United States Patent Application Publication US 2026/0103690 A1 - sequence listing, part 18

SEQ ID NO: 75031 - protein, 338 aa, unidentified
MGKYIGMDAHSSICVFSVVDKNGTEVNQAKIATNGQLLVEYIRSIEGPKKLVFEECELSTWLCETLRGEVDELIVCNPTRNLQYKKAKTDKLDAQNLALLLRGGYLSAVYHDGSKTEHLRALMSGYQDIVDTGVSVKNRYKSLFRKAGLPARGTKVYNDESLLEDLPRADQRFVGRSFYRLLETLEKEREQYIAAINKLGRTFPEIKLLKTIPGIGDIQAAKIVSQVISAQRFKDKHKFWSYCGLVRYRMESAGHIYGSRRGWGNRILKCVFKTAAQTVLRGENELRAYYDELRVKGTSDRSARNAVSRKLAAISLSVLKARHPYDETRIFPQLEQAR

SEQ ID NO: 75032 - protein, 418 aa, unidentified
MVAVMIGIDPHKASHTAVAIDPAEVPLGQLRVRACGAQMERLLGWAQAWPERAWAVEGAGGLGHLLAQQLLSAGERVLDVPPKLAARVRLLATGNINKNDPNDARSVAVAALRSAGVREVRRDDHAAVLKVWSKRYQDLGRARTQVACRLHQVMCELIPGGVPGEITAGQAERILASITPAEAVQAARWELAAELTEDLRGIDARIRQARTKLAAAVRAAGTSLTGLFGVGPVIAAAVIGDVRHVARFPDRDHFAAYNGTAPIEVSSGGRKIWRLSRRGNRRLNHAIHMAAVTQIRHRHSQGHAYYQKKLAEGKTGKEALRALKRQVSDAIYACLQADARRAAAHVKSPGGQPGNGSDSSAAGSHPGHRLFGPATPGPATYPTTPLLPFPRRCHPGRAGDRSRTGRSPAAAAAPAGRP

SEQ ID NO: 75033 - protein, 422 aa, unidentified
MKKIQAKKVRFVNANTLIVTIDMGKTTPVGYCLCPDGTEVKPFEFTNNRGGFTKLWDCVIRTKMANGLKEVVVGYESTGAYAEPLINFLKGKPVRLVQVNPMHTKKLKELQGNSPCKTDKKDPKIIADIIKLGHALTVVIPEGSAAELRRLIQARERVIGRRTALYNQLQDLIFISFPEFLQVVKDVKTKSARHLLQHYPTPQDILDQGVDALALILKRISRGKLGMARAKALYEAAEQSVGVKEGRISVTLEIRAMLTDITRCDHLIKQFENEMAQYLEEIPYSRIILSMKGIGMITVAGLIGEVGDFSKFDTQAELLKLAGLNLFEVSSGKHKGQLRITKRGRSLMRKLLFFAAINTVRKGGIMHECYQRHLQKGMKKIKALIAIARKLLCIIFALVRKQSEYLVNYQEVMAAQQFKKAA

SEQ ID NO: 75034 - protein, 453 aa, unidentified
MAQGSGLTRGDRNRNRRIGLLREVVRRDRAVLAVDLGEDKQAAVLVDHEGRVLARKTVRAKAHQLGGLLGWAAGQAARAGFAGLTVACEPTGHRWKALMGLADAAGHGFCCVQPLAVARAREGDDYTRDKTDHRDARLIGKLAVRLECYLPERADETWARLRHLGARRAALAADAVACRQQIGDLLACAWPAALGVAARPLRSVTWLAAMGVITDRCCGDPARLRKMGYARFLAAVRRELPRWGGKYVRHSIVTGLWAALADPGGVRAQRRGALERVHLLMADWRSLRTRLADTEARMCAVLDELGLTGLVTSIDGLSAAGAAVILAETGELSRFASARSVVKHAGLNPAENTSATLTGRTRISRRGRPGLRTAAWRAAWAALRRNRVLAAKYAHLTGRDGRRLAGGQARAACAAALLRWLYAVITRRQPWDPRIAAGTIGARAGAVTAPAAA

SEQ ID NO: 75035 - protein, 414 aa, unidentified
MLKIVYRVCCGMDVHKSFVVACIASTNEYGVTTYKSKRFSTFTKDLRRCADWLSENNCKDVCMESTGKYWIPIYNILEPTCNVVLAHPKYVKAIRGKKTDKRDAKWIADIFKHDLVAGSFIPPVDIRQLRDLVRYRWKLTNFTTGEKNRAQNCLTVSNFKLDDVFSDVFGKAASAITTRILQDPTEKITDVSGFRTKGMKATNEQVLAAVDGEMCEEQAEKLRIIRSHMDSLELCKLNLESLILSTAEQYLPQLNLVMTVPGIQSFAAIGIISEIGVDMSVFPTSKHLCSWAGLTPQNNESAGKKKTTRISRAGAYIKPLLVQCALCAIRAKQFPELRNRYLALKKRRGHKKAIIAIARMLLTAIYNMLKKNETYNPEIYRKGDRPPAHREVSVEEAIFILQRQGYLVTAPPTS

SEQ ID NO: 75036 - protein, 359 aa, unidentified
MPATASLQLTRSGHIVIGVDTHKHVHVAAALDSIGGIQATMTIATDSGGFKQLLEWAATLGQIIAFGIEGTGSYGAGLTSFVRRAGHRVVEVNRPDRRMRRLVGKSDTLDAENAARAVLAGFATAEPKTADGTVEMIRQLKVAHDTAVKDRSAAMITLKAILIHAPEQLRHDMAKKTQIMLARHLAALRPTRLETPDDSIRHTLKSLARRWQHLNAEATELEAMIKDLVTRTAPQLVEPFGIGVDTAAEILIVVGDNPERIRSEAALAKLAGISPIPASSGMTSGRQRINHGGHRQLNAAIYRTVIVRMRFHQPTIDYVARRTAEGLSKRDIIRCLKRYVIREVYHLIVPAKNVAQITS

SEQ ID NO: 75037 - protein, 350 aa, unidentified
MTMVGGFDVHRKQITFDYVDDDGLVRFGEIRPASRKTLRHWLGEHCPTGNAEFALEGCTGWRYVVDELSAAGVVAHLGDPAETAGLRGRKKRAKTDRADARLLRTLLLEGRFPESWIPPAHVVEIRTLGRLYCTLMDERRAWQQRIHAQLFHQGCPPIRALLSEAGREALTNAELSAAGRQYVDTALRRIDELTAEIEPLRTQLVGFARRQAGCRALHAHYGIGGLCAVIMWAEIGDARRFSSSDQLVRFAGLDVTVYSSDAKRSPGHLSRQGSPQLRWAAFEAAKSAARRGSPDYAYYHKLAAKHDGHNGKNPTLAVERKVLRRCYYTLRELGDAALAMPVAQPQEVAV

SEQ ID NO: 75038 - protein, 442 aa, unidentified
MPLQEVAAQMKVLYEHVAGIDVHKEMVKVAIRSPGEKPWTRKTEILEFRTFYGVLQEMARELRRRGVTHVVMEASGVYTEPVYYALCEQDFTQVAVINPAHAKALRGHKTDAKDCARLAELFECGLLRGSYIPAPELKEVRDLTRYRTKTVQARTSEIQRLGKALESAGIKLGSVASSITGTSSTAMIESLIDGERRGAVLAELAIGRMRSAGKLADLSMALAGRFTEHHALLCRLHRDRITVFDDAVDGLDQRIAGKAARWQREAGLLTSVPGFGDVVAWAWLGEIGPAPHQWFASHEKLACWVTLCPGNNISAKKRKHGRTGDAGTYIKPMLIQAAWAAIRVRGRLQARYNRLVRRFGGDKNPGAKKKAITAIAHTLLKIAYQVLKTGTPYQEPGADFYTRRESPAARQAFLERQLQKLHPGCTITITISPPEAALTPAA

SEQ ID NO: 75039 - protein, 369 aa, unidentified
MDETITSYVGLDAHAESSAIGVAAAGELTAPRFLGTVGAKFSQLTKALGRLGKPSALRIVYEAGPCGFAMVRQLRQAGYQCEVVAPSKIPRKPGERVKTDRRDALTLAGLARAGQLTFVTVPDERDEAMRDLSRARIDAVRARLKARQQLKALLLRHDRRYTGKSSWTAAHERYLSAVSFDHPAQEIAFVEYRRAISEAQARVGLLTQALTEQLEHWRMRPLVRALMTLRGVDAVVAMSLVAELGEMKRFAHPRDLMGYLGLVPSEYSSGQKRSLGAITKTGNSHARRMLIEAAWNYRFPARISLPLQKRQEGQPATIREIAWKAQLRLAHRYRRLSARGLQHNKICVAIARELTGFIWSISQQVTIGT

SEQ ID NO: 75040 - protein, 327 aa, unidentified
MTASVASHNQIFVGIDVGGLSFEAAWHRGGSTQYQNRPDAIAAFVARLSVEKQIIRIAVEPTGGHEKALVKALRGAGLPVEMVHTSRFAAYRKLIGAKAKSDTSDARLLAAYAAAPEEVRGRKAGHVVLPQDDVREQLAELAARRDQLKHMIHAETCRLSTVRSPSIRDEITAHLQAMRQADRKTHDAMMLLVRQRDELRNAKRLLQTIKGIGDKTALTSIAAVPELGLISNKAAAALVGVAPFVRKSGTMTAPAHIHGGRALVRNAFYMAAVTASRGKPVLAPFYSRLIAAGKPVKVALVAVMRRLVVYANAVLRSGQPWKGAEIG

SEQ ID NO: 75041 - protein, 338 aa, unidentified
MKLYVGIDLHSNNSVLVIIDENDKVIYSKRLPNDAQVILGVLAMYKEQIDTIAVESTYNWYWLVDALQAEGYEVRLVNTAAVVVYDGLKYSGDFADARHLAHLLRIDLLPCGYIYPKEPRALRDLARKRAQLVRQKTTQLLSIKNLLMRNLGRDTPSYTIKTWTAEQVAALPLLPEQLLALQANWTVMQALAQQIQAVEAELLRQLKPCKDFQLLKTVSGIGDILSMTICLETGDITRFDSCGNFTSYARMVTSKRESNGKKKGEGNRKCGNRYLCWAFMEAAHFAIGSDELIKRFYQRKCAKNLKVVAMKAVAHKLARACYNMLKDGVEFDVKRAFN

SEQ ID NO: 75042 - protein, 337 aa, unidentified
MDRIAVFVGLDYHQDSVQVCVMDGGGRVLANRPCANEWGEIEAMVDRCGQVVRAGIEACTGAASLAEELSERAGWSVDQAHPGYVSRMKQNPDKTDYTDAQMLADLVRVGYLPRVWTAPREVRELRVLIRYRQQLAKARRNAKLRICAILREQRAGRGPGRRWTRAWLKWLGEVACMSEQSHWVAGEHLAELDSLETRLRRVEDRLEALTRDDPIVQRLLLYKGIGVVTAWTMRAMVGRFDRFRTGKQLSRFCGLTPCNASSGHRQADAGLIRAGDPELRTIIIEAAHRLIRYDPRWKTLAAKMRAGGKKACVVAAAVANRWIRWLFHQMQPERLAA

SEQ ID NO: 75043 - protein, 422 aa, unidentified
MLSVGIDWSEEFHLVALGRPSEGVFEVLRIEHRPEAVGRLVARIVQLEPEPEEVRVVIETRHGLLVEAMVDAGFVVVPVNPDLVARRRGPARKKDDTEDARIACLLGLDRFSHLSPLIPHGELANELRAIARDDKRAAQDQRRLLNRLRMDLFSTFPAALGIAGDYLGAPTMLRLLERWPTHQELAAASPQELVEFARAGRHGWPERFADQVSAALTSAQFTARTSLVRAKAASIRLAAAQLLLIGQQRNQWERRMGAILLGAPRRGRDQQPRSDELGEKFPGGEIYLSFPGLGDRLAARVAAEIGDHPTQFSSPNSLQCYAGKAPVTRRSGKSEFVVAHRLACNRHLADAVQQWAFCSLKRSGWAREFYDAKVAAGDSHNAALRKLGNRWLEVLWHCLIKAALYSEAIHVANRNRALGKAA

SEQ ID NO: 75044 - protein, 357 aa, unidentified
MISIGIDVHKKKCVATLKRDSKRIVEQTSFCNNSYGINEFIQHIKGYYKEDAIAVCESTGNYWIRLHDTLEDNGINTLLANSLKTKIIAQAKLKDDKIDSNVLVDLLRADLVYESFVPDKEYRELRQLVRTRLDLVTERTVLKNKVHALLAKYEYQCPVSHIFSKKGTEWLKTIDLSWIDRMAVDAYLDALVAIQKQIEIFTAKIAFVSKEDQRVKLLMTIPGIDYFTALTIVSEIVDIKRFSTPWKLVGYAGLAPSKRDSGDAHRNGGHITRQGSKWLRYTIVEAANTSTRCDDRIGRFYKRIAERRGPQKARVAAAKEMLVIIWYMLIKNEPYRTMNREMVERKYKKMERESNMV

SEQ ID NO: 75045 - protein, 345 aa, unidentified
MDQIIRIGMDTSKHVFQLYGVNAAEQPVLRKKLRRKDMVAFFEKLAPTVIAIEACGASHQCARFLQSLGHSVKLIAPQLVKPYVKRGKNDAADAEGLCEAMSRPTMRFVPVKTAEQQAALMLVGLRDRLIRNRTQLSNAIRGYAAEFGHTAAKGIAHLVPLLERIQADENLPALARELFAIQAKERTQLQAQIDDVDAKLMAWHRADECSRRLAKIPGVGPIGAVQLTMKTPDPKLFKSGRQFAAWIGLTPKDHSTAGKTKLGVITRAGDEGLRSVLIVGASSVIQQAQRSGKMSPWLAALLKRKSAKLAAVALANKTARIAWKMMVTGEAYDAKLVAAAKDVTG

SEQ ID NO: 75046 - protein, 383 aa, unidentified
MWTCGEVVAEPFEVSHTDAELRKLACFLEKLPGETRIVMEYTGSYWQPIAKVLHDAGLFVSAVNALLIYKYGNNSIRKGKTDKLDAVKIANYCLDRWTDLERYAPADQIRQTLKTCRRQYDQYIRLKVNLKNNLIALLDGTFLGLNTLFKSAPRDTDGHEKWIDFAAKFWHIECIYGSSEKAFTNQYQKWCARAGYRFSEEKAASIYAYAGSQVNTLPMTDAVKCLVTLAVSQLNTIIETISVIQHEMLSLAAQLPEYPVVMRMFGVGPVLGPQLMAEIGDVRRFDRKQSLVAFAGVDAPPCQSGTFESKNRHISKRGSPRLRKTLFQVMSTIIQHAPADDPVFQFLDRKRQEGKHYYVYMTAAANKFLRIYYGTVMAYLEKL

SEQ ID NO: 75047 - protein, 321 aa, unidentified
MHLGIDVSKHRLDYCLLLNNGKMAEITIDNDLEGYVRLRKWLQAHDAEDDLNICMEYTGIYYEQAAEYFSRFYTVSVVNPYWIKSFGMAVFKRSKTDKQDAKLIAQYSKMVQPEPWQPLTEKQRQLRDLNRYLIRLKRQRAAEETKRQTAPDYLQGYLNQNIAHLDEQVKAVNWQIKQLLKQDKEHSDKIKRLQTIPGIGLTSATILFTLLQDGRFSKASELVAYLGLDPRHQQSGSSLNKLSRISKFGQNDLRAALFMPAMVAYRDNAFPAFIARLRQKRKPPKVIIVALMRKLAVIAFHLVKTGQDFEPKRYQAGINSE

SEQ ID NO: 75048 - protein, 396 aa, unidentified
MPATTRHARVPALPESTTAQARLLYLALDLGERHWTLAFTVGRGQRPRVRTIPAGDLERLTTELAAARRRFGLPPETRVVSCYEAGRDGFWLHRALLAAGVTNVVVDAASIEVPRRARRAKTDRLDARKLVTMLVRYVEGERPVWHVVHVPSEADEDRRHLERERETLVADQTGLVNRIQGLLATQGVRLARGGDVPAQLAAVRRWDGTPLPPELRARLEREWMRVEAVRTALRALTTARHRRVTTPTPPAADAAAVHLTRRLAALGAVGETTAWLLATEMFSWREFRNRRQVGGFVGLTGTPDQSGDRIREQGLTRNGSVELRARVIELAWGWLRYQPASALSQWYRQRYGGGNARLRRIGIVAVARRLLIALWRYAMGGPPPAGAHLKDDAVAA

SEQ ID NO: 75049 - protein, 412 aa, unidentified
MLKIVYPICCGIDVHKGFIVACIASTNEQGVTTYQSKRFSTFTNDLRRCAVWLAQNHCKDVCMESTGKYWIPVYNILEATCTIVLAHPKYVKAIRGKKTDQKDAKWIADIFKHDLVSGSFVPPADVRQLRDLMRYHWKLTNFTTGEKNRAQNCLTVSNIKLDDVFSDVFGKAASAITTRLLESSEPFDVAPYLTKNIKAPVEKIQAAVDGEMCAEQAEKLRIIRSHMDALELCKLNLQSLILTTAEKYLPQLNLVTTAPGIQAFSAIGIISEIGVDMSVFPTSKHLCSWAGLTPQNNESTGKKKTTRISRAGAYIKPLLVQCALSAIKAKHFPEVRRRYLAIKKRRGHKKAIIAIARMLLTAIYNMLKKNEPYNPELYCKADRPPAHREVSLEEAIYIIQRQGYLVTAPPIS

SEQ ID NO: 75050 - protein, 391 aa, unidentified
MPMYFVGIDISKYKHDCCIISAADQQIISKFTITNDKDGFEQLLTALNSLSNPEDIKIGFESTAHYALNLELFLENAHHSFMEVNPVLIKEYKKSTTLRRTKTDSVDCESIARWLITVEYKPHSKGFYHAYSLKSLTRLRDRLIRQRSFYLVKITNVLDHTFPEFKPFFNERLSKTALYLLENYGSAEKMARMNSASYDKLRCISRGKFSIQQFLRLKELAANTVGVNNSIFDLELNTLLTLYKSLSDEINTLETEIIKLIEEVHPHYMSIPGIGPISSAVIYAEYGDISNFSNPGQMLAFAGIEPGINDSGTESHGGRMVKHGSSQLRYVLLNACLPLIRFDLTFATYYEKKRAEGKKHRVAITHVAKKLIRVIYALERQDVDFNAQKIR

SEQ ID NO: 75051 - protein, 355 aa, unidentified
MESVKYLGFDVHQSTISVAVVNADGKLVMQSVIATHAATILDFIHGLRGTLHLTFEEGTHSAWLYDLLARGVARVVVCNPRQNALLKAGNKSDTSDARKLAELLRAGLLAPVYHGEGSTRTLQELVRSYAALTEDTTRVMGRVKALYRSQAIACAGKKPYGRRHRREWLSKLSEAGLHRRAERLYEELDALQGLRRAAKRELVLESRKHAAAKLLRTVPLLGAIRAALLIGRVQTPHRFRSKRQFWAYCGLALETRSSADYRFEDGQLVRAKKPVFIRGLNRNHNHDLKNLFKSAATTASALHRPFREFYEGLLAKGMQPAMARLTLARKIAAITLSVWKKGESFDAEHLKPQAA

SEQ ID NO: 75052 - protein, 425 aa, unidentified
MKKTDYLSTLFVGIDIGSRTNVVSAIDFNQDFFIRMKPVPNAKEGAETLESLLVDVLSVHHEFNHVIIGLESTGFYGVHIANYLSASDLLAPFGTEVYCLNPKEVAKYKESFNSLDKNDGIDSFVIADFARVGRISIKPWRGAQYLALQRLTRHRLHIAECIAREKTYVLNNIFLKFSEFAMLKKEDHPFSNKYGATAEAILEQYVTNDDIIEASIEELVELIESKSRGRITDPEETARILKAAANGSYRLDKVVAEPITLSISSSFNCIRAFEKELKAIEKAIEHTVQGLNPVEYQVLKSIPGIGHVYAAGILAEIGTIKAFTGNGALAKYCGIVWKENQSGNFRAEDTKMSKAGNRYLRYYVIEATGSVINNCPEYKDFYDKKFAETTTHQHKRALALTFRKFLRMLFGLLDKSQLYSLERSR

SEQ ID NO: 75053 - protein, 379 aa, unidentified
MAIYLEGKTNIDTNELSPKEATQMSHEVKYIGMDVHKEAIVIAVLNGSGKVVMETIVETKASSILQFLHGLRGELHVTWEEGTWAAWLHDLLQPQVQEVVVCNPRRNALLKEGSKSDKVDARKLADLLRTGMLRPVYHGENGLRTLRELARSYQTIGKDLTRVMNRLKGLYRGWGIACAGTQVYAPRFREEWLRKIEQAGVRRRAELLYQQLDGLQALRRNLRPELLAESRKHKAAKLLRQIPCIGPIRAARLIALMQTPHRFRSKRQLWTYSGLGIETHDSAQYRYVGGQVQRSKKPQQIRGLNQNHNHEMKEIFKSTATRASCGTGPFHDFYAALLTKGMKPEMARLTLARKIAAITLTLWKRGERFDAEQLKAQAA

SEQ ID NO: 75054 - protein, 325 aa, unidentified
MTTYVGLDVHLRTCHATVMDEHGRILKQEKFPNERLEFERILKGIDDAKIAMEACYCWQPPYEFFESRGFEVKLTHPIKTRIIAEAKIKTDAADSEALAHLLRADLLPTSYVPPKELRELRELVRLRTYLVRERTRFKNKIRAELAKQGIRVLKNPFAKRRTPLLSELGVRSINECLSMIAALDERIREVSSELKRRVAENEDAELLMTVPGIGCFSALAILVEIGDVSRFGSAEKLCSYAGLVPSVHQSGAMRRYGRITKQGSSMLRWIVQECLWVHLRYDTYITRFFFRVAAKKGKKIAAVAAARKLLVAIYWMLIRKEKFRA

SEQ ID NO: 75055 - protein, 397 aa, unidentified
MYIVGIDIAKRKHEAAVIDGEGTVIIKPFSFTNNCSGYNRLLAMLTKAKLPLDEVSFAMEATGHYWLALFTRLQKEGFRVQVINPVQTNSIRSFYIRQVKTDPRDALLIAEVIRFGHFSESTLHPENIYELRELCRGRHAIVSMQADVKRKVVALLDQVFPEYETAFTNLFGDTSMAILQTCPTPKELSETPLEELCHLIEVSSHKRFRMAKAQELQALARNSFGFAMAGDVFSTMIRLYAKHLDFLKQQVREMDRKIAEIMDTLDTPITTITGIGPTLGAYILSEIGDISRFSSAAKLAAYAGIDPTMRQSGEYNGVRNRMSKRGSPYLRHAIWLAASSAVLHDPALKLYFQKKRDEGKPYMASVGHACRKMVSIIYAVMRDNKAYTPCIPNEISA

SEQ ID NO: 75056 - protein, 342 aa, unidentified
MDVLYRCCCGLDVHKDSVTACVSWVEGSKKRREKRKFGTFTQELLALSDWLRQWGVTHVAMESTGVCWKPVFHVLEGQFELLVVNAQHVKAIPGKKTDPRDAAWLAELLQYGLLKSSFVPPEPIRELRDLTRYRVNLAQECNRIANRIQKVLEDANLKLASVATDPLGVSGRAMLKAIIAGERDVEKLAEMSRGLLRRKIPQLQLALEGRVSDHHRFLLQRLMEHLEFVESQMTRLEQEIAERLRPFEETVRRLCTVPGIDRVSAWGIISEIGLNMEQFPDEHHLASWAGLCPGNWESAGKRKSGRIRKGSAWLRRHLCQSASQPARGVSRLGSEVLRQTAS

SEQ ID NO: 75057 - protein, 297 aa, unidentified
MQLYGGIDLHANNSVVVLLDEQDRVVYQKRFPNQLEQILHQLAFYQGAIEGVVVESTYNWYWLVDGLMEAGYTVHLANTAAIQQYEGLKYTDDTSDARWLAHLLRLGVLPEGYIYPKAERAVRDLLRKRGQLVRQKTANLLSIQNLLTRNTGASMSGNRIKQLSAADLERLVPEADLALAVRSNLAVMHCLASEIALLERTIKERVKLRSGFTSLLTISGIGDILALTIMLETGDIGRFATVGHFASYCRCVASQKLSNGKRKGQGNVKNGNKYLAWAFVEAANFAVRYNGQIKRYY

SEQ ID NO: 75058 - protein, 340 aa, unidentified
MRQLYAGCDLHGNSNFLGIIDEQGKRIFKKALPNELPLIRHTLQPFHAELGGIVVESTYNWYWLVDGLMEEGYRVHLANPSAIQQYGGLKHADDKHDAFWLAEMLRLGILPEGYIYPKEERPVRDLLRKRGHLVRLRTSLVISLENILSRNLGKKVSAHDVEGLREDRVTPLLERNEDLALAGRVSKDAIDHLTRQIHKIEGAVQKRMGVKESYRYLLTLPGVEKILALTIMLETGPISRFETVGDYVSYCRKVPSQWISNGKWKGSGNRKNGNKYLSWAYAEASEFARRLYPEPRSYYHRKLQKTNEAVAHSALSNKLARAAYYVMRDQVPFRPEKLFG

SEQ ID NO: 75059 - protein, 354 aa, unidentified
MKISRIGMDIAKNVFQLHGVDSFEQTVLKKKLKRADVLAYFRTLAACKIGMEACGGAHHWARTLIAMGHSVVLMAPQFVKPYVKTNKNDAADAEAICEAMSRPGMRFVPVKTVEQQDIQALHRVRSELVKQRTAKGNQIRGLLAEYGLVVQKRIECLRVALPELLEDADNGLTGEFRALLDGLRLDLVGLDERVGQLDRQIVQMCRASVSAKRLQEIPGIGPVTASALIAAVGDGSGFKRGRDMAAFLGLVPRQHSSGGKEKLLGISKRGDSYLRTLLIHGARSVQRVSVNKTDPSSRWLNALSHRRHKNVAAVALANKTARIAWAVLSKGQAYRVPAQHDECIGPVLPVAANG

SEQ ID NO: 75060 - protein, 405 aa, unidentified
MGQVFVGLDWAEDHHDVCIEDDTGRWLGGGRLPEGVEGVARFHEWVAAQVDDSADVVIATETDRGLFVGALVAAGYTVLAVNPMSTSRYRERHSTSGAKSDPGDAKVLADLARTDAHNHRPVAGDSELGEAVKVLARAHQSMIWTRQRQTNQLRSTLREFYPAALEAFGDLAGRDALAVLAIAPTPSTGRQLSRSKIAAALRRAGRQRRIDQRAVEIQTALRAEQLAAPTLIADAMGATVTALVAVIAELQTQISRLETELADRFERHPDAKIIHSLPGLGMTLGARVLGEFGDDPNRYATAKCRKNYSGMSPITRASGKHHVVLARYARNKRLADACYQWAFSTLTASPGARAYYDARRAAGDTHSRALRALGNRLVGILHGCLRHDTLYNEHTAWAHRHQLAA

SEQ ID NO: 75061 - protein, 345 aa, unidentified
MNRGDASKIQGCDFHPGWQQVAVLDSETGEIRELKLENGNGEAERFYRELSSPARIGFEACGNTQWFEDLLDRLGHEVWVGDAAEIRASYVRKQKTDRRDAAHILKLLLENRFPRLWRPSAGERDLRQLLMHRHKLVGIRARVKNGLQHLMLNRGMQMKRKLWSEAGQKALRTLPLEGWAAQRRQDLLNLLSHLDPQIRQLDDAIERAAQQNPRAQLLMTQPGVGPVTALAYVLTMGDVSRFQRGKQVTSYLGLIPSERSSSHRRRLGSISKQGNSFMRMLLVESAQTVTRLDEGFRKQYQHRCHRMAKGVAKVAAARRLAVRLFWMLRRNTAYPEIAYIESSPR

SEQ ID NO: 75062 - protein, 348 aa, unidentified
MLIIGCDYHPGFQQIAFVDTDTGECGERRLTHQEEAEQFYSALKGRSVRVGMEASGHGRWFERLLAELQFELWIGDAAEIRTKRVRKQKTDRQDAQLLLRLMIEDRFPRIWVADAENRDLRQLLWHRHRLVQMRTRVMNQLHVVALNEGLRRKKALWRPAGRNELESLVLARWASRRRQDLLDVLDQLTPKIQELTRALEEEVQNRPVTRRLMTHPGVGPLPALAFELVIGTPERFHYGKQIASYVGLVPSEESSGDRRRLGHISKQGNALLRFLLVEAAQVTVRSQPQWRSKFFHLAMRRGRKIAKLAMARKLAVHLYWMWRRGWDYGQFEKLGSHAGEPGNRHGVQ

SEQ ID NO: 75063 - protein, 332 aa, unidentified
MQLLNRWRKEAAQAGHTIKRIAVAYEAGRDGFWLARWLRAREIEVYVIHPSSVPVSREHRRAKTDRLDTELLKRAFLGWLRGEPKHCSMAAIPTVEDEDAKRPSRERESLVGECTRIVNRVKANLARLGIRGFRPRLAHAPKRLDTLRTPEGTTLPANTLAEMQRDMAHLRFVKQQIKEIETTRTKRLQQASEGGRDAMVRLLARVVGIGIETADLLVQEAFSRKLRDRKAVARYAGLTGAPDESGQKRRERGLAKAGNARVRHAMIELAWGHLLHQPDSALAEWYRRRTVHARSGTRKTMIVALARKLLIALWRLVTTGEAPAGLLLRSAV

SEQ ID NO: 75064 - protein, 344 aa, unidentified
MSNLDTCGIEVSAKELVVSLRRQGDLEPLRNFTNTPEGHLIILRYLRQAGRVVRVCMESTGLYGLDLALALSGQEGMEVMVANPRAVRHYAQAMMKRSKNDQIDAGVLEQFAVHMPFKPWPRPSLAMLALHALARRLRELVEIQTAEKNRQHAAGLSEAIPAVVRRDLARSLRAQERAMERLTRQARKLIAQDPQLAERFELLDSVPGIGETSAVQLLGELGVLAPDLEARQWVAYAGLDPRQYTSGTSVHKKPRISKAGNKHLRHALFMPALVAVQHDPHLRAFYQHLLAQGKFKMQALVAVMRKLLHALHAMFKTHQPYDGSQLFQLKSAPAQEVTHVLVAS

SEQ ID NO: 75065 - protein, 376 aa, unidentified
MTKILFVGMDVHAETIAVAVAEQDGEVRSHGVIPNRVESIRKLVGKLGAAKRLRVCYEAGPTGYALYWQLAALGVACEVIAPSLIPRKPGERIKTDRRDAEKLARCYRAGELTAVWVPDADHEALRDLVPAREAAKKDQLRARHRLGKFLLRHAQRPPAGVKAWTKKYLEWAHAKVRFEQPALEATLADSLHEVEHAAERIVRLEKAIDEAVGHAPAQMRAVIEALQALRGVAQTTAATIVAELGSLSRFPSPKQLMSYAGLTPSEHSSGNRIQRGPLTKSGNAHLRRVLVEAAWAYQHRPDVSGFLLRRQKKLALSDEVKRIAWKAQLRLSGRYKKLTARGKNKNETVTAIGRELLGFIWAIAVETEAPNAAIAA

SEQ ID NO: 75066 - protein, 401 aa, unidentified
MPTLRDNTIRIKRFRDLKATLRINRDRLLVGIDVALAAHVVHLRQAHTRVLIPSLTIPNTTRGFAQLWAAIEQAQHATGCREVVIGLEPTGTYHQAIAAFLESHGADVVFISNSVAYWNRRTQDGTWDKNDRKDAANCADLLEQGKAVFYSQPTGDLAELRHLVRCLRRARVELARCKARWRTTLRPTLAPSAEPLPPRLCAALPPVLPAWEPAGPGRPAGVKSGLPLGLGTACADLAAQITAVQTRIASIEAALTPMAERVPAYALLRTIPGIGPTIAAIVIAEIGDIGWYTQFSQLRKLAGLDIVRVQSGQFAGQQRISKTGRSLLRWALYQAAMGVAHTAAGRARLMALKAKRAGDRYAGFKAMVELAAKQLRLVWGVWRSGQPYDPLRAKGRRRPRR

SEQ ID NO: 75067 - protein, 341 aa, unidentified
MKKAEFVVGVDVGDESLSVAVTTGADGTGLVERSVSNKLEGFEDLHGWLGKQKATADNAVVCLEATGVYGEGLCYYLCSRGFKVAVEPPVKVKRAFASSAHKNDTVDARQIAEYGHRFYDELSWWTPPAVVLEQVRVLLSAREQFTGQKIANANALKALQRKTITTRIAIQAYEQTIERLTENIKDIDQEIKRLVKKDDSFNRLITTLTSTPGIGMLLATNLVVMTNAFTRTANHKELASYTGISPIEHASGSSVYRRPRSRRFGPSRMRKLLYLAAMSVATHNPEFRRYYLRKVAEGKPKRLVLNNVANKLLKVVCALVRSESAYIPNYKSIQPMLLKTA

SEQ ID NO: 75068 - protein, 344 aa, unidentified
MTSMHFIGLDIHKKTISYCVKDVSGKVLSEGTVPATRIHLDQWMKTLPAPWTAAMEATMFTGWIYDHLLPHAAAVKVAHPLMLRAIAAAKKKNDRIDASKICDCLRCDFLPECHMVSTEIRERRRTLRYRKLLVRQNVQLRNKVSQMLMESGVVYNKQKLHKVGYFKELMETNQDIGRALRPLLTICRETIVRIGKTESALIRSLRRDPLLQARVERLMTIPAVGPITALTWVLEVDDVARFHSVKQAVSYCGLCGAERSSAETIKRMPISKQRNKHLQSVLIEAAKLGPRLSPDLALIYDTEKQKGHANRASIAVARKLVAYLLAVDRSGREFVVARERKTAA

SEQ ID NO: 75069 - protein, 351 aa, unidentified
MNHTTVAVDVAKSVFQLAVSEHPGHVGEHRRLTRAQLTRFFSNRAACTVLMEACGSSHHWGRQLEQLGHSVRLLPAHAVRPYVCRNKTDRADAMALLEAARKQDLRDVPLKSVAQQTLTALHRLRSGWSATRTARLHTVRGLLREFGFVIPLGPRQVVPHVRRLVEDADSGLPDVLRPAMDAACREILHLEQLIADVEAQLKRLAPQIPGVSRLLTIPGIGLLTATALAAFVGDLRRFPTGRHFASYLGLTPREHSSGLTRRLGSISKRGDVYLRMLLIHGARSVLVAASRMDAPDRLRTWALKLQASRGHNKATVALANRLARIAWAVWCHQTDFAAGAGGPHAMEDLAG

SEQ ID NO: 75070 - protein, 338 aa, unidentified
MKNASTLERFCNCSGLGIDVSKASLEVCGIENEVEWRTELGNDQVDIEALARTLHQGGYRGKIICESTGHYHLLLGLVFARYDLDLRIINPLQSSKHQKSRIRKTKTDRMDGYVLATMCETERDLPKPARLQPNRVLMRLKQGQLQALDKQIQKMSRSLATYTETYQQLGLDSGDSAEILHQVLVGLKAAKRQLEKELNALFVELAQNQEDIDRVRAIPGYSPLVSGLVSCVFDREAKSDRSWVAYAGYDISVRESGSWTGKGRLTKRGNNYIRKRLYCAAWGANMHYPEVHRYYEALKAGGRNHVEALCIIARKLLRIAYAILVKGKTYDAEIAFPA

SEQ ID NO: 75071 - protein, 392 aa, unidentified
MKKNTTAKKNSRARMTADRKQVRQMAAKQRLTIGLDLGDLTSCYCILGEAGEIVSEGQLPTSKAGLDSLFAKMPSSRVALEVGTHSPWVSRHLAGLGHEVIVANPHKLKLITQSVRKNDRIDAQTLARLARVDPQLLSPIRHRGEQAQADLAVIRARAKLMEARTELINCARGLAKPMGERLKKCDADQVSEPLADGLSEALQNVIRPLLKGIEAISQQLAVYDQKIAAIAKRYPEIELLTPVYGVGTLIALTYVLTLEDAQRFGHSRDVGPFLGLRPKQRDSGQSQPELGITKAGDGLLRSLLVQAAHCILRKGAPESDLRDWGSAIWATAGRTPSGGRWWQWRGAWRCCCIRCGPMAWSTTRCTTARRRRRPRPKRQPKPGPRAKRRHNG

SEQ ID NO: 75072 - protein, 343 aa, unidentified
MKSTTIAVDLAKNVFQIAVSNHPGKVAETHRITRKGFLRFFAERKPALILLEACGTAHFWAREIQQLGHQVLLLPPGDVRRYVRRNKTDSSDAKGLLEAHRNEDIHPVPIKSVAQQTLTGLHRLRSAWVADRTARINLVRGILRELGLLLPVGAHHVVPKVWAMIEDAGCAIPDPLRLALAEACLEIREFEQRIQAAECQLRVLATQIPVIQRLLSIPGIGLITATALVGFVGSVLRFPSSRHFASFLGLTPRERSSGQTRRLGAISKRGDAYLRMLLIHGARTVLIAAKNLEKPDQLRSWALHVQRKRGSNKATVALANKIARIVWAVWINETSYQSKALAA

SEQ ID NO: 75073 - protein, 379 aa, unidentified
MNNYSKYVGLDVHKETIVAAIAKAGRGDAMQYGEIDSTAEAIQKLAKKMSANGERVLFCYEAGPCGYGIYWQLKEMGQECMVVAPSLIPRKAGDRIKTDSRDALTLARLSRAGELTAVWVPDKEQEAVRDLTRAREDMKVMEHHARQQLGAFLLRHGKRYPGKSAWTQAHFRWMEALRFEHSCQQIVFQEYVDMVKHAQGRLEALEQQMLAVLETWSMREVAIALMALRGVKLIAAMTILAELGDLSRFESAPQLMAYLGLVPSEHSTGQKKKRGGITKSGNGHVRRVLVEAGWSYRFPARKTAALQRYAEKTSDEVQEIAWKAQKRLCMRYRHLLLKGKLKVEVCTAVARELTGFIWAIACEVMKKRGIKTITKAKAA

SEQ ID NO: 75074 - protein, 428 aa, unidentified
MTTLNESQVEPNEYAAFVGIDWADKRHAVCLATGHGDHEIAPLDQSPEAIDAWAQALHQRFDGRPIGVCIESRRGALISALLKYPWLVLYPINPRQLSSYRDAVNPSGAKDDDGDAGLLCDFLRLHRQQLRPLELEDAATREIRGLAEGRRKLVDLRTKLGNQLRQQLKECFPQALELAGKSMYAEAFLKLLAKFPSLKALQRASPRKLIRYLPRRRKAKDEPAGGIDPRVTRLRASVPLVDDRAIVAAGTRMIEALVQQLLALNESIRKYDRDLASLMETHPDAELFRSLPGAGAAMAPRLIAAFGADRERFATAQNVQTASGIAPITVQSGKSRATRRRRACSKFVRQTFHEFADHSLKKSAWALACYRMLRARGKRHHAALRGLAFKWIRILFRCWQNRTPYDETRYLQVLKRTNSPLLAFIEAA

SEQ ID NO: 75075 - protein, 434 aa, unidentified
METNGKFDKNAKLSFISDDMLILGCDVGSETHYLRAIDPRGRELSKSAYSFRNNCEGFQSAKEWAVELAAKNEKKQIVLGLEPTGHYWFCLATWMIANGISVVQVNPYAVKQTKEVEDNSQLKDDTKDPKLIANLVKDGNFGMPYLPEKVYAELRRLSMFREQLNEDRIRAINRMHREMKIYFPEYKEALGRVEGAFSLELLKQTPFPEEIQTLGEEGIRQIWHDAKLRGRGYSRVREIVGYAKTSVGMKDGAEASAMAVKWFVKEIRELDEKLAEIEKLMREKYQEIPYAKNILEISGIGENTLSGILAEMGDISRFDDVKEIQKLSGLGLVACSSGKHKGETKISHRGRKRLRYWLFQAAKSAVAHAEEFKELHVYYTTRADNPLKKMQSLIVIACKLLRIIYGILKNGTVYDPKKMLRDIRRPEKKEVIAA

SEQ ID NO: 75076 - protein, 340 aa, unidentified
MTITTVGIDLAKNVFAVHCVDQNGKTVLVKSRVSRTALPGLIAGLPPCVIGMEACSGAHYWARLFRQYGHEPRLMAAKFVSPYRMAGKSGKNDAADAQAICEAVRRPHMRFVPVKDESQQAMQCLHRTRQGFIEEKTATYNRLRGLISEFGVIAPQSTDALRHIVFEQKNSLPLQVQQCVDDLLEHVARIEANIAEYDRILSRMAKTDHRSQRLMELKGVGPTTACALVASIGNAHDFKNGRQLAAWLGLTPSQYSSGGKSKLGRITKAGDSYLRTLLVQGARSVLIGAEKRTDLFSRWVCSLVERRGYWRAVVAIAAKNARLCWASLHYGDDFRLYSAS

SEQ ID NO: 75077 - protein, 327 aa, unidentified
MARMQGKTTSDISQLFAGIDVSKAHLDLQLSCERRSRRFTNDPAGFAAIDAYLRACAPADTPCLVALEPTGRYHFPVWRALHEAGHGVAPLNPLHVRRFAESDGELAKTDALDAAVLARMAAQRLPCAKRPPSEEQLRLKVLTTSIADRIDRRAALKGQRAEVRDPLVAGFDEAEIAQLPDAIDALKAERARLIGQHPHRARVSEILCSIPGIGEASAHQIIADMPEIGTLDENQVAALLGAAPRANQSGKRDKRRHIRGGRRRLRAALHMPAIVASNANPDLKAFKQRLKANGKKNAVILTAILRKLIVLANALVAQNRKWTQKRP

SEQ ID NO: 75078 - protein, 374 aa, unidentified
MKYVGVDLHKHVIRLCVVSRAGQRRKVVDRRRFDCQDTAAIRAYFKHLGRFQAALEATAAYEWFFLLIEDLADRVVLAHPKKLRVIAESTRKTDKIDAEVLATFLALDMIPEAYRPSPRIRQHRVLVRHRCWLQRRITSIQCKLRNTLAHYNADIAELFTQRGKAYLAGLSLSAADRFAVLALEEQLALFQRQLRDADQQLREFAGLGALAEQEARAILATIPQIGPVTIDVVLSEMGDWRRFRSQKAAVAFAGLDPGVRQSAEKRRDLPISKEGSRLLRWVLIQAAWRLAGRSARWSVTFHSLEKKTGSKKKAIVAVARRLLCVMFSMLQSGQAYRLAAGENTVEEKARKQRPRRSRRCGPRSRQLVGSGRSA

SEQ ID NO: 75079 - protein, 340 aa, unidentified
MESFAGADLHKRVTQLAILRDGQPPSQFRFPNDPKTVDGVLKKLPRRTKIAVEATGSWWWFVEKAQELGHEVCLSHPKQTKAIAHARLKSDKVDAVMLARLLKADFLPTVWIPGERERYVRELLAHRARLGRTRTAVINELHAVYAKRNIEVPGMIWHRIRPVAWRAEELSGYAPRIVSENAELLKLINQQIQNLDRELAKAGQEDPQAKRLMTIPGVGVATGVAVSCWIGDIRRFPSAKKLVSYFGIAPKVRQSANREIHGHISKEGSGMVRWLILQAALVGIRMSKGPGRGQYLGVSRRRGKKIARIAVARKLLGTIYHMMREEIDYEEFVRRGSNAQ

SEQ ID NO: 75080 - protein, 341 aa, unidentified
MQSTKYFLGIDISADDFAASCITSPDNLVFSTQKFLNNIDGSTEFVSLLSKHSIKHSKVIICMEATGVYSENISYFLALKGFTICIEAPHKIKNKTKNSPRKNDFVDALAIAEYAYRYIDKLSLWKPNNEILDQIQVLLSTREHLTVQMTANVNALKALKYKHYQTPLANQIYEQTINKLKEHIKQIDQEIKNLIDKDDSFKSKVSLAKSVPGVGLLLAANLLVLTKGFTEHTNYKHTTAYSGICPYEQISGTSLNKPPKSRKSGPAKLRKLLYLAALSVRTHNKNFKKYFLRKVAEGKNKRLVLNNIENKLLKIIFAVVNSGVAYTENYKSINPGLLKTA

SEQ ID NO: 75081 - protein, 339 aa, unidentified
MNCTVFGLDLAKRVLQLHWVDMETGEVCRRQLKRQQVVEFFANRTPGIIAMEACGSSHYWGRKLTAMGYEVRLIAGQFVRPFVKSNKTDVADAQAIWEAAQRPGMKFVALKTEEQQSVLTLHRIRAQLVKMRTMQINQLRGLLYEFGADLPQGRQRGIARVGEELARLEGRLSPLVIDAIRDQLRRIETLDQDIAGIEKKLLLWKKQDESSRKLMEIPGVGLLTATAAVATMGNAGVFRSGREFAAFLGLVPRQSGTGGRVKLLGISKRGDVYLRTLLIHGARSVIQNQKEHDPWLTKLLSRRPRNAVTVALANKMARTIWALLAHDRRYDRNYATSAE

SEQ ID NO: 75082 - protein, 343 aa, unidentified
MKKVIKQVLGIDVAQLELVVCLGRMYDTSQKELYGYKTFANTAKGFELLLSWTRKLTQKDVDVLYVMEATGVYHERLAYFLKDHDQLVSIVVPNKISNYAKSLTIKTVTDKTASEAISQFGLDRMLDQWEKPLPVYKKIKQLTRERDQIVTECTLIKNQLHAEKSEAEPNKNSISRIKKRIELMDKQQSAIMLEIKELVKSNQKVTEMITIACSIPGVGLLTAATILAETSGFDLINSRRQLTSFAGLDVKEKQSGKSIKGKPKISKSGNRYLRKAMHMPSLSIIRHDENSKNVFSRILVRHGIKMKALVAIQRKTLELVYTLCKNKTKYDKEYIKGFETANV

SEQ ID NO: 75083 - protein, 342 aa, unidentified
MSIVMGLDQHRAQISAEWIDTITGEIFRARIAPADRAGVRNFLARFGGEGLEAALEATTGWRFVVEELERIGAEVHLAEPAEAAALKGKKKRAKTDWADARHLRELLLIGRLPESWIPPAHILDLRARVRTRHLLSHQRTEWQQRIQAVLYHHGFPQRRGLLTLEQRKWLAALKLCSAARQQIEIALEMIDALDIQLAPFDLELRSYARKQTGCRALIDALYGVGELTAVTILAELGDARRFPSSRDVVRYGGLDITVYQSDEHRAPGHLSRQGPPALRWALYEAAQVSRRGQRSPDRAYYLKTAERVGGNRACLALARKLLKRSYHILKALGDRALEPVAA

SEQ ID NO: 75084 - protein, 341 aa, unidentified
MQDVTLIGIDLGKHSFHLHGQDRHGKALLRKKFSRRQLIDFLANFPACTIVMEACAGAHWMARQLAGFGHEAKLISPQFVRPFVKSNKSDFIDAEAICEAACRPAMRFVTPKTEAQQCLSALHRVRESLVHDRVKASNQIHAFLLEFGIGLPVGHASIRRLPALLAEQALPPRLVSVLEKLHLHFKYLEEQIADIDKELARQLQKDDLGQRLMSIPGIGPITASVLAAEMGDGKQYSCGRDFAASIGLVPRQYSTGGKVRLLGISKRGSKTLRRLLVQGARSYMQRLDRHTDRLAQWVRIMLTRRHANVVACALANKLARTAWAIAAKHTEFEKQEAVTHL

SEQ ID NO: 75085 - protein, 454 aa, unidentified
MNNDGFLGLDISKGYADLYVVNAAKVPVEAAFRLYDVQDGHQRLEELIDKWLVKQNFDTIYCGVESTGGYENNWINFLQELALTRPLKIARLNAKGVKSLSDAALKRTITDSVSAENIAMYLIDFRHKIQWIDDPKSFRKYTDGRRHNTFIRMLKKQRIQLSNQLEKLLYQELSPLMAYCRHGAPGWLLNMLSKYASVTAINKAGPKGLIKIKGITTEKAEAILNKTKESKHWTTEHISSVIKSTIKQMVHLDEAIREEKNKLIKAYADCEEVKLLTSISGLGNQSAVEILIEIENIHRFENAKKLSAYFGLHPVFKQSGDGKWGNHMSKKGRSEIRAVLFMSSLTSIRYSDLFKNIYSNARAKGKNHFNAMGVVMHKLLRVIFGVLKNRTPFSLEVNAKNVENAEVKQLEQKEKLKVQKKEQVQKLERYNQVELEISPISKRHAKKRKVLQVT

SEQ ID NO: 75086 - protein, 337 aa, unidentified
MYLGVDTHLELHVATLINGLGQVVKSNAFSANLSGYRELFAWCKSYGFLQKAGIEGTGSYGAELTKYLIKNGVDVYEVMRPNRMERRLKGKTDGIDSENAARSVLSGEVKVIPKSHAGPVESLRSLLLTRNSAVKARTQAMNQIRALLVSGPDELKQSLYLPKPQACATACLAQCSNSSEPLMISLVLLAQRWNFLNEQVKKLDKALKKLTLSAAQDLVSRFGVGANVAATLLVAAGDNANRLRKESSFAALCGVNPIPASSGKTTRHRLNRGGCRSANNALWTVAMVRMRSDPRTKDYVARRTAEGLSTKEIARNLKRYIARELFPLILKDLARLA

SEQ ID NO: 75087 - protein, 367 aa, unidentified
MKKVSTAAMKQSRNISRQTLTIGLDLGDRNSWYCVLDETGQIQLEQRVRTTAKALQEVFGAMPRSRIALEIGTHSPWISRLLNELGHEVIVANARKVRLIGESRKKDDRLDAQTLARLARIDPELLYPVKHRSAQAQADLMMIRARAGLVRARTGLVNTARGLAKSYGERLRGCNVRNMDPEKAEGLSPELQRALEPLLATIEELSERIVEYNDRIEALAQTSYPQVELLKQIKGVGTLIALTFLLTLEDPHRFRKSRDVGGYLGLQPGRRKSGESEPQLHISKEGDPYLRTLLVQGAQHILGPFGIDCDLRRWGLKLAERGGRNGKKRAIVATARKLAVLLHHLWVSGEVYEPLHNSSRVKLAAAA

SEQ ID NO: 75088 - protein, 348 aa, unidentified
MRFYTNQHKHYCGIDLHAKKMFLCILDASGQIVLHRNIAASPESFLRAIAPFREGLVVGVECMFAWYWLSDLCSKEGIDFVLGHALFMKAIHGGKAKNDKIDSQKIAVLLRGGSFPVAYVYPPEMRATRDLLRRRNHLVHKRAELLAHIQNTAIQYNLPEIGLNLSYEGNRKEVDQHFPDPQVRKIVQVDLAMIDAYDDVLKILEPDIEKTARRHDRHALMLLRSVHGIGQILGLVMLYEIHDIGRFQTVQDFASYCRLVRCSHESAGKKKGTGGAKIGNAHLKWAFSEAAVLFVRHNPSAKKLMDDLTKLHGKGKALTILAHKLARAIYHMLKRNTPFSLKQFLATA

SEQ ID NO: 75089 - protein, 358 aa, unidentified
MAAHVTYTRRFQMVTTIGIDPHKATHTAVAIDEDETVLGEITLPADRDQTKKLMDWASGLNGGDGRVWAVESAGGLGYLLSQQLVATGEHVVDVPAVLASRVRVLSSGKSDKNHPNDARSVAIAALRQPALSVVRREDHAAVLGMLAKRHLELTSLRTQAACRLHGTLMLLKPGGMQRRLSAKQASRMLGGMRNLDTVGEQRRWGAKAHLGDIRRLDRDIKANKTLIRHAVTATETTVTDVFGVGPIVAAFLIGYTGDPARFATSDRYAAYNGTAPIEVSSGGKKRHRLSLRGNRRLNHAIHMAAVTQIRFPTPGRVYYDKKLAEGKSKKEALRALKRHIPDAVYRRLIADQQQATTS

SEQ ID NO: 75090 - protein, 371 aa, unidentified
MGKSNRTLSVGLDVHKDSIAVAYAPEDRGAEVVSVGPIGTRQCDIDKLIRKLQAKDATLVFVYAAGPCGYWLYRSLTRKGLTCSVGAPSLIPRKPGDRVKTDRRDAIPLARLMRSGDLTPIYVPQVQDEAIRDLSRAREDTVSDLRVATQRLKAFLLRQDIRDEGRATWSPAPLRWLAQVVCPTPAQQIGFQESLRAVTEDQDRLGRLEDALHEPGKRWRLLPVVEAIQALRGVELTGAVILIAELGDLTRFDPPRHLMHYLGLTPSESTTGVRRRQGGIPKAGNTHARRALVEGAWASRYPAKVSRHLQLRQEQLPAAVQAIGWKAQVRLCKRSRHLTARGKHVNQVVVAIAREMAAFAWAIARLVPLAP

SEQ ID NO: 75091 - protein, 343 aa, unidentified
MSISMIGLDTAKSVFQIHGVNETGKAELKRKVRRSDLIAFFEKQERCTVVMEACGAAHHWARILMGLGHTVKLIAPAAVKPFVKKGKKNDAADAAAICEAAARPDVKFVPVKTVAQQGVLALHTARALLVKQQTMLANAIRGLATEFGHVVPKGLHNLEPLVALVNDDAAMPAQARQAIAELYKRFGELAKGIQSCEAEIVKHARNDAMARRLATIPGIGPITASLIAATVVDISRFKTARQFAAWLGLVPRQNSTGGKTRLGRITKAGNREIRKLLVLGATSMLGHAEGWHSVLGGWLRNILQRRPVRLATVALANKMARIAWSVMTRNEVYRPAGGVAAKA

SEQ ID NO: 75092 - protein, 413 aa, unidentified
MDEFGAYVGVDWGDRMHRIALWDCRTGKEESIELEQTPAALHAWVRSLAARYGGEQVAVAIEQSRGQVFDVLVGYEFLELYTINPRSAARYREAFRPSTAKDDPTDAASLLDMLRKHRDQLQPFVADDVQTRTLRLLVEDRRALVDERTAGVQRLEARLKTYFPQALEWAGALDTLQACDFLERWPTLAAIQKARPCDIRTFYRRHTHGGEWIEAKLQQIRLAVTLLGDEAIISAAILMVRSEVAQLRALVASIGEYGRRIEAVFSEHEDAFIFKSFPGAGEQLAPRLAAAFGSVRDRYDTAVEIAERSGIAPVMRRSGKSVLVEMRWACPKFMRQSFHEFARASIGQSVWAGAFYRHLRARGVGTHSAIRTLAYRWIRILYACWKQHRPYDEVFYLRQLARRGSPIAALLVR

SEQ ID NO: 75093 - protein, 330 aa, unidentified
MDTSKHFFQLHGVNAAEIPVLRKKLRRKEMLAFFEKLAPTVIAIEACGSSHHWARLLQSLGHTVKLIAPQLVKPYVKRGKNDAADAEALCEAMSRPTMRFVPVKTAEQQAVLMLVSARDRLIRNRTQLANAIRGHAAEFGLTAAKGMAHLIPLLDRIRADESLPALSRELFATQAEECVQLQAQIDKIDAKLTVWYRADECSRRLVKIPGVGPIGAVLLRTKAPDPKLFQSGRQFAAWIGLTPKDHSTAGKVRLGVITRAGDEALRSVLVVGATAVIQHALRSGRVSPWLVELLKRKSPKLAAVALANKTARIAWKMMFTGEAYSAKVAA

SEQ ID NO: 75094 - protein, 265 aa, unidentified
MTRNYVGVDLSKDAFDVHDPLRGEARIANEPPALAGWIAGLGPDDVIVYEATSGCDRPLRLALDAAGQPGVRVNPLHAWHFARSLNRAKTDRLDAAMLARLGPERQLGPEAALDPAREELRDLVQRRDQLKRMQVQEKNRLSACSHPLVAEDIRDEIAALAACIGRIEAAIAAHLARHPALAEASALLRSIPGIGPVSAMTLLAHLRELGQLDRRAIASLGGLAPRAHESGRYRGQRFLGDGRRHIRRALYLAAVSTLRHPGRSS

SEQ ID NO: 75095 - protein, 416 aa, unidentified
MTVDLVHPRCAGIDISKRDAKVCVRVASAGRAKATSTVTTWGSVTNQVLALREHLVAEQVTLVVMEATSDYWKPFYYLLEDGPFEVMLVNARHVRNLPGRKSDVSDAAWLAQLGAHGLVRGSFVPPEPIRQLRDLTRTRTAIVRERAREIQRLEKLLEDAGIKLSAVATDITGVSGRAMLEALIEGQRDPVVLADLAKRRLRSKIPELTEALTGRFGEHHGFLARLHLDLIDNHTHAISELAARIEVVIEPFRGARDLIVTIPGISTNVADVIIAETGADMTRFPTAGHLASWAGTCPGSNESAGRIKSTHTRPGNPYLKGALGVAAMSASRSKNTYLAAKFRHIASRRGPIKAVVALEHAMLVAVWNMLDTGTYYGDPGENFFTRLNPDRAKSRALEQLRKMGYAVTLSPLAASA

SEQ ID NO: 75096 - protein, 366 aa, unidentified
MKKISTVLTFENEIFNTQKLTIGMDLGDRWSFYCILDEAGKIILEQKSLTTPEAMNKTFGKIARSLIAMETGTHSPWVSRLLTELGHEVIVAHAQTVQLITKSNRKDDRHDARTLARLARIDPELLGPVQHRSAKAQIHLMVVRARAELVSARTALVNAARGLVKSYGERLPKCGTQQVSRELGAGLSAELRDVLEPSFEEIESLNEHIKEYDQRMEKIAKEVYPEVSLLQQVKGVGTQIALTYVLTIEDPHRFLKSREVGCFLGLKPGRRDSGESQPQKGISKAGDRYLRTMMVQGAHYILGPFGEDSDLRRWGLKLAERGGKNAKKRAVVAVARKLAVLLHRLWVSGEVYEPLRNSQKAMRAVA

SEQ ID NO: 75097 - protein, 353 aa, unidentified
MAIAEGGRGGEVRYLGEFPATEAAMRKLVAKLAAKFAKLTFCYEAGPTGYGLYRLITSLGHECIVVAPSLIPKKPGDRVKTNRRDAISLAKLSRAGELTAVWVPDERHEAMRDLSRARLAAKKDLQGKRQQISSFMLRLGRVYPGKTTWGPAHMNWLMAQKLEHREQRTALEELLQGVRQENERVERLDQAIREAAPEWSLAEVVTALQAMRGIDLIAAVGVLAEIGDLSRFQNPRELMGYLGLVPSEDTTGDRVKRGHITKAGNGRARRILVEAAWAYRYPARVSREKQPKVAAAPRRVREIAWKAQTRLCRRFRSLERKGKLRTVIATAIARELAAFVWAINREVMGNRQA

SEQ ID NO: 75098 - protein, 404 aa, unidentified
MYIVGIDIAKFSHQGIIISKESGEVLCKSFKFHNSHDGLNLLLQKIREVSPVISDFEIGMEATGHYWLNLYTHLLDNGFTIHVINPLQSDALRNLYLRKQKTDSIDAKIIAQVIRFGQYSETKLKDGNILAIRELCRQRFYLVDKGADLKRKIGVMMDKIFPEYKSIFSDMFGKSSIALLKKYTTPKEFLQAETFKIVQIIKRASGGKLGERKAIEIKMTAKNSFYSLLDSENYSVMIKQMVEQIELNEFHIFQLEKIIQKNFEPFKSKITQIPGIGEVLGASIFSEIGDINRFSSIKKLTAYAGIDPSVRQSGEFLGTENHMSKRGSPYLRRALWIAAFVTVNHNESIISLYNRRKLIGKSHFQIMGFICHKLLNIIYSILKKNEDYKNQQCKNQQWTNLLSS

SEQ ID NO: 75099 - protein, 412 aa, unidentified
MEAIIERCCGIDVHKKTITVCLMIGAAGESARTTIKTFSTLTPDLLACRDWLIAEGCTHAVLESTGVYWKPLFNVLEDAIEVVLANARHVKNVPGRKTDVKDCEWLAQLLRHGLIKGSFIPPKPVRQLRDLTRYRQKLVQQRAAELNRLQKFLEDANIKLSSVVSDINGVSAQQMIQHLIADDMSPEQMAQLAKGRLRSKLAELEKALMGHLSEHQRLMLKVSLQVIGSYDEAIEKLSQEIGRHMLAFEPVAGRLQSIPGVKKNGAERIIAEIGVDMNQFPSDAHVSSWAGISPGNNESAGKRYSGRSTPGNKWLKACLVEAAWAASKTKNTYLKARYHRLAARRGKKRAIVAIGHTILIMAYHIIKEQSTYKELGADYFERLNEQAIIKRLTARIQNLGYQVELTKTELAA

SEQ ID NO: 75100 - protein, 313 aa, unidentified
MDRHPFVGIDVSRERLDTGVGADGEFWQAANDEVGIGQTLRRLSALQPALVIVESTGGLEWPLVSELAARQIPVALVNPGRVREFAKALGLLAKTDKLDAHLLARFGEAAKLSPTVLPEAAVQKLSALMGRRRQLLEMLVMEKNHLLSTRLNLRHGVQEHIAWLQQEVDRLTEQIQQHLQDTPGFRDKDRILRSAKGVGPITSLILLSDLPELGQLDRKKIAALVGVAPFNDDSGRRRGARRIKGGRTAVRQVLYMAAIAAARFNPVIRTFYQRLLASGKKKKVALVACMRKLLTILNAMVRDMMPWQEPLGA

SEQ ID NO: 75101 - protein, 341 aa, unidentified
MQITTIGFDIAKNVFQVHGIDGDEKVVVRKQLRRSQVIRFFQALAPCLVGLEACATAHYWARELMKLGHKVRLMPAKDVKAYVKRNKNDAADAAAICEAVSRPTMRFVPAKSAEQQAELMQHRARDLLMRQRTQLINAIRAHMAELGISAPQGREGIKQLLAITAADEDTRLPADARASLIVLAAQLQAIQTTIGSLERRIVARHRSNQDSKRLQTIPGIGVIGATAIAATVTDPTVFRSGRDFAAWVGLVPRGDSTGGKHKLGPISKQGDRYLRRILVGGAVSILRRAKLNPQRYPWVTRLLARRPFKVVAIALANKMARVAWALVAKGGIYRIPRLAAV

SEQ ID NO: 75102 - protein, 410 aa, unidentified
MLFVGNDWAEDHHDVEVQDETGRRLGKARLPEGVAGIARLHELIGGFTTEDMTAEQVLVGIETDRGPWVAALVAAGYTVFAINPRQVARYRERHGTSGAKSDAGDAHVLADMVRTDAHQLRAVAGDSALVEGVKLVARAHQNLIWDRHRQVLRLRSALREYFPAALEAFDDLAAADALDLLGAAPDPEQAARLSRSRIAGALKRARRRDVEVKAETIQAVLRSPRLSQPPQLAAAYAATVQATVAVIAVFNTEIATLQGQVEAHFGRHPDVEIYRSQPGLGEVLGARVLGEFGDDPDRYQGVRARKNYAGSSPITRASGKKTVVLARFVRNQRLADALHQQAFCALRASPGARAYYDQLRARGVGHHAALRQLSNRLVGILHGCLKTRTLYNEATAWSHYNQDQDQQPAA

SEQ ID NO: 75103 - protein, 304 aa, unidentified
MSNSPQHRTFTNDLEGFTAFTNWLALDLFVFDPHFCMEATGRYGEALAHFLYDQFKSVSVVNPSCIKNYGRSKLRRTKTDKIDSALIAEFCHKENPALWQPLEKDLRDLQQLTRELEHVKRLLADEKSRSKAGSHLGAVKDAIASLMNFLEGQIVVLEEQIKEIINSNKRLKKQKALLLTIPGIGETTAHALLGELPDISRFKSAKQVVAFAGLAPKESSSGSLHAKTRMSKVGNSRLRKLLYMPVVSAKRYNPVIIALCSRIEGSGKSKMVSIGASMRKLLHIVFGVLKSGKAFNKRLHLLEA

SEQ ID NO: 75104 - protein, 325 aa, unidentified
MTASLSSDNSFIGIDVGSTSFEAAWHRGGCAQYANRPDAIAAFLARLRAEPGIQRIVIEPTGGYEKLLVTALRRAELPVEMVHTSRFRAYRQLIGVRAKSDSSDARLLAAYAAAPDEIRRQDNRVVLPEDADREELAALGVRRDQLNRMIHAESCRLANVRSTLVRQGISRHLEALRQEVREIGVAMKAIVRQRQDLSRQKRLLRTIVGIGEVTAVMCLARAPELGRISNKAAAALIGVAPFVHESGGLSAPARIFGGRADVRRVFYMAAVTASQHNPVLATFYEQLIAAGKPPKVALIAVMRRLVVFANGVLRSDEPWKRGMAS

SEQ ID NO: 75105 - protein, 320 aa, unidentified
MRNAVGLDISKLTFNASAMVGNAEYSAKFDNDSKGLDQFSDRLKSLGCQNLHICMEATGNYYEEVADYFAQYYSVYVVNPLKISKYAESRFKRTKTDKQDAKLIAQYCRSAQESELVKRQKPTDEQYRLSRMTAAYAQIKSECAAMKNRHHAAKDEEAAKAYAQIIKAMNEQLEVLKEKIKEQTEKPNCKEGVKRLETIPAIGRMTAAVLFHHLTSSKFETSNKFAAFAGLSPQQKESGTSVRGKGKLTKFGNRKLRAVLFMPAMVAYRIRAFPDFIKRLEEKKKPKKVIIAALMRKLAVIAYHVHKKGGDYDPSRYKSA

SEQ ID NO: 75106 - protein, 339 aa, unidentified
MKTITIGLDIAKNIFHAVHMTSHGKILKKKKLNRTAVLSYFAQIELSCIVMESCGSSNYWARELVNLGHTVKLIAPQHVVAYRRKNKNDYNDAEAIAEASQRDSMTFVPIKTREQQDAQIVLRIRERLIRQRTQLSNQARGMLLEQGISINRGWSAFRKVLPEVLEDANNNLTSISRELFNDLYEEFKALCERIERVEQRIKSFTETNDVCQQAQTVVGIGPITAIALYAAIGQGKHFQNGRHFAAWCGLVPRQHSTGGNQTMLGISKKGNIQLRTLLVAGARSALSRMDRKEDKLSQWAIKLKATKSFNIACVALANKLARIVWSVICNDKAYELKGA

SEQ ID NO: 75107 - protein, 340 aa, unidentified
MEKVSVVGVDLAKNVFEVTGRNEQGRTVIQRSLRREKFREFIFQLPPTVIGMEACGGAHHWGRVLRGMGHEVRLVSPQFVKPYVKSNKNDRADSEAICEAVTRPHMRFVAVKSLEQQDVLSVHRVRERLIKNRTALCNEIRGLLGEYGRVVAQGVSTLRRMLPRLLEEAENGLTDRMRELIGNLWEELKELEERIARYNTKIEIEVRTNEVCQRLKEVPGVGSLTASAVVASVGNPNVFKNGREFSASLGLVPRQHSSGGKDRLLGISKRGDKYLRRLLIHGARAVLRHLGSKEDPRSEWLRKLEARRGKNRACVALANKNARILWVLMARGEKYLAKTA

SEQ ID NO: 75108 - protein, 429 aa, unidentified
MTSKSCTTSPVVRVAIDVATLTHQVLLELPSGTRRVLRVANTKAEIDRFVATLRALELSCEIAFEPTGDYHRPLAYLLGQAGFHLCLVSSIAVARTREALYNSWDKNDPKDAQVILHLLKNGTTQRYLDPLMTGYQDLQEMANTYQQISLRKVRLQHSLVTHHLPLYFPEAERYLHSSRAEWFTELLLFTPCPTAVRRYTKTAFVAAAREQIGGRKVDKARWLADFYETACSSVGLPVSEASETMRMFRVVLEEYRALCQLRKRLETDVVTRLANQPDFVRLQTLPGIGPILAMIILAEARDLRRFGCARQFLKYCGFDLCTEQSGQFRGTTHLSKRGNARLRYAFWMAGTVAIRMQQNSFRRKFDDYIRRDPQNTDRRRKGYTAVAAKMARVAYAVVTTGTDYRRFPEATRPGGRIPSPGAVEAHATS

SEQ ID NO: 75109 - protein, 352 aa, unidentified
MLLIGVDYHPSFQTIAFLVEETGEYGEQELNHSDGQAEKFYRDLKQRGMCVRVGMEATGHSRWFERLLAELGFELWIGDPAEIKAKRVKKQKFDREDARLLLRLLRENNFPQIWVPDAENRDLRQLLWHRHRLVQMRTRIMNQLHALAMNEGYCWKKKLFSEQGRVQLEKLALAPWASRRRQELLELLDRMNPTIEQLTAAVEREAKKRPEVLRLMTHPGVGPLTALAYVLIIGTPTRFQRGKQVGTYVGMIPCEESSGARKQRLGHISKKGNSLLRFLLVEAAQAAARVHPDWRRRYMHLAMRRHKSIAKVAMGRRLAVRLYWMWRNGCDYSASVGFGSYAGQLEIGNGVK

SEQ ID NO: 75110 - protein, 394 aa, unidentified
MAFKIFRKNCCGLDVHKTWIYACMGITDTNGRTEYKQARFSSFTKGLQELADWLAKYDCNDVCMESTGKFWIPVFNILEKTCWVTLAYPKYTKPQKGNKTDHKDAKWICDLYMCDMVNPSFIPPPDIRQLRDLMRYRSKLTNIMTSEKNRALNCLTVSNLKLDDVFSDVFGKSSRSVIRYILEHPGETFQVAPFIDRRCKHLVEEIQAVIDGTISHQQAVKLRECLQHLDELEVHKTNVEKEILCLVQQYPYQLELLQTVLGFSGNIMTAIALISEIGADMSVFPSAKYLVSWAGCCPRNDQSSKKVKSTRISRAGVYLKPLLVQVAIQPFTANADKLSAAGALEIRCQICDGRFLSMWAALFIFLGCPLPPCPKNLHVHNGRIVILASVAWIF

SEQ ID NO: 75111 - protein, 400 aa, unidentified
MLNPHQALQLRVGVDVGSQCHSVAVGLADGSLLEEFEIPHTAAGFGDFFARIEGHAKRHSSPVAVAMEGYNGHVRPLDSLVKARGWRLFNVNNLKLARFKEIFPAAAKSDRIDSAKTLELFQLRDHLPMGGDVLQEVMATPEENDILKRLSRRRRRLVNECGRVINSVQADLQAVAPGLLQITGYVGNLWFLNFLTCRKGLLRLAGLRRASLLKVSGIGATYADAIQAWQSRAFFGHDASLVGDMIQQDATRILELKQQIKALEEQMAHVAESSAIANQLASIPGYGSVCSAELAGEIGTIERFGSESSLALYLGMATLDNSSGKYRGSKAPKHVNARAKAAMMIAVDHHRKRVPQSQRYYEKKRAEGKRHNQAIRALGRHLCRVIFKMLSQERTYRIDP

SEQ ID NO: 75112 - protein, 349 aa, unidentified
MSQPVKPVVVRMGIDIGKSAFHVVGLDFAGKPVFRSRFTRERLIEFLARASPTVVGMEACPGSNWLARKAVLSGHEVRIVPAQFVKPFVKSNKTDMIDAEAIAEAISRPTMRFAQPKTEAQLDLQALHRVRQRLVSNKTSVINQARAFLLEYGLTISVGAAYFVRDMPSILSDDQNGLTPSMRRLLEELWQEYRSIEARLLQLRQQIESIASADDAATRLTSVPGIGQLTATAITAFAGTGTQFKSGRHLGAWLGLVPKEFSTGGKQCLLGISKRGDPYLRKLLVHGARSCVLRLDRTKDHLGAWIGRMEARGIHRNKIIVALANKLARIAWAVLTRQGAFYLRQPKQQ

SEQ ID NO: 75113 - protein, 348 aa, unidentified
MNTTTIGLDIAKRIFQAHGVDIRGKTTMTRRLKRSEVLRYFANLQPCLIGMEACASAHHWARKVAELGHTVKLIAPQFVKPYVKTNKNDARDAEAICEAVSRPNMRFVPMKSVEQQATLALHRARQGFVMARTAQSNQLRGLLSEFGIVMPKGISNLKRQMPEILEDAENGLPNASRELFARLYAHFKELDRQVGELERQIKVCQRENPASRRLEAIPGIGPLSASALAASIGDAKAFRNGRQLAAWLGLVPRQHSSGGKEQLLGISKRGDTYLRTLLIHGARSVLLSLKRHGGQTDGWLTRLAARRNANIAAVALANKNARIVWALLAHERDYEAAYVAPSVRGAAA

SEQ ID NO: 75114 - protein, 353 aa, unidentified
MERTQTDWTGQTLYAGIDLHKKKWVISVRTRDMYLKTFVTNSDQEILLKSFRNNWPGAEIIAVYEAGCFGYHLAKFLNNNTIKTMVVAPHTIPVAPGLFVKTDKLDSKKLALELANGSLRGIYQPTSEQLYDRGLLRKRRQLIKRKVQVQLQIKSDLQFYGIKANAYEARYWSKKTFQELRNIEFDNKGFKKAFLLILTEYEELVARLKEIDQLLDELSKLDKYRKKIELLRTIPGIGKLAALNIILEIGDIRRFNSAEKFASYLGLTPSERSSGETKRIGSLTGMGQVILRTVFIESSWVAIKKDPALLRKYQRLTAKKRPVKAIVAVAKSLANRTRKVLIDEEPYIIGMVR

SEQ ID NO: 75115 - protein, 450 aa, unidentified
MTKKLSKRQDLPVLHSDAAGIDIGSSFHVAAIPPDRSEESVKSFSAFTGDLNRMADWLIEHGITTVAMESTGVYWVPVFEILESRGLLVFLCNARETRSVPGRKTDVKDAQWIQRLHACGLLKASFRPTCDIAELRTYLRIRERLLDYAAAHIQHMQKALTFMNIQLNLVVSDITGVTGMRIIRSIVKGEKCAKTLAKMRDNRCKNSQETIQSALEGNYQAEHVFALKQALIMYDAYQVQVHECDKEIERVLSKLSLGKPSPSEPIPKPRHRTRQPNQLNFDVRQSLYKLIGSDLTQIHGLGPYLSLRLVSECGLDMSKWPTAKHFTSWLTLSPGSKVSGGKVLSSHSRKSNNRIVAHLRLAATTVGRTSTALGAFYRRLAARIGKAKAVTATARKIAILFYNAMRYGMKYQDPGADQYEKNYRDRVIKNLHRKAEEFGFDLQPKPTCVS

SEQ ID NO: 75116 - protein, 422 aa, unidentified
MLEETNDTEELIERVAALDIGKAELVCCVRVPDPQGSGRRLQEVRTYATMTRSLLVLADRLRELGVTRVVMEATSDYWKSPFYLLEAHGFEVWLVNARDVKHLPGRPKTDRLDAVWLAKVAERQMLRPSFVPPPAIRRLRDLTRYRADLVVVRTAEKQRVEKLLEDAQIKLSVVASDIFGVSGRAMLDALVAGERDPKALAQLARTRLRAKLGQLEEAFTGHFSDHHGFLLARMLGRIDQASADIAELEAHIDQEVAPFAQAVDRLDEITGVGRAAAWVIIAEIGLDMGRFPTPGHLASWAKFAPGVKQSAGKTKGKATTGHGNPYLARVLGEAAVAAGRTDTFLGERYRRIARRRGAKKAIVAVGRSILVIVWHLLADPTARFHDLGAGFYDTRINPERVKRNHVRQLEALGYKVTLEPAA

SEQ ID NO: 75117 - protein, 356 aa, unidentified
MFPYRTFIGLDVHARSVVAHAINIDAEQPVRKKFPYDPFQVIEWARTLPGPTTVVYEAGPTGYDLARHFSDAGIECVVAAPSKLQRPTGDRVKTDARDAAHLAKLLQLGQIVPVAIPTITAETARDLVRAREDCRHDLMAARHRLSKLLLRHGYVYDSTTWTQKHLAWCRAHRPGTPAYTAAFDAAYETVEQTLTRRTRLDAAIKEMAADSEFTPVVHRLGCLRGMGTLTAFALTVEIGDWDRFTGKTIGSYLGLVPSEYSTGGSRRLGAITKTGNSHARRLLVEAAWHHRREYRPGYSPSLEKRLALAFPAARARGQVGNERLHRQWVRHTVRRKKSTVGRVPVGGVIPEARVSS

SEQ ID NO: 75118 - protein, 323 aa, unidentified
MNKDIKYFGIDISHLVFDVTDTDGNYYQFKNNITGFKKFIKKLDSASHCVMEATGYYHYQLAYYLQENSIKISVENPLAVKRFIQMKLSKIKTDKSDSKLICEYAQQVELKHWQGNSKHQIECLQMTRLLSVYTKQSTMLKNKLHGESVLGNPSKAVVSSLKRSLKQVKKEIETIEVKLLLLVKQAHQDVLTRIKSIPGIGNKTAVMLVVLTDGFDRFNSGSELCSYAGLTPIIRQSGSSVKGRPRISKIGNQKLRNLLFMCSFNACKYNKACREIYERIVAKGKSKKLALIAVCNKLLKQAFAIAKSGLIYDDSYRSVLVKN

SEQ ID NO: 75119 - protein, 342 aa, unidentified
MGQITTIGLDIAKSVFQVHGVDATGEVILRRRLTRARVVPFFTKLAPCLVGIEACATSHHWARELRKLGHEVRLMPPSYVKAYVKRQKNDTADAEAICEAVTRPTMRFVEVKSPEQQSIMVVHGTRTMLMRQRIQLSNAIRGHMAEFGVVAPVGREGLLTLTDTLHDEADDRVPAEARHCLQMLAAQLRLVNAQVLENDRRIRLSARATDVGRRLMGIPGVGPVLASAFVATVPDPHAFRSGRNLAAWIGLVPRQNSSGGKERLGGITKQGNRYLRQLLFVGAMAVIRYAQRHGTRRPWLVQLLARRTTKVAAAALANKTARMVWAIMTSGQPYREPELRAT

SEQ ID NO: 75120 - protein, 356 aa, unidentified
MSIVAHSHPFVVGVDTHARNHVYAIISTATGEVLETRAFPATGTGINRSIAWVARRTGADLGTLWVIEGAASYGALLAGAVGAAGYPVAEAARMDARAHRGIGKSDPLDAHRIAAAVLPLQEEQLRRPRLNDGIRAALRVLVTARESMTTDRTRAVNALTALLRVNDLGLDARKPLTGTQIAEVSRWRGREEPLAVSVARSEAVRLANRISGLDADIKANNAQITELVEISEAAPLLRETGFGPVTAAICLTAWSHHGRVRSEAAFASLAGVSPIPASSGNTVRHRLNRGGDRTLNKALHMIALSRMTFDAQTLGYVQKRQAEGRTKKEIRRCVKRYLARRIYRTLNATTPTPCHA

SEQ ID NO: 75121 - protein, 401 aa, unidentified
MIAQFRIDHGPAGVQGLIRRCLELEPDPAEVRVVLETRHGLLVEALVDAGFTVLPVNPDLVARRRGPAKKKDDAEDARICCLLALDAYLELRKLIPHGEIGAELRAIARDDERAARDERRIGNRLRADLLTAFPAAIDIADGDLGAAVFLKLLARWPSAAALATATREDLQAFARSCRHGWPERFAGRVIDAQAQPRLAVRPELARAKAGTIALAAAQLLLLRAQRKAWERRMGELLLGAPRTGRDKTAKDPDPGKAFPGGEIYLSMPGLGDRLAARIAGEIGEHIGQYATPNALQCYAGRAPVTRRSGRSEYVVARRLAYNRHLGEAVQQWAFCSLTRSAWAREFYDEKIAAGNGHNSALRKLGNRWLEVLWHCLDKGVFYDEATHTANRLRSRTLKPAA

SEQ ID NO: 75122 - protein, 340 aa, unidentified
MINNFLGIDVSKEHFDVSLSFISKKGKREARKRKFKNDDIGFQGLLSFLQKHNVEEVKACMEFTGCYGEALAEFLYNAGHFVSVVNPACIRFYAKSKLTRQKNDQIDAEIIADYCQKQEPSRWMPPSPKKKKLKHLYRCSDALKNELTLVNNHLEKKERLPEEVVNVWENLATSIEQSIETIKNSIRELLKQHKELLEDFQLLLTIPGIGEESAIAILAEIPDIKAFINARQLAAYAGTIPKNITSGSSVYAKTRLSKSGSRTLRKAMYFPAIVAKNHNPIIMTFCERLKEKGKHNMAVVGASMRKLLHIVFGVLSSKKAFDPDHIKNYRAKRLAEGLVL

SEQ ID NO: 75123 - protein, 418 aa, unidentified
MTVDLERGYTSKEPCGLKQYLNLLRRSIFMIYVGIDVAKDKHDCFVTSSDGKVLFPVFTIQNNREGFDDLFSKIQSVEVSNIKVGLEATGHYSYNLLGYLIDKGLPTYVINPLHTNLYRKSLSLRKTKTDKVDARTIAMMLMSDVNLKSYSDISYHNEALKSLTRYRFDKVQERARLKQSVSRLVTILFPELEKLVPSLHTASVYALLSELPSAGKIASCHLTHLTKLLENASKSRYRREKAIEIRDAARTSIGSNMPAKSLELRHTLRLIRELDSEIAEIESEIKRIMDQISSPILTIPGISYRMGAMILAEIGDFSRFDSPDKILAYAGASPSTYQSGQLKSSYSHMEKRGSRYLRFALINAAKYVCHWDETFGAYLQKKISEGKHYNVAIAHAAKKLVRLIYAMEKSGMPYIKTA

SEQ ID NO: 75124 - protein, 395 aa, unidentified
MGPLSGLLPHLTTDPKRLHTDFTVALVVLCVAWLVAWAAAWPERTWAVEGAAGLGHLLAQQLVAAGEVVVDVQPKLASRVRLLQAGDTNKNDPNDALSVAVAALRSRACRPVSADDYAAVLKVWSKRHRDLGRTRNQVACRLHAVLCDLVPGGHPKEISAAQAARILEQAAPSGAVARARAELAAEFLADLRHLDAQLRGIRKKLASAVRASRTTLTQVFGVGPVIAGTVIGDVGDVARFPSRDHFAACNGTAPVEVSSGNRKIYRLSLRGNRRINHAVHMAAITQLRHKHSQGRAYYDKKVAEGKTHKEALRSLKRRISDAIFARLQADARQASTMGPGGQPGNGSDSSAASSHPKRQLFGPATPGPGTTPRPATTASTPSPSKPPSKKTRPAA

SEQ ID NO: 75125 - protein, 407 aa, unidentified
MDLLKTVFGIDVSSRKSNVCIMVNGQKVDDYAISNDMVGFNQLLDDLKQVTNPQIIFEATGVYSRRLQAFLDMHELRYVMMNPLEAKRKTKDDLHQNKTDKLDALYLAKLQSEHPQRLAFVQSEEYQELMANNRIYEQASHDLITNKNRLHKAIQLTFPEIEHLMANPRGKNYWSIVLRFPHPDIVLETKEADIIDFLKSLSGIGEKRANDLAQRLIRLAKLACPAVKKSSAHIRGLEMAINNILSAEEACQTALKEMTKLAPKRDLEILKSIPGIAENTALRIISELGDIRRFKKPSQLNAFVGVDPQVYESGNLTAHLSISKRGTAIGRKVLYLAINQIQSAKKAGNPCHIADYYEKRKRSSETASHKKAAIASIHKLLRTIFALIKNDQLYSYDVAKHNQRLLS

SEQ ID NO: 75126 - protein, 446 aa, unidentified
MDEYFLAADVSKGYADFIILDNKKNVIEDNFRLDDTYQGHIALHKVLTEFLTNHRDSIIYFAVESTGGLENNWLNFITGLSNTMNIKAARINPLVISASYKASLTRVVTDPVSARTIAEYMIAYPEKIRYNVDDPYAEVRRLWKFTEMLKKQRTQLKNQLHILLYTSLPFLVTYLKNGIPNWMLELLLQYPSAEAIAEADITSLAQIRYISKKKAQSLKEQANMNVGSAKHQSTSFLIVSTARQIIELSKAIKEQKSYLAEQYGNLQMVKLLRSFKGIGIDSAIGLIMNIVSTDLFPDVKKAASFFGVHPVYKQSGDGVWGFHMSKQGRASMRSILFMIAFSAIRSNPLIKEFYVEQLKKGKSRMSALGICMHKIFRIVYGMLKNNKPFDQKIDKQNRKRNRKEKPATGNNIRVRRFHKEDELAPISRRQNQKRKKSKQSQSDKIT

SEQ ID NO: 75127 - protein, 570 aa, unidentified
MVVVGTDAHKYSHTFVATDEVGRQLGEKTVKATTAGHATAIMWAREQFGLELIWGIEDCRNMSARLERDLLAAGQQVVRVPTKLMAQTRKSARSRGKSDPIDALAVARAVLRETDLPLATHDETSRELKLLTDRRDVLVAQRTSAINRLRWLVHELDPERAPAARSLDAAKHQQALRTWLDTQPGLVAELARAELTDIIRLTGEINTLAQRISARVHQVAPALLEIPGCAELTAAKIVGEAAGVTRFKSEAAFACHAAVAPIPVWSGNTAGQMRLSRSGNRQLNAALHRIALTQIRMTDSRGQAYYQRLQDAGKTKRAALRCLKRRLARTVFQALRTVHQPSSEHTQPAAACHRSYCSSHLGEPPRLTDMTQKTRIQPLPPKRAGLLIRALYRIAKRRFGEVPEPFTVTAHHRRLLIANVVHGALLQRASRKLPPSVRELAVFWTARSIGCSWCVDFGAMLQRLDGLDVDRLTDIDNYATSSKFSDDERAAIAYAEAMTADPHSVTDEQVADLRARFGEAGVIELTYQIGVENMRARMNSALGITEQGFNSGDACRVPWAAPDVPSAESR

SEQ ID NO: 75128 - protein, 479 aa, unidentified
MRTDKKLWRNRKARKELARRLQSENPSLEVVHPHAAGIDVGNSAHYVAVRPDRDPQPVRRFECFTADLYRLADWLQSCGVQTVALQSTGVYWIPLYDILEERGFKVYLVNARHTKNLPGRKSDVQESQWLLKLHTYGLLNNSFQPPSQIRILRTYWRQRLQHVTGAATCVQRMQKALTQMNIQLANVISDLSGVTGQLIVRAVVAGERDPWKLAELSHPRIQASRAEIAKSLEGNWRQELIFVLQQEIEMYDTYQRRVAECDQELQKHLRAFVDTVPPPVKEALSPKKKKKQNKNNPRFHLADELQRITGVDLTRIDGVDVMVAQTVISEVGLDMSPWKTEAHFASWLGLCPDNRISGDKVLARGTRHVLNRAANALRLGASTLLKSQTYLGAQYRRLRSKLGAPKAITAMAHRLARLVYRMLKYGQDCVDKGAEYYERKNRQQQIEFLTRKAARLGLQLTPALASTYQARSFWRVDAI

SEQ ID NO: 75129 - protein, 331 aa, unidentified
MEQKYIGIDLHKEFFQACAVDPQGTRMWEGRFPRTEGGLTLVQAHCGVETAIAVEATGPTWALVDALTSSGARICVVDPRKTRLKAGYAAKTDRLDARRLADALRRDSVVSVYVPPPAIRELREVCRGRHQLVRVRTRIAQMIRALLLRSGVADVPVRRVFSPPGLAWLEAVVLAPEAQASLPRLRQVLVAIQAEAGGAEARLTERASTDPIAGALDTLVGIGPVLGLTLRAEIGDIRRFRRGAELASYAGVVPRVEASASRYWSGRITREGAPWLRWALVEAAMHAHRRSDALGHWARQLAIRKGLFTARIAYARRLCDEIVHVWPRAAE

SEQ ID NO: 75130 - protein, 356 aa, unidentified
MLNKFNKFVDFSGHNVYAGLDVHGKSWTTTIIVDDIEHRRFTQPPESMALYKYLSSHFPGANLFSAYEAGFCGYHHHRKLIELGIQNIVINAADLPITNKEKVNKNDHIDSRRLAQALQRNELKAIYVFGPEHEQFRSLFRMRWRAAKEHRRAKNRIRSFMYYYGINPPSDFNPEHWPLGFIHWLNQITMPTEAGTLSLKFLLKAYQNTREQLLEVTRQLRHEVKIHYPGLYKLLMTIPGVGPIVAMCLIAEIGDIKRFKSYRHLSSYVGFIPNSHQSGEKDPNGRLTYRSNKYLRSMLVESAWVAMRHDPALLKYYRERITKQKPQYIIIKVAHKLLNRVRQVWISQNPYQTAMA

SEQ ID NO: 75131 - protein, 322 aa, unidentified
MVGIDVSKATLAVTWVNGQTRQVEWEASVPNTVAGVRQLLSATPAQLPWVLEPTGRYSLAVARQAQAAQRTVLLAQPKAAKAFLSALRPRAKTDRLDSRGLALYASATPLPPYPFKSALMDELQQLLTARKGFSGALSRLHQQAGELPAAAASLRPALTALRAQRAALDRHLAARMTQSPAWALTQELRRIPGIGPVTAATVALCVQSKAFPHPDAFVAYCGLDVRVRDSGQRRGHRTLTKQGDAELRRLLYLSAQASLRATQSPFKAQYERERAKGLSTTAALCAVARKLARLCWSLARHGTSYDPQRVYRQPTHEKALDT

SEQ ID NO: 75132 - protein, 333 aa, unidentified
MNGLVWAGFDVGKSKFSAALDIPDVFGRKLELPALSHKEFDRNEEGLEAFFVWASEKTSGPLSIVMETTGCYSQNLAYWIAEKRPEMHVSIVHAGSLSSYINSFRLGNKTDALDAKAIARFGSERQPKATKLPSEKQRELKELTRERTALIEAKVDLMNRSESLKTSLVREMNAQNIAVLMKRIEEFDKAIKELVVQDEELHEEVRILDTMPGVSFISAYTILAELGSLKQYTRNELSALSGLAPRIKQSGSSVNYSFMSRRSSGRTRQILYINSLKGVEMVPVLNDMYHRLISRGKKKMQARCACMRKMLLMMRSMVINNKPYDKNFHNFSS

SEQ ID NO: 75133 - protein, 357 aa, unidentified
MDLIIAMDCHKHYSLVNVQRADGQPVAEQRITHQRGQIQAFLAQYPPGTPVAIETIGNWYWIVAEIEGAGQAPRLVHARKAKLMLGSINKTDKLDVRGLNTLQRVGTLPTVWIPPAALRDQRELPRVRMVFGNARTRLKNRLHSVLDKYGLQDRFDGISDVFGRQGRALLQQVLASLPDQTLYTTERMLERLDQLDQTIKQIEKRMAEIFTPTRSMTLLRSLPGVGAVLSVVIGLEIGDIRRFKGASGLASYAGTVPRIHASGGKAYYGRTRPDVNHYLKWAYAEAGNSVALNHKRFPYRHVSQLYQRLRARRGHAQAIGAVGRHLAEATYWMLTKDEPYQERGLKEVQGAVSAKLS

SEQ ID NO: 75134 - protein, 341 aa, unidentified
MEYCGIDLHAEYSQICILDEDGEVMETSRVSTSQKALERFFRRDPMRVVMEAGGSSPWVSRLLDSFGHEVVVCSPRRVRLIAESKLKNDKVDAEVLARLVRLDPGFLKPIQHRSEEAQLLRANLKVRRAMVDARTKWINTVRGLLRSFGYKVAGKAPHTFVDRVDAMKLPEELRAPIEPLLEQLDLLSGEIRRRNEHLEEMVQGLPEVDHLRKIPGVGVVVATYFVLTIDDPNRFRNSRDVASFFGLRPSMRESASVSHYGRITKEGDPEMRRLLVQAAHACLLTKADSELKNWALALAERKGKGKAVVALARKLAVLMHHLWVTGEVYQAFPNKKASQAA

SEQ ID NO: 75135 - protein, 341 aa, unidentified
MEYGAIDLHLRSSLIRIVDAAGALVLERRVSTTREGFRSVFADRAAMRVLVETGTESEWVATVVEGCGHTVIVADPNYALMYGQRQRRIKTDRRDVAALAEACRLGIYRAAHRVSAAQRDRRRRLRVREQLIRMRTQAINLLRAQLRQEGYRLGSGSAEAALTRYERLTLPPAFREAVAPLRELLASLRPVIAHLSAALEQAASTDPIARRLMSVPGVGSITALSFQAAVDDIGRLRDASSASAFFGLVPTEDSSADRHHRGRITKAGPRGPRRLLVQAAWVIWRSRARAGGTLQVWVQQLADRRGKRVAVVALARRLCRILYALWRDDTVFTVRPRPAGA

SEQ ID NO: 75136 - protein, 404 aa, unidentified
MNAVGIDVSKGKSTVAVLRPFGEVVASPFDVAHTGSELKALADFVKKLRGETKVVMEATGNYYEPIARYLHEQNIFVSVVNPVLISDFGGNTLRKPKTDKKDSLKIASYALSYWVDLKEYVPQADLRKSLKLLNRQYQQASKLKTMMNNNLISLLDLTFPGINKLFTSPSRESDGHEKWVDFVLAFPHCDMISKLTIKAFSRKYKKWCNSNSYYFTDASCEKIYDFAKDCISSVSSAESTVFAVIQAARMLNSATENCHDIQLEMNRVAALLPEYDTVMSMYGVGKAVGPQLIAEIGDPRRFHSRKAITAYFGYDSENNDSGQKVSISNSMTKKGASALRRTLFIIMQVLLQTKPIDNSVYDFLIKKQSEGKHYYSYMNAAANKFLRIYYARVKEVLTAAEALT

SEQ ID NO: 75137 - protein, 382 aa, unidentified
MARTREGARRVTSSGARVAGDAADDVVLGVDTHLDFHVAVALDRLGRRLGEAKVPTTAEGYERVVRWAEGFGPVRCAGIEGTSSYGAGLARHLKAAGIAVVEVERPKRRHLRRRGKSDPIDAEAAARTVLAGQAVGEPKSGDGRAEMIRTLRSARQSAVKARSQAANQLQSFMVTAPEELRHRLRGLSTKELVAAAARFRPGNDPEDVKAATRFAMRSVARRYQALSEEIAELDAHLHRLVAEAAPGLTSLPAIGTHHAATLLVLAGDNPERLNSEASFASLCGVSPVEASSGKVVRHRLNRGGNRDANRALHMICVVRMGSDERTRRYVARRTAEGKSKWEIMRCLKRYIAREVYRVLLSSAAAEPPPSGITKPVLGADIA

SEQ ID NO: 75138 - protein, 353 aa, unidentified
MTRNKRSIIGGVDTHTATDHAAVIDVNGRLIADAEFPTTPAGYASMLTWMRSKGKLGLVGVGVEGTGAYGAGLARYLHDQGIDVLEVPRPDRRIRRQRGKSDPIDAEAAARTVLAGKASGAPKLADGPIEAIRMLRVTRNGAVQARTATLNTLRSLVITAPEPLRTQLRSLTSAQLVTACAHLRPDLTKLADPVQAAKHALRSMALRAQHLNTETRTLRMQLNDLTQAAAPATSAVFGLGPDTVSALLITIGDNPDRLRSEAAFAHLCGVAPIPASSGKTHRHRLHRGGDRAANSALHIATVVRLRYDPRSRAYADRRTTEGLSMPEIIRCQKRYLAREIFDALRADYAQLST

SEQ ID NO: 75139 - protein, 352 aa, unidentified
MNNRNTIGLDMGDRKHSFCVLNCQGKVVLQDTVSNTSEAIRKRFEGHPPALFAVEAGTHSSWVSRVLEQMGHEVLVGNPRKLRAIWQSDRKDDVRDAEMLARIARFDPELLYPVRHRSQAAQFDLTAIKARDLLVRTRSMQTAFVRSVAKGAGERIAGCDTKCFHQRAREQLSEGLVDRLEPVLTVIEELNRQIAEYDRQIESMCRQQYPETALLRQVPGVGAITALTFVLTIEDPKRFSKSRDVGPFLGLVPRRDQSGQTDRQMRITKAGNAMLRRLLVGSAQYVLGAFGPDCELRGFGLKLAERGGKNAKRRAVVAVARKLAVLLHRLWIEQSSYCADYQHRRRTQAKAA

SEQ ID NO: 75140 - protein, 411 aa, unidentified
MEVVHARCCGLDVHKKSVVACVLITQPDGNTERYIRTFKTMTTDLVALSDWLSTLSVSHVALESTGVYWRPVYNVLEDDERTLLLVNPQHMRAVPGKKTDVKDAEWIADLLRHGLLRGSFIPPVPIRVIRELTRYRKTLVQARADEVNRLQKTLEGANLKLASVATDVLGVSGRAMFAALLDGERDPDVLADLARGRLRAKLPQLRQALVGRVKPHHLVLISQILAHIDFLEQAIAEMQVEIDRCLPPFEKALELLQTIPGIREVAAAAILAEIGTDMSRFPSAGHLASWAGLCPTNKESAGKRMKGPRNRGNVWLRAIMGEVAWASIRTKASYFYAQYHRLARRRGKEKAAVAVAHSLLVVIYHVLSTGRPYQELGVDHFDRLNTAHIQRHHVRRLEQLGYTVTLTPIAA

SEQ ID NO: 75141 - protein, 412 aa, unidentified
MNAAGIDVSKGKSMVAVLRPFNQMVAKPFEVRHTGSELKQLADYLKGLDGETRVIMEHTGRYYEQIAQYLHDAGLYVSAVNPKLIKNYGTGNTLRHIKTDKADAKKIAKYGLDRWTELREYTPMDTIRYQLKTLNRQCGLYTKTKTMMKNNLIALLDQTYPGVNALFNSPVREDGTQKWVDFAASFWHVDCVRSMSQTAFTERYRKWCKQHRYNFSGDKAAEIHAEAQDQIAILPRDAVTRLMIRQAIDALNAVSATLEKLKAEMLALASQLPEFPVVMNMRGVGDSLGPKLMAEIGDVTRFARRSAITSFAGVDPGADQSGGHEAKSVPTSKSGPPELRKALFLVMDCLIQTKPQDDPVYLFMDKKRSEGKPYLVYMTAGANKFLRIYYGRVKEYLDKLEEPSSTDPTQPS

SEQ ID NO: 75142 - protein, 405 aa, unidentified
MEIIIEKGCGLDVHKGTVVACIMGTGIKKEIRTYRTMTNDLLKLKGWLQESGITHVAMESTGVYWKPVFNLLEDSFEVILVNARHVKNVPGRKTDVQDSEWLCKLLRSGLVSGSFIPPRDIRELRDLTRHKRKLIQAIVSEKQRVEKVLEDANIKLSSIASDTFGASGKKIIEELIKGELQAEAMADLSKGRLRRKRGDLKEALVGQVREHHKFMIKVSLKHIRAMGKILSEIERKIQEKINRHYKEEYELLQTIPGVKGEASTLIAEMGVDMGRFPSEGHLSSWAGMSPGNNESAGKKKPGSTTYGNKCLKTMLTEFGWVASKTKDTYLRSKYHSLVGRRGKKKALVALGHKILIMCYHILKDRCAYKELGVDYLDKRRKDKIARSYIKRLNHLGYEVTLKEAA

SEQ ID NO: 75143 - protein, 475 aa, unidentified
MIKSVGIDFHQGKHIVRCLDEKAQLCDSFNFETTAEGLAILEECVFKDGSNPVIVFEPAGLTWLILAICLRAHHPECRLVRAKGQKVAALRRYLRGSSKSDRLDALTLAKMPFIDPEQLDEVYLPPAKIYALQRLARQRKRLESEIGGRKMRIGAIVDGYLPRVRQAFSNPWSCQARAFLRCRLNPMAVVRDGEKALHSFLARARHSNKADVVESHQVYVACESAAVLYQLSSPAGVVDDEFFSVLQEEIARELKLMEAEEAESEAVAKRMQDLYQELHPSDNLRTIPGVGEITAPVFLATVGDPGRFHNQSAFANWTGVVPRARQSSESEAKGLRMTKAGPAVMKWALFQAGDIGRRFDPQLASVYYREMVYHGKNHKQAMGAVMSHLGARVLRVLQDDRPYQLRNNEGKPISRAEARKLILLNYQVPENIRRERRRRNPAKRGLIRTGGMAVRRTNEAAIAPQPVKTAAIPEN

SEQ ID NO: 75144 - protein, 371 aa, unidentified
MLMLAEPSPGTQVPTVAEVYRFVVGVDTHAKVHQYAIVEAATGRVLDEGGFPTSGAGLARAAAWIARRTGGNLDSVLVSCEGTGSYGARLAKLLGEAGYRVVDAPSPKRDRGQDKDDTIDAIKAARNVLGKRVDRLADVRAGELQEALKVLLAARDRMATESTRSVNALTALLRGVDLGVDARRKLTATQIRQVARWRTRSESPAAAIARAEAVRLAARITQLRVELAANKTQLRQIVAAHAPVLLDTYGVGPVNAAIVLSVWSHHGRIHHEAALAKLGGVSPIKIESGDSTEHRLNRGGDRQLNRALHSIAKTRMERDPHTQAYVELRTKQGLSKRRIRRCLKRYIARQLFRTLANTNTDQTHHVMPSAA

SEQ ID NO: 75145 - protein, 381 aa, unidentified
MNAPSARIGDCRVQANRQKKEVNNEMAVYVGIDVHKKYCQAALMNDNGRITHELRFDNNQQGATSLVDLAKSVDPQIKAVLEPSANFWIRIYDKLEDEGVEVKLSNPLRTKAIAEARIKTDRIDAKTLAFLLRGDLVAESYVPSRKNRERRALIRHRASLMRIRVDIKNRVHALLDKHELTHSYSDLFGKEGTGWLRSLQLPTPDHQILQSNLQVLETVNAEVRNADIQIAKDATTEDQAKLLMTMPGVDYYAAMVLLSEIGDVHRFNSDEKLVSWVGLAPQVHQSGETNWTGHITRKGSKRARWILGQCAQSARQHDPRMREFYERIERKHGHQKAIVAVARKMLAIMYVMLIRNEPYRGENPELTEQKHKRLDTLANSA

SEQ ID NO: 75146 - protein, 358 aa, unidentified
MTTTAMTTAVDQPIRTITVGVDTHSKVHHAAVLDDCGAMLGERRFTTDVRGYQELLDWAADFGIINAVGVECTGSYGAGLTRHLLAAGVDVVEVNRSHALVRSRSGKSDAIDAEAAARKIMSGECKSPAKDTSGSVEAIRNLHLVRDSAVKSRTAALVQLRDVLVTAPDELRHRLDAKTLQAKAMQAKSLRPDMARLHEPEQAVKYALRDLGRRIFDLTVEINATDKHLTRLATDVAPTLMALPQVGPVSAAQLLVTAGQNIERFPSEAAFARLCGVAPIPVSSGKTSRMRLHRGGNRQANKIIYLIVICRLRYDPRTQAYRDRKRALGHSTADAIRSLKRYVARELYYALKKDLTMA

SEQ ID NO: 75147 - protein, 350 aa, unidentified
MTVTIVDAARPVTGGVDTHLDVNVAAALDAIGGLLAVAEFPTTSAGHRELLGWLSGFGPVARVGVEGTGSYGAGLARFLRSAGVAVVEVDRPNRQARRRSGKSDPLDAVEAARAALSGRACGVAKSRDGNVEAIRALVVAKRSARSAKIQTLNQIRHLGFTAPEQLRQRLAGVSRHHLAARAAALRPSQQEGADPVVAATKTALRILGRRVLALDEEKARIDALLSTLVAQTAPQLLGVFGVGVDTAAALLVTAGDNPGRLRSEAAWAHLCGTAPIPASSGKVTRYRLNRGGDRQANCALWGIVITRLRNDPRTKAYMDRRLAEGRSKPEVIRILKRYVAREVYHRLPRP

SEQ ID NO: 75148 - protein, 534 aa, unidentified
MAGTTNTKRKTRRFRSKSRNRQSLQKPNGVISPRVAKVGGDRFAIVCIDPAKHRSEWMMADYFGNMIITARTLEHQAGFFKIAFALIREAQEKHNIEDIIVSVERTGNYYLIPKRAFAKAGYEVRVVHPFATKQYRMPADPGNKTDETDLYAQHRAAVAGFGLCELELESPYRELQLRVRHRRNLVEKASSIACQIKDHMHLCLPGYSTLFDHLFEHQAAMVIARNCESPAKVFELGHEGLRKLLREHAVRYQVRTVDKILAWASQAEVDSIQSGPLHHAVWTDLEDLYQRFRRQAFEVKREFAHDLVKTPYVRLLAMPGINVVSAAELAGELGPIRRYANANAITGRAGLFPSRSQSDQTDNSGPIIRQSNRRIRRVLMRIADNLACHCAYYRGQADADQARGMHVRMSRVKTAKKFTRVAFQCVAGDQPMKHPAFQQPNSIIEKLREFHHVHKTPLDQTLADLETVVEQLPYNTRHHEAEVVSEVLRQNAKRKRGTPAIGALLPAVLARLGVSLDEAEPANNETETEIRDRS

SEQ ID NO: 75149 - protein, 343 aa, unidentified
MHTITTIGLDIAKSVFQVHGTDAAGQVVIRRQLKRRAVLAFFQKLPPCLVGLEACASSHHWSRELQALGHAVRLMPPAYVKPYVKRQKNDMADAEAICEAVTRANMRFVPTKTPEQQGCLMLHRTRHLFIRQQTAVINSIRAHLAEFGIVAPVGRKGVMELLQVVADPSDKRVSEVARACLAALGNQLLGLKEQILEFDRMIMAWHRSNEPSKRLRYIPGVGPMLATALVASVADPKTFRSGRNFSAWIGLVPKQHSSGGKDRLGSISKQGDRYLRSLFVAGALSVIRYAKIHGTKHRPWLTALLARKPTKVAAIALANKLARMAWAMMARGERYRNPVALAA

SEQ ID NO: 75150 - protein, 457 aa, unidentified
MSNKLRIKKKTKKFKTADLPIELKHVNLDAAGIDVGSDRHLVAVPVGRDEVSVREFGAFTTDLHALADWLKKCAVTTVAMESTGVYWIPLFEILERRGFEVKLVDARKTKHVSGRKSDVLDCQWLQTLHTYGLLTAAFRPADEICVLRGYLRQKEMLVQSSSMHIQHMQKALQQMNLLLHNVVTDITGVTGMSILKAIIAGERDSKALARYRDERCRNSARTIAKSLVGNYRQEHVFALTQAVELYEFYQAKISDCEKAIANFLAIQETQTEDEPPPSQKNIPPRQRIRAGVDLRSRLFKLTGVDLFSIPGLGADTILTVLAEVGFDMSPWKSEKNFASWLGLCSGTKISGGKVLDRKSKRSANRAAQAFRLAASSLTRSATALGAFYRRIKARIGAPQAITATAHKIAIIFYQLLKCRTAYVEIGQQAYEQKFKERRFKAMQKQALAMGYQLIPAA

SEQ ID NO: 75151 - protein, 341 aa, unidentified
MKHYAGIDVSLECSSVCVVDTNGKILREARVASEPEALIAWFASLGFGLERIGLEAGPLSQWLFAAMRQAGLAVELLETRHVRKAFEAMPVKSDRNDARGIAQLMRLGWFRPVHCKSMSAQETRTLLTARKLVQSKLRDVENSLRGILRGFGLKVGKTTEREFAGRIEELVAGHPHLQVIAKALLSVRAVLRSEFAAFEKQVRKMARSDMRTRLLMSTPAVGPIVALTYASAIDDPTRFKSSKQAGAHFGLTPKKYQSGETDYTGRISKIGDASVRTALYEAAHVMLTKPVKGCSQLKSWAMRIARRTGMSKAKVALARRLAVILHRMLADGTPFNAAAAT

SEQ ID NO: 75152 - protein, 383 aa, unidentified
MEVVHERCAGMDISKRDAKVCIRTPGARPGTYRKQLSVHGAMRRDIAALREHLLAAQVTLVVMEATGDYWKPFYYALEDDLNLMLVNARHAKNLPGRKTDVSDAQWLTELAAHGLVRGSFIPPWPIRRLRDLTRQRTLLTTQKTRETQRLEKLIESTGIKYTSVTTRTLGVSGRAFLEALIAGETSPLVLAGLARGRLKNKTGQLRLALDGNFTNHHGQLVGLYLDRIDVLDRHITALTRMIDTLVTDYDLAWARGLLVTVPGLSTTGAENILAETGVDMTAFETPAHLASWAGVCPGQHESAGRSGPGKTRPGNAHLKGALGIAAMAAARTNGSFFQQRYRRLSARRGPTRALVAVEHSLLVAIWHILTDHEPYRPHRPKAA

SEQ ID NO: 75153 - protein, 373 aa, unidentified
MPKYSTAFGMDVHLRSTTVCALDADTGEAVTRRFPGNPWGEIAGWMDGFPGPSLAAYESGYLGFAPQRELAGLGVECAVAAVSKIPRSAADSASKNDRNDAARMAKAILAHDISPAWAPSPEVEGIRDLAGAYDGATARLATAKQRLLAFLARRGFVYGGTTPAGNPRKYWTYDFLRWLDKVRPEDDGGVRTLAALRNEVEAAAEARADLLSEYRAAVDASPIAAEVAALQSVKGCAFALAAAFSAEVGDFTRFRSGRQVTAYFGLAPSQRSSGDSVRLGGISGAGNALVRKLAVEGSWCYAAARHQPKLMPRDTGVPLEIRMHGRKGSERLLRRREEMLARGMPAAKANAATAAELVRWLWALGMMCREGAE

SEQ ID NO: 75154 - protein, 355 aa, unidentified
MTSTKYIGMDVHKESISIAVMNSIGKIVMECVIETKASMILQFIDGLRGDLQVTFEEGTSAAWLYDLLKPRVTKLVVCDPRKNKSMREGNQSDKIDARRLAELLRLHHLTPVYHGEHGLRTLKELVRSYLTITKDLARVMTRVKAIYRSWAIPCTGKQVYARCHRAEWLAKITEPGVHRRAEFYYQQLDALRLLRQEARRDLLAESKKHKAWKRLCQIPSIGPIRAAVLLGILQTPHRFRTKRQLWNYGGLAIEMHSSADHRSVDGQLQRSRKNVLVRGLNRNCNHDLKNLFKGAAAVASSKPGPFEQFYAALAAKGMRPEMARLTLARKIATIVLIVWKRGVCFDAQHLKPQTA

SEQ ID NO: 75155 - protein, 355 aa, unidentified
MDSRKYIGMDVHKESISIAVGNAAGKIVMECVIETKASMILQFIGGLRGDLQVTFEEGTWAAWLYDLLKPHVTKLLVCDPRKNRSMREGNQSDKIDARRLAELLRLDHLNPVYHGEHGLRTLKELVRSYLTITKDLGRVMSRVKALYRSWGIPCTGKQVYTSRHRAEWIGKISEPGVRRRAEFYYQQLDALRILRQEVRRDLLAESKKQKAWKRLCQIPSIGPIRSAELLGILQTPHRFRTKRQLWTYCGLGIETHSSADHRMVEGQLQRAKKQVEIRGLNENCNHDLKNLFKGAAVVAATKPGPFEKFYAELLAKGMRPEMARLTLARKIATIVLIVWKRGVSFDAQHLKPQTA

SEQ ID NO: 75156 - protein, 347 aa, unidentified
MKQVTYVGLDVHKKSITAVFGPVKTKPESMKVTNDSKGWTRLTERLKTWDAQAVYEASSCGFEVYDEMTARGWSVVVVAPSLMSKSSKEKKNKTDLKDAVELRSRLVAHRVAGASLPTVWVPPVQVREDRELVRRRLGLGEKAAGVKAEILSLLQIHKVRSVEGTAWTKAHMGELWALCGQTSRLGAPVKRALESQLRELEFLMAETARVEKAVEALAQEARHQAQVRELRQVKGVGTLTAMTFLTELGDASRFSNRRRLANYLGLTPSSYESGEAADRKGHITRQGPPRIRKILNQAVWSRVRWNPEARQRFGRLAARTGVKKAIVAEMRKLGIELWHRAVAAIAA

SEQ ID NO: 75157 - protein, 451 aa, unidentified
MKKKNEKTKIVKVSSGLPVLYAHAAGIDIGDTEHYVATPDGKGGHEVKCYDAFTCELRNVVSDLKEKGMTTAAMETTGVYWLNLYLLLEEAGIEPWLVNAKHVKNVTGRKKDDTDAIWIQKLHACGLLQKCFQPDEQVRILRTYVRQRKNLITICSDSVRRMQKALELMNIKLHTVISDILGKTGMQMVEAILKGERNPEVLAELTDPRIKATRETIIKSLEGIWKDEYLFMLQQAHEEYLFYQKQIKCCEEKIRKQLLQQVAIVNEGDISAITWQKEVKKKVRKNQFSFQVTPYLKAMTGVDLCKIPSVNEITALELISETGVDMNKWKSAKHFAAWLNLTPNTKITGGKIISSKVPKKKNKAGQCLKMAASSLSKSKSPLGDEYRRMRAKFGGKGAALAMAHKLSRIIYTMLKNKTEYNAEIITGNQKKWREQKIKRMEKQLEKLKKTA

SEQ ID NO: 75158 - protein, 410 aa, unidentified
MEILHPHCAGLDVHKESVVACVRHVADSRVTSQIKTFKTTTQELMALSEWLSTEGITHIAMEATGVYWKPVWHILSDGEFELVLANAAHVKNVPGRKTDVNDAVWLADLMAHGLIRTSFVPDEPTQQMRDLLRTRKQFVRERSSHTQRIQKTLEDANIKLDSVVTDILGLTGRRILQALIDGQTAPHALASLAHWRIEATPAELEASLRGRVTAYHRFMLKLHLDQIDSFDAAIARIDKEVDANVEPFRAAIQLLTTIPGINSLSAETIVAEIGVDMSRFPTPGHLISWAGLCPRNDESAGKRRSTRMKKGAPWLKTTLIQCAWAASRKKNSYLQTQYLRLRSRRGPKKAIGAVAASILTAAYHMLKDGTIYQDPGPNHFDNRAKAKHALRLVNRLQTLGFNVQIAPSTA

SEQ ID NO: 75159 - protein, 385 aa, unidentified
MNRELCLKTDSSPYLDTLAFLNGDLYKKLTFLLLRFLGDVQYPFPLQIAKHKDMENFYFIGVDVSKKKLDFCVLLNGTIVLEEVVNNNIPSIRRFLETFLVDFKTSIDNLLVCAEHTGQYTFPLSIACQSLSCGLWLENPARIKYSSGFSRGKNDKVDAHRIARYASRFSDNARYYQRPREEIERLKQLRNEQDLYKSDLAKYKGQLSDQREFMLDRVYQEKAQRLERLIEELEKLIKDIDLLVETIIRSCRVLWRQRELLLSVEGVGPSVALCLIIETEAFTRFDDPRKFACHAGVAPFRYTSGSSQHSRNKVSQRANKQIKTLLHMAALSITGRKSGELKAYYERKVKEGKNKMTVINAIRAKLIARMFAVIKKDQFYTPVYS

SEQ ID NO: 75160 - protein, 345 aa, unidentified
MAAYVPIDLHRHRSVVMHMADDGEVLGWTRLANDPETLVAEVLKAGEAPEVAIEATYGWYWAVDALEAAGANVHLVAPSKLTAFEGRRVKNDQRDCKVLGDLLRSGMLPEAWIATPQVREWRELVRYRAKLVALRTGFKAQAHAVLAKHGLAVPMTDLFGVGGRQLLAHLCTTDDRFHSAYGQRLESLVVLVDAFDSEIDDLTDSIAHLFRDHVGYRAIQQVPGIGPIIAAIFVAEIGDVHRFKSAAHLASWCGLTPRHRESDTTVRRGPITKQGSKLIRWAAIEAAQRLGHDTWLHAERERLAERRNSRAIAKTAIARKLITLTYYGLRDGEIRCLNQPTSRAA

SEQ ID NO: 75161 - protein, 413 aa, unidentified
MKVTYQTCCGVDVHKSFLVATIITTTGGIEPSYQKKRYSTFNNSILEFKQWLLDNDCHDLCMESTGKYWIPIYNVLEKDCNIVLAHPKYVKAIRGKKTDKKDAKWIADLFKHDLVAGSFMPPADIRQLRDLMRYRFKLTCFMSSEKNRLQNCLTVSNIQLASVVSDTFGKSSQRILDKILENPDDTSFDIEPLIHGSMKKKLPELELAIDGFITPEQAGKLKVIKKHFEDLESRKAELEKLILALASPYQQELDLILTAPSFKNKFTAIGIISEIGVNMEAFPSAKHLCSWAGLTPTNNESAGKKKSVRVSKAGCYIKPLLVQCANSVVKSEKHPEIRNRYLRLRKRRGHKKAIIAIARMLLTALYNMLKNKEPYNAELYRKSDVLPVNREITIEQAILMAQFQGYKIKSAAE

SEQ ID NO: 75162 - protein, 410 aa, unidentified
MDVIYPRCCGLDIHKKTVVACLMTSEAGQPPAQTIRTFSTMTADLLALVDWLHAAGCTHVAMESTGVYWRPIYNILEGLFTLLVVNAQHMKAVPGRKTDVKDAAWIAELLRHGLLRGSFIPSKPQRQLRELTRHRTTLVQDRARVINRLQMILEDANIKLASVVTDIRGVSARAMLEALIAGERDVAALAELARGRLRTKRDQLAAALRGYFAPHHSFLVTEYLSQIDYLDEAIDRVTAAIDQHLIAEQEAVTLLDTIPGVSQRTAEILLAEIGTDMARFPNAKHLASWAGMCPGHYESGGKRLGGKTRKGNRWLRQALVEVAHVASKMKQTYLGAQYRRIAARRGKKRALIAVGHTILSLVYTLLTRKQPYRDLGATYFDTLDQHRVERRLVQRLERLGYQVSLQPHVA

SEQ ID NO: 75163 - protein, 469 aa, unidentified
MVQSLLNHIQGKNGSRWANFLRNIGSENILVVAIDAAKYTHKAMICNFYGDILVKPFELDASDTGFKKLKQKIHQEKEKFPYKEVVFGIEATGLYYEDLVRRSYKEKYFVRILNPVITSIERTSLLNRSKTDNLDLMAIVNCLIRGRGTSSPLASGSVRSLQKLTRARRALVQEKTSVQNHIRTYVDYIFREFQGKSIWVHGKKERVKPFTDMFGKTSLYIMRHCLHPSDILRLGKDGLRKLSIRENLKLRDSAVECLLDFAENSISQAKECVQSEQILLNMKLDQFSLLEKQIKELERKIEDLFIKTEGAIILSVPGIGLVTGAELFAEMGDISDFEHSGQLIKMAGTNPIIKQSGDRRPSHYRVSKEGRKSFRNIVYQTGKSLATNNPEMKQKYKALLDRGKATRQAYIAIGNRMLRLAFSMIKYQTLYRTDEENYVLLDQLNKKLHSASVQYFFEKFVSSTDYQSA

SEQ ID NO: 75164 - protein, 322 aa, unidentified
MATLSFCGIDVSKDRLDAMVLPEQQSSCMGNDPAGWAQLVEWLSDFSIAAIGLEASGGYERGVMRALLAAGLSVRQINPFKLRQFANASGVLAKNDRLDARMIASFIAVMPTRAAQRRTPGIEQMSEIVTVRRHLSDQKIAAENATKLLEDAMLQRLSRRRIAQLASDIAQLDNRLAEIVAADSALSRRYQVLTSMPGVGLVLACTLIALLPELGRMSRKQIAALVGVAPYDFDSGKLKGKRCIWGGRAPVRHVLYMAAMSAGNWNPTLKAFRHRLKTAGKVPKVTIVAVMRKMITTLNAMVRDDVAWADHLAGRRSAPTAR

SEQ ID NO: 75165 - protein, 338 aa, unidentified
MKLCGAIDLHSNNNVTVLIDEQDQVVYQKRLPNDLGAIAQQLAAYQSSLEGIVVESTYNWYWLVDGLMDKGHHMHLANTAAIQQYEGLKHTDDTSDARWLAHILRLGILPEGYIYPKEERAVRDLLRKRGQLVRQRTANLLSIQNLITRNTGSSMSSNRIKTLQPQQVDELLADGDLVLAVKANVAMVQCANGQIEILERTVRDRIKPRPEFCFLKTVPGIGQTLALTIMLETGDIARFAGVGNYASYCRCVGSQKLSNGKKKGKGNTKNGNKYLSWAFVEAANFAIRFSSRINSFYQRKKAKSHGVVAIKAVAHKLCRACYYIMKNRVAFDVTKAFA

SEQ ID NO: 75166 - protein, 341 aa, unidentified
MKHYVGLDVSQKETSICIVDETGRPIHQGRVKSDPGVLAAVIAKKAPNAERVGLETGAMSSWLWHELKRTGLPVVCIDARHAHAALSVRMNKSDENDARGLAELVRVGWYREVAVKSEESQTARSILVCRSRLVRVRRDLENQMRSMLKECGLLFPRAAGRQFQRRVNDLITDGHALGPILRPLLSVHQQTCSELEKIDRIVRDLAREDETTRRLMTVPGIGVVTALTYRHTIDDPTRFQNAAKVGAYLGLTPRRKQSGEMDVTGKISRWGDRLLRAYLFEAASVLLHRTKRWCSLKAWGLRLAKRSGMKKAQVAVARKLAIILHCIWVDGTEFEWGKQPA

SEQ ID NO: 75167 - protein, 460 aa, unidentified
MREKQNEEPSCRRQLQGLPLIRWKVAGIDLGSERHWVCAPTVDGNAREVADFGATTPELIRLAEWLKARHVESVAMESTGVYWIAPHEILEAQGLEVLLVDTRQLARVPGRDKKTDPSDCEWIQRLHSCGLLRGSFRPQEAICMLRTLVRDKATLVAESGDWVRRMQKSLDQMNVRVHRAVSDIDGVTGMAILRAIVEGERDARKLAQLRNPHCRKSEEEIAEQLSGHWREDHLFSLQQALKMYDAIAERIAAYEKQIQRKLDEMEPEQRHGTTAPPLSNANKARGIKRRGQEPMRQALYRMSGVDATQIDAIGVETIEVILSEYGPDLSRFPTEKQFVSHITLAPHVPKSGGKPLKKKKRHSASTRVANVLRMAALSLRHSDTALGAYYRHLAQRLGADIAVFACARKLATLIYRLLRWGQPYIDEGTETYEKRFQQQRVRSLGSKAKTLGYKLIPISL

SEQ ID NO: 75168 - protein, 341 aa, unidentified
MMIIGCDFHPRFQQIAFLDQDTGEHGERRLNHPGEAERFYRSLVGRQVRIGAEATGNFRWFRHLMEELGQEFLLGDATAIRAACPRRQKTDKRDARHILNLLVEDRFPVVWQPSAENDHVRQLLLHRCRLVRMRTRVKNQLDSIAKNEGLLSSRVWSPRRRSEIEALPLPGWYAHRRADLLGLLDELDARIRPLDEAVQEAAEDNQEARLLMTHPGVGPIVSLAYVLTIGDWRRFPRGKQVGSYLGLIPAEESSGSKRRLGQVSKQGNTLLRWLLVEAAVHAQRHDASWHRQYVRLSMTKHHGVAKVAIAHKLAVRLYWMLRSAQNYEQVMERGSHAGQSV

SEQ ID NO: 75169 - protein, 399 aa, unidentified
MESEIFLGIDVGKTEHHATAVNHNGDVVYDKTLPQSEPKIRQLLEEFSSKHGQVLVVVDQPKTIGALVVALAQQLGSQVAYLPGLTMRRVADLHPGQAKTDARDAYIIAETARTMPHTLRGITVAEEQIAELSMLCGFDDDLAAQLTQVGNRLRGLLTQIHPALERVLGPRLHHPAVVDLLGRYPTPAGLARAGRGHVRTRLKKFAPRLAGRLTEEIFDALAQQTTTVTGTNVAEHIIGRLAAQLQQLTQQRNDIEAEILLVVDAHPLTQVLTSMPGVGVRTAARILTEVVGKDFKSAAHLASYAGIAPVTRRSGISIRGESPSRRGNKVLKRALFLSAFASIKGDPASRTYYDKKRAEGKRHNQAVIALARRRSDVLFAMLRDGTFYESRPTQPATAA

SEQ ID NO: 75170 - protein, 473 aa, unidentified
MEATKRLTRKQKNELGRRIWSADPGLEVVHRDVAGIDIGSRQHYVAVGPDRDTEPVRVFGCFTADLQGMVRFLKGCGIKGVVMQSTGVYWIPVYDVLEEAGFEVWLVNARDTKNLPGRKSDVQESQWLMKLHTYGLLRRSFRPTPEIRAVRTCWRERAEYVQQAGMCMQRMHKALTEMNIQIGTVLSDLSGTTGMGMVRAIVGGERDANNLADFRDPRVKASRETIVLSLQGTWQSEQVAILKRQLADWDHVQKQIRACDQDRKALMRKLPDAQVAPGDRPPAPEQPGKRGHKKNGKSSRNEPGFDLAAELKRVTGVDLTRIDGVKVNTIQTVIAEAGLDMSRWLTENHFVSWLGLSPRNDTSGGKVLNRGTRKVVSRLATALRMAASSLRNSDSYLGAQFRRLRTRLGAPKALTAMAAKLARLIYRMLRYGQEFVEKGAAAYEKKYCQQQIELLAKKAAQHGFALVEIGQPA

SEQ ID NO: 75171 - protein, 412 aa, unidentified
MEVVHSRCCGLDVHKKSISACVMIREQGRVEKLERRFGTFTRDLEHMAEWLAEQQVTHVVMEATGVYWKPVWNVLEGRFELMLVNPEHIKALSGKKCDRRDASHLADLLQHGLLQGSFIPPAEIRQLRDLTRNRARTVQEAARIKNRIQKILEEANVKLGSVATDVLGVSGRLILKELVSGEQDATKLADLAVGVLRKKRDQLAQALSGKVNDHHRLMLRKLLRALKQREAEIADDETDIRRQIEPFRKAVLAWTQVPGIDEITAWSLVAEMGADMAPFETAEQAASWSCVCPGNHESAGKQRDGRTRKGNPWLRSAICEAAWGASRTKKSYFHAQYARICVRRGPKRALMAVAHSMIVVGFYLIKYDLEFKDLGADFFDRRNREHATRRAVKRLIALGYKVHLEEEVSVPS

SEQ ID NO: 75172 - protein, 340 aa, unidentified
MKHIGMDVHSTTTDACVRNDKGIIVLRSRMATRQKELEGFIESVKGQKRVVLEEDQMADWITRVLQPHVDEIIRCQPQYNKLISNSEDKCDKTDAESLSELLYLNRLKPVHHPEEKYRILREAVRAYWIASADLTRAKNRLKGWYLFNGLHETGRGIYSSRNRSRRLRSMRQQGRNVELAGLLYEQMDSCRQLKAKHIRMLRKVAQPVKELVNVVTTIPGIGLISSYTLVAMLEDGWRIPNKRKLWRYAGLSLRRYESRDIGFKGASKSGNRLLKRVVMSAAITIVSRGEPNGLLALWEKDIRCKVEPKRARRNLARKIVVIAQRLLRAKQEYIDERIKV

SEQ ID NO: 75173 - protein, 343 aa, unidentified
MDQYVALDVSLQKTAVCVLNVSGRVLIEADVPSEPAALIAFIQTHAPGAARVGLESGPTSPWLWHSLKAAGLPVVCMDARHAHAALSVRPSKSDRNDARGLAEMVRMGWYREVQVKSLAAHERMALLGVRRRLVDMRVEIDGQIRGILKTFGLVVGRGNKGAFAQRARMLAQDHPVLSALIDKLIEVREVAVAKVAALDKEIRRFVRDDLTLRRFMTVPGVGPVTALAFRSTIDEPNRFKRARDVGPYLGLTPRRYQSGETDRQGGISKCGDRFTRTCLYEAASVLLTKVQRWSPLKAWGTRLARRIGSKKARVAIARKIAVILRCIWTDGTEFWWTKETATA

SEQ ID NO: 75174 - protein, 317 aa, unidentified
MLLDHPSDRPAAIRTQFGAIFVSLELSRSNWLITSLSPGTGEKMSKHSVTAGDIAGLLQLFAELKRKAQARTGQIYPIITIQEAGLDGFWIHRVLEQEGIESHVVDPASIATPRRRRRAKTDRLDGEALLRALLAYERGEPRVCAMVVAPTPEEEDRRRLCRERGTLIAERIRHVNRIKGLLFAQGASDYAPLRRDRRARLEALRTGDGRLLPSHLKAQISRELDRLELLLEQIKQVEAEQDALLAAAKNAAEAKEPVVETLLALKGIGANFAAVLWLEAFYRQFANRRKLAAYAGLAATPWRSGGIEQEQGVSKAR

SEQ ID NO: 75175 - protein, 395 aa, unidentified
MAVLDADGSVLARARIDTGATGFSRLMSLLAEHVDDADQLASVPIGIETDKNLLVVALQAAGMTVFAINPRAVARYRERHGQSGKKSDPGDAFVLADLLRTDRHQHRPLPSISVHASAIKTLARQHQDAIWSLNQTVSRLRSLLLEFYPQALRAFPNLKQKAALAVLSAAPTPEAGLRLTARRLATLLRRCRRRNDPSLAEHVLSALHSPALRQPTAVEAAYGVTAQTLIAIVVAMQTAVEELEQALAAELDQHPLATILRSAPGLGPVLAARVLAEIGDDPTRFTTAAGLRAFAGTAPVTRASGRSRYVKARKVRNKRLGDACHWWAFVTITKSAGARAHYDRRRAAGDHHNAALRNLANKLIGRLWWCLQHDETWNENTAWNIDIATPDPRTA

SEQ ID NO: 75176 - protein, 383 aa, unidentified
MFHSPSADASFSDSTHTIFLALELSRRSWLVALHAPDAAKIELHRLPAGDGQAVLDLLARIQTRVERRTSASPHVSCCYKAGRDGFWLHRLLEAHGVSSHVMDPSSLQVDRRARRAKTDRLDAQALLRALMAWSRGEPKVCSMVRPPSPDEEDARRPSRERATLLQERIRLVNRIQGLCATQGIADYEPLRPDRRRRLPQLITGDGRPLPPRLSEEIAHQLDWLELVLRQLAEVETRRDAEAAAAKAATSSKLGALLHVKSIGPELATVLAKEVFYRCFASRRHVASYVGLTPSPFASGRRSREQGITKAGNARARKALIELAWLWVRNQPDSALAGWFRSRVGSATGRVRRIAIVALARKLLILLWRYVETGALPADVVVKP

SEQ ID NO: 75177 - protein, 422 aa, unidentified
MLAEARDDEVIIERIAAVDVGKAELACCVRVPDERRPGRRLQEVEVYPTMTRSLLRLADRLRCLGVTRVVMEATSDYWKPVFYVLEAAGFETWLVNARDVRHLPGRPKTDKLDCIWLCKVAERQMIRPSFVPPPPIRRLRDMTRYRIDLVTTRTAEKQRAEKLLEDACIKLSVVASDIFGVSGRAMMASLIAGERDPKVLAQLARTAMRRKISALEEAFTGHFTDHHAFLLAKMLARVDALDADLAELDAVIEQMIAPFASAAERLDEVTGIGPVAAAVIIAEIGTDMTRFPTSGHLVSWAKYAPGVKESAGKKKGAGTTGHGNPYLARVLGEAAIATSRTDTFLGERFRRIARRRGSKKAIVAVGRSILVIIWHLLSDPTARYADLGAGFYDARISHSRKTHNHVRQLEALGYKVSLEPAA

SEQ ID NO: 75178 - protein, 384 aa, unidentified
MTVPAQFVPRNYDVFAGLDVDKKSMAVIFTDHEQLMQSLRLPYSAAQLLNYVRKRFPGQRLAFVYEAGPTGFGLYDELVAAGHPCLVVAPMVPTAPGARVKTNRLDARKLSTALRGGELKSIHVPSPKYRELRHLVQLRDTHVQQLTATKCRIKALLLYEGIAFPADEGKEKQWSQRVLDELLALPCSEAVRFKLDQLIGTLHFNFKAAAAAQKQIRHYCKKDQELRRSIAWLKSLPGIGEIVATHLVARLGDPVLITNVRQIAGFLGLASSEHSTGDKQNRGEITRAGDSRLRNKLIQSAWVTIRRDPELREFYQRVYQRHPKKVAARKAIVAVTRKLTTRIYAVLKEQRPFVLREVSTAPLTTEETAGHRERLDGQQNEQPR

SEQ ID NO: 75179 - protein, 323 aa, unidentified
MSVFVGVDVAKKTFDIATPLPNGKTRTKAKLSNDPGGFKQFCDWLERHAEPGAWILMEATGTYHEALAEHCHNQGYRVCILNPAVIAKFADVELRRVKTDKADAKVIAAYGQQKAASLRQWEPEPPAQRRLRALVRRLDDLKEMRQMEQNRLDVAQDAVQQSIQDVIGHITEELEKTRKAIEQTIDDDPDLRKRRDLITSIDGLGDTTATLLLAELGDPLKYQSPSAIVAFSGLNPVVQQSGEFIGQSTISRTGASRLRAGLWMSGTVSIRHNPVVKALAERLNSRHKAYKQIVCAAMRKLLHLVYGVVKSGIPFDPKIALAG

SEQ ID NO: 75180 - protein, 330 aa, unidentified
MNFKEFIGIDVSKSYFDVFIYSKKLHLRFDNTASGFEQMIAWISQQIHCGSNEVLFGLEHTGLYSVSLSIFLNEHQYTFCMIPGLELKRSLGIRRGKNDKIDAYAIAEYLYEKREKLKPYVLADQRQLILKRLLSYRERLVKERAAFKGRFKEYKSVLNQQDHLVLFESHQRMLEFQNEEIKKVEAELYRLIKEDEQLSKQFDLINSIKGVGPQTALLMIVLTRGFTSFTAWRKFASYSGIAPFPHESGTITRRKKVSHLANKRIKALLTCCACTAIQYNPEMKLYYHRRLREGKNEMSTINIIRNKMLARIFAVVQRGTPYVETYKFAS

SEQ ID NO: 75181 - protein, 342 aa, unidentified
MKITTIGIDLAKTVFQVHGVDAQGKTVLRKQLKRDQMAVFFVNLPPCLIGMEACGSAHFWARKLQELGHTVRLMAPQFVKPYVKTNKNDVADAEAICEAVSRPNMRFVAIKTAEQQSVLALHRARQGFVRARTAQANQIRGLLGEYGLILPLGIHYIAQRVPALIEDGDTPLPGQFRHLIQRLVEHFQELDRQVLELEREIKAWHRANPASCKLEQIPGIGPITATAMVASIGHARQFANGRQLAAWLGLVPRQHSTGGKAVLLGMSKRGDTYLRTLLIHGARAILAHAPRKAAQDSWLLNLVQRRNANVAAVALANKNARIIWALLAHDREFRSEYTPRVA

SEQ ID NO: 75182 - protein, 394 aa, unidentified
MKLVGIDVGKNSHHFCVMDKETGEFNVTPTSFSNNKEGFDFLINSLKPYSKKSILIGMEDTGHYHVALLKFLLSNGYTVALINPKTTDLTRKMEGGITKNDKLDTITICDVLDTPERKKQYRITKVDRFDLYKQRQLTRHHHNLKEELNVYCNRLQKSIDLVFPEFNTLFSSKYSIVYMNLLKTFGSAEAIASTDIRTIRKCFEIKGRGNRISLTPEKLKECAKNSIGISSEVETIQIKHLVSQITLIKEQIAEIDKKIEEFSIPNNSPILSIPGISHFSGTSILAELGDIGNYSKPSQIIKFAGVAPYHYESSQYNAQHTGITKKGSKYLRKTLYQIILTVINNNPVFKKYYRLKISQGKGHRCAQGHCIRKLLRIIYHLLETGQSFDPALLR

SEQ ID NO: 75183 - protein, 337 aa, unidentified
MEYFAGLDVSMAETHVCVVTRNGAVVHQAKVPSTPADIAAELAQVPTCRRVLFETGRMAPMLYHGLSQLGLPVVCVESRQAYQALKSLATHKTDRNDARGLAHLARTGFFKPVHVKSLAAHAVRSLIIARKKLVGQRVTLENQIRGLAVVFGVRLPRALSSTFIRQALQASEGIPGLSAAMQGLVAARTAVLAAIVAIDGDIRRMVRASDACRRLMSIPGVGQLTALAFTAAVDDPGRFRRSRDIGAYLGLVPRRHQSGEIDYSGSISKCGDRRVRTLLYEAANVMLTRYKAPLKLKDWAFAVAKRSTMRKARIALARRLAIIMHAMLRHGTEFKPV

SEQ ID NO: 75184 - protein, 420 aa, unidentified
MEELTEEPAELLERVAALDIGKASLVCCVRVPHESRLGARRQEVRTYGTVTPALLELRDWLICQGVTRVVMEATSAYWKPPFYLLEDDIECWVVNARDVKNVPGRPKTDKLDAVWLCKLAERGMLRPSFIPGRPQRQLRDLTRYRRTLTHERTREKQRAEKLLEDAQVKLSSVISDIFGVSGRDMLAALIAGQRDPHALADLARKRMRAKTSVLRQALTGHFTEHHAFLLAMMVDRVDALTAQIDTLTTRIDKAIAPFAAQVAQLDEIPGIGITTAQEIIAETGTDMSRFPTPGHLVSWAKFAPKARQSAGRSKAAATGKGNPWLGGTIGEAAAGAARTSTFLAARYKRVVKRRGKKRALVAVGNSILTICWHLLSDPGAHFTDLGPDWHDRLAPQRRKRQLIAELERLSGKKVTLNDAA

SEQ ID NO: 75185 - protein, 523 aa, unidentified
MITKTRKRKSTGTKKRFIGKPAGQIQERVQAVGPEHFGVVAVDCAKRRSKWMLCNFFGKVVVEPTAVEHSTGGLREMTQLVARTCQAEGLTDVIVAVEMTGIYHKPVQRAFRKGGFDTRIVHPFASSHYRQPLHPDAKTDDHDLEAIFQAAIRGYGLATLPVGEVYQSLQAVSRHRHNLVKQRSRLMVQIRRLLHQTMPGFADLFDEGKLFHHSIALPVALQFPSAEAIREAGVDGISRRLNQIHVSFQTRTIERIVAWAGNATEPSELTPMYTRQWQQLNQVRQMWDEQILATEREMAGFLVKTPYVLLLTVTGINVVSAARFAGEASPIEHYASARAINGRAGLFPSRYQSDEVDHADGSLIRQCNRKLRGAAMLVAENLIKCHPYYRGVAELWKQQKVDPRDRRCRIANRAMRMVYQLIAGRQVWRGKGVDREYLLAKLQEFHRLHQTPIDQSIRDMNEAFFWLPKSAYAMEAKPLAELAAKKHRGPKRIGELLIPLLIRLGVSIEDGVELDTSEARSSD

SEQ ID NO: 75186 - protein, 445 aa, unidentified
MGQRTIGIDLAIRGDHVARIFDDGRPHAKPIRFRLTSESLSSLVARLRERLPADSTITAVMEPTGMSWFPVARWLERAGIKAIRVKGQRVRALRRYLSEHTKTDAADAYVLGAIPWFGGVPVDPVYVPNADRHALQRLTRQRERLEDEVSTIKRRLIDLVRWACPAIEAVLPDFRTNLALAVLHDLLNPMTVIKARRTTLLGFIAKHASGNHPHSGPFAHKLVDGLKAAAMETRRLHGDAVNFEHLQLEAAIEIDRMRLLESQLGTLGREIERLYGKLHPSDALRTIPGIGHALAPLVLGVLHEARRFAGLHQLRGFCGLFPRTNSSGGADQPGQSITQSGNNRIKRALYLAADAARRIDPGLAEVYWRLMVRKGHHHKQALCGVATRLVNRIGKVLRTGEPYELRDTTGKPITTAEGRAIIAERFSIPVEIRNARRRHRAESLS

SEQ ID NO: 75187 - protein, 412 aa, unidentified
MNAVGIDVSKGKSMVAILRPLGEVVAKPYEVNHTAAELGKLANFLKSLDGETKVIMEHTGRYYEPVAQVIHEQGVFVSAVNPLLIREYGGNSLRRVNTDKAASKKIARYGLDNWAELREYTPMDTIRYELKTMNRQFHLASKNRTACSNNLVALLDQSFPGANRWFTSPPRKDGSQKWIDFVMTFWHVDCVRSTRLTGFTERYRNWCKRNGYRSNAAKAEQIHSEAREMIALVPKSATTKLLVQGAASQLLNISRLVEVLRAEMGRLAAKLPEYPAVMGMYGVGESIGPQLMAEIGDLRRFQSKRSLAAFAGVDPMPNQSGTKDCRSNRTSKRGSPYLRKTLFNLMSMLLQLAPTDEPVYQFLDRKRAQGKPYYVYMTAGANKFLRIYYGKVRDHLAALDSASHDPTSANPQ

SEQ ID NO: 75188 - protein, 390 aa, unidentified
MRIMYERCCGLDIHKASIAACALISEKGKPQEETRRFGTMTADLRELAGWLQQKGIRHVAMESTGVYWKPVWNILEPAGFELLLANAQEVKVVPGRKTDQKDSQWIADLHKHGLLRNSFVPPRAIRDLRDLTRTRAILTQEHTSICNRIQKVLEDANIKLGSVASDVFGVSGRAILRALMKEEHDAEALADLSKGLLRKKIPQLRRALEGQVTAHHRSLLTGQWSRMEFLEREIVDLETQIAEGMKPTPEETALTLPNTAEDAPAPLSPREEAIQLWMEIPGVGWTAACSMVAELGVNMDQFPSAAHVASWAALCPGNNESAGKRLSGKTRKGNVWLRRTMCEVAWAASHTKDTYFAAQFHRIASRRGNKRALIGSGAQHSRHGLPHAEA

SEQ ID NO: 75189 - protein, 292 aa, unidentified
MEQYVALDVSLQKIAICVLKASGRIVIEAEVASEPGAVIAFIRSKAPHAVRIGLESGPTSPWLWHSLKSAGLPVVCMDARHAHAALSVRPTKTDRNDARGLAEMVRMGWYKEVQVKSLAAHERMALLGVRRRLVDMRVEIDGQIRGILKMFGLVAGRGNTKAFAQRARMLAQDHPVLLALIGKLIEVREVAVAKVATLDKEIRCFVRADPTLRRFMTVPGVGPVTALAFRSTIDEPDRFKRARDVGPYLGLTPRRYQSGETDRQGKISKCGDRFTRTCLYEAAGALLSKVQR

SEQ ID NO: 75190 - protein, 387 aa, unidentified
MAQVNDLSRSLTAFDPLSTLVVVVEMSKASWLVSGAVPGVERQPLKKLEPDATALLRLIERWRNEAVRAGRPISRIALAYEAGRDGFWLARWLIARGIEAYVIHSASVAVSRERKRAKTDRLDAAMLMRVFLGWLRGERGHCGMVAIPTMEEEDARRPSRERESLVNERSRITNRMKSALARLGVRGFKPHLRKAPERLADLRTAEGTGLPANIIEEFRRDMARLALVREQISSIEKTRAERLERAPDTGPHAMVRLLARVIGIGIETADMLVREILSRRLRDRRAVARYAGLTGSPDESGLKRREKGLAKAGNARVRRGLIQLAWRFLVFQKDSALARWYRMRTEGPSGARKTTMIVALARKLLIALWRLVTTGEVPDGVELRPAA

SEQ ID NO: 75191 - protein, 376 aa, unidentified
MEQHSEVFVGIDTSKLRNAVALAEGARGGEVRYLGEIDTTDTATRKLVAKLAAKYTQVTFCYEAGPTGYGLYRLIKSLGHDCIVVAPSLIPSKAGDRIKTNRRDAENLARQLRAGELTAVWVPDEHHEAIRDLSRAREAAVDDLKSKRQQVLSLLLRLGLYYPGKTTWGKAHRNWLAVQKIVHREQRFVFEELLGAERQAQDRADRIAAAIVVAVPEWSLAQAVTALQAMRGIDLVSAVTILAEIGDLSRFASPRELMGYLGLVPSERSTGDNVKRGPITKAGNRRARRILVETSWSYRHPPRVGREKQMKVEAASEPVRAIAWKAQTRLCGRFRALSKKGKRQTIVVTAIARELCGFIWAIHRAVTNPGTTTTSR

SEQ ID NO: 75192 - protein, 351 aa, unidentified
MGEVSTIGLDIAKSVFQIHGVDAGGAVVIRKRITRAKLLEFFAALPSCLVGVEACPTAHYWSRRLGALGHTVRLLPPSYVKAYLKRSKNDANDAAAICEAVTRPSMRFVATKSEQQQSGLMLHRSRQLLVCQRTMLSNAIRGHMAELGIISAKGRNGTAELLKIIADEQDDRIPAAARFSLAILARQYAVVRAQIVAIEKRIHAWHRSSEESRRLEEIPGVGPIIATALVAEVGDWKVFSSGRSLAAWIGLVPRQHSTGGKERLGRISKQGNRHLRWLLVAGAMAVIRYARQHGTKRPWLARLMDRRPIKVAAVALANKIARMAWAMMVRGERFKEPKLLPAAECVRWIGT

SEQ ID NO: 75193 - protein, 371 aa, unidentified
MNFIGIDLHTNRFTCCYRNELSSTENTKKGREIKTFDLTEYGLTDFYQTLTKDTYILIEATITSFSFVRLIKDRVKDVIIANTYELKQISLARCNTDKIDADKLCRILKAQVLSGEQLISPVVLPPVEIQELRSLFTTYRLYKKQNTQLKNRIHSLLKERLYGFTQEEIFSNKRREFIRKISPGSAMQFQINQLLDRLERDEADVEELEKQILLNAEPFMKEIEILTSMKGISVFIAIAIIADIIDVKRFRDSKAFTSYLRSAPRVSNSNTSVSICGTNKKGRKLSATLLTQSLNHVLDASSKLRNWYDRLCEYKKPGLVRTGLRRRVFAEIFQMLKKQEYHYARDKAKHEFKINQYRKFLDKTKILFKTA

SEQ ID NO: 75194 - protein, 340 aa, unidentified
MIKIIGLDIAKNVFQVHGVDETGQPALRRKLRRAEVLRLFYHLEPALVGIEACHTAHHWAREIAALGHQVRLMPPQFVRPYVKSQKNDAADAEAICEAVQRPTMRFVPVKGADQQAVLLLHRTRDLLIRQRSSLISAIRAHFAEFGVVVGQRMRNIDRLLELLVADGTALPELARRMLAVLADQLRDVAARVAVVEGELMAWHRANEVSRRLATIPGVGPITASAIVATVGDATQFKSGRQFAAWLGLVPQQRSSGGKERLGRISKRGDGYIRRLMIHGARAVVGWRKRRPLAGDPWLAGLLARRPVNVATVAFANKSARIAWALMAGGRSYTTIRARAA

SEQ ID NO: 75195 - protein, 353 aa, unidentified
MKFFAGVDTHRDNHTVVVINAVGELLETFTIEANAAGYGLAMGRVANYAGLIWGLEGTGSYGRSFPKALAREGHTVYEVPGTLTKRHRRRLRGAGKSDPQDAHAIAEAVLREREHLPQYVERDAEDATRLLYERRDRIVRERTAKINRIKALSLRLQLNLAEDLTTARTLKTLTALLAKTKAEGYADFEALDEMRDLAAELQRIQQRIAELEERLRPFVDRLAPKLLELRGCSIISAAGLIGHIGSTRSYPNADAFAAHAGAAPVPCSSGKYQSVRLRTGGNRQLNRCLHNIANVQMRTEEHLGKLYYDRKRAEGKTHREALRCLKRRLATVVFRKLRTAEAGRTPLQNVFAA

SEQ ID NO: 75196 - protein, 296 aa, unidentified
MAHFVGLDVSVRETSVCVVDDVGKVILEQKVLTEPDAIIALLASLGATYGRIGIEAGPLSQWLFNAVTAAELPVICVETRHMKALLTAQQINKTDRNDARGIAQMMRVGLFKPVHVKTLVAQEQRMLLTSRKLLQRKLLDVESDLRGTLRNFGLKVGVVSGGRYEARVRELVGDFPRLAAIAEPLLRVRRVMRQQLAVLHKMLLDTVRDDPVCRRLMTAPGVGAVVALTYRATVDQPQRFVHSRAVGAHVGLTPKRYQSGEIDYDGGVSKCGDALLRTMLYEAAHSLLTRNRRGRG

SEQ ID NO: 75197 - protein, 351 aa, unidentified
MHYIGVDYHKKYSYVVVKDKEGKVERRGKVDNTKEEFRQLLKPYQSGKAVLEATRNWGLVYDWLEEILDDVALAHPLKVRAIAEARIKTDKISADILCDLLRSNLLPEAYVPNKETRESKNTLRQRMFFVRVQTMVKNRIYTILDRHPEIVTQAPDVSDLFGASGMAWLRQAVLPGQDNQLLVSELELLEVLKRKISESNGMVKELARGDKWVKLLRSIPGLGPFFSVLVAKEIDDISRFRDDKKLCAYAGLVPSTYASGGKVFHGRITKTGNKWLRWAFIEAVQPAISCDADLFAYYQRLKIKKGANAAKVATARRLLTIVYRVLSQERLYERRSRRVGSRVAPAALVTS

SEQ ID NO: 75198 - protein, 314 aa, unidentified
MAAEMFVGIDVSKARLEVALGSTGELLSVDHDGRGIGTLVRRLLAVAPALVVLEATGGVETAAVAELGAAGLPVVVVNPRQVRDFARATGQLAKTDALDARVLALFAERIRPALRPLPSAQERELKALVARRRDLVEMLTAERNRLSAAPKLLHKEIAAHIRWLEARLEQRDRDLGRMLRASPLWREREDLLRAVPGVGPVLCATLLAELPELGRLSRRQIAKLVGVAPLNRDSGALRGRRTVWGGRAPVRAVLYMATVSAVTYNPALKTFYDRLLAAGKPKKLALTAAMRKLLLILNAIVKTSSPWRPPCPAA

SEQ ID NO: 75199 - protein, 340 aa, unidentified
MSEITTIGLDVAKHVFQVHGIDAQGTTVLRKRLRRGQVLAFFSRIPRCVVGLEGCATAHYWARELGALGHEVRLMPAQYVKAYIKRNKHDAADAKAICEAVGRPTMRFVPVKTAEQQAMALLHRGREQLVRQRTMLVNALRAHLAEFGIVAAQGLRNVGELIAIVRDDGDTRLPDVARQVLQVLANQIEQIETTITALERQLLAWHKSNPVSQRLASVPGIGPIIATALAATVVEPSGFRSGREFAAWLGLVPRQHSTGGKHHLGGISKRGNQYLRRLLINGASANLLRSKATNADPWVIGLRQRRPSLVVAVALANKTARIAWAVMHRHENYQRVAAAA

SEQ ID NO: 75200 - protein, 353 aa, unidentified
MTDTPSIAWLGLDAHSRNCVLGHLDDHGNEIKDWRFPTDPQQLLKHIQAIPATVKHLMLEESNLARWISQLLKPHVQQLIVCDARRNRLISHDANKHDRRDAFALARLLRLHEFKPVWQPTDDQRVLFKRAAQAYEKSVLRQTRLKLQIKSLFQHWGLFPTGASVFSKPGRSAWLQKLPYDALRSQALLLYELLDQALAGQNQARRLMCQSGRRFPEVQRLRTAPGVGLVGAHLFVAYVQDPHRFAKFSRLSKYCRLSIRDRTSDNKPLGFKQLDRQGNGVLKAISYRAFLQATKRRSGPLWDYFQLSLRQTKSPTHARLNTQRKILLVLWTLWLKGEDFDPNLFSRSKPIDV

SEQ ID NO: 75201 - protein, 343 aa, unidentified
MQITTIGLDLAKSIFQVHGVDAAGQAVVRKSLRRSQMLPFFSKLPPCLVGIEACGTSHHWARELIKLGHEVRLMPPAYVKPYVKRGKTDAADAEAVCEAVTRPTMRFVPVKSPEQQAALSMHRTRDLLVKQRTQLVNMIRGLLAEFGVDIPKGLERALLMARQIVDGKAPEVPTEAVKIVATLSQQALDTHVRLREIDRDLAVWLRGNDVARRLMTIPGIGPIGATALAASVTDPHQFRSGRQFAAWLGLTPLQKSSGGKERLGRITKMGDKYLRKLLVVGMTALVRRTRQNPEGNPRLADLLARKPTRVATVAMANKTARIIWAIMARGQTYRTGHQPALAA

SEQ ID NO: 75202 - protein, 304 aa, unidentified
MEYIAFDAHKHYTLASVVRPDGQLVREERIEHDRGSLREFLERCERGSPVAVETIGNWYWIVDEIEAAGCVPKLVHARKAKLMMGEINKTDRLDVRGLNRLQQNGTLPTVWIPPGALRDQRDLPRTRMVLVRQRTQLKNRIHATLAKYALHDAEVSDIFGVRGRALLRQRLALLPPHTAYASQQLLEQVESLDRQVRAFEDRIQAAFKPTPAIQLLLTMPGVGLTLAVVIALEVGEVTRFATAEKLAAYAGTTPRVHASGGKTRFGPSRPDVNRYLKWCPSPKRRPTRSGAFEIHRQDAEPGWR

SEQ ID NO: 75203 - protein, 343 aa, unidentified
MKLTRVGVDLAKQVFQVHGVDRAERPVWCKRLKRSRWIADLERDVEPGAEIGMEACGSAHHWARLLQSKGYRVKLIAPQFVKPYVKTNKTDANDAEAICEAMSRPSMRFVGVKTVEQQDLQAVHRVRSSLIRERTAKANQMRGLLYEYGLVAPREISSLRRAVPQWLEDAENGLTIRFRSLLAGLYRDLRQFDERVRELDREVAAIAREHEAVGRLEQLRGIGPLTASALYALVGDARQYRNGRELAVALGLTPRQHSSGGKERLLGISKRGDKYVRTLLIHGARSALRAAPGKTDRLSRWVLALAERSHPNVAATALANKMARVAWAMLRHGTNYEPERVVA

SEQ ID NO: 75204 - protein, 337 aa, unidentified
MEYFAGLDVSMAETHVCVMNRDGAVVYEVKVPSTPADIAAGLAKAPACGRIVFETGRMAPMLYHGLRQLGLPIFCIESRQAHQALKSLATHKTDRNVARGLAHLARTGFFKPVYVKSLPAHALRSLIIARKKLVGQRVTLENQIRGLAVVFGVRLPRALRPAFVRQALQASEGIPGLSAAMRGLVTARAAVLAAVSAIDADIRQLVRASATCRRLMTIPGVGQLTALAFTAAIDDPSRFRRSRDIGAYLGLVPRRYQSGEVDYTGSISKCGDRRVRTLLYEAANVMLTRYKSALKLKDWALAIAKRSTMRKARIALARRLAIIMHAMLRDGTEFNPA

SEQ ID NO: 75205 - protein, 480 aa, unidentified
MNVKARRTKKQVNVENQAINLLSKEELNKKIEVVEKELRSYTWRELETNGKFAKNDKLSFITDDMLIVGCDIGSETHYIRAIDVRGRELSSGAFEFSNTSEGFANARAWVLALAAKNDKKQIVLGLEPTGHYWFALAAWMISNGISVVQVNPYAVKQSKEIEDNSQLKDDRKDPKLIANLVKDGNYGMPYLPEKVYADMRRLSMFRDQLTEDRIRNINRLHRELKIYFPEYMDAFGKIDGAFTLEVLKVSAIPTDITVLGAEGMKNIWHNAKLRGRGYSRANEIVSYAEKSVGLTDGTDAGREAVKWYAEQILRLDEQLAEIESALHEKCREIPYAENILAINGVGENILAGILAEMGDISRFDDVKEIQKLSGMGLVACSSGKHKGQTKISHRGRKRLRYWLFQAAKSAVSHADEFKQLHEYYTTRSNNPLKKMQSLVVIACKILRVIYTILKTGTTYDPQKLLKDIKHPAASQAPMAA

SEQ ID NO: 75206 - protein, 391 aa, unidentified
MSLYFVGIDISKYKHDCCIISATDQKVISKFSIKNDKVGFEELITTFNSLSSPEDIRIGFESTAHYALNLELFLENANHSFMEINPVLIKEYKKSTTLRRTKTDSVDCESIARWLMTVEYKPHSKGFYHAYSLKSLTRLRDRLIRQRSFYLVKITNVLDHTFPEFKPFFNERLSKTALYLLENYGSAEKMARMNSVSYEKLRSISRGKFSPQQFIALKELAANTVGVNNSIFDVELNSLLTLYKTLVTEINTLEKEINLLIEEVHPHYLSVPGIGSISAAIIYSEYGDISNFDNPGQMLAFAGIEPGINESGTESHGGRMVKRGSSQLRYALINCCLPLIRFDMTFATYYAKKRAEGKPHRVAITHVAKKLIRVIYALERQNTDFCVQKLR

SEQ ID NO: 75207 - protein, 372 aa, unidentified
MNYNTVYVGMDVHKESFTLCAYTIDAEKGSHFQRTEADYKNVLKYLEFLRTVYGNDANFICGYEAGCLGYTLYHQLTEHDVNCVILAPTTMLEQRSKRRIKTDRRDAEIIGKCLAQHNYSPVHIPTATDEETKEFLRMRDDHKLALKKVKQQILAFCLRHNYRYDGNSHWTAAHIKWLKSLNPEALYKEILDEYLLTYTTLSDKLERLDKRIEELASKDEYRESVKKLCCFIGIKTHTALSVLIEVGDFQRFASAQKFASYLGLVPGEDSSGDEQTRLGITKAGNRHVRMLLTEASQCYARGQIGFKSKELKSRQAGNSPQVIAYADKANERLRRRYYKMVLGKSKKHNVAKTAIARELACFMWGMMTEHIA

SEQ ID NO: 75208 - protein, 334 aa, unidentified
MSQEKYIGMDVHQATISVAVMDAGGKLIMECLLETKAATIVEFMEGLHGTLWLTFEEGTSAAWLYDLLKPHVSRLVVCDPRKNALLKDGNKSDRIDARKLAELLRTNQVKPVYHGEHGVRTLKELGRSYLTITKDVTRVMNRVKALYRSWAIPCAGTTVYAPRHRAEWLAKIAEPGVRVRAERLYQQLDLLQPVRLEARRELLVESHKHSAVKLVRQIPSMGPIRAALLVALLQTPHRFRTKRQLWAYIGFAVETHDSGEYRYVRGKLQPNRERITVRGLNDNHNNELKNLFKGAAISASTRPGPLRDFYVGLRKGCGRPWPVSPWHGRLPLSV

SEQ ID NO: 75209 - protein, 415 aa, unidentified
MKFEKDTRGIKRYIGFDIHKEYARVGGQNAQQEWVMQPRRVGLEKFREWAQANLRPGDAAIIETTTNVWDVYDIVAPLVSYVVVAHAGGVRQIAEARVKTDKKDIERLLKLLIADIVPEVWVPPLHVRELRGMISYRNRLVKTSTMIRNRLQSLIHRHNLILPKGALTDKAWWAAQTLSALEQIQIRQELALLEGLDKNKAEVDAELGRQCLGATWGRQAVRLLQLSGFGVVLTMTVLSAIGDISRFEDAKQLVGYSGLGPGVHDSGKEHIEKRITKSGRKELRWALVEAAWRAIRISPYWKEQYEKYLRRMRKPNQAIVVIARKLLVAVWHVLTKEETDEHVSEEDLAYKLLVLAWDLDEDVRMGLSYKQFAKYALMKLGVETDITRFVRKNVARRVAPKAEVLARMEELGLTC

SEQ ID NO: 75210 - protein, 356 aa, unidentified
MIPITHPNVPGIIIGVDTHKEEHVAVAVNKLGVHIGQHKLPTTNTGYAGLEHWARRLGEIDAFGVEGTGSYGAGLARFLRSQGRRVIEVNRPDRSTRRRLGKSDPTDAEMAARSVLAGVAHDRPKSGVDKVEMIRMLKSTKDSAMKSRTQAINQIKAIIITAPVELREVLRGLATNRLVLRCARLRPGQLGTPTAAAKYVLRSLARRHTQLTQEIETLDAELARLTLAFAPALMQSFGIGADTAAALLVTAGSNPERLKSEAAFAALCGVSPIPASSGKTNRHRLNRGGDRKANAALYRIVIVRLRYHDRTRTYFTRRIEEGKTKKEVIRCLKRYVAREVFGILQDIGKRHAFQNA

SEQ ID NO: 75211 - protein, 393 aa, unidentified
MRCLITLNPKEGGMARRNEMTVRCEDTTETPTIHMALDLGRRCWTVGFVLPGDRDARLYQIAGGDREALLGLIERQRSRLDEAAVRIVSCYEAGRDAFWLDRWLKAHGVDNRILDPASLEVPRRKQRVKTDKVDTVGLLRVLLRLERGETELTRVVRVPDPAVEDARRRSRERERLVRERTAHRNRIRGLLATQGVSDIKPGTRGWLDRLDAIRSGDGRELGPALIAEIRREAERLELVERQITAVEAEGRAALDEDTALSAGARRLKRLKGIGEIFAGGLMHEAFWRDFDNRRQVGASFGLVPWPWDSGDVHRDRPISKVGNRRARTLAIECAWMWVFHQPASTLSRWWRERYAGGGKRLRKIGIVAVARKLMVALWRYLTQGLVPEGAVVK

SEQ ID NO: 75212 - protein, 375 aa, unidentified
MKRLDLHGDVVAESPHRVFTRSPFGDGAHTGRPAAMEMIGVDLHKRESQLCIQSSEGAFTEQRIMTGRASFAALFAGRPRARVLVEASTESEWVARYLESLGHEVIVADPGFAPMYATRSKKVKTDKRDARALCEACARGTYRAIHRASDEQRHVRAELAVRDALVRTRTRYVAIIKAMVRREGLRLRSGEPAHTAAKLAELALPVGLQSELAPLVSLLEPVNAQVAAATARLTALARGNPVVTRLQTIPGVGPITALAFVAALDDVTRFASAHQVQAYLGLVPSEFSSGERQLRGRITKRGNARVRWLLVEAAWRVMRARDVEADRLRAWAERIALRRGKRIAAVALARRLAGIMYAIWRDGTVYQGGSQAIAA

SEQ ID NO: 75213 - protein, 363 aa, unidentified
MKEENRRFVGIDLGKREYTMAIIGKKGKMSIHKGKTSIQGRQALYRLLEGSDKIALETGNLAFIMAREIEKQVGSEVRVLNSAKLPYIWDSPTKTDKEDAMKLAHLVRDRRDEKLPIVPLPSEQEMERREVLANYGREVRDRTKMINRLHSLFLKQGHTTVVKKHLATAQRRLEAVQVLTGQEREDAEYIVQHLDLNEKRIKELKEKIQKDAKSDEDMKLLQSIAGVGPVVAYAYVAHVGDGGRFSKGAQVSNYLGFVPRLYYSGTIQRHGHITKRGNGYLRSLLVQAAWSTVRSRHGGPLKERFIYLTRFQGRSKKKTIVSIGRRLAELMYAVLRNKTPYEERPWKALSNDPAAIAEKAMCA

SEQ ID NO: 75214 - protein, 427 aa, unidentified
MSYRIAGIDVHKRMLVVVVADVDVGGEYEFEPRQYGSNPAHLRLLAAWLVEQQVQEVVMESTAQYWKPVWASLERDWKPICEKWEGARPMSGTLHLAQAQSNRGARGRKNDFADAERLVRRLMADELTLSFVPNAEQRLWRTVMRTKYQMRCNQVQLHNRLEALLEEAHLKLSSVVSDLLGMSGRRMLQAIAEGETDPAVVAARADYRLRATQEQLGDALGACRDLHPIYRRLLKTALEEWERTEAQIAQLGQEMARLISPHQEQVQRLAEVPGLGVDSGQQIIAEVGASAATFPSGKALASWVGACPGEEETAGVNRNRRSPKGNRHMRRILNQAANSAVKLKGSIFALLYRRYVVRFGHNQTIAVIAHRLCRLIWKILHEGVRYEERGPAVSEKAKQRRTARMIRQLRSLGYRVELLHAPAGAPA

SEQ ID NO: 75215 - protein, 401 aa, unidentified
MSKKNTRNALDTSLSYAVIGLDLAKADCAVAAVPCADDELGLIDRMDYESLFEQAEKLEPTLFAMEPCCGYSQISLRLQNMGHEVKVISGHAVKNWIATHKSNQKTDLNDATALAKLALYDHDLQPIRVKNVEECRIASVQAIRIQLRTQATKSLVCFKSLCQCWGIVIRRGSLNTKKMAEAVAAVEKLLGVEVASSLMILRDAYKFTMKQINALDKLLDALVEANEQARTMKTVLGIGTQTAARLAVTTGDIKRFPMPRSYVAYFGLAPRNIITGHSGTPSPSKRGALKPVSSRGQGKVSRRGDRVARSFIIQGAATIYMLYCKDMLPECQLRRWLHEQIKRGKPYGKIIVSLAAKLLRIVWALLTYGEKFDSHKAGVPRSVLAAMEKPLKHDAAAESAA

SEQ ID NO: 75216 - protein, 337 aa, unidentified
MDYYAGLDVSLEKTHICVLDRDGAVMHEAAAPSSPAEIAAALAAAPACRRVVFETGRMAPMLYHGLSELGVPVICVESRQAYQALKSLATHKTDRNDARGLAQLARTGFFKPVHVKSLPAHAVRALIIARKKLVGQRVTLENQIRGLAVVFGVRLPRGLSPAFVEQVIGMSEGIVGLAGAMRGLLAARDAVLGAIAAIDVDMKKLVRASDACRRLMTIPGVGQLTALAFTAAIDDPGRFRRSRDLGAYLGLVPRRYQSGEVDYVGGISKVGDRRVRSLLYEAANVMLTRYKGDLKLKDWALAIARRSTMRKARVALARRLAIIMHAMLRHGTEFQPA

SEQ ID NO: 75217 - protein, 363 aa, unidentified
MTYERSTLVNSEKYIGLDVHQATISVAVMDSKGKVVMESILETKAATILEFFAGLRGTLLVTFEEGTWAAWLYDLLKPHVAKLVVCNPRKNALLKHGNKSDRIDARKLADLLRLNDLEPVYHGETGVRMLRELARSYLTIVKDLSRVMNRLKALYRSWAIPCAGRDVYYTRHRSQWLGKIPEAGTRRRAEQLYQQLDMLQHLRQQARRELLAESRKHTITAKLRQIPSLGPIRSALAVALIQTPHRFRTKRQLWTYSGLGLETRDSGEYRYVKGQLRRSKKQVSIRGLNKDHNHDLKGLFKAAATRASVQPGPFQDFYQRSLAKGIKPTMVRLTLARKIAAITLTLWKKGENFDVEKLKSQAA

SEQ ID NO: 75218 - protein, 377 aa, unidentified
MSKIRFVGLDVHAETVAVAVAEPGGEVRSLGIIPNRLESIRKLLGKLGPVQHLKACYEAGPTGYVLYWQLTQLGVACEVIAPTLVPTKAGDRVKTDRRDAEKLARCYRAGELTGVWVPDAAHEALRDLVRAREAAKKDQLRARHRLGKFLLRHGQRPIDAGKAWTKKYLEWIKTHVRFDQPALEATLAHYLHEVDHAAEQILKLEKAIDEAVSQASPEIRSVIEALQALRGVAQMTAATIVCELGSLSRFPSPRQLMGYSGLVSREHSSGNRIQRGAITKTGNAHLRRVLVEAAWAYQHRPNITGFLLRRQKSLALSDEIKQIAWKAQYRLHKRYQVFAARGKNKNQIVTALGRELLGFVWAIAIHTEAQHKLGKAA

SEQ ID NO: 75219 - protein, 350 aa, unidentified
MDILGGFDVHRKQITFDYMQMDSGEVHRGKIRPADRESLREWLESFTERFPEHETAIAVEATTGWRYVVEELRRAGVEPHLAEPAETQSLQGRKKRRAKTDRLDAGHLRDLMVIERLPESWIPPDHVQEITTLTRLRHNLIEERTTHKQRIHAQLFHNGHPQQKNLDSMEGRAQLEEVELPAAARQVVDLSLQMIDHINEGLEPVEARLRDYARVQASCQALMEHHGVGELTSVALFSELGDTRRFSSSKKAVRYAGLDVTVHSSDDKRAAGKLSRQGPPVLRWAAFEAAKGAWRKNSPDHEYYLQNKERIGANRASLSVARKLIRRAHHTLRELGEEAMSEPVFASSRA

SEQ ID NO: 75220 - protein, 370 aa, unidentified
MLDTTTFIGLDVHARSIKAVSLDVMTGEVRAATFGYDAGAVAEWVRSVDPRARCVYESGVTGFDLQKRLSGLGVDCVVGAVSKMIKPSADRRRKNDRNDAEFLARMLSVGNVVEVWVPDDECEAARDLTRALEDARDDLSRSKQRLSKFLLRHGLAFDERTPTGRRKGNWTRAHWSWIESIRFAEGADNDVLAYYVDAVRRAAEEKARLEGLVEAEARKPRWRRRVDSLRCLKGVDTASAADLVFEAGEFSRFRNARSFAAWVGLTPSEHSSGESDRRGAITKAGNKHLRKALVEAAWHYLTCSGRPKDLARGQAPDRVARRHAAKGVRRLVERREALLARGVHGNKANVATARELACWVWAVGLMAEEA

SEQ ID NO: 75221 - protein, 366 aa, unidentified
MKKTSTVRVNKNTIFKGHKLTIGLDLGDRWSCYCVLDEAGEIILEQKVAMTPETMKQTFSKIPQGLIALETGTHSPWVSRLLTELGYKVIVAHAQKVQLITKSSRKDDRHDARTLARLARIDPELLGPVRHRSAQAQIHLTVIRARAELVRARTALVNSARGLVKSYGQRLPKCGTQQVSRELGAGLPAELREVLEPLLKEVESLNERIQEYEVRVEKIAKESYPHVELLKQVKGVGTQIGLTYVLTLDDPHRFPKSREVGCFLGLCPGRRDSGESQPQMNISKEGDRYLRTMLVQGAHYILGPFGEDSDLRRWGLKLAARGGKNAKKRAIVAVARKLAVLLHRLWVSGEVYEPLRNSQKAMRAAA

SEQ ID NO: 75222 - protein, 353 aa, unidentified
MITIGVDAHKRLHVALAINEAGQELGEWRGPNSAAGWRSIAQWASSLGSPRQWGVEGAWSYGRNLAQHLVAVGETVFDINPRWTAGGRRRARKPGKTDRLDARAVALLVRQEAPTLPEVHAEDDTAVLDLLTNEREGAVAEATRLRNQIHALLMQADPDYHSYLPNLKSRSALDALEAYALPGGSPLQAQRAAAVRRLAARLRLALSQAAQLAEEIEELARRRFSPLTNLCGVNLITAGTLAGILGPGDRFATDAQLAAYAGVAPLEASSAGLVRHRLNRGGNRRLNSVLYRIVLTQAHHSPAAKAYIKRRLSEGKTRREAHRALRRFVVRAIWRLWHECQTAQAREAVREAA

SEQ ID NO: 75223 - protein, 472 aa, unidentified
MIRSVGIDLHQGQHRARCLDERAQPCDSFSFQTTPEGLATLEEHVFRDGANPIIVLEPAGLPWLMVAVYLRSCHPDCRLVKAKTQKVAALRRYLRGPVKSDRLDALTLAKMPFIDPEQMDEIYLPPAEIHALQRLTRQRKRIEQDITGRKVRISAIVDGYLPGVRRTFNDVWSSPIRAFLRSRLNPFIVVRDGEDALHASLSKNSYHSKWSKAQTRLVFLACQSVAAVCKLSESAGTVNEDFFMDLQDEIARELRMLEADEIESEALARRIAELYQKLHSSDNLRTIPGVGEHTAPIFLATVGDPARFPNQSAFANYEGVVPGARQSSNVEAKGLRMTKAGPSIMRMALYQAGDIGRRWDPQLAAVYYREMVYHGKNHKQAMGAVMSHLGARILAVLKEDRPYELRDPEGKLISKDETRKLILSKYHVSEDIRRERRRRNSKVSKARETATYRTNEAAKAPQPVPVQAVSRK

SEQ ID NO: 75224 - protein, 417 aa, unidentified
MEVLVTRCAGLDVHKKSVMAAVRAPGPDGKRLQVVRESPTFTRNLVQLRNWLVSQGVTEVAMEATGVYWQPVWHVLEDMPGVELKLVNAEHVKNVPGRKTDVSDAAWLAQLLECGLLRGSFIPEPAMARLRDLTRYRKKLVEERAREVQRIQKLLETAGIKLDSVATDIVGKSSRRMLEALIAGERDPDALAELALTRMRAKLPALRLALEGRFSEHHALMARLYLDHSDHLSKAIDRLDAQVVSETAPFAQQIDRLCTIPGMGRRVAEVVIAEIGVDMSRFPTAGHLASWAGMCPGNHESAGKRRSGRARRGNDDLRTALCEAAWAASHTKDTYLSAQYRRFVARFGKSNGGETKAIFAVGHTMLVIIWHVLAHSGNYEELGFDYFEKRNETEAYKRRLVHQLEKLGLKVTVEPAA

SEQ ID NO: 75225 - protein, 342 aa, unidentified
MQVAVLGIDLGKKSCSLVGLDNVGHVVLRRRLLRSNVIKLTAELPACIVAMEACCGAHHLGRLLHAQGHRVRLMSPEYVRPYVKSHKNDDRDAEAIAEAATRPTMRFVELKSEVQLDLQSLHRARDRLIGHRTALINQIRGFLMERGIVVAQGRRKLEMHLAALMAEHSETLSPRTRLLLADMCSEWRDLDRRIKAFDEEFTALVRIDDVAGRLTTIPGIGMLNASALTAAIGNGQTFRRGRDLAAWLGLVPRQMTTGGKPRLKGISKRGNKYLRKLLIHGARAALPSLAKSETALGAWLRGLRARAHVNTVVVALAAKLARMVWAVLRHGGRFNMRPAPAA

SEQ ID NO: 75226 - protein, 417 aa, unidentified
MKQISNARPILRYVALDIHREYVMAGGMNAAQEWVLRPRRVEMVRFRAWAEANLRGGDAVVLEATTNVWDIYDIVAPLVSRTVVAHAAAVRQIAEARVKTDKQDIERLLRLLIADIVPEVWVPPVPVRELRGLISYRWRLVKMSTMIQNRLHSLLHRHNIQVPEGGLDTEKNQAWWEQQEFCPIEALQVKQELATLAQIEQHKEEIEQELGRLSLTEPWASQSAYLMQLSGVGVVITMTVLAAIGEISRFESPKKLVGYAGLGAGVHDSGKEHRDKKITKSGRKELRWAMVEAAWRAVRSNPYWKKQFEVLKRRKHPNQAIVMIARKLLVTVWYVLSRQEAFRHASEEDLAYKMLIWSWSMNEEARQGMTPQQFAKYGLLRLGIGRDLTRIVKGGYPRRLAPAEEVLAIRPELRPPE

SEQ ID NO: 75227 - protein, 365 aa, unidentified
MFVGMDVHKETIDISVAESGRHGEVRHYGVIPTDLEALDKVVRALRAPNRVLHVVYEAGPCGFGIHRHLTARGEDCVVVSPSMVPKRSGDRIKTDRRDSVALARLHRAGELRAIHIPDALDEAMRDLGRAREDAVVVATQAKYRLKAFLLRQGRRYPGRAGWTIPYRRWLADLSFSSPAQHIALQEYRDTIHETERRIVRLTEQLRQLAPTWRWAPLVAALQALRGVSFITAMGVVAELGDLTRFGQPRELMAFVGLVPSEYSSGPSVRRGGITKAGNPHVRRLLAEAAWAYQGTPRIGRQQLYRQEALPKVVCDIAWKAQLRLTGRFRRLVARGKAKPKVATAIARELCGFIWAIAREVTPASD

SEQ ID NO: 75228 - protein, 368 aa, unidentified
MSDIIRIGVDTSKSVFQLHGVDAAERPVLRKKLRRRDFLSFFAQLPPTRVGLEACGGSHYWARELMALAHEPKLLPAQHVRPYVRRNKNDKQDADAICEAMSRPRMSFVRIKSAEEQAAQMLMTTRQRLIDYRTQLINTIRGHAAEFGLTAAKGPAHVEPLLARVAKDVTVPALAKELFAIHGQEYDRLKLELREIEAKLKAWHRGNEMSRRLAEVDAIGPIGGCLLAIKAPDPQAFHCARNFAAWIGLTAKDHSTAGKMRLGVITRAGDEALRRTLVVGATSVIKQVRNGKAHPSPWLRDLVARKPPKLAAVALANKVARIAWKLMVSGERYDAARAGIVSPTARVAPCSRRQGRCAPPAAVACGQP

SEQ ID NO: 75229 - protein, 417 aa, unidentified
MKEVGQVGRRCCGMDVHKDTIVVAVLPPEGGDGPPVHKRYRTFRNDLIRMRVWLKQLRVTEIAMESTGVYWRPVWNVFEEEGFRLLLVNPAQVKALNGRKSDGRDARRIAEYLKDGRLDASFVPPPEIRELRMLLRHRVSLLEQRNEVHNQIRDLFETANLKLSSVVSDLMGVSGRRIVEALIAGEDSPEILSWKLRGKLRKKEKVVRESLKGCFNEFHRTMLQSLYKHYQFLTAEVADFEARIEGRMAPYSAQIELLVTIPGIERLVAWHLIAELGVDMTVFPDADHCASWAGLVPGENESAGKTKSTRCRKGNKSLRRVLTQAAWAASHCKTGYLRAFFNRKQASRGWAKAIVALAHKILIIAFNMLCTGTPYHELGGDYFDRINPTRTANRLIKRLEAMGYQVQAAPTASGSNA

SEQ ID NO: 75230 - protein, 362 aa, unidentified
MTVIGIDAHKNWHTLVAVDEVGRRIDVLTVEARAAGHQKIMTWLEQFEEVIIAIENCRHLTRRLEADLLDAGHKVVRVHTRLMAGMRRSDREPGKSDPIDAEAVARVALRESDLPTAELPGPAREIKLLSDHRRSLVARRTALQSKVRWFLHEIDPDLQIPSRALRRYHLLDELITHLDGLTGVVPEIARDILEDIRSLTRRINEIESRLSKLARANHQHLLEVPGLGVLGAAMIIGETAGVRRFKSKDAFARFNGTAPIPVWSGNKVRVRLSRGGNRRINTALHMAAVTQLRLGGEGTDYYDKLIAAGKTRTEALRLLRRRISDRVFAAMRADEARPVAEATSPPPTAAPRTPIPAIQAAA

SEQ ID NO: 75231 - protein, 339 aa, unidentified
MELYAAFDLHSTNSQLGIVNEAGKKIHRKKLPNEPKAILQELEPYRMEIMGIAVESTYNWYWLVDLLQGAGYRAHLANPAAIQQYSGLKHVDDRHDAFWLAEMLRLKILPEGHICAKEERAVRDLLRKRGHLVRLRTSLILSFQNTITRNCGIQVDVNDIKVLREDRISPLLKDNVDLELSGEVSKESIDFLTRQIKKIEKILAKRVALKPAYKNLLTMPGIGKILGLTIMLETGDIGRFAAVGNYASYCRKVNSNWLSNGKSKGKGNKKNGNKYLAWAFSEAAEFARRYDAAARAYYERKLRQTNRMVAHSALAHKLARAAYFIMRDGVEFQPQRIFT

SEQ ID NO: 75232 - protein, 375 aa, unidentified
MTMVTDPAAVQQVLSVTGGVDTHADVHVAAVIDAVGRELGHREFATTPVGYAALLAWLGSLGPLELVGVEGTGMYGAGLTRVLQAAGVTVVEVDRPDRKARRFQGKSDPIDAFADARAALSGRASGTPKTRTGTVEMIRTLRVARSGAVKAKAVTWNQLKALIKTVPDELRERLRGLDGAALLDNCAGLRAARGPAPEHGPHAKRRRPGVLVDPSAACKRSLSVLARRIRALEAEVADLDDDLEPLITATAPTLLAMYGVGLDVAGQLLATAGDNPDRLRSEAAFAHLCGAAPICASSGKTTRHRLNRGGDRHANHALWRIAMTRLRYDPETRAYRDRRAKEQKTNKDIMRCLKRYIAREVHQALLVDLTAPSAA

SEQ ID NO: 75233 - protein, 384 aa, unidentified
MKLSVGIDAAKTTHWAVAVDEGGRIDTLVADLRRLGGEMVIGLDVVGSFARFLEAVLLAEGFALVHTPGIAVNRAGQGFAGSERKSDPRDARTIAELVRTRALRPILPEADTVTALRLKVGRRCDLMQDQTRRLNRLRGLLCGIFPGLERGLDMTCKGPLVLLSRFVTPAEIRRAGQAGLVAHLRKTPHLHGSEALAARALEAARGQHIAVPGEAPTAELIRELAGEALEARARIARIDRDLERLLADHPDGALIRSLPGVRPIGQTALLAAEFIACVGDIRRFASADALASAAGLAPVQRQSGKRNGWRRALTGHKTLKRVLYQSAFCAVSTKDPLSRAFYDRKRREGKHHTQALIALARRRVTVIWTMLQRRETLQPNRKAA

SEQ ID NO: 75234 - protein, 391 aa, unidentified
MSLYFVGIDISKYKHDCCIISATDQKVISKFSIKNDKVGFEELITTFNSLSSPEDIRIGFESTAHYALNLELFLENAHHSFMEVNPVLIKEYKKSTTLRRTKTDSVDCESIARWLITVEYKPHSKGFYHAYSLKSLTRLRDRLIRQRSFYLVKITNVLDHTFPEFKPFFNERLSKTALYLLENYGSAEKMARMNSVSYEKLRSISRGKFSPQQFIALKELASNTVGVNNSIFDVELNSLLTLYKTLVTEINTLEKEINLLIEEVHPHYLSVPGIGPISAAIIYSEYGDISNFDNPGQMLAFAGIEPGINESGTESHGGRMVKRGSSQLRYALINCCLPLIRFDMTFATYYAKKRAEGKPHRVAITHVAKKLIRVIYALERQDTDFCVQKLR

SEQ ID NO: 75235 - protein, 345 aa, unidentified
MEPMYYIGLDVHKRKISYCVKDSGGKVYAEGSLPATRADLDLWIKTLPQPWSAAMEATMFTGWIYDHLKPHAAALKVAHPLMLRAIAAAKKKNDRIDASKICDCLRCDFLPECYMASTAIRERRRTLRYRNLLVRQMVQMKIKISSLLMEAGVSYNKQRLHKAGYFRELLGTNPDIDEGLCSLLRLCRETVVRLGKTESALVRSLERDSLLVERVERLMTIPAVGPITALTWALEVGDVQRFSSLKKAISYCGLCGAEKSSGNTVQRTPLSKQRNKHLQTTLIEAAKMAPRNSSELAMLYDKEKQKGNANRATLAVARKLVAYLMAVDREQRNFQIAETSSNIAA

SEQ ID NO: 75236 - protein, 376 aa, unidentified
MREKLRFLGLDVHAETIAAAVAEPDGEMRSLGTIANREDSIRKFIKKLGSPERLRACYEAGPTGFVLYWQLAQLGVECTVVAPTLVPKKPGDRVKTDRRDALKLARSHRNGDLTAVWVPDEASEALRDLVRQREAAKQDQLRARHRLTKFLLRTGQRAPLGRKAWTEPYMRWLAQIRYMQPAQEVTRLDCMNEVEHMSARVKRLEEAILEVVKQAPQAMQELIRGLQALRGIAHISAVTIASELGNVSSRFQSARKLMGYSGVFPSENSSGTRIRRGGITKAGNAHLRRIVMESAWCYRHLPRVGEKLRKRHQGIPADIIEIAWKAQNRLHKRYVKLAMAGKDQRKVVTAVGRELLGFIWAIGVKAEQANRQPLAA

SEQ ID NO: 75237 - protein, 389 aa, unidentified
MIYVGIDVAKDKHDCCILGPDTEKLYPVFTISNNRDGFDELYEKIQAAETDIDQIKVGLEATGHYSLTLLGSLIDKGLTTCVINPLHTNLYRKGLSLRKTKTDKVDASSIAMMLITDKTLKPYSDTSYHNEELKSLTRYRFDKVQERARLKVSVARLVNILFPELEKLVPDIHMASVYALLSEFPGASHVAGCHLTRLKNLLETASKGRYGRDKAIEIRNAAHTSIGSVMPVKSLELKHTIHLINVLTEEIEEVEAVIKKIMDDSASPIMTIAGIMDRMGAMILADVGDFSRFENADQILAFAGLSPSTYQSGQLESSYAHMEKRGSRYLRYALFNATKFVCKWDETFNAYLAKKIREGKHYNVAVSHAAKKLIRTIYRMELTGEVYRK

SEQ ID NO: 75238 - protein, 379 aa, unidentified
MQPIRTLAGVDVSAKALEAKRRRDDEDESREFSNDGAGHRELLKWIGRGARVCIEATGVYHLQLALMLTAAGVEVMVINPRVARDFGSALGNRSKTDRVDAATLLEYVCRMNFVAWKAPSWAVLELRELGRRLSELVHTGAEEKNRFHAKKAAGISTTVINDVKAHGAQIQKRTKEIEKSAVALIRGDADLREQFEILTNIPGVARRSAVLLLTELAVLDPTMTVKQIVCHAGMDPREYESGSSVQKPTRISKVGNARLRAILFMPALTAIRHDRGARLFFAQLMARGKKKMQAIVAVMRKLLHGIWIVLQRRVPFDSAVLFAASLAKAESSDSAVAANPPEPSKDHPKGRSEAQELRQQLDPGSAQATRSPRRRSKAA

SEQ ID NO: 75239 - protein, 360 aa, unidentified
MPYSTSIGLDVHARSISAAAYIFETGELVEATFGYDAEAVAKWAEGLPEPKAALYESGPTGFDLKRKLDALGLPCHVGAVSKMRKAPGDRVKTDRRDAAYLARLLMVGDYVECVPPTPRMEAARDLSRIREDAREDLMDARHQLSKMLLRHGYVWPAGRASWTKAHRDWLKGIHLAEPTAQYVLEEYMERVRECEARKARLDEAIADRAKEEDVAGIVQRLCLLRGISTLTAFGIAAEIGDFARFRTAQGFMSYVGLVPSEYSSGSSVARGPITKTGNSHVRRLLVEAAWQHSRPLSPASDSMQPPEGVPPEAAGIAAKANMRLHSRALHLRRRGKKACVANIAVARELAGFVWALALCG

SEQ ID NO: 75240 - protein, 412 aa, unidentified
MNSWENGIIKSNPIVRINLLTVPKSVYSFNNDSEGFQSAKEWAVQIAAEHNKSQIVLGLEPTGHYWFCLAAWMISNGISVVQVNPYAVKQTKEVEDNSQMKDDRKDPKLIANLVKDGNFGMPYLPEKLYAELRRLSMFRDQLNEDRTRTINRMHREMKIYFPEYKDALGKVDGAFSLELLRQAPFPDDLISLGEDGIRKIWHDARLRGRGYSRAGEILQYAKVSVGIKDGAIAGKAAVKWFVQKILELDAELAVIENQINQKCQEIPHAGNILEISGIGENILSGILAEMGDISRFDDVKEIQKLSGLGLVACSSGKHKGETRISHRGRKRLRYWLFQAAKSAVAHAEEFKELHIYYTTRADNPLKKMQSLIVIACKLLRIIYTILKKGIVYDPKKMLMDIRRVEKKEAIVA

SEQ ID NO: 75241 - protein, 344 aa, unidentified
MDHFAGLDVSVKVTSVCIVDDTGKIIREVKVASEPEALLAVLKNPAYRFKRIGLEAGPLSQWLFSALAEAELPVVCVETRHMQAVLKAQINKTDRNDARGIAQMMRVGLYRPVHVKTLRSQKLRMLLTHRKLLQSKAIAIENDLRGTLRNFGLKVGIAGKVRFEARIKELVESLPDLAELVEPLLIVRRALREQIVVLHRRLLAIVRDDEVCRRLMTTPGVGPVVALTYRATVDVPARFRKSKSVGAVFGLTCSKYQSGEIDWSGRISRCGDEMMRVMLYEAAQSMWRSKKWSWLKAWAMQIARRRGIKKAIVALARRLAVVMHRIWVDGTEFRWTRQQAAAAA

SEQ ID NO: 75242 - protein, 491 aa, unidentified
MRTDRSKSQRKDGPLRPAKSLPLVQPHAAGIDLGNAEHFVCVPSDSVPPGEKPVRRFGVFNPDLDQMVQWLKQCQVKTVALESTGVMWIPVWKKLEAAGLEVVLVNTKGVKHVPGRKSDVLDCQWLQQLHSYGLLSGSFRPADLICQMRTLMRQRENLCASAGRESQHMQKAMQEMGVHLHVVVSDVCGDTGLRIIDAILAGQRDPAALVRLRDPRIRRSTPAQMEAALQGNWREELLFVLGQSRQGYEFIQGQMGRLDERIMLLLAQWPEAPVVVRPATAPPSEAATRAVPALAEKKKPKKMGTGGNPLPQDIRPQLAKIMGVDLTLIPGLNALGVLIILSEIGPDLKRWRHAGAFAAWLGLAPGSKISGGKVLSSRTPHVMNRVAILLRLAALVVGRTETALGSFYRRIRAKHGAPKAMTATARKLAELIYNLMTRGTPYVETDPKIYEERVRQQKVLRLAREAKKLGYDLVQWQESQADTTPQKVASC

SEQ ID NO: 75243 - protein, 333 aa, unidentified
MPQSRTRSVGLDVHKDSLAVADAAQDHGAAVVALGNLGTRQRDLDQLVRRRQSQSPPLVLVSEAGPCGYWLSRSLTTKGHACWVVAPSLRPKKAGARVTTHRRDALKLARLMRSGALTPVSVPAVEDAAMRDLCRARDDVIRALQAATFRRQAFLLRPALRSTGPATWGPAHRRWLREVVWPTPAPQSVLQEDGPAVTAPTARLERLELALHDPVQPGRLAPVVDALHGLRGVQCTVAVTTVAARGDLTRFEHPRPRMRYLGLTPAAYSSGARRRQGGMTQTGHSQARRALREGAWASRSPAKVRRHRQLRLAKLPKPIQASRGQAQGRLGNR

SEQ ID NO: 75244 - protein, 386 aa, unidentified
MYFVGIDISKYKHDCFVTTETNCVINENFSFENNKDGFQKLLDLFKSFDNQEIRIGLEATGHYGMNLKLFLEENNFSFMEFNPSLVKKFIESQTLRKTKTDKADARWINKYLISMDYKPHPKQFYHKYALKSLSRRRANIVKHKSSYMIEITNILDLTFPEIKSFFNNTFSATFLYILNKYKTAEKIANMKDYDSLRKVSRGKFSYSKFLKLKELAKDTVGTSNDIFTFQLETFLALFSNIDKQKDLVENKIAQIIKELNPNTLSIKGIGIVSCAAIISEFGDISRFKSADAMVAFAGIDCKIEQSGTSEHFGKMVKRGSSHLRYHLINAAGFVFMHEPIFTEYYYKKRAEGKAHNVVLTHVAKKLIRVIYKLETGNTTFDSSKLR

SEQ ID NO: 75245 - protein, 597 aa, unidentified
MSTQHATTPSPAACQPRCVGVGIDTSRYGHCAAFLRDDLQPAAAELQFAESARGYASLRETLAQIAERHGAGHFIIRLDAAGQYADNLLHFLYGLSTLGAGASRLAHVTISISCGDPQRNKNYRAALFGNKKSDPIEAQAAARFAVSERPAHTPPLAAELRTLRQVAGRLQAVVRQRTRLINQFHHLLALSFPELALLIKDISVGWVLELVHRYPTAQLLGRAAASDLDNIPYLPDRHIDVLLQHARSSIGSQSGPAVEELVRDQVRQLRDVRARQKRLENLLVSLYHGLPAPNHIDSITGIGDVTAAVLTAFVLDIDRFETENQLVAYFGTLPIEVASGVDRDGQARGPRRYVMSQRGNDLVRRYLWMAALSAIRFNPAVRALYARVVAKHPNQKAIAVGHAMRKLLHLVFAIWKSGKAFDPQHYACDKPTHLPPTDDAMSIQHGTPTALPRSANNQAAGHKPDAEPAKQVVTAARNAEPAVVDEHAFIDFAHLKRQLTMSQVLDHLGLASRLRGSNSQRRGPCPIHRGDGRGRTFSVNLDDNVFQCFDVACGKHGDVIDLWASVNAMSLREAAIDLVNTFHLEPTPQNRTEKRHG

SEQ ID NO: 75246 - protein, 410 aa, unidentified
MRLCVGDDWAEDHHDIEVMGEAGTVLARKRLPEGVAGIGQLHELIGRFLPAGGDAEVQVGIETDRGPWVAALIAAGYTVFPVNPLQASRYRGRYGVSGAKSDGGDAHMLADVVRTDAHQLRPAAGDSAAAEAVKVLARTHKRLIWERAAVVLRLRAQLREYFPAAVAAFEDLDAPDALELLGKAPEPARAAKLTRAQVSAVLKRAGRYKIAERADAILAALRSPQLGQPPALTAAYAATVRSLIAVITTLNEQVNSLQGQVEAHFGQHPDAEIYLSQPGLGAITGARVLGEFGDDPCRYTSAKARRNYAGTSPITRASGKKKTVAARFVRNDRLIDALMIQAFAALRVSPGARAFYDAQRAKGLEHNDALRRLASRLVGILHGCLKTSTCYDEATAWGHRENIPQSEAAA

SEQ ID NO: 75247 - protein, 363 aa, unidentified
MDTNIQTGSDKLRVSFSGRQIFLGIDIHKKNWNISVFIDDIFFQNFHQEANSLLLLNYLNSHFPEARYLACYEAGFSGFSIQRELKSLGIDCIVVNPSDIPQTNKGVLSKTDTSDSRRLGMALSRGLLTPIYIPDKLTESDRQLIRYRKKTLTDLQKKRKILKSAFHSMGIIIPKEYEKPYWTKKFIDWIRNLKPEEVSSQILISHVIDDVEFLRKRLLEINKNIRHLCSHERYKEVYSILISAPGIGIITDMTMLTEIGEIKRFDNFSKFNSFIGLCPSEFSSGENIRKGKMTPRANSALRPLLIEAAWIAIRTDPALALKFQELIKSRTKKRAIVVIARKLLSRIYHIWTNTRLYEKGLLR

SEQ ID NO: 75248 - protein, 421 aa, unidentified
MDVVVQRCAGIDVHKDTVVTCVRTPGADGQREVVTKTFGTVTAELLALREWLVAMGVTLVGMESTGVYWRPVFYMLEDVTECWLLNARHMRNVPGRKTDVADSEWICQLVEHGLVRPSFVPPKPIRELRILTRHRKTEIEEHTRVAQRLDKVLQDAGIKLSSVATDILGKSGRDMLAALVAGTSDPDVLAELARGKLRKKIPALTQALEGRFGTTHALVVGEILAHLDFLDEAIERLSGRIDEVIAPFGTERDLLCTIPGIDRRLAEAILAEVGVDMSRFPSAAHLASWAGMCPGQYESAGKSRSGRARHGNSWLQRHLAVAAMAAARTKDSYFAAQYARLVRTRGKPKARKAVGHSMLVAIWHMFEAGVPYQELGADWFEQRNSPDRRARRHLADLKSLGWTMTDTPEGIVLTRPQPAAA

SEQ ID NO: 75249 - protein, 344 aa, unidentified
MNHVAIDLGSKESQVCMRDKDGKILVEKKYPTRKLGTWMTEWSSSRVILETSSEAFKIADQARAAGHQVRVVPATLARQLGVGERGVKTDERDARKLSEVSCRIELPSVHIPSPAARDLRSLVRSREMLISMRTMSINHVRGWLRTQLGKLRKGSTTTFPDRIRARAAENKQTIPGHIEQVLVVIDALNVQLLAAQRQVNQLAKASPVCVLLMSMPGIGPVTALTFVAAIDDISRFEHAYQLTSYVGLTPGENSSSERERRTGITKAGSTSVRRTLIQAAWAAIRYSPNDPMVRWAKQIADRRGKFIAVVALARKMAGIMFALWRDSTTYRSSQAALAPTTALA

SEQ ID NO: 75250 - protein, 353 aa, unidentified
MEYIAFDAHKHYTLASVVRPDGRLVREQRLPHERGALQQFLARCESGSPVAVETIGNWYWIVDEIEAAGCVPKLVHARKAKLMMGEINKTDRLDVRGLNQLQRNGTLPTVWIPPGELRDQRDLPRTRMVLVRQRTQLKNRIHATLAKYALHHLEVSDLFGVRGRALLRQRLELLPPCTAYATQQLLEQVETLDRQVRGFEHQMQTVFKPTPTIQLLLTLPGVGLMLAVVVALEVGSVARFATAEKMAAYAGATPRVHASGGKTRFGPSRPDVNRYLKWAFVEAANAVCLNRSRAPRRHVSRLYERVARRKGHQKAIGAVARHLAEATYWILTKQEAYREPNAAAVSSTGDKRG

SEQ ID NO: 75251 - protein, 311 aa, unidentified
MTILTSQTVVGIDIAKAEIVVYRADLETIEAVKNDRAALKRWLKTLPAQSAIAVEATNIYHLETVDLAHAMGHQVYVVDAYRVSHYRRGVGQRAKNDPCDARVLARYLTNEQSKLRLWNPPPKAYTVLKSLVHRRATLIQNHTGLMLSWADEPLLKKERTAQQKAFERSDKGIQKLLRKVSKEAGIDDNIDRCKAIEGVGELTATGLATTYMRGDFANSDAFIAFLGMDLTVDDSGKKNGPRFLSKKGDPEIRRLAYNAAMAACRSTKWKPFYESYLARGFSKTQALVALARKLCRVAFTLMKNQGEYRSV

SEQ ID NO: 75252 - protein, 337 aa, unidentified
MEYFAGLDVSMAETHVCVMHRDGAVVYQVRVPSTPADIGAALAQAPACGRIVFETGRMAPMLYHGLSQLGLPIFCIESRQAYQALKSLATHKTDRNDARGLAHLARTGFFKPVHVKSLPAHALRSLIIARKKLVGQRVTLENQIRGLAVVFGVRLPRALTAAFIRQALRASEGITGLSAAVRGLVAARAAVLAAVTAIDADIRKLVRASAACRRLMTIPGVGQLTALAFTAAIDDPSRFRRSRDIGAYLGLVPRRYQSGEVDYTGSISKCGDRRVRTLLYEAANVMLTRYKSALKLKDWAFAIAKRSTMRKARIALARRLAIIMHAMLRDGTEFNPV

SEQ ID NO: 75253 - protein, 420 aa, unidentified
MNRLTTMQYTAFVGIDWADRKHDVCIQAAGSERREFAVIPHRVGPIEAWARALQKRFGGPIAVALELSRGPLVTALQKYDFFVLYPINPSTLADYRKAFTPSRAKDDPTDAELALDLIVRHPEHFRPLRPQGAVMRSLTTLVEQRRHLVDDRNRIANRLRSTIKQYYPQPLDWFAQIDTVLFCEFLTRWPTLAQVKRARRNTLVRFFQQHSMHFTRVLEERLAAIRAATPLTTDAAVIAPYRLQAEALVAQLRATLDGIKQYDAAIEELAEQHPDYALFCALPGAGPCLAPRLLVAFGEQRDRYASAAEVQKYSGIAPVTERSGNKHWVHWRLQCPTFLRQTFVEYAAQTINKSFWAGAYYRQQRAKGCTYQAALRALAFKWIRILYRCWQTRTPYDESKYLQALQRRGSPLLKEFGEIM

SEQ ID NO: 75254 - protein, 324 aa, unidentified
MASIEAMEGVVTIGVDPHPGSHTAAALDPVGTQLASTCVANGADAGARLLEWGLQFPHRRWAVEGAGNRFVHAVVLELLAAGEEVHSVPPSLTSQYRNRRGRKKDDVIDAANAARALQANPALPCYQPGEQEVHLKAVSRAYQRLSTELKRLRMMKRSATDPVVLTVLETAIGGVEPALHALKRELQALAEALAPALLERQGVGPVVAGILLAEVGQITRFGNSHQLAAYAGVAPIPWQSGAHSVNRLNPGGNRRLNCAAYLITRTRLRLDPRTQAFRDRKLAEGKTQREIIRSLKTYVLREVYAVMLHATVCPDHATKVSVAA

SEQ ID NO: 75255 - protein, 413 aa, unidentified
MEKVYDKCCGIDVHKKLIVACFKCGKKQEVREFGATTRELLKLADWLGSGGCEMVAMESTASYWKPLYNILESSGLNAMVVNARHMKAVPGRKTDVKDAEWIADLLQHGLLQASYIPDKDQRELRELVRYRKSLVGERTRELNRLQKMLEGANIKLSGTVSDINGKSARSILEYILTGESFDDAKYDEMYGNKIIAHNLKATKEQIIDDLNGIMSPLQRKMMRTLLKHLDELNSHIHELDDDIDSFMKPEEKQASVAIQDVTGIGNTSAQAVFSVIGTDMGRFPDDAHIASWAGLCPGDNESAGKRKSGKTRKGNALLRETLVNCAHAAVKNKKSYFYAQFMRISAHRGKKRAYVAVAHSMLVAIYHILKDGVVFKDLGADYYNQFNKERKIKAYLKKLKALGWEDSAAGQPA

SEQ ID NO: 75256 - protein, 309 aa, unidentified
MDVYVGIDVSKDSLDVHVRPGGEAFSIASDAEGVAALIERLRGFGPSLVALEATGGFETVAAGAMASAGLPVVVVNPSQVRAFAQALGQRAKTDPIDAMVIARFAEATRPVVRALPDEEVRLLSDLVARRRQIVQMLVAERQRLARALEPRLKKSLGRLIRALQKELAQIDGDIDQAVRASPIWRRNEDLLQSVPGVGKIVARTLMAELPELGTLNRREAAAITGLAPFTQTSGRWRGKSFTSGGRASVRSVLFLASLSAARHNPQLKAFHQRLIAAGKPKMVALIAVARKLVILLNAILRDQKPWQNA

SEQ ID NO: 75257 - protein, 438 aa, unidentified
MKVLHERGAGIDVHKDMIKVAIRSPGEKPWTRKTEVFEFRTFYGVLQEMARELRRRGVTHVAMEASGVYTEPVYHALCEQDFAEVIVVNPAHVKAIKGHKTDAKDCARLAELLECGLLHGSFIPSAEQKQVRDLTRYRMKVVQARTSEIQRLHKALESAGIKLSSVLTDITGVSGRLMIDALIDGERRAQVLADLARGTLRSAGKQADLSMALAARFTDHHAMLCRLHRDQIKLHDHAIAGLDEQIADRAGRWPRELGLLKTVPGFGDVVSAAWLAEIGPEPHRWFPSHDKLASWVTLCPGNNISARKRKSGRTGEAGTYIKPVLVQAAWAAIQARGRLQARYRRLVRRFGGDKNPGAKKKAIIAIAHTLLKIAYQVLKTGQAYTELGADFYTRRESPQQQHAYLERRLQKLHPGCTVTVTISPPPDSHPPGTAPEAA

SEQ ID NO: 75258 - protein, 308 aa, unidentified
MTTIYTGLDIAKLNLQLHLAGRIHDLPNTAAGHRRLLKLLAAQAGAHVVCEATGGYERDVVAALHEAKVPVSVLNPARVRHFARATGQRAKTDDIDAAVLSACGQALQPKPTAPRAEPEQQLAELIRRRVQVVEILVAQRQQAERLTLPALRRQAQSLVRRLERDVAQIEEQLQALRTQAATLNERVQKLEAITGVGAITALGVLAELPELGTLNRRQAAALAGLAPHPRESGQWHGRRSIGGGRTPVRRALYMAALVAAHSNRQLKEFYQRLRAAGKPAKVALTAVMRKLIVLMNRILKNPNFALQN

SEQ ID NO: 75259 - protein, 425 aa, unidentified
MSEVESVKREPQFAAFVSIDWADKKHVWCLQAVGTEKRESGELEHTPEAVEAWVGQLCQRFSNRPIAVALEQSRGALVFMLSKYEPLHLFPVPSTMSAAMRTALYPSGAKDDPRDADLLLDILLKHRDKLHRWSPDTEVTRRVQNLVEERRQLVDEKTEQVNRLTSHLKIYFPQILDWFDLDTELACALLERWPTLEELQKVPPTKLREFFRQQHCRDQERVEGRILAIRQAIPAIRDRPVIEAKSTVVKVIVQLMRSLRAGIADFDKRIEEAAAAHPDFFIFESLPGAGAVLAPRLLAALGSQRERYGDAGEVETYSGIAPVMEKSGKTKWVHFRWACPKFLRQSFHEWAGHSIGHSVWARNYYQQQRRKGRRHHAIVRSLAFKWIRILFRCWKDRVVYDEGKYLAVLAKRGSPFAGVVAAGTL

SEQ ID NO: 75260 - protein, 452 aa, unidentified
MLPRDGAVIGVDLADEKQALAVIDHDVRVLARKTVRVKAFRLGEALSWAAEQARAKGFTSVTVACEPTGPRWLQVQRLCAERGLPMVCVQPLVTHIARQQQDYTMHKTDEADCVMIARLAAELHCYVPEELEEVWADLRYLGRRRAALITSCTASEQRVRDFLSVAWPVATEACAQPFKSKTWLAALQVVASRCGGQPEELADLGTDAFAALVRSALGGWDGQRLRGPVCQAVFAALTSAEGVVRAHRRGLLRRISAELGDLQRARGQLRDTEAGMAAALASLGLARLAGIPGLTATGAAAILAETGDPNRYDSSSSLVKHAGMSPSDNASGAFDGEAHISRRGRPSLRLTAWRAVWPMLLHNPVMAAKYQAMTATPAQAAAGDRDDGTGRAGHPSAAAAAARRRRAKARVACAAALLRWIYSIVVHGTSWDPDVASGRKDHQDALSYREAA

SEQ ID NO: 75261 - protein, 350 aa, unidentified
MEKIYIGVDFHARQQTICYLTTDSGELLFHQLKHQDKAAVRAFYTQFTGHVIVGLEASGYSPWFERLLEELGCEVWLGHATEIRRRARGRHKNDRRDAELILDLMLHNEFPRLYLPPLQSREVLRMLRYRQKLIKVRTIGKNSLQALALQSGLAKGPHLFTKAGLQELQSAAMTPAMQWQRKQWLQLLESLNERLLETMLWLKQQSQADQRISRLRTHPGVGLLTALCLVHSLEPVSRFANSRKVTAYAGLDPLERSSAERQRFLQISKGGSRVLRFLLVEAAHTALRKDAELKRFYQRLAERHGRPKAKVAVSRKLLIRTYIMLRDEIDYAEFQRRAVAARPARDATGL

SEQ ID NO: 75262 - protein, 547 aa, unidentified
MNITTVGAEKKEELIVNSENHKDENVNSRDPEKHEDLDSAKMRKDLQDTQWTEMLNRRDEAIRQTMRDKYIKVGMSTKGVHDALVKIDDTLKALREEIHSGTGVYNWKNLEVGRRFTTDDKIGLVDEQTLIVGADIGKNEHHIRAFNKSKKELKRKDILRFDNREEGLEKALVWIEEKRVEYGFTKVILGCEPTGHYWFDAALYFEHNGITVVLVNPNAVNKSKELDDNSQEKDDRKDPSVIAKLVIDGRYSVPYLPEGNYAALREIEKLRIWYMEERTMCINRLHRFTDIHFPEIDDVTQSSEGKTNQLILLNAPLPEDLIALGIEGIQQLFRKNKLRGIGRKLAKRYYDAAVKSIGVTACPEMARIEARYLVEDIQKYDERIADLEERYAEYGVKIPNMEKVLEIKGIGIASLCDALAEIGDISRFEDASQIFKLAGFVPVHQSSGKHIGEFKISKRGRKHLRKALWILARNVSTQNDEWRQLYNYYLTRENNPLTGYQAYVAIAGKLLRVIFAILRKGYTYDPQKLLSEVKRVQTKPEEEAKIA

SEQ ID NO: 75263 - protein, 412 aa, unidentified
MRVVHERCCGLDIHKKFVVACLLATESDGTVHKEVRTYSAMTNDLLGLADWLRGEDCGPVVMESTGSYWRPVFNLLEEQCEVLVVNAYHAKAVPGRKTDVKDAEWLADLLRHGLLRASFIPAPTQRHLRDLTRYRIHLVDERARLINRLQTVLEDANSKLASVVSDVRGLSAREILQRLLEGETDAQALAELARGKLRAKRDALAQAVVGRLQEHHVFLLREQLAHLDYLDAAIARLDAELAARLAAEQEALALVQTIPGVARRTAEVLVAEIGTDLTRFPSAEHLASWAGMCPGNAESGGRRLSGRTRRGNAWVRRTLAEVANVVSRMKGTYLAAQYRRIAARRGKGRAVLAVGHSVLVAFYHMLTRHQAYRELGADYFDDRQRDQVQRRLVHRLERLGYAVTLEALTTPS

SEQ ID NO: 75264 - protein, 370 aa, unidentified
MKKYSEAFIGFDTAKKKHAVAIADGGRNGEVRYLGEIDSLPLTVEKVLGKLADRYAKLHVCYEAGPTGYGLYRQVKTLGHECTVVAPSLIPKKPGDRVKTNRRDAVTLARLLRAGELTSVWVPDATHEAVRDLARAREGASEDLRKRRQQLLAFLLRHGRIFNEGKHWTLGHLRWLARQSFEHPAQQIVFQDAINAIEDGAVRLRSLDQQLTAVVPSWSMAPVVAAFQAMRGVSFIVAVTFVAEIGDVRRFDNPRQLMSFLGLVPSERSTGETVRRAGLTLAGNRRARRVLIEGAWTYRYPARVSETLRARLERLPKAVRDIAWKAQVRLCARYRRLIAVGKKTAVVIAAIAREMAAFLWAIGRQVVPLT

SEQ ID NO: 75265 - protein, 388 aa, unidentified
MQVIAARAEAPTAIQTDLRAIFVSLELSRSTWLITSLSPGGGEKMSKHSVQAGDIAGLLRRFAQLKEKARARTGRDFPVITIQEAGLDGFWIHRVLQSEGIESHVVDAASILTSRRRRRAKTDKIDGETLVRTLLAYKRGEPRVCSMVKAPTPEEEDRRRICRERRALVAERVQHINRIKGLLFAQGAFDYEPLKRNRRTQLEDLKTGDDRPLPVNLKAQISRELDRLEVVLQQLQVVEAERDALLEPASEASPAPAAMLSQLKGIGPEFATILYTEGLFRGFDNRRQVAAYAGLAPTPWQSGSVNHEQGVSKAGNPRLRTTMIQLAWLWLRHQPDSALSRWFQDRVQRNGGRMRKTTIVALARKLLVALWKYATSGVVIEGAVLKAA

SEQ ID NO: 75266 - protein, 408 aa, unidentified
MNPLYVGIDVSSKNNVIYLMLPNGDKHSSFSLANSHDGSTQLVKRIFTAMTSNNIDSVLIGLEATSVYGDNLVYFLKEDTTLASFDRKIHVLNPKQVNKFKESYNDLPKNDYVDAFVIADCLRFGRINKEVYMDDYRYKALQNLTRARYFAVTNLTKEKQRFINVLFKKYSTMTQEKVFSDTFSTTALAVYEKFESAETLAKMDLQELTAFIMEKGKNRFPDPDAVAKALQKAARSSYRLPKTVNDSVNQVLAISITSIRALESQIKAFDKAITKQMELLPNVLISIPGIGPVLSAGIMAEIGDINRFQNQAALAKYAGLAWQQHQSGDFEAQTTRMIHSGNRFLKYYLCEAAFSLVRCDKEYSRFYRLKYKEVNRFQHKRALALTARKFVRLVFALLKDNRLYRPAE

SEQ ID NO: 75267 - protein, 370 aa, unidentified
MQTVRSFVGMDVHKETISISVAEDGRNGPVRFIGVIPNQPDDIAKMAKRLAKHGELDFCYEAGGCGYNIYRQLTALGHSCTVAATSMIPRKPGERIKTDRRDSQKLAILHRSGDLTKVWVPDAAHEALRDLVRARVDASMHLMRARQQLLAFLLRHGRSYPTGKHWTQRHRSWLAGQTFELEVHRIVFQDYVEAVWTAQERRDALIERIAAMTTVWSLGPLVEALRGLRGIDLLSSATFLATTGDLSRFESPRMLMGYLGLVPSEHSSGGSVRRGGITKTGNREARRMLIEAAWSYRYPARVAKEKAEILVRLPKSVRDIAWNAQTRLCARYRAMIARGKKPTVVVAALARELAGFIWAIGQEMRTPMTT

SEQ ID NO: 75268 - protein, 318 aa, unidentified
MRIKECDLQARQQTLAMLDTGTGEVVNRTLPHEGKSVREFYSTLPGPVRVGIEATGSMKWFLQLMQELGIDCQVGHPATIRAAEPRRQKHDQRDAELLLKLLVENRFPSIWQPSQELLDLRGLLLHRHQWVRLRTRIQNALQAIALANGLRRGSSLWSESGQRAIASLPLATHTAQRRSELQAMYARFEAEIEQLKQQVLQQAGPRPTAGLLMTHPGVGPITALATDVFLGDPKRFSNGKALASYIGIIPREHSSGGRQRLGGLSKQGNPLLRLLWCEAAAHAVRRDPELRRFYRRKLVQKGLGKARVAAARKLGPGN

SEQ ID NO: 75269 - protein, 341 aa, unidentified
MNEVTLIGIDLGKHVFHLHAQDAKGHEVFRKKLSRAQLIPFFSNLKAVTVVMEACPGAHWLARKLDAMGHQAKLISAQYVRPFVKSNKNDYIDAEAICEAASRPAMRFVEPRTEAQQLLAALHRAREGLVTERTATINRIHGVLLEFGIVIPLSRAMLRRLPDVLAVHDLPPRLIQLIHRLHAHYRYLDQQIDDVERDLTSQLHEDENAARLLSIPGIGTITASLLASEVGNVAQFAGGRNFAASIGLVPRQHSTGGRSVLCGISKRGDKHLRHLLVQGARAVIQRVETRTDRLGEWIRSMLRRRHSNVVACAVANKLARIAWAVLTRHTTYDAARLKLAD

SEQ ID NO: 75270 - protein, 478 aa, unidentified
MTPPKDYCLAAPCPPTPLLPPLPVLSDALQVCNPHAAGIDIGEAEHWVAVPPGRDPQPVRRFGTFTVDLDALADWLIDCGVITVAMESTGVYWIPLFELLEARGLQVCLIDPRQAKRAPGRPKTDRLDCQWLQRLHAYGLLAAAFRPADQICVLRSYLRHRQMLLTYGAHHMQHMHKALQQMNLKLSQVVSDLTGATGMAILKAIIAGERDPLPLAKLRNPHCQHSEDDIAKALQGTWRAEHLFALQQAVELYQFSHQQLTVCDQHIQTHLGTFADKSHGQPLPPKARRHKKANEPRFDARTPLYRLAGVDLTTIEGIEEGTALVILSEIGTDMSRWPSVKHFCSWLGLSPQHKISGGKVLSRRVRPGAQRVAVALRLAARTVHKAHTALGAFFRRLRSRLGAPKAITATAHKLARLVYSLLKHGSAYVQQGLDAYESQYRERKVKAMARQAQALGYTLVALGTPEGASLDAVTAPIP

SEQ ID NO: 75271 - protein, 409 aa, unidentified
MDVVFDRVAGLDIGKKSVVVCVRTPGERGRRVSQIRTFRTMTRHVDVLGDWLVEEGVQVAAMESTATYWKPVFYGLEDRVECWLLNAAHMKAVPGRKTDVRDAEWIAQLVEHGLVRPSFVPPPSVRRLRNLTRYRVQLMGDRTRHAGRLEKLLEDASIKLSSVASNITGTSSREMLAALVAGERDPAVMADMAHSSLRRKIPDLTEALIGRFDDHHALLVGAMLRELDLVDGALVRLDAQIAAEMAPWKHELDLLRTIPGVGQVVSQVFIAETGGDMSRFGSPESLAAWAGVAPAVHESAGKRTPAGSRRGNKWLTAALVEGAHSAAQSKGTYLAAQYARLASRRGGKRAAVAVAHSMLVSAYWMLVRDEPYQDLGPDWLSKRNDQAHTRRLVAQLERLGHTVVLDPDA

SEQ ID NO: 75272 - protein, 387 aa, unidentified
MNNAMGAKMQSIKTKAGVDVSAKTLRAVRRRGSEDEEKEFTNDAVGHGEVLKWVGKSARVCMEATGVYHLQLALMLRRAGVEVMVVNPRVAKDFARALGNRSKTDRVDAWSLVEYVERMQFVAWEAPSQAVLELRELGRRMGELVQDLVDEKNRSHAKGVSGISKFVMADVKAHVAQIDKRIKQVEGAAVQVVEGDDDLRKRFEILRGIRGVGRRSAILLLSELAVLDPTMTVKQLVAYAGLDPRSYESGTSVHKTVRISKTGNARLRAILYMNALSAIRHDRGARLFFAGLVARGKKKMQAIVAVMRKLLHGIWIVQQRRVAFESSVLFAASLAKAESSDSAVAATQPEPSQSHPKGRSEAEELPQQLDTGSAQATRSPKKRSKAA

SEQ ID NO: 75273 - protein, 349 aa, unidentified
MSPKLNAAIAVIGIDIGKNSFHVVGLDWRGAIVLRQKWSRGQVEGRLANLPPCLIGMEACVGAHHLSRKLTSLGHDARLMPAKYVRPYSRGQKNDFRDAEAIAEAVQRPTMKFVATKTAEQLDLQALHRVRERLVSQRTGIINQIRAFLLERGVAVRQGLRFLRAELPRILAMSCDVLSPRMVRVLEDLACNWRRLDERIEGLSSEIEVLARQDAGCERLMSVPGIGPIVSSAMVAAIGTGDAFTKGRDFSAWLGLVPKQISTGDRTILGKISKRGNRYLRVLFVQAAWVVLIKPKSWDRHGLKPWLEAAKKRLHHNVLAIALANKLARIAWSVLARGRTFEASKIQVA

SEQ ID NO: 75274 - protein, 392 aa, unidentified
MIYVGIDVAKDKHDCFLTNSDGEVLFKSFTIPNNRKGFETLFQRVESVSDDLTKVKVGLEATGHYSYNLLGFLLDKGLTTYVINPLHTNLYRKSLSLRKTKTDKVDSRTIATMMMSDMNLKSYSDTSYHNEELKSLTRYRFDKVKERAKLKSSVSRLICILFPELEKLVPTLHIASVYALLSEFPSADAVANAHLTRLSNLLSESSKGRYGKDTAVMFRDAARSSIGSHMPAKSLELKHTIKLIQELTAEIDEIEAAIKRIMDEEIQSPILTIPGISYRMGAMILAEIGDFSRFDSADKILAYAGMSPSTYQSGQLDNCYSHMEKRGSRYLRYALYNATKYVCHWDKSFGAYLEKKRSEGKHYNVALSHAAKKLVRLIFAMEKSGKAYLPTA

SEQ ID NO: 75275 - protein, 310 aa, unidentified
MQTICGVDVSQAWLDAWIEAVGHQRFANTPEGADALGAVCDANGVELVVMEASGGVERPPFLALWQRAQPCAIANARSVRKFAEAMGYLEKTDRIDAEMIARFAEAKRMVPTPPPSADQQKLTALATRLRQVTRDLGVQKRRLYSTSEPLALDSLKEAIAFFGNQAKRLATEIASLVEADPLWVALDRTFRSVKGVADRTVAFILADLPEIGTMSNRAITKLVGLAPLADDSGKRQGPRSIRGGRAGVRSILFLVADIARKYDPSLTAFRERLLAKGLARMEVRVALARKLLVRLNAKAREVRAELANAL

SEQ ID NO: 75276 - protein, 343 aa, unidentified
MEYGAIDLHTKESEIRIVTADGPVVLHRRVATKREALAAVFGGRPRLRILLESGTESEWVAQHVEALGHEVVVADPNYAPMYGQRNRRIKTDRRDVIGLADANRLGIYRPAHRVSSAQRPVRRQLQVRDQLVRMRTQVINLMRGQLRSEGLRVRSGRAESFVARYQALEVPAALRAVLEPLVQGLTALAPLIAAADTWAHETAHGDGVTRRLMTAPGVGPITALSFQSTLDTVTRFRGPGAVSAYLGVVPQEDSSGDRQRRGRITKAGPARVRGVLVQASWTVWRSPRGSATLHAWVHRLADRRGKRIAIVALARRLARILFAMWRDGRDFQPARVSRAATAA

SEQ ID NO: 75277 - protein, 424 aa, unidentified
MSSDLEIAAFIGLDWADQQHVIRLRVAGSAPVEAQLLDQKPETLRSWIGQLRQRFGGRTVAIALEQSRGSLLYALMNVDFLLLYPVNPQNLAQFRKAFYPSGAKDDPQDAFLLLEMLEKHRDRLRVWVPDDADTRCLRLLAENRRKLVHRRTALTNQLTSLLKESFPQALDWAGPLDSLRACDFLQHWPSLQILQKTPTSRLRKFYRDHTRLDSDAIHQRLDQIRQAQPLTSDSAVLAAAELMIPALVRQLRCLIESIQQFDQQLKDRFQQHDDYTLFHSFPGAGPALGPRLLSAFGSNRNRFECAAEVQMLSGIAPVTERSGKSHWVHWRLACPKFLRQSFHEFAAQSILFSTWARAFYDQLRSRGTSHHAAVRTLAFKWIRILFRCWKNRTPYQEQIYLASLRRHGSPLCAAPSSPTTGANL

SEQ ID NO: 75278 - protein, 318 aa, unidentified
MEQQEQACFVGIDVAKDHLDVAVRPTGAARRFAADELHTLVGFVQQARPTLVVMEATGGLETAVAAALAAAGVAVAIVNPRQPRDFAKALGKLAKTDAIDAAVLAHFGEAVRPEARPLPDAQTRELEALVMRRRQLLEMLIAERCRLSSCRVSSMRQSLEHHIEWLRKQVKDLDKDITKSVRNSPMWREKDDLLQSVPGVGPVVSSMVLVSLPELGTLNRKQIAALVGVAPLNRDSGKMQGKRSIWGGRAPMRAALYMATLVATKRNDKIRDFYQRLLTAGKAKKVALVACMRKLLTMLNAMLRAGCRWKSKEVPAPA

SEQ ID NO: 75279 - protein, 365 aa, unidentified
MSGIGTDPHKSQHTAAATEAATGELLDDLTVAAKPKGHAELLRWGRALGADRLWAIEDCRHLTGNLERYLVAHGERVVRVAPKHMAGARRSVRERGKSDAIDALAVARAALREGPERLPSAFLDEQAMQIKLLLDHREDLEQESTRIVGRLRWHLVDLWPELELPARAFERNVWLDRIGRRLARAEQSTRVRICREQIRALQALLRRSRELERELTVLVKAKNPALLELPGCGPLTAAKLIAQTAGAERFPSEAHFARLAGVAPIPVSSGRTDRHRLDKGGDRQLNCALHRIAVTQKRVHAPAQHYLARKQAEGKTNREALRCLKRQLVRTVLRLLRPVSSDRTDPLAMNKSTNIRKPLQVAALT

SEQ ID NO: 75280 - protein, 327 aa, unidentified
MAKQKQPKEVTFEEVVERGCGLDIHKKEIVATVNGTGITQETRTFQSTTRSLTELKEWLLTLRVTHVAMESTGVYWKPVLNILETGGFTIMVVNARHIKYVPGHKTDKKDSAWICKLLRAGLLKGSFVPCRSQRDLRDLTRYRRKLVQQQAAEHNRMIRIFEDANLKLSSVFSNIRGKTCTAVIDAVIAGETNPEKLSELCTHWKLKSTKEEIALAVEGKFTEHHIFMIRAIRTSISNIEAEIDHLDKEIERRMQPIEERIRKLCEIPGMSTNSLRELLAEIGVDMEVFPTAEHLTSWAGLAPGNNESAGKKKVHTPTTETKLLRLS

SEQ ID NO: 75281 - protein, 434 aa, unidentified
MDEVSDEPLYRDRVCGIDIGKAGMVATIRVPSDSNPARRAAETRSFGTTRREVLALADWLRCWQVPAVVMEATGDYWKGPFYRLEAEGFECVLADARQVKNLPGRPKRDPSDSRWLAACFERGAVTSCFVATGEFRVIRLHTRYRRDLIEERTREKQRAEKLLESAAIKLSSVVTDLHGVTGRDIMDHLIAGERGPKVLAQLARGRARRKLCELEAALEGAEFFTAEHAALLAAMLERIDGLSAQIGKLSEVIERLVAPYEEQLQQAESMPGWGRRAAQDAIAETGVDMSRFPSGAHLASWAGRTPLDNQSGKRKGKARSRKGNRYLAGITGETATAAGKTQTREGARYRRLARRRGKAKAQVALGNTQLKVYHKLLSSPGARYADLGPDYYERQASTRRQIAHHVGKLGALGFEVTLCRIPAPEDQAADTPAA

SEQ ID NO: 75282 - protein, 432 aa, unidentified
MEIINNHSAGIDIGSRNIYIGLSDSPVKVLGTFTKDFKEAGAYLREHNVTSVAMEATGSYWVILYDILIEYGLDVWLVDGRQTRQVPGRKTDVKDCQWIQQLHSYGLLNRCFVAEGDLKEVRSYQRLRDDHIRSASMHINHMQKALIEMNIRLPEVLDQIHGASGIAIIRSILTGERNPQILLSLCHSSIIKRKSTELLSALEGFYTKQGIFALRQAYEAYMFYQKQISECDNALSNLFSKINKGKSIREVSGRKAIRHHKPDIDELGKHMLDIFEGRDATILPGITDYSWMQIYSETGADLERWASEKHFTSWLGLSPGQNNSGKTKKRVNKKGKPAAGKIFRTLAQALLSSNKIAFGAFGRRLRGRKGPRIAVKAVARKIAAQYWPLMVKGKDFIEQGIANYQQILLQQKTKYLNKLALELNVEVMPMKQ

SEQ ID NO: 75283 - protein, 355 aa, unidentified
MTASYDYHIGVDYHKSYSHLVVQDSAGKTLRSGRVKNDRQSLGGFLERYRENSHAVVEATRNWMVIYDWLDDICDDVVLAHPLKVKAIADAKIKTDKIDATVLAHLLRADLVPEAWAPGERARELRVALRERMFYVRLRTMTKNRIVTVFDRYPEQTAQLKKLGDLFGKAGRVQLAQVNVSEIDRIQIDRGLAFIGDIDGRIKQSEATIRTMTKANGNVRLLKTIPGIGEFFARLIDAEIDDISRFRNAKKLAAYAGLVPSTYSSGGKTFHGKIIKQGNKWLRWAFVEAVTPAIVTDAQLRAQYEHLKFRGVNKARVAVARKLLTIAFQILRDQRAYEPRGASPTEGASTISRLS

SEQ ID NO: 75284 - protein, 475 aa, unidentified
MEEVEFKFSVDWTQPAFFCGLDVHKYELAVAIYSKDDSQSEFLKTNVFSTDSAGLRRFWQFVKKYRPRGFVMEATGIYHHVIYRFLQKMRAKVHWPFKILVVNPADASGIPGRQKFDRIDAENLAKYLSMGLFRDGKPIIEVLEDIKAIFRTAARIEKDRTALKNRVKKTLDRVGIRPRGLNLNYEWVREFLHHYIEQNLTLGECLKEIHLNPTILKEHRNKILKNLKKFFPYFEFSLTSAQKAIIRQDLVELDFKTARKSLLAIEIDHMMLDRPGLRQYAHVLSSIPGISPFSAVWILAELGNIQRFPRKRQLLAYCGCCPRIVSSAGKVYSAHISRHSNAYLRTIFYNAAVVTCNLVKKDSALKEYARHVTARKGSYSMKLVYCIVAAKIVKIVHAVLRDNVVFEPDHGISIRKQSSSYGSDDFTISDRKLIRRARNSLKRVNEVANIGLLGEHSLKLAEQLESILQRKKFSD

SEQ ID NO: 75285 - protein, 366 aa, unidentified
MMNHINDSELSSPEGTRGQFKGRSFAIKLGIDVHQTFYVVVVQEGGSTPKPPQRFPKAAFLVWAAKLRQKDPGAQWHAVYEACGFGFGLQRQLSALGIECQVVAPQKLDERQQRVKTDGRDARTLCLKLSRYVEGNKEELAVVRVPSEAEEQLRALHRQREQLVRTRKQWEAHGRSLLVNHGCEPVQKWWKARAFAALAVPAWLRELLGHTQPLLLALEAQIRALTVQLQAAAAPDQPRGLGALTSVVLDREVCSWERFANRRQIGSYTGLCPGEHSSGQTRLQTCITKHGNPRLRAALVELAWRMVRFQPEYRPVVKWRRILAKGAMATGAARKKAIVAVARQLAVDLWRLRTGRVAAATLGLKT

SEQ ID NO: 75286 - protein, 396 aa, unidentified
MTDESLSWFAAVDWGSEKHQACILDAKGDVAGEREFPHSGTGLTELCDWLLSVACDTSAVAVAIETPHGPVVDALLDRGFAVYAINPKQLDRLRDRFCVSGAKDDRRDARVSADGLRADRHLYRLVQVSDPAVIELREWSRLLEELQQERVRLCNRVRHQLWRYYPHLLDLTDDVGADWFLELWALAPTADKAGRLRETTIARLLKQHRIRRLNAETACRILRQPAIKVAAGVTEAAVLHLRSLFARLRVVNRERHQAERKLDELCTELSERASEGQSGEPCDVAILKSLPGIGRVTLAALLAEASGPLSRRDYPALRTLSGVAPVTKRSGKSNIVVMRYAAHARLRNTVFHWARAAVQNDPKSSCRYAALRKRGHSHGLALRDVADRLKAKRPCR

SEQ ID NO: 75287 - protein, 354 aa, unidentified
MFIIGCDYHPSVQQIAWVETESGECGELRLRHIEAAEQFYRELKKKGVNVRVGIEATGHSRWFERLLGELNYELWVGDPAQIRAKRVRKQRNDRFDAQHILKLMLEDNFPRIWVPTPENRDVRQLVLHRHRLVGMRTRVMNQLQAIAMNEGVRRKRGLWSEKGRAQLESLRLPPWTTRRRQELLELLDRFDPSIDQLSQAIEQEAERVPEVQRLQTHPGVGPITALAFVLVLGTPDRFRCGKQVASYLGLIPCEDSSADSWRLGHISKQGNALLRFLLGQAAQSVARSDEAWRHQYAHIAMRRNKAIAKVAMARKLAVRLYWMMRQGWDYQQWSKFGSHAGQPENRHGVPSNIE

SEQ ID NO: 75288 - protein, 347 aa, unidentified
MRFYTRQHRHYCGVDLHARSMYVCVLNGEGTVLVSKNIAAEPAPFLELVAPYREDLVVAAECMFTWYWLADLCEREGVVFVLGHALYMKAIHGGKAKNDRIDAHKIAALLRGGMLPQAYVYPRELRATRDLMRRRNYLMRHRAELLAHIQNTNSQYNLPAFGVRLAKPHLRRQAAEHFVEPSVRKSVAVDVSLVDHYDRELPALERYIEESAQGHDPVTLALIRTVPGMGKVLGLSILYEIADIARFLRVQQFLSYGRLVKPTKSSAGKVLGHSGKKIGNAHLKWAFSEAAVCFLRGNKPGQALRRRLAAKHGKGKSLAIIAAKLARAVYFMLKRRTAFDADRFFAH

SEQ ID NO: 75289 - protein, 310 aa, unidentified
MDIIAVGIDVSKNRLDIAVLPTREAFVVERNGAGLEALVARLRQVGPDIVALEATGGFETIVAAALGGAGLPVVVVNPAQVRSFARAIGQRAKTDPIDALVIARFAQATKPEVRPLPDEATRLLADLVARRRQIIEMIGAESQRKARTSVPRLQKSIERLLKALEKELASVDADIDDTMRGSPAWREAEDLLRSVPGVGPVIARTLIAELPELGRLDRKEIAALAGLAPHTRQSGQWRGRSFISGGRATVRTALYMGALVAMRRNPVLKTFYGRLVAAGKAKMVAIIAVARKLLTILNAIIRDQKPWQIA

SEQ ID NO: 75290 - protein, 345 aa, unidentified
MSQQHFVGLDVSVKETAICVVDLQGRVVDRAAVESHPAVISQYLLGLRLTFSRVGLEAGPLSPWLYAGLVEAALPVICVETRHMHAALSARINKTDRNDALGIAQMMRVGLFKPVHVKTPASQQRRLLLTSRKLLQRKVYDIENDLRGQLRNFGLKVGIVGTVSFEQRVRDLVLDLPHIAAVVIPLLAARSALRVQLAKLHKMLLDEVRADPVCRRLMTAPGVGPVVALTYRACVDNPARFSRSKCVGAHYGLTPRLYQSGETARIGRVSKCGDAMMRAALYEAALVLLTGSRGRWSTLKAWGMGIAKRRGVQKAIVAVARKLAIVLHRMWRDGTDFRWSAAQAD

SEQ ID NO: 75291 - protein, 460 aa, unidentified
MTLLERLGSQLPCRYYVGIDAGYKEHVAVVISLQTFVRGDDRWKQARCVHFPSTQAGLRKLQHYLDHFSTDHGEFFGLCEPTGGHYGATVFQYLLDQEYNMNLVENATVSHMRETMFPGLPKTDEMDTRVMARIGYLHEAVGEEFTLRPLALPDADSAHLLALCRDSWKLGIIITRARNQFTQLMAVTFPELKTFFTSSVSTVVPVRLVAAYPTPALLAEATEEEVKDVLWQAGGYQHAHRASELLTLARDSSGLLPDPGRAWRLEWLTNFLLTNVQYQAQLDKCVEGLLEQREDYELIVKVPYSGPNALGTILAVTGDVARFSNYRKYVAYGGYFAGLDKSQTIDRTRMSRRGNRDIKRALFQIAAPLVWFDKGVNPYKTLFQDKTAAGREWYKAMPFVCAALARHIYHCLKFNDPYDVEKAFRGSSLLPASEEEWLDLSATLDEKFEVMEVHLCQIEG

SEQ ID NO: 75292 - protein, 415 aa, unidentified
MISAVLECCAGIDVGKKFVVACVLKGPAQGDAQAQIRRFDTTNAPLEELREWLVNCGCTHVVMESTGEYWRPIFNVLEEAASLHIVLANSQQVKGLRGHKTDPEDAHWLAHLLRHGMIRPSYIPPPAIRQLRDLTRRRRQMVRTGAQERNRVQKVLEGANIKLGSVLSDVFGLSGQLMLEALLEGNTTPQQIAQLAQRSAKKKIPQIQAALEGHRMSDMQRKLIGFSLDHMAFLEEQIAALDQEISAHLHASELQQPHRNLQTVPGVKREAASSLLAEFGPDMKVFGSGAKCSAWAGVAPGNNESAGQKKRAPALRGNPWVRSTLVECAWSASRKNGSEFQQQYERLKTRLGHKRAIVAVAHSLALVIYQVLSTGEPYTKPGANPMPETQAARLIRHHTRRLRTLRRRVTTRAPA

SEQ ID NO: 75293 - protein, 348 aa, unidentified
MATACLVTLGVDTHKDLHVAVTLDQVGRRLGVATFPTDDAHHGRLWDWASGFGPIGQAGVEGTGSFGYRLAQFLTGSGVTVFEVNRPNRVARRRRGKSDPVDAEAAARAVLAGDATATPKNRSGPAGQLRALLVARRSAVKARTQTEQQLRSLILELPDLLRAQVDRRRIADLTTACVALAGADGTSIALGALARRWQHLDAEVADNDQHITTIVRRVVPGLLARPGIGPVCAAQLLVTAGDNPDRFHSEAAFAALCGVSPVEHSSGKTVRHRLNRGGDRAANSALWVIANNRLMHDPRTRAYAARRTATGASRKEILRLLKRYIARQVFPEIRHALSPPDALPNSAP

SEQ ID NO: 75294 - protein, 421 aa, unidentified
MKVTYQICCGVDVHKSFLVATIVKTTGGIEPSYQKKRFSTFNNSILEFKQWLLDNGCHDICMESTGKYRVPVFNLLEDEINVVIANPKWVKAVKGNKDDTKDSKWIGDLFRLGLVKGSYIPCKKVRILREYTRYRYKLVSCRSSEKNRYQNALTVCNVALDSVVSDIFGKSSTSIIDYLLEQSGTSINHEEIASKLLRSLKSKEDAVIHSIEGYQMTDAQKYRMRLVRAHMDYITAEINDVDKMIENMISSNPDFENAVQFLCTIPGVKRDSAITIISEIGIDMSQFSSSKRLCCWAGLTPGSNESAGKKKSVRITRAGIYLKPALVQCAHAAVKSDKSPYYKKKYESLVKRRGKKRAIIAIARMILTAIYQMLSTGEQWNPSDLYKIDIPVALVEKKRQKLSSRLRSCCNGKDYFLLMNH

SEQ ID NO: 75295 - protein, 336 aa, unidentified
MKKFLIGIDVSKQKLDVCLIDRSGAIKEEIVIGNHPSMIDAYLKTASKAYGFCLSELLVCAEYTGRYIYPLCCACHDFGVDLWLENPTQIKYRSGLKRGKNDKLDARKIALYALRFQDDAKLFSMPEKTIATLKQLIKERGMYIVDKGKYQGQLTDQKMFMDNDDYKRKSKRLKGFIKQLDEAISQTEEDIRNLVDSDPDLSHQFKLLRSVEGIGERTAVKMIVETNAFKDFKDPRKFCCHAGVAPFSYTSGSSIRSRNKVSNRADKSIKALLHMGALIAATRMKGELHDYYLRKVGEGKNKMSVLNAIRAKLVYRMFAVIRNDRMYEKNYQNALA

SEQ ID NO: 75296 - protein, 320 aa, unidentified
MSDSTERFVGIDVSKDSLDLFADPPAPQLPTHCGYDDTAVRTLCDALADLAPTLVVMEASGGLEQRLAAELAARGVPLAVVNPRQVRQFARALGELAKTDALDARILCAFARAIRPQARAPHDADTRDLADLLSRRRQLVDMRVQELQRQHSACSRTMRKSLAEHIAWLDKRIAQLDEDMGQRLRASEVWRAKDDLLQSIPGVGPVLSLTMLGLCPELGELNRREIAKLVGLAPLANDSGRHRGPRRIWGGRADVRRVLYMATQVAIRHNPVIAAFAARLRLAGKKPKVVIVACMHKLLTIMNTMLKTGQTWRAPEQLAQ

SEQ ID NO: 75297 - protein, 342 aa, unidentified
MAIVAGFDVHRAQITFDALDTDSGEVMRGRIDATPAAVTQWARRFRGREMHVAVEACTGWLFVCDALAAAGAVAHLAEPVETRALRGRKRRAKTDREDARWLRELLADGRLPEAWIPPEHVRQWRSRARMRHTLIDERTQWMQRIQATLYHHGVSGTPEKLRTREGRAFLAALDVPADARERIEIALAMVEAIEAQIAPLERELRQLARRQTGCKALMGLYGMGELTSLVTLCELGDVGRLSASRKAVRMAGIDIGVHRSDRRARAGKLTRQGSPQLRWALYEAALSACRPSSPDHADYLALKARGLSHTRASLTIARKLARRSFHVLRELGPAALEPVPTR

SEQ ID NO: 75298 - protein, 378 aa, unidentified
MKTVLQDKDTAFYNHLYIAFELSFKNWKLGFSNGDKHRIRNIAARDWKALRLEIGLAKEKLNCASDCEVTSCYEAGRDGFWLHRALIQEGIKSKVIDSASIEVSRRKRKVKTDRVDANGMLRLLIRHSHGEKQALHIIRVPSVEEEDQRRLNRERDRLIKERGSHSARLKSLFILHGLKLEKMSDIKHLLPTAKAAIIGYDLPADLKAEIAREHERYELVDRQIKELERQQKVRASAEDSKVIRIINQLCQLKGVSWQSSWGLSTEFFSWRAFKNSKQVGACAGLTPTPYDSGDSTREQGISKAGNKRIRKLMVELSWLWLRYQPKSKLSLWFEKRFGSGGKRMRRIGIVALARKLLVALWQYVEHGVMPEGAVFNAG

SEQ ID NO: 75299 - protein, 313 aa, unidentified
MNQPKSNVFVGVDVSKERLDVAVRPSGEHNSFANDEAGIAQMSECLCRLSPEMILFEATGGWQMNAVNALAARRLPVVIMNPRQVRDFAKATGQLAKTDAIDAAILAHFAEAVRPEIRELKPLEARKLEALNTRRRQIVEMLTAERNRLITAPEWTRPDIEDLIAFLKKRLATINLDINKLIRQSPLWREKDKILKSFPGVGPVTASTMLSDLPELGSLNPKAIAALVGVAPLNCDSGKHQGKRKICGGRAGVRSLLFMCAKTAVRCNPVIRGFYERLLRAGKLRKVALTACMHKILIILNAMIRDQVCWKTA

SEQ ID NO: 75300 - protein, 311 aa, unidentified
MTEITIGVDVSKDFLDAHRHPDGDGRRFANTTAGHKALIGWIGKTVERIVFEPTGPYHGALERALAKAGLPLAKVNPRQARRFAEATGKLAKTDQLDAALLARMGALLQLEVRPVHSETIAELKQLHIAREALVKDRTAAKNRGKAINLAILKRQNAERLKHIERQVTAIEAEIDSRIQADAELARRLEILISIPGIARLTAFVLLIEMPELGHMESGQAASLSGLAPIARQSGRWIGKAFIRGGRANVRQALYMPALVAMRFNPDLKAKYDHLIGAGKPAKVAITAIMRKLVVLANALLKAGRPWIPKTA

SEQ ID NO: 75301 - protein, 387 aa, unidentified
MFYCGIDVAKHKHVVSMMDEKGQVTRTGFTITNTRSGFDQLLETLQLQPESVSIGLEATGHYWLALYDELTRQGYPVTVLNPLQIAAYRKTGIRKLKSDASDAVWIADYIRVSNLPPTTPDLPVLLQLRELTRFRFRLSEQIGDVKRKLLSILDRVFPEYERLFSSVFLQASRAVLQEAVSAHEFADFDLHELADLLSQASHGRFGQEKAEFLQQQARLSVGVAFLADAARIEMGCLLAQIDLLETQRAQLDLAIAERMQQIPQHITSIPGIGPATGAAILAEIGDIQRFETLDKLVAYAGIDATVYQTGQFQASEAHMSKRGSPYLRQALWLAAVAALLHDPSLKAYYQKKRDEGKHHGTAVGAVCHKLLARVFVILKEQRPYVIR

SEQ ID NO: 75302 - protein, 402 aa, unidentified
MNAVGIDISKGKSMVAIMRPFGEVVASPFEVMHTDSELRQLADRLKSLNGETKVIMECTGNYFYPVAYALHEHGLFVSAVHAQLIHDYGNNTIRRVKTDKADAIKIANYGLSNWMELPRYIPEEDIRRMLKAYSRQYTKYIKIKVMLKNNLISLTDQTFPGVNELFSSPPRKRDGHEKWMDFVLKFWHCECICSLSQNAFTERYRKWCKRHGYNFSARKAEDIYISSLGHWLVIPKDDTVKLLVTQAVTQINAICETIAIIAAEMKRLAALLPEYPVVSDFFGVGEILGSQLMAEVGDVYRFRSKGSLVCFAGLEAPPYQSGKFESENRNVSKKGSPHLRKVLFQIMDCYLKQAPADEPVFQFLDRKRAEGKHYYSYMTAGCAKFLRIYYARVKAFLDTSED

SEQ ID NO: 75303 - protein, 341 aa, unidentified
MNHVAIDLGGLQSQVCMRRSDGTIIEEKKVLTRQLPELVKAWPQSRIVLETCSEAFHIADAAQAHGHEVRVVPATLVRTLGVGARGVKNDQRDARVLSEVSCRIEMPSVHVPSSLARELKSLCGSREALVETRTKLINNTRGWLRTQLWQIRKGATGTFAARVRARVKAQKQLLPEHVERQLVVIETVHEQVKLADKQVQRIACEHPICRRLMTVPGVGPVTAVRFVAALDDAARFPNAHALESYLGLTPGEDSSSERQRRTGITKAGPTELRRALVQAAWSAFRTQPSAPMVAWATQIAARRGKFIAVVALARKIAGILFALWRDGTIYRPAEGARSKSA

SEQ ID NO: 75304 - protein, 333 aa, unidentified
MLKVSTIGLDLAKNIFQAHGSDASGAVVFRKKLRRDHVLRFLAAQPACRVAMEACAGGHYWAREIAKLGHDVRLIAPGYVKPFVKRQKNDAADAEAICEAAQRPTMRFVAVKSEDQQAAAMVFRVRDLVVRQRTQTINAIRGHLAEFGLVAAQGLFHVAKLIAAIEDNGSAIPEAARPILSLLVAQLRSLDERVAGLDREIAKRAREDAEARRLMTIPGIGPITATAVAALAPSAQTFKRGRDFAAWLGLTPLQRSSGGKQKLGETSRMGERTLRRLLIIGASATVRWAMRKGAATDPWLIRMLNRKPPMLVIIALANKTARIVWALMAKGGT

SEQ ID NO: 75305 - protein, 347 aa, unidentified
MEIISRVGVDLAKNVFQLHGADRKGKTVWKRKLSRDKWLTVLFATVKPGAVIGMEACAGSHHWSRILISKGYEVKIIPPQFVKPFVKSNKNDANDAQATCEAMVRPDMHPVKVKTIEQQDIQAIHRIRNEIKSHRIAKGNQIRGLVAEYGLVAPKELSSLSRAIPEWLEDASNDLTMFFRQLLQSLYEDLCSMDKRMTELDKQIAVIAQQNPIAKRLQQLPGVGPLIATALVATMGDGKQYRKGRDMAAAIGLTPRQHSSGGKDRLLGISKRGDAYLRCLLVHGARSAMRTAKDKDDRLSRWITSLQDRRHANVAACAMANKMVRMAWAMMTRGVDYDPNFNVVSAN

SEQ ID NO: 75306 - protein, 383 aa, unidentified
MLYSPSADASFSHSTRTIYLALELSRRSWLVALHAPDAAKIELHRLPAGDGQAVLDLFARIRTRVERRTGVRPQVSCCYEAGRDGFWLHRLLEAHGVSSHVMDPSSLQVDRRARRVKTDRLDAQALLRALMAWSRGEPKVCSMVRPPSPDEEDARRPSRERATLLQERIRLVNRIQGLCATQGIDDYEPLRPDRRPRLTQLVTGDGRPVPPRLAAEIARQLDWLELVLRQLAEVETRRDAEAAVAKAAPSSKLGALLHVKSIGPELATVLAKEVFYRCFASRRHVASYVGLTPSPFASGRRSREQGITKAGNARARKALIELAWLWVRNQPDSALAVWFRSRVGSATGRVRRIAIVALARKLLILLWRYVETGALPADVVVKP

SEQ ID NO: 75307 - protein, 385 aa, unidentified
MTSTNSRFRIIPAQFDIFAGLDVDKKSMSMTFSDHATLFKSLRLPHNATHLLNYVNKHFADKRIAFVYEAGPTGFGLHDELLARNHTCLVVAPSMVPTEPGKRVKTNRLDSRNLALRLRGGELNGIHVPSRCYRELRHLVQLRDTQMRQLTATKCRIKALLLYESIEFPNPTGRWNARTIAGLHGLACSSEVRFKLDHLIGTLYFHFNSAATVQKRIRQFCKNDPELHQSITLLTSLPGIGWITAAHAVARLGDWRELKNVRQIAGFLGLVSSEHSTGEKENRGPITRSGDSRLRNKLIQCAWVAINKDPELRAFYRSVYQRQPKKVASRKAIVAVARKLTTRMYVVLKEQRPYIIRPEISVAPLTAEETVGPRERLDAAQNEQL

SEQ ID NO: 75308 - protein, 415 aa, unidentified
MNDLIRIGMDTSKSVFVLHGVDAAERPVLRKTLRRRQVIEFFAKLPPTQVGMEACGAAHHWARELGALGHEVKLLPAQRVKPYVARNKNDTADAEGICEAMSRQRMTFVPVKTAEQQAALMLAGMRDQLVARRTQLSNTIRGYAAEFGLVAAKGLEKIEPLLARITADESLPALARELFAVLGAEYHELKLKLRKIEAQLLAWHRQNELSRRLAEIPSVGPIGAALMVMKVANPRAFRSGRDFAAWLGLTPKDHSTGGKQRLGVITRAGDEALRRVLVLGATAVIQQVRRGRGHSSLWLVALLKRKPPKLAAVALANKTARIAWKLMVSGERYRGACATEVTHGNVCFEGASSQPRKPGAVLAAVKARPGSAAARRTGNATAGLDGGCARRPTTIAVGTKKRSMVEQRNESHGHD

SEQ ID NO: 75309 - protein, 408 aa, unidentified
MTIDNAIGIDVSMHESTFVGLARPEEVVLRSRLVPHTAEALNQVAAEILALPGSTVAFCECTGVYHESVVKALREAGVDVVALNPLLIHDFGGDTLRKVATDKAEAHKIALYGLAWGYKFTPSAVEDPIRVTLKAVGRQYAFFTKQKTAQRNHLHALSERVFPGVQSLFTSQDRDDGSVKWVDFLYEFPHAESVSKLSLAKFTERYRKWSKKHGYYAVKAGTIHAHAKSCVTSFPKNCDTTLIVRTAIEQVCQVSKTVAVYEKRMTQLAKLLPEYDCVMALYGCGDCTGPQLMAEIGDVRRFALRKGYKSLAAFAGVSPGDSQSGTYDAASVPIEKRGSPYLRRSLFCAVNTYLLHSPGNEPVYKTLDKKRSEGKKYLVYMTAAMNKFLKVYYARVMDCFSNLAASEI

SEQ ID NO: 75310 - protein, 320 aa, unidentified
MNSHYKIEKIQTEINHIGIDVSKQHLDVSIAGSKSQRLPNTQSGLRLLHQKLGRLAHPRVTCEATGGYEKLLVDSMLDAGIEVCVAAPGRVRYLAHAEGLLAKTDSIDAELIRRFAEKIPLPRQIKQDPAAQKLRQMSDYRRMLSEDIVKTSNRLELAQGYLREQLQSQLTHLQGLMKKVEVDIKAHIRNCEELAQKAARLQELKGVGPVLAATLLAHVPELGKVGDKTLACLVGVAPHPKQSGNFKGKSSIRGGRANVRHVLYMAAVTAARSNPILAAFYQRLRTQSGKTAKVALVAVMRKMLSVLNKMIAQPNFSLAH

SEQ ID NO: 75311 - protein, 337 aa, unidentified
MNVTLLSIDLAKSIFQVCGVNQAGKQVFNRALRRAKLPALIAQYPGIPVAMEACSGSNYWGRTFHEAGHKVLLIPPNHVKPFVKGNKNDRNDAFAISEAARRPNMRTVMPRSLEQTDLIMTHRIRERRIRARTALINQSRGLLNEYGIVVPQGASVLRKALPLLLEDAENGLTCIARHHLHSLLEEWRGLDEQIKELDQSIRQSARELPAARRLTGIRGVGDMIATAAVAKLGRGDQFRNGRQFSACLGLVPKEHSSGGKQRLGGITKRGNNYLRRLLVQGAWSIIRHVDNSQDRLSCWAREVIARRGKHKAAIAIANKLARIIWAMTRRETEYLAA

SEQ ID NO: 75312 - protein, 389 aa, unidentified
MSTVPCFVWRGLVTASKGEGSVDVSDGICFVGLDVHARKTAAAAVRLGSGEVWKARIAGSSSAAIEWLQTLPGPVRAVYEAGPTGFGLARAARAAGLEVMVCSPGAIPRQPGDRIKTDVRDALKLARLHAAGQLRAVTVPSAQLEALRDLVRAREDLRGDLMAARHRISKLLLRRGLIYDGPGRPWESPRHAAWLRAVDLGDPLTRVVLGEYLACHDVLLARRDRLDALIAEQAFDPQWAAVVGRLRCMRGVDTLTAVGLIAEIGDFTAFAHPKQLASFLGLVPAESSSGQKRRQGSITKAGSSHARRLLIEAAWHYRRRPAVSLTLRRRQDGQPPAAIETAWRAQLRLSARWAHLDARRAKRRTTVAVAVARELACFVWEIARQPDRP

SEQ ID NO: 75313 - protein, 352 aa, unidentified
MRKITTIGLDLAKKVFHVHGVDAEGNVVVARRLRRKEVLAFFANLTPCLVGIEACGSAHYWAREIAKLGHTVKLMPPRYVKPYVKRGKTNPGDAAAICEAVTRPTMSFVPVKGLEQQGLSMLHSARSQLTGQRTQLINAVRGHLSELGIVAARGMLGFAELAAIVRDESDKRLPVTARAALMILVRQIETISTEIAALDSTLRKENNASELGPRLESIPSVGPVIASALRARVTDAALFENGRHLSAWIGIVPENDSTGGKIKQKGLSKKGDRYLRSLLVNGAMAVVRQAQKRPDKHPWVAKLLARMSAKQAAIAIANKTARIAWAIMVHGGVYEAGHRAPQYRAQACAAAG

SEQ ID NO: 75314 - protein, 355 aa, unidentified
MDGTKYIGMDVHKESISIAVMNSAGKLVMECVIGTKANMILQFVAGLRGDLQFTFEEGTWAAWLYDLLRPHVTKIVVCNPRRNALLKDGNKSDRIDAQKLAELLYLNKLRPVYHGEHGLRAVKELVRSYLTITKDLTRVMTRVKALYRSWAIPCTGKQVYGQRHRAEWLAKITEPGVHRRAEFYYQQLDALRALRQDVRRELLKESKKHKAWKLLSRIPSIGPIRAAVLMGILQTPHRFRTKRQLWTYSGFGIETRSSADHRSVEGQLRRARKPASIRGLNENHNHDLKNLFKSAAILASNKPGPFQEFYGALLTKGMRPEMARLTLARKIAAITLHLWKKGECFDAQYLKPQTA

SEQ ID NO: 75315 - protein, 291 aa, unidentified
MENKIIVGVDVAKDWLDIVIAGAARVARIDNTAAAVSTWLDQVAPALVAFEPTGGYERVLRQGLRERGILFVRVHPNDIIAFRRSRGIKAKTDRIDARLIAAFAAEELSRRGIRPSIVGDETLRELAARRHQLVQALQAERCRLALAQAASVRDSITLVVDALRRSLETLEAELRAHIAADPATARLATILQSLTGIGPVTATTLIADLPELGHLTGKEIAALVGLAPQTRQSGRTHYRERTGHGRPAVRRALFNAARAAIRHPSPIKTFYDRLTTQKPTARQGRPHRCHA

SEQ ID NO: 75316 - protein, 327 aa, unidentified
MSSFVGIDIGATAFEVVIRKNDKNGAVKSYQQTPKDHEKLAAQLLKLKPACVVMEATGIYYLNLAVVLFNSGLKVSVINPNSFNHFAKLTLTHSKTDGIDAALLAEYAQRMTPRLWTAPDPKLLSLRDIGRQINRLVGKNNLHALQAKDSTYQPLIDDELEGIEYLELRIERMRNMALEIITNNENLKQKLENLTAAVGIGTNSAIMIICELELLPEHLKSSQISRFAGLDVRLTQSGTSINKPGRLSKAGNSYLRTALFMPALSAATHDANVRAFYQSLIQRGKKKMQALCAVMRKMLTGIWACLKLNLPFDSSKLFSEEHKKACA

SEQ ID NO: 75317 - protein, 371 aa, unidentified
MFKVGANSESVTADTGRQPKLILTPEEPMSKSTIPQQTTVFCGIDVSAATLDVALIEPDRALQHRQFSNCARGHKALIGWLGKCQGRVRVSLEATGTYSLDLALALHAAPHTELAVLNPKVANRFAQTMRRSKTDAADAMVLAEYSQRMPFLAWTPPSLSGLRLRALGRHIAALVTEHTREQNRLHASQSCSQAAPRCVLQDLKGALAALERRIVKMRHAARQLIQADAALEQRFRLLTGMPGIGETSAMAILGELALLAPQLTVRQWVAHSGLDPVHRQSGTSVHTRSRISRAGNRYLRRALYMPALTAVRWDPHMKGFYEALQRRHKTKLQAIIAVARKMLHAIYGVLGSRTPYDGNKLFPKLKIASAL

SEQ ID NO: 75318 - protein, 347 aa, unidentified
MYDHTVIAIDLAKIAFHACTISKHNKIITQRQFNRTRLMSWLIKQPRAIVAMESCGSAHYWARFAKRHGHQVKLLSPQAVKAYRQGHKTDANDAVAIAIAARQPNVKPVTPKTIEQQGLQGIERMRKHHSDTKTAQSNLIRGLLFEFGITIPQGDCSLKRDMADILEDAENELPISFREQLADMYQCFLKTEQALIKVEMALMGLIKSQPDCQALMAIEGIGPINALGLSLALGERGQSFANGREAAACIGVTPKQHSTGGKAMLGTIGKYCGKQYLRSTIIQGAMAVAKVVQTREPRTTKELWLKQLIERSSLKSAAVALANKNIRTAWAVLNSGQPYQRPRPLVA

SEQ ID NO: 75319 - protein, 338 aa, unidentified
MSIIRIGLDTSKHVFQVHGVDENEQPVLRRQLRRQDVVKFFAKLAPTRIGMEACGASHHWARVLRSLGHEVVLIPPQYVRAYVQRGKNDKIDAEAICEAMSRPKVQPRFVPIKTVQQQAALTMLGVRDLLVKQRTMLINAIRGHAAEFGVTAPKGPEQVAELLRRLVSDAGVPALAQEMIGELTCQLAALDAKLTAVQARLTAWHRHNQTSQLLATIPGVGPISGVSFALKVPDPKVFRSGRHFAAWVGITPRENSTAGRQQLGRISKQGDEDLRRLLVLGATAVIQQAKPGRASPWLVDLLARKPKKLVALAVANKMARIIWAMMISGEIYRRPQAA

SEQ ID NO: 75320 - protein, 338 aa, unidentified
MEHFAGIDLHSNNSYIAIIDNENRRVFKKKVSNDLQNVLHVLEPHRKQIKGIVVESTYNWYWLVDGLMEKSYKVHLANPSAIKQYEGLKHSDDVTDAFHLANLLRLGILPEGYIYPKEERPVRDLLRKRLQLVQQRTALILSFENLLTRNLGTRLHVNEINKLTEEDVEDIFHQEYLVLSGKASIATINFLGTRIQQIENAVHKAAKLRSEYKLLMTVPGIGKILALTIMYEAGPMERFAKVGNYTSYCRCVGSERISNGKKKGKGNRKNGNKHLSRAHIEAAHYAIRHYEYVKRYHQRKMAKTNNIVARKAIAHKLARACYYIIRDQKAFDPGKLFV

SEQ ID NO: 75321 - protein, 352 aa, unidentified
MRTSQKTAGIITTIGIDLGKNTFHLIGFDQRGAIILQQKVSRGQLERRLANIPRCLIGMEACSGSHHIGRQLQAAGHDVRLIPAQYVKPFLKGHKNDYRDAEAIAEAVQRPTMHFVAIKTPEQMDLLALHRVRSRLVSQRTGVINQIRGFLIERGIIVRQGVVPLRKALPEILSSQTGPLSPRMIGVIADLTQDWRRLDERIGGVSAEIEALAEQDDGCQRLMTVPGVGPIISSAVVAAIGNGAGFKQGRDFGAWLGLVPKQESTGDRTILGKISKRGNKYLRTLFVQAAHVVLVRRPRAAMRGLWPWIEQASKRLHRNMLAIALANKLARIAWAVLARGRAYQPRTAADAA

SEQ ID NO: 75322 - protein, 395 aa, unidentified
MHYIGIDWADSSHQIAVLTAEGQCISEFAINHTNDDVSKFCRQLELLAPVQVSIERPDGLLVDQLLEAGIEVYVIPPRIAARRRPRKSKDDRGDARLLANLLRTGDDDCRRLERHGSTVETLRQLLQAFEQLQRQQLRTSNQLRQIVKQYYPVLLSMFSDVATHISLAFLETYPDPNLAQRLTYTELEQFLKAHHYTHMRRLDTIYQHLRKSPLKARVWQGFSVHAQALVPILRLLNQQITALKREIRETFARHPEAGWWQSLPGSGELTSPRLLASIGDNRSVFPTAAVLQARAGTVPVTRRSGKSYAVRFRWACDKTLRKALTDFARNSIEHSGWARSYYFDQLERGHDKPRAMRGLANRWVKIIWTIWSRRETYNEVLHVANRSRKGKAVVR

SEQ ID NO: 75323 - protein, 355 aa, unidentified
MRQLEKVLKEVAGIDVAQKELVVSLGRLLESLSIEIFAYKVFVNSDKGIQSMIEWVSSCCENAAQMRYVMEATGVYHERLAYALESMNIDLSVILPNKISNYARSLDIKTVTDKTASQAIAQFGLERKLDNWVRPKDIYRELKQLTRERDQIVEERAMVKNQRHAEKSEAMPNQKSLVRIEDRIKFLNRQEKEIKLDITTLLKSHPELKQRVNNICTIPGVGELTAVTVLAETNGFELIRNKKQLTSYAGFDVKEKQSGTSIKGKPRISKRGNRHLRKSMHLPSLSSVKYNQSHKDLYVRLVSKSGIKMKALIAVQRKMLELIFVIDKNQNPYENDYHQKRVHHTNAEVPLQANL

SEQ ID NO: 75324 - protein, 402 aa, unidentified
MNCVGIDVSKGKSMIAVMRPFGEVVVSPFEVLHTDSELSKLAGLLKSLDGETRVVMESTGNYHAPVAWLLHDAGLYVSVVNAMLVHDYGNNSLRRAKTDKKDAVKLANYGLDHWLILPRYVPEEDTRLMLKTCYRQYQQYSKVQTMLKNNLISLLDIAFPDANRLFTSPPRADGSEKWVDFVAAFWHCECVCGLSEKAFTAKYHKWCRKHGYNFSEDKALDIYASACGHFGVMPKTDTAKLLVEQAIFQLRATSATLAALKQEMQSLAASLPEYPVVMGMFGVGPVLGPQLMAEIGDVRRFHSKKALVAFAGIDAPPYQSGQMAIRSRSISKRGSASLRRTLFLVMSVILQRAPMNEPVYQFMNKKRSEGKPYRVYMMASANKFLRIYYASVKAYLDSLEHD

SEQ ID NO: 75325 - protein, 414 aa, unidentified
MRVVYERCAGLDVHKKTVVGCVITPDGQQEWQHKLRTFKTMSGDLLQLADWLRQQGVTHVAMESTGVYWKPVFNILEDEFEVMVVNAKHIKFVPGRKTDVKDAQWIAELLQHGLLKGSFIPEAPQRDLRELVRYRTHLLQERTREVNRVHKVLEDANLKLGSVATDIMGVSGRAMLAAVIAGKDDPAALADLAKGRMRTKIEELEQALTGRIKDNHRLLLRLHLEHIDDLTAKLGELEEEIGKLLPPFDQDDLIERLDEIPGINQVTAQIIIAEIGTDMSRFPTANHLTSWAGLAPGKNESAGRNRSSRTLKANRYLRPALVQAAHAVSRTNTYLGEKFRRLARRRGKKRAAVAVARTILVIVYHLMRDGTRFIERGADFFDQLKPQSTQQWLTRRLERLGYKVTLEPIEVAAA

SEQ ID NO: 75326 - protein, 319 aa, unidentified
MAQNDLVVVGIDVAKDKVDACIRRFTLWQTFPNTAQGHRKLVAWLRKYQVGKAVMEASGGYEREWRNVLHNASIEVRIVDPRRVRSFALSAGRLAKNDPIDAEMIAWFAETFSQAPGQIPDAAREELAALAKARKALVDVKIRLQAQDEHAAPEPARKAHARVLKSLAAEIDKLEAAISAKVNATPEFAERAEIIESVPGLAQATSAILIAGMPELGQVSDEVAAALIGLAPYDDDSGKRRGERYIKGGRRWVRNAIYMPCLGAATQYNPVLKAFYQRLLAKGKEPKVALVACMRKLIIILNTMLARRQKWDPNRYAVS

SEQ ID NO: 75327 - protein, 301 aa, unidentified
MQKQVTKLDYTGKDIFVGIDTHKKSWNITTMMGLFSKTFNAPASPETLRHYLDKKFPGGNYFSAYEAGFAGFWPHYQLLKLGINSIVVNAADIPTTIKEKVQKTDVRDSRKIAKSLQNRDLTPIYVPSQECLDDRSLCRYRNTVVKELSRTKNRIRSFINLNGLKVPEDIPEGRWPKRLINWLKEIDLSLSLRLTLNGLLEDYERLAEKKKCITKQITELSRTSRYEQDVKLLRSVPGIGLVIAMAFLTELENMNRFKTFDQLCSFIGFVPSTKSSGEKESVGEITSRAQVILRPLLIEAS

SEQ ID NO: 75328 - protein, 393 aa, unidentified
MICVGIDVAKDKHDCFILSSEGEVLADVFTIPNNAEGFDTLLQTIHRCARPEDKIKVGLEATGHYSYNILGFLLDKGLHTFVINPLHTNLYRKSLSLRKTKTDRVDARTIAAMLMSDVDLKSYTDTAYHNEELKSLTRYRFDKVRERAKLKQSVSRLVTILFPELEKLVPTLHMESVYALLSEFPGAKQVAEAHLTHLKAVLYGASKGRYGRDMATTLRDAARCSVGSVMPAKSLELQHTIRLIRELDAEIEDIETAIQSMMDEIQSPITTIPGIGVRMGAMILAEIGDFSRFGSPDKILAYAGMSPSTYQSGQLSLSGAYSHMEKRGSRYLRYALYNATKYVCLWDPAFAAYLAKKRGEGKHYNVAISHAAKKLVRLIYAMEKSKQSYRNAA

SEQ ID NO: 75329 - protein, 313 aa, unidentified
MKNLSQVHVGVDVSKEKLDIFIYPKGVSITVENSKKGINKLIDTLSKYDVLQVVFEATGGYEKQLHDMLNKKSYNCWNVDPRRIKGFIISTGCKAKTDKIDAKKIAEFSSKYSKDYDSTIRTAQEESLLSLVDRRFDLIKFLTSEKTRLKHPVHQNCITSIKKIIKMLEKEIKQIEKQVEKLIAENETISARSKLLESIPGIGKTTAATLIASVPEIGTISNNKISALVGLCPYEFESGSFKGKKFIRGGRIAPRNALYMCALTTIKYHLPLKNFYDRLIAANKPFKVAIVAVMRKLIVMANAILRNGEPCRL

SEQ ID NO: 75330 - protein, 359 aa, unidentified
MLYLGIDQHAKQLTINLRNEAGDVVLKRQVSTEWKRVRQFFAGIRRRARGSGFMAIVEICGFNQWLLEMLKEYGCKETVVIQPEKTSNKKTDRRDANALCELLWTNRKRFQGGKRPNGIRRIVMPSAKEAENRQLTALRQHLVRQRTKVINKARSILRKRNLEQECPTSAFTTKAARRWMKELELESIADQLELAIHLETWEQLDEKIATVEEEMSTRSEAPSVKVLASIPGVSEQGALTIASRIGDIERFPRPSSLANYFGLTPGCRNSGEATARLGSITKAGSTIARHVLNHAVMHVLRVDAQMRRWHKRIKMRRGTKIARVAVMRRLATIIWHMLKRQEGYRFHFEPFEEFLEYAK

SEQ ID NO: 75331 - protein, 348 aa, unidentified
MENVSRIGMDTSKSIFVLHGVDASDQVGLRKKLRRKEVVEFFRKLRPTRIGIEACGASHYWARQLSALGHQVLLIAPQHVKPYVRRNKNDAADAEAICEAMSRPRTWFVPAKTAEQQAGLMLAGTREAFVRRRTQLSNTIRSYAAEFGLVSSRGLDKIEPLLARIAADDDLPTLAKEMFADLGEDYALLQKRLEIIERKLRLWHRNDEQSRRLAEIPGVGVVGAALLAMKVPDPKAFRSGRDFAAWLGLTPKDHSTAGKQRLGVITRAGDETLRSVLVVGATALLRQVRLGRSHHSRWLADLLRRKPPKLVAVALANKTARIAWKLMVSGESYDRTRVGIAAREAAPA

SEQ ID NO: 75332 - protein, 370 aa, unidentified
MLDTTTFIGLDVHARSIKAVSLDVMTGEVRAATFGYDAGAVAEWVRSVDPKARCVYESGVTGFDLQKRLSGLGVDCAVGAVSKMIKPSADRRRKNDRNDAEFLARMLSVGNVVEVWVPDDECEAARDLTRALEDARDDLSRSKQRLSKFLLRHGLVFDERTPTGRRKGNWTRAHWSWIESIRFAERADNDVLAYYVDAVRRAAEEKARLEGLVEAEARKPRWRRRVDSLRCLKGVDTASAADLVFEAGEFSRFRNARSFAAWVGLTPSEHSSGESDRRGAITKAGNKHLRKTLVEAAWHYLTCSARPKDLARGQAPDPGARRHAAKGVRRLVERREALLARGVHGNKANVATARELACWVWAVGLMAEEA

SEQ ID NO: 75333 - protein, 348 aa, unidentified
MTHSTITTVGLDIAKNVIQVHAVDAKGTPIIRKSLKRHQVLPFFANLPPCLIGIEACGGAHDWARRLMALGHTVKLMAPQFVKPYVKANKHDAADAEAICEAVTRPTMRFVPVKTPEQQALLALHRARQGFVTARTAQANQIRGLLAEFGLVIPKGMAALKQRLPDILEDAENGLPDACRELMQTLSAHLNELHRQVEAITQRIAMAHQANPLSRRLAQIPGIGPVIATALLAAIGDIREFASGRQLAAWLGLVPKQSSTGGKTRLLGISKRGDTYLRTLLIHGARSALSAAQRSKEPGATWVTRLADRRHPNIAAVALANKNARIAFALLAHDRDYQPGHSPVRATA

SEQ ID NO: 75334 - protein, 360 aa, unidentified
MTNSENSITIGIDISKEFFDIYVYESAKTMRFDNNNRGIKLFIKYITPLKPTLVAMEYTGGLERQVFFALQNNNIPCCCIKPTNIKNFSKTIDANAKTDLISAKLIAHYAKILKPAPQPKPNESLLILKDLASRHLQLTEFLVSEKNRLSSSTFAKTKSQINKSIKVFEKLIEDNKKQFKELICSNPDLKAKIELLDTMPGVGEHSAMMLAVLLPELGTISGKQISSLCGVAPFVNQSGKYSGKAFIRGGRDKVRKLLYMVALVSITYNPVIKDYYNRLVKKGKPAKVAIVACMRKIITILNAMLTNNLPFIAEYYKLDLREQNYDSKIILTKKDEKNKEEADLVLSNTNLKEPVSKNIS

SEQ ID NO: 75335 - protein, 382 aa, unidentified
MPDVISSAPAAVRMRAALDVHKRTIVCAAQPDDPRAELRLEEIPNTERAVRGLVRRLGGPEGLVVCYEAGPCGYDLFRLLSAMGVACDIVAPALTPVAPGARVKTDRRDAKRLLVLHRAGALKFVAVPTLAQEGLRDLVRCRDDLVCARRAARHRVAKQLLRHGHVFREGKKSWTKTHQAWVRRQRLGDPLAQSALDHMLAHLDSLDAQIAALDHQLDEIAAREPWSDPVRWLCCFRGVTTITALGLLAELGDLRRFATARELMSFLGLTPSEYSSGEQRHRGHITKAGPRHARRLLIEAAWHYQHPPRVSQRIAAVHPHVPPDVAARAFSAQVRLHHRHRHLTSHGKRSTVANVAVARELAGFLWAAMTRQPLPAQEVTAA

SEQ ID NO: 75336 - protein, 346 aa, unidentified
MKILALDLGKYKTVGCDYESESGVHQFKRGFTTPAGLAKLVQEVKPDRVVIEVCSIAGWVCDLMWSLGIEVQVANTSDDAWRWRKVKQKDDRRDALKAARLSAVNQLREVYIPPIEVRQWRALITYRQQLVRRRTKIKNHLRDLLLREGQILGRGSSCWSQLGIKQLQEQARPFSECGPAELWRGELQLELEQLRAIQQQVATVTAQLDKLGAADARVQLLRTVPGVGPRLAEAIVALLDQPQRFRKASQVSGYIGMVPKALDSGETERRGHITRQGSRLVRSLLVEVAWAGLRHNAWVRQTYQRLSGGKKARKKIAIVAVGRKLLVKCWAMLRDNRAWDWQPQIT

SEQ ID NO: 75337 - protein, 430 aa, unidentified
MNEVDRNRLEEFRQLRKEIRQSEEHLIVGIDIAKDRHHAFFGTATGKTLLRRLVFSNDGEGFGKLLDQTEALRVRHGLKKVVYGMEPTGNYHKPLGEYLIHMGRMVVLVSGVTAKHNRESLDGRWDKHDDKDSANVADLISQGKCLYYEYPPAQLRGLRGLLSLKRRLKRQEQSYRVRIRNHLIAQYFPELDSHYGQSEAQGLAIVRWCFPASHITEIDVDPFIERVTSRRVRVEKRRRLEALWEKAGESIGCDEVPGLDHEAKVMVEGLRQIREMIQETKDRIEELCKRYPEYPFLLTIPGFGPDVSAKVLGAIGDPGRFENGKQVLKQAGLDLSANRSGKNSAQAIPQISKQGKADLRYALYQAAFIASTKNRGFMRYYTSKLRGREKEKGIDGKRLVKLSAKMLLIAWTLMKKKEAFNPAYLKAELS

SEQ ID NO: 75338 - protein, 369 aa, unidentified
MKTIGMDVHARQTFFHVVDEKGHRVERGSTETTAKNLSEVIGRHLEEGDEVRVALEASTTTWWVQEVLKKAGAHVEVTNPYKLKLIAESRAKTDKADAEILAELLRCGGLPTPVYVPTPQIRELRQRLSLRRQLVRIRTQVICSAKAHLRGQGVKTTKRDFHTEASWKRLMAVHDSSRWHLNPLAGVYGEIVSSCRQAEAEVQELWDEDPSVRRLQTIPGIGPIVAYTVVAALGEVERFSSSKQVEAYAGIIPIERSSGEVTIRGGITHEGRAELRGALIQAAWAVLRTRKNEALFLKKFYYKLMHRRGSQVAIVALARKLLTIAYQVLKQEEDFDGDRTRERKTEKKSAPHQKQLLNLNQEARSEIQT

SEQ ID NO: 75339 - protein, 340 aa, unidentified
MTSTQVAVDLAKSVFEVAVSRRPGKVDESHRLSRSRFQRFFAEREPLEVLMEACGTAHHWGRTLEAMGHRVTLLPPGDVSRYRDGNKTDRADAKALLEAARNDAIDAVPVKSLDQQAIAALHRVRSGYQQTRTARINAVRGHLREFGIVIPTGASRVVPLARAALEEGAAPAYLRDVLEEVLDEIETLSEKAKAVQRRLERLSEQMPEAQALMTIPGIGVLTATALVSFVGDVRRFRSGRQLPAYLGLTPREFSSGSSRRLGRITKRGNSYVRMLLIHGARSALRAGKLSDEPDDLRAWALDIERRKGFNVAAVALANKLARVAWRVWRDQRPFERRLPA

SEQ ID NO: 75340 - protein, 345 aa, unidentified
MKITTVGIDLAKSVFQVHAVDERGRAVLRKQLRRDQMTVFFANLPPCLIGMEACASAHHWARTLQKSGHTVRLMAPQFVKPYVKSNKNDVADAEAICEAVARPNMHFVPIKSVEQQAVLALHRVRQGFVRARTAQGNQIRGLLGEFGLIMPKGIVNVAKRVPVLLEDAGEELPALFGQLIERLTDHLKELDRQVDELETQIKAWHRSSELSRKLEKIPGIGPLGASALVASIADANSFDNGRQLSAWLGLVPRQDSSGGKPKLLGISKRGDVYLRTLLIHGARSAIQAAQRKTVNTNAWLAGLLNRRHPNIAAVALANKNARTVWALLAHGREFRPGHAPEVSAA

SEQ ID NO: 75341 - protein, 411 aa, unidentified
MKMAGIDVHKKVLMVVVIETTSPEEKPERRRFTTLPGDLSRLSSWLRAQDVQEAVMESTAQYWRTVWLELEPHMLLHLAHAFSNRAPRGRKHDFKDAERLVRRLFADELILSFVPNGEQRIWRNLTRMKMQLTRDRIRLQSQMECLLEEMRIKLSSVVTDLLGASGLRILRALAAGETEAKRLAALGDNRLKCTEEQLLDALTGSSQPMHREMLALQLERLQLIDTQIAKLNNLIAQGMKPHQEAVMRLAEVPGLGVDSAQQIIAEVGAQAGTFSSAAELTSWVGTCPGKDESAEQNHSSRSAKGNKYLRRVLNQAAHAAVKKRGSYFQVVFRRLLPRLGYQSAIWAIAHRLCRVVWKILHEGARFIEKGSQPDAQTKKKRARMLLQALRRLGYDVAITATHLATQNAMQV

SEQ ID NO: 75342 - protein, 410 aa, unidentified
MKMAGIDVHKKVLMVVVVDTSVPEEKPVRRRFVTLPSELQRFRIWLQEQGVEEAVMESTAQYWRSVWLELEPHMSLHLAQAFSNRAPRGRKHDFKDAERLVRRLMADELILSFVPKGEQRIWRSLTRMKVQLTRDRVRLQNQMECLLEEMRIKLSIVVSNLLGASGLRILHALAQGETDPKRLAELGDERLHCTEEQLVDALTGRVQPMHRGMLALQLQRLQLIDQQMAQLNSMIAQAMKSHQDAVIRLAEVPGLGVDSAQQIISEVGAQASSFSSAAELTAWVGTCPGKEESAEQNHSSRSAKGNKYLRRVLNQAAHAAVAKKGSYFQVVFRRLMPRLGYKSAIWAIAHRLCRVVWKILHEGVRYIEQGREVGPREKKQRAQMLARALRKLGYEVTITPINQLAPKPAI

SEQ ID NO: 75343 - protein, 340 aa, unidentified
MQEQLSRQYVGTDLHRRRSVIVRLDQAGKVLGTVRVDNDPVEFALAMAEAGEGPEVALEATYGYYWAADLLKDNGAKVHLVHPLGLHWDSRRVKNDVKDATELAKRLWLGDLPEAWVAPPEVRELRELVRYRAKLVALRTSAKAQVHAVMAKCGILPGLDDMFGPGGQVLLDKMPLGQPYRYRVDSLRRLIEVFDDEVDIAESQVHKRLARHRGYKAVQALNGVGRVTAAIFVAEIGDITRFSDARQLCSWAGLTPSHRESDDKAHRGHITKQGSTLVRWAAVEAVVRYHGGAPITPAFMRIQQRRGTPIARVAAARKLLTLVFYGLRDGEVRCLAKKVA

SEQ ID NO: 75344 - protein, 350 aa, unidentified
MLIVGCDFHPGWQQIAVFDSDTGEVNEYKLSHGNGEAEQFYRKLPAPARIGLEACGNSQWFVDLLQKLGHEVWIGDAAQIRASYVRKQKTDKRDAMHILKLLLEKRFPRLWTPTPEIRNQRQLLVHRHKLVRLRAQVKNELQHLAMNQGVQKKARLWSQAGQKLLRDLPLAGWAASRRANLLELMKLLDRQIAELDGALQQAAEANPQARLLMTQPGMGPVTALGFVLTIGDVSRFPRGKQVASYLGLIPREHSSGGRQRLGAISKQGNRFLRQMLVEAAHSGVRPDEGFRKQYQHRCHRKPKGVAKVAAARKLAVRLYWMLRTNIGYPEIVHIESSPMVPLVDKIRPKP

SEQ ID NO: 75345 - protein, 347 aa, unidentified
MNFYTQQHKHYCGIDLHARAMYVCILDQHGTKLVHKNLPTTPEAFLRLIAPYREDVVGGVECMFTWYWLADLCAKEGIAFVLGHALYLKAIHGGKAKNDKIDAHKLAVILRGGVFPQAYVYPAEMRATRDLLRRRCHLARKRAELLAHIHNTNSQYNLPEIGKRLANKSNRADVAAHFPAPSVRKAVEVDVALIDHYDELLSEVELYLTRSAKTDDVQTFARLQSVPGIGQILALVLLYEIQDISRFPRVQDFVSYCRLVKCAKESSGKKLGTSGKKIGNVHLRWAFAEAAVLFIRQSKPGKEYFGKLEHKHGKAKALTVLAHKLGRAVYYRLTREQAFDLKRFVTA

SEQ ID NO: 75346 - protein, 312 aa, unidentified
MADMVRLAGIDVSKATLDVYVAPAGENRTVSYDEGGLAELCRWLVGAGVAVVALEASGGYERQVSEAVEAVGLVVVRLNPLRVRRFAELRGRLAKTDRLDARTIAEFARAYPQEQSVKRDRRRERLAEYLLVRRHTQEVIVDCTNQLEHLRDAQLRRLVRARKASMERMCDTLDRRLAELIAEHTDLADLSERLRSVPGVGPVLAVTLIALLPELGSLTRRQIAALVGVAPFDRSSGHQIGRKTIQAGRAAIRAPLYMAAMVAARWNPAIAAFSARLANKPGKVRLVACMRKLIVTLNAMVRDGAQSQPRTT

SEQ ID NO: 75347 - protein, 351 aa, unidentified
MPHKSTVHAVTAIGIDMGKNTLHMIGLDLRGAIVLREKVLRGRIASRLANLQPCLIGIEAGMATHYVARELAALGHDVKQVPPTYAKPFRQGHKNDFRDAHAVAEAVQRPTTRFVPAKTNEQLDLQALHRVRSRLVSERTAVINQIRGFLLERGIIVRQGVRFLRQQLPDILAKRTDVLSPRMVRIATDLAGDWRQLDERIETVTDEIETLAKSDDNCRRVMTVPGIGPIISSAMVAAIGNGAAFGRGRDYSAWLGLVPKQMSTGDRTILGRISKRGNGYLRTLFMQAARVILLRPANWPKHGFGAWLIRAAQRLHPNVLAAALANKLARIAWTVLAQERSYEARVTKAAA

SEQ ID NO: 75348 - protein, 419 aa, unidentified
MKTPGDTSFTAFIGIDWADAKHDICIQAAGDERREFSRLSHKVEAIDEWAQSLYRRFGGPMAVALELSKGPLVYALQKYDFFVIFPVNPSSLAKYRETFTPSGAKDDPTDAEFVLDLILRHAEHFAPLKPQSVEMRTLVSLVEQRRCLVNDRVRTTNRLRNTLKQYYPQALEWFDRIDTPLFCDFIERWPTLLQVKRARRTTLQSFFHQHNMRRTHLLEARLTSIKAASSLTLDKAVITPHRLQALVLVDLLRVTLAAIKRFDEAIAELAPQHPDYELFSPLPGAGPSLAPRLLVAFGEQRDRFRNAAEIQKYVGIAPVTERSGNKHWVHWRWQCPTFLRQTFVEWAAQTINKSYWAGLYYYQQRAKGCSHQSAVRALAFKWIRILYRCWVTRTPYDEAKYLKALQERGSPLLKIAEAA

SEQ ID NO: 75349 - protein, 361 aa, unidentified
MASISLSRIASFVLGFEKKVFCIGADVHKKSYSIALRRADDKFLTWTCSASPDLLVDQIKRLGVRIGAVAYEAGPTGFSLARALRCAGINVIVAAPSRIPRPVTAGAKSDRLDCIKLSAYASKGMLTTIAVPTVEEEARRALLRRRHKAVDAVRRCKQRIKSQLLCQGIEPPKELGNWSKGAPAALRKLTMEPGFGITLDSLLRELAFFQKELCRLERELVRMVKDRKCRANMGYLKSVPGVGSVVAATYSLELFRPERFQVADQVSSYIGLAPMVRQSGQSRGSGRLVPVGQSRLRSLLIEAAWNWKRKDPYAAALYNKFVSRTGIAQKAICAVARKLAIILWRLLVEQRVYRPRPVAAR

SEQ ID NO: 75350 - protein, 365 aa, unidentified
MFKLDRRGHRVGEPEPAYRQEAILDDHDYCGIDVSAQELVVVVERQGKRDGARTFANTAEGQQQLRRYVGRGGAKVRVCLEATGLYGLDVALLLQRDTRCEVMVANPRAVKHFAQALMQRSKNDRLDTGVLLEYARRMPFQAWQPPSRAALELTAVARRIHALTEQGTAEKNRQHALRATALAVPAVAADLKRSLRAIEQAQIRLTHAARQLIAADAQLQRRFQLLCSVPGVGATSALQLLGELVLVPADADVRQWVAYAGLDPRECTSGTSLKKRVHISKVGNRHVRRALYMPALTAAYHSPVFRAYYEHVQAAGKCKMVALVAVMRKLLHAIFGMFKHDAMFDGSKVCPVLSLATPIEAAPAA

SEQ ID NO: 75351 - protein, 387 aa, unidentified
MRDMSCAWMRWPSPPAPCMSHAKLTVTALARPPRELREQARGRARSGAAIVESLSKPERLDGSESRIERKEGSNNMEQQFVGIDVSKAWLDTEAIPQSQSMRYGNDAAGIVALVEAMQAATPALIVVEATGGYETAVASALSAAGLPVVVVNPKQVRDFAKAMGILAKNDRIDARVLALFGQRIRPQLRPLPGVEQRELAELLDRRSQLVVMRAQERARLATALPVAKASLVEHIHWLDERLRQLDIELTARLRTSAAWKVKVDLLKGVPGIGKVTIFTLLARLPELGQLNRGTIAALAGVAPFDDDSGKRRGQRFIRGGRAEVRNVLYMATLSASQHNAVIKAFFARLTAAGKPFKVAITACMRKLLTILNAMLKNNESWHCPATT

SEQ ID NO: 75352 - protein, 346 aa, unidentified
MKTIAYLAMDVHARSCTLGHMDEDGTFRGNRRFITSEKNIIDAIKSVKAKNKFLTMEEGTLSHWAAQVARTYVIDVIVCDPRENALIFKSPNKKDKVDTRSLCRLLRLGELKPVYHTLNDDRAIFKASAQHYLDLRNQLTRLKHKIKAVYRRWGIINVFTSSVYSSSGRDKYLKKIKHIPIRRQLRRLYYLMDQTEALRKSALHSMKQLGLKYPEIREFEKIPGIATVNAHVFDAFIQTPHRFAKRNQLWKYCRLSITDRSSDGKQLGYKRLDTSGVSELKALSFRAFMAAMRGENEVKRFYLDSLHRTHDHKHARLNTQRKILTVMLGIWKKGKTYRPELFSGSA

SEQ ID NO: 75353 - protein, 403 aa, unidentified
MNSVGIDISKGRSTIAVMRPFGEVVISPFEVRHTGSELSELARQLKSLDGETRVVMEATGNYHASVAKLLHDAGLYVSVVNAKLVHDYGNNELRRVKTDRKDAVKLADYGLDRWLTLPRYIPEEDTRLLLKNCYRQYRQYSKVQTVLKNNLISLLDTVFPNANRLFSNPIRGDGSEKWVDFVAEFWHCRCVSEKSERAFTSKYLRWCRKHGYSFREAKAHTIYAEASGHIGVMPKSETTKLLVEQAIAQLRATSTALAALKHEMQSLASQLPEYPVVMDLFGVGPTLGPQLIAEIGDVRRFYSKKALVAYAGLDAPSNDSGDVTGRHKSMSKIGASSLRRTLFLVMSVYLQTAPLDEPVYQFMDRKRAEGKPYRVYMMASANKFLRIYYATVKAYLESLEHTA

SEQ ID NO: 75354 - protein, 349 aa, unidentified
MSQIIRIGMDTSKHIFQLHGVNAWEQVALRKRLGRNAMLAFFAKLPPTIVVIEACGAAHYLARELGKLGHTVKLIAPQLVKPYVSRNKNDGRDAEGLCEAASRPRMRYVPVKTAEQQAALMLLGIRDQLVARRTQLSNTIRGHAAEFGLIEAKGLDKLASFLAAIEQNEGVPVPARELFAMLARQYAQVQVELKAIEAKLLAWHRADGLSRRLAQIPGVGPVTAAALVMKAPDPHAFRSGRLFAAWLGLTPKDHSTAGKTRLGKITRAGDERLRQLLVVGAASVVKQAKARGRGPRWLIELLKRKAPKLAAVALANKMARIAWKLMTTGESYDSARLETRIDAEVAVAA

SEQ ID NO: 75355 - protein, 341 aa, unidentified
MMSNVTTIGLDVAKSVFQVHGVDAGGEVAVRRKLTRGRVLAFFKSLPRCLVGIEACSSSHYWARELIALGHDVRLLPAQYVKPYLKRQKNDAADAEAICEAVTRPTMRFVPVKSPEQQSVMMLHRVRLMLNRQRTQISNALRAHLSEFGVVAPIGRNGTEQLLTVINDENDARIPADARLCLRMLEAQLRVVKEQILENDRRVRTSARETELGRRLMEIPGVGPLLASAFVATVADPHAFKSGRCLSAWIGLVPKQNSSGGKEKLGSISKAGNRYLRQLLVVGAMAVIRYAERNGTRRPWLVQLMARRTTKVAAVALANKTARMVWALMTGGERYREPVIA

SEQ ID NO: 75356 - protein, 461 aa, unidentified
MITASSLALADQARPRAGLVCASSRQRSNVCTETPTSRDTAPTSALSGGNNRATTLFLNASPYRAIFHPYRPQFHHHKEATTILTRRGIEQRQFGGFKRDRRKLADWVASLRPDEVVMESTGIYWKSPYAALETVGIRAKVVNARHVKNVPGRKTDVGDAHWLATLARAGLLRGSFVPPAKLRELRLIARQRQKLVGQLASEKNRLHKVLTDSGIRLGVVVSDLHGKSARAMIKAIIAGLAPNEVLNLASTRLKASREEIFDALQGDLTASHRFVLDELMRHIEEIEARIARFDARLLSELESERNTLALLQTIPGVDLIGAAMLLIEIGTDMDAFGSADRLASWVGICPGNNESAGKRKSGRVRKGNLYVRRLLCEFAHAASRTTSVFKSKFQSLVVRRGYKRAIIAIGHKILRTIFFMLKRREHYRDSATDYEALSVQRNAPRWIKTLIKFGFIAPANA

SEQ ID NO: 75357 - protein, 404 aa, unidentified
MDRQQPGHEQVWVGIDVGKHAHHAAAVAADGQLVWSRRVANDQAAIAELIGQATASAAGVCWAVDSTGSSAALLLALLVAADQPVLYVPGHMVNRMAGAFAGEAKTDAKDALVIAQTARMRRDLLAARPRSELVAELAVLVGHRSDLMADWVRTVSRLRGLLVASFPGLERCFAFTSRSALVLVARYQTPEALRALGRRRLVAWLRRQVPAQLSDARIEQMAEAALAAAAAQTIRLPAQDTTARLIAQLASDLLGLDRRLKELDKTIGQHPQAKIICSLPGMGPLLAAELLVAVGDLGSFPDAGHLAAYAGLAPVPRDSGRRTNNLHPPKRYHRSLRRVFYLSALSSLSGPGPNRDYYQRKRTQGRKHQQALIALARRRVDVLWALLRDNRCFELAAPVKTTTA

SEQ ID NO: 75358 - protein, 344 aa, unidentified
MSNLDSCGIEVSAKQLVIRLRRQGDLEPLRNFTNTPEGHEMVVRSLRQAGRVVRVCLESSGLYGLDLALALSAATGIEVMVANPRAVRHFAHALMKRSKSDPIDATVLEEFAARMPFQAWKPSSAASLALHALARRLRELVEIQTAEKNRQHAAGLTQTTPTAVRRDLARSLRAQQRAIERLTAQARKLIDQDAQLKEGFELLDSIPGIGEASAVQLLGELGVLAPDLDARQWVAYAGLDPRLFTSGSSVHKKPRISKQGNKNLRHSLFMPALVAVQHDPYLGGFYQHLLAEGKLKMQALVAVMRKLLHAIHAMFKTHQPYDGSKLFRLSGVTNQEVLHAPLAG

SEQ ID NO: 75359 - protein, 320 aa, unidentified
MMSKIVLGIDVSKRTLDVALIFEARTLCKQFKNSTDGFKSLADWLDSLEIKQIHACLEATGIYGEAVALFLHECGHQVSVVNPLRIKGYAQSNMQRNKTDRLDARLIADFCLTQKPDAWQPPSAAVKHLQSLVRRVEVLEEMRQAEDNRLANASAEIKPSVERMVTLIKEEISELERQIKQHIDRHPDLKEQSELLQTIPGIGAKTAHLLLSEIEFERYNSGRAIAAQAGVVPRQKQSGTSLKQTGLSKLGNARLRKALYFPAITAKRHNEIIKEFAERLHKRGKTPMQIVCAAMRKLLHIAFGVLKHKRAFDASLAFSA

SEQ ID NO: 75360 - protein, 363 aa, unidentified
MSVQYVGMDVDKQKIVLARLGAGQDARAVEQVIANTPRAVKKYFASLLSAAEVHATYEAGCFGFGLYRQLSAMGVTVVLAAPGLIPRKPADRVKTDRRDAHNLALALRAGQLTAIYVPTQQDESVRDYLRMYEAFRGDLRICKQRILQFLLRRSLSYGGGGPWTVKHRHWLNTLEFQQPRDRQTLDMYLAQMQELEAKCAEAAAEVESIAAQDCYRQQTKKLTAFKGIKTLIALSFITDIGDFRRFTNARQFMAYLGLVPSERSSGNKRRQGSITKAGNSHLRRLLVEAAWHYRSYHPTSRDLTERRRGVEPAVVSYANRAGRRLNRKYMHMLLRGKRSQVAVTAVSRELAGFLWGAMTNQVA

SEQ ID NO: 75361 - protein, 316 aa, unidentified
MEQGELNTTVAGVDVGKRTLDVAVHGGGELVVANDETGFSALVSWLLERGVGRVGLEATGGYERDVRAWLERAGFEVVVHQPIEVRLFARLKRLKAKNDRLDARLIAQATAQVEAVKAARDPRLVDLAERLTAYEQITDQAASLKTFLESVRLKDVIAGVRGQIRALERLKAKLAADILKRIRACPDLADRFKLLMSLPGIGPIVAATLVVRMPELGGMRRGQAAALAGVAPFDRDSGQFRGLRAIAGGRSRPRRMLYLAAIAAKRHDPALRAFAQRLAANGKKPKLVIVAVMRKLIEAANLVLSRGQPWVRQPAT

SEQ ID NO: 75362 - protein, 414 aa, unidentified
MAIREGTKTYSAGRVATERETLELFAESLCPTDEVVMEATGPAMEIARILTPHVARVVVANAQEVRAISHARVKSDRFDARTLANLLGAGMLEGVWVPDAETQGLRRRVARRASLVRQRTRAKNEIHAALSRSLLGRLPVADLFTAEGRAWLQAQELGAEEAETVEGCLRQIDFLDAEVAEIDTKLAKWAVSSAEAKRLMSIPGVGAGVAVTLMAAIGDVSRFSGQRQLVAYLGLDPKVRQSGEEAPRHGRISKRGNGQARSALVEAAWMALRQPGPLRAFGERVRARKGAQVAAVAVARKLACIAWQLLTKEEDYVFAQPSKVRAKLRGAELRAGAPKLRRGHGGPRISATPAERESERELVQRGEVAYRRLIADWKASGPAKKGAGATPGRASSGPSTGQAARQAQAPGPAL

SEQ ID NO: 75363 - protein, 357 aa, unidentified
MAMLSEVVDAVIGADTHRDTNQVEIAYPSGAVIATGSFGNDSAGHAETLAWMFEHAPGPRLVVSIEGTRSYGVGLARAAKAAGLPVIEAEQPSRKARRGKGKSDPIDAHLAVLSALGLDADKLPTPRADGDREALRILLCAREELTTTSTGQTNRLKALLRDGGDADCRFARGKLTTTTLSELVKRRQPHQASREQAVRHAEIRRLALALREAARMLKANRAELVAIVNDLVPGLTDQRGIGPVSGAQAIVSFSHAGRCRNDAAFAALAGTSPIEASSGRTVRHRLNRGGDRALNKAIHVIATTRIRSDPATQAYVARRTTEGKTSREIRRCLKRYIARQLYRTLTAAMASNLAATA

SEQ ID NO: 75364 - protein, 402 aa, unidentified
MNAVGIDVSKGKSMVAIMRPFGETVSPPFEIKHTASDIHSLVELINSVEGESRIVMEHTGRYYEVLAHQLSEANLFVSAINPKLIKDFDNDSLRKVKSDKADAVKIARYALDKWHNLKQYSVMDELRNQLKTMNRQFSFYMKHKTAMKNNLIGILDQTYPDVNAYFDSPARSDGSQKWVDFASTYWHVDCVRKMSLNAFTCHYQNWCKRKKYNFSQSKAEEIYGKAKELVPVLPKDDLTKLIIRQAVDQLNSASTTVESLRTLMNETASKLPEYPIVMDMKGVGPSLGPQLMAEIGDVSRFTHKGAITAFAGVDPGVNESGIYEQKSVPTSKRGSSELRKTLFQVMDALIKTKPQDDPVYRFLDKKRAQGKPYYVYMTAGANKFLRIYYGRVKEYLATLPES

SEQ ID NO: 75365 - protein, 351 aa, unidentified
MESRVTALPKLFIGIDIHKRSWKIHCSTDLFAGKSFSMPPDPFKLQEYVQKHFPDHEVSTAYEAGCCGYSAHRSFESFGWKSLVVNPADIHRKGKERYTKTDRIDAQLISRELKDGRLESIVVPDKEREELRSLFRRRNELVKDLRRVKSMIKMQLLYFGIKVPAEFDNDHWSHAFRHWIDSQEFNYPTARETMASKMRNFRFIDKELRDVSTQLRAYCRKHFKKDYYLLRSVPGIGGIVAVGILSELGDLRRFNSLKHLAGYVGLAPGIYESGANSKSTGMNPRCHRLIRSYFVEASWQAIRTDPVLQAYYRKHLGKDVKKIIVKVAHKLLSRTLAVIKTETPYEIGVVA

SEQ ID NO: 75366 - protein, 351 aa, unidentified
MWIIGCDFHAGFELVAICDKQTGEVSVRRLEHREEAERFYREQVPVGSIVGLESCGHTQWLEKLLYEVGMEMWVGDAAQIRAAVVRAQKTDRRDAEHLLTLLLEGRFPRLWLPSLEERDLRQLLVHRHKLVRMRTQVKNQLQTIALNQGMQKKRQLWTAKGRAAFEALPLLPYAARRRQELFTALDRLEEQIEQLNQAGRAEAEKRPAVVHLMQQPGVGWQTALAFVLTLGPVARFARSKQVASYLGLIPREHSSGGKQKLGHISKQGSGYMRFLLVEAGQSVARHDPAMRKKYLRWAVRSGRAKAKVAVARALAVQLYWRLRQYQTQSAVVRHAGKPELMTWCPNPAPMD

SEQ ID NO: 75367 - protein, 433 aa, unidentified
MLKINYMSTLFVGIDVSSKSNQVYAMDFEENKYISAPFGNNQPGADALADMIADCMRKHKNLDTIIVVLESTSVYSIHISNFLSTSEVLMPYKPYVFCVNPKTTANYRKSYVGMEKTDPTDAFLIADFARVGRTKKLEPWRGSQFIALKRLTRHRMHLTECITREKTYMVSNLYLKFSELHLLEGDNKPFGNVYGATASAVLTEFMSPQEIIDSSEEDLLKFISVKSRNRISDISKTTELLRKAARDSYRLDKCMYEPLSISIASSFNCIHAYQREIKLIDEAIMKCINGMSPNALLILQSIPGIGPVWASGIISEIGDITAFHSSDALAKYAGLYWPKEDSGDFTSEDNRISKAGNSYLRYYFGEAASSVRHHIPEYADFYAKKYAEANKHQHKRALALTSRKLVRLVFGLLAKNQLYTGEKLDAIINIDTN

SEQ ID NO: 75368 - protein, 373 aa, unidentified
MTEFAVSTSNEQSIFAALELSKNSWLLAIRVPGRDNPSLHPIKGGDAEGLIAKLDAARDRVAKVTGQAPTVTLCYEAGYDGFWLARFLEQRGIECLVMEPASLQVNRRARRVKTDRIDVESILHTLIAWCRGERHVCSMVVVPSVEEEDLRRSHRERDRLIRERTAHINRIKGLLFGQGIRGINVKAHDKTLTPSALVTADGRPLPERLGREITREIERLAQVQAQIVAVEHERDKAPTPCVATERQRHQLLRLKGVGPTLTREVYYRRFVNRRQVASYIGITPSAYDSGEGRRSQGISKAGNRLARVAMIEAAWLWVRHQPDSAPTQWFHDRTRGQKGRIRRIMIVALARKLAIAFWRYLEIGLIPEGAVVK

SEQ ID NO: 75369 - protein, 368 aa, unidentified
MKKNSSCLKSPKQSKTRERSITIGMDLGDKTSHYCVLDSKGEMVREGTVATTKKGMKQRFGSLPKCRIAIEVGTHSPWVSRLLSSFGHEVIVANARQVKLISASSRKNDRLDAQTLARLARLDPELLRPIRHRGEKAQGDLLQVRVRAALVDTRTSLVNTARGLAKAMGERLAYCDADQMGVEKMQGLPAVLVEALRPLLETVESLTQQIQASDQKLEQLAGRDYPETELLRQVSGVGSLISLTFVLTLEDPNRFRKSRDVGCYIGLRPKRSESGESRPQLGISKEGDVYLRKLLVQGAHCILSQKSPDTDLKRWGLKLAGKGNKNAKKRALVAVARKLAILLHHLWVNGEVYEPLRNSRLLEQKAVA

SEQ ID NO: 75370 - protein, 411 aa, unidentified
MDVFCGIDWAEDHHDAALVDAGGQLLARLRITDDAAGLAALLELLAQHGDSAQDPVPAAIETPRGLLVACLRATGRPVYPVNPMAVARYRDRHSVAGRKSDKGDATVLANVLRTDLHAHRPLPADSELAQAVAVLARAQQDAVWERVHAQNKLRSHLREYFPGFLAAFGSARGGITRPEARAILAAAPTPADAARLTRARLASLLRKAGRQRGIEAEAARLHAVFQHEQMRQLPLVEQAMGRQALALARQLEAACQSADDLQAAAEESFNQHPDAGIITSFPGIGALTGARVLAEIGDDRSRFKDARGLKAYAGAAPITRASGKSRSVTQRKVKNNRLAAAGYTWAFAALTASPGARAHYDRRRDKGERHTAAQRNLFNRLLGCRWHCLQAGRHYDEATAFPVREAVPAAA

SEQ ID NO: 75371 - protein, 373 aa, unidentified
MENRITYVAMDTHKKEHKVALHYPGQEEIVRFTVKNTARDIAKMVKKVAREAPGEIKFCYEVGVCGFVLKRRIEALGCKCEVIAPSLTPRKPGDRIKTDRRDALKLLMLFKAGLLTEVHAPDKQQEAGRELTRCRQVAQENLKRVRHQLEKFLTRHGYIYTDGFHWTQKHLRWLRSLEFEQLLLRDVFDSYFTEMQHCLQRLASLDKEVEKLAESESYKEVVGFLRCFHGIDTLTAITMITEIFDFGGFSSPGELMSYLGLTSSEDSSGQKERKGPITKTGNKRVRRLLVETSWHYRHPCNVSSALKQRRKDQPQWVIDIADRAGQRLRKRYWHLVNKGKMPCKATVAIARELAGFIWSVFREHEMRNSKEAA

SEQ ID NO: 75372 - protein, 336 aa, unidentified
MTFNSFMGIDISKKTLDLCLLSSDNAPDHCTIENNTTAIEHHFTKVINAAASKNEKILFMMEHTGIYNEKIAAFLEKKNQDIWQCNPNEIIRSNGLQRGKTDKVDALRIAKYAMRNIDKYRPHIPMREELTQIKRLFAVRRNLVKSRKQVKALCQDYDFLNPKLISIEKKSVSQAILALDRQIDNIEEEIKLRVLNDPFISRLYMIITSIMGISFVTAVKIIIATNEFKKITSAKALSCHAGVAPFQHTSGTSLKGQTKVSHIADKELKSLLHMSAIAAIAHPGELREYYLKKVDQGKHKMKVINNVRNKLIHRVYACIKNNRIYQKNYNNCLTLT

SEQ ID NO: 75373 - protein, 393 aa, unidentified
MSAPFELRTPATAFDHDITVVAAMELSGKSWIISGAIPGVDRRPKKTVAVGDIAGVADVLKSWGEEAARAGKPVSRTIVGYEAGYDGFWIARDLMALGIEVRVMQPSSIPVDRRHRRAKTDRIDVELLLRTLLAWLRGEPRVCSMVAIPTPEEEDARRPTRERQRLVADRRRLENRMESIWARFGIKGFNPRRKDAAARLEALRDRQERPLPPNTMTELSHLLAQHALTESHIREIEAARDAAVKDASFTVAIDDRMMKLIMILVRVPGIAAETATILVVECLARHFPNVRAVGSYAGVTGSPFSSGGSQREQGISKNGNPRLRQCLVQLAWRWVRLQPDHPLSLWFRERTGGAAKGRIRKIMIIAVARKLLVMLWKLVTTGVVPESLHLKAA

SEQ ID NO: 75374 - protein, 426 aa, unidentified
MDIVHPRVAGIDVHKKIIWVAVRLPGEAPGGRTVTVRKFLAFWRSLQQMAAWLAELGVTDAAMESTGVYWWPVYHALAGERIEVCVCNAAHMRNVPGRKTDLKDCQWIAQLHEHGLLRPSFIPAAEVAGLRQRTRYRKKLIGQRTSEGQRLSKVLEDAGIKIDSVASKLLIKSGRKMVEALIAGERNPGRLADLAEGVLRRKTDELQMACDGRFTAAHAQMCRLHLDAYDHLTAQIAELDQLVAEAAAPFAAVIARLVTIPGIGQRTAQVIVAETGADMSRFSSPARLAAWAGLAPGDNESAGKRKRAAARKGDQHLRTAMAESAWATARTATRPGARFRRLARRFGKGNENKAAVAVAHTLLCIAWAVMKHDSDYTEAGADYYDHRDRRNHEHLVRHHQQALARLGYQVTLTPPGDGSPPPAQAA

SEQ ID NO: 75375 - protein, 459 aa, unidentified
MNRKQRREMMRKVQSEDLSLQVVHPHAAGIDIGNESHYVAVPPSRDPQPVRCFGCTTAELKKKAEWLTQCGIRTVAMQSTGVYWIAVYDILEEAGMEVYLVNARETKNLPGRKTDVQEGQWLMKLHTYGLLRHSFRPSQEIRTLRTYWRQRHDLVRSTGRHIQRMQKALTQMNIQLANVISDISGVTGQTILKAILDGQRDPRELAAYRDCRVEASEEEIVQALEGNWQEDQLFVLRQEQAGYEFCQKQITECDQQLAQYLARLEDQTQGATLPEETRKGRRKKKKGNPQFNLREELFRMTGTDLTQIDGIDVMTAMTVVSEVGWDMSKWKTENHFVSWLKLSPDNKISGGKVIGKGRMPTNNRATTVLRMAATTLRESDSYLGAQFRRFRTRLGPPVATKAMAAKLARLVYRMLRYGMKYVNQGAEFYEAQHRKQQVIHLKRKAAQLGLEVIEVAAAA

SEQ ID NO: 75376 - protein, 375 aa, unidentified
MKECIKYVGLDVHKETIAVSIAEAGGGEVRYFGEIANTPEAVAKLARQLNKGATRLSFCYEAGACGYGVYRQLRELKHDCMVVAPSLIPKKAGDRVKTDRRDSLSLARLHRSHELTAVWVPEGAQEALRDLTRAREDMKHLQRQAKQRLLAFLLRHGKRYSGKTRWTQEHARWLEAVKFDHPIQQIVFQEYVDTVKALILRVAGFDKHIESASRESVFWPVIEALMALRGVNLLTATTVVAEIGDLRRFAGAPQLMAYLGVVPSEHSSGGKRSRGGITKTGNGHVRRVLVEAAWTYRHPARKSAVLQRRAERTPEAIQAIAWKAQQRLCGRYRRLEGKGKLKVQVCTAIARELAGFIWAIAQAVPQTKAKATTKA

SEQ ID NO: 75377 - protein, 437 aa, unidentified
MEEVTDEPLYRDRVCGIDIGKAQMAVTIRVPSDKDPARRAQETRSFGTTKKEVLALADWLRCWQVPAVVMESTGDYWKGPFYRLEAEGFECVLADAKQVKNLPGRPKRDPSDSRWLAACFERGAVTPCFVATPEFRIIRLHTRYRRDLTEERGREKQRAEKLLESAAIKLSSVVTDLHGVTGRDIMDHLIGGERNPRTLAQLARARARRKIAELEEALEGAEFFTPAHAALLTVMLARIDRVNAEIDQLTAVIERLLAPWEEQLEQAESMPGWGRRSAQDAVAETGPDMTRFRTGGHLSSWAGKTPLDHQSGKRTGRARSKKGNRYLAAITGETAIAAGKTQTREGARYRRLARRRGKAKAQVAVGNTQLKVYHKLLSNPGMRYQDLGADYYERQRDARRQIAHHVGKLGALGFEVTLCRIPGPEPGQDHSGNTQAA

SEQ ID NO: 75378 - protein, 392 aa, unidentified
MLYVGIDVSKRKHDCFITNEHGEALTDVFTIQNSKEGFLELQKQIKLHQPRPSQENIRVGLEATGHYSDNIVGFLRKIGLPPVILNPLRVNLYLKGQDLRKLKTDKSDAKFIAKMIFAESFSPHSQESYHSEELKSLTRHRQRMVRDRSRYKVSYDRLLTIIFPELEGLVYDTLCVTISRLLLEFPSTEAIASCHLTSLANFIRTHSRGKFDKEWTIRLRDLARDSIGSISLAKSYELQYTIRQIMSLNKEIDIVEKEIKSIVIDSGTTLLTIPGISYTLASVIMAEIGDISRFETPAKLQAFAGLEPTKYESGQFVGQNNRMVKRGSTYLRWALIYSAKSVSLFDKTFGEYLDRKIVEGKHYSVALSHVAKKLIRVIFHMMNTGEVFMAKT

SEQ ID NO: 75379 - protein, 339 aa, unidentified
MSTQLKPTEPSHKPLFSGIDVGAEELILTIRSNGVPRKPQTFANTAIDRAHLVKKLAKLPGIIVCMEATGIYHLDLSIALYDAGVKLMVVNPKASHNFAKVLMRNSKTDAVDANTLAEYAERMDFVAWTRPSNERLTLRSFSRRINALTRDKAAAKNHLHALSFTRATPKSVLRDARLAITQLEKRIARLTRDALSLIESDTEFSHVFELLLGVKGIGETSAIALMGELLLLPPGLSHREWVKFAGLDPRAYDSGKSVHKAARLSKAGNRHIRSALYMPALSAKQHDPYVKAYFQHLLDNGKKPIQAVCAVMRKLLHAIHGMLKYDKPFDNTRFYAIPA

SEQ ID NO: 75380 - protein, 422 aa, unidentified
MSYCPVAGIDVSKQFSDMCILSPDNKIFAQEKIYHDETSINRANALLQKAERLFFSKPVIVMESTSHYHLILFQFFSEHGYDVIVVNPLQSNSMKDFSIRKRKTDRVDAFKLAMMYRTKTLRPSQIPQTATRALRQLCRHRAELLNDVSSYKNRLTALLDQTFPGYDKVFSDVGGVTSCAVLVRFPTPTILLVEEESELVEVIAAASKSGYSFAKKKAGLLISAAQKAQTLGVHSCADETLIVCTIQMLRTLSESVLQIETAIDNLLAQIKEMRNNVSLLQSIPGVGSHSAALLLGEIGDISLFKKPKQLAAYFGLDPTERQSGSFRGTKNKLSKRGSPYARAALHMGVVNSICKRGKDSAANPVLLSYYEKKCKNKPAKVAQAASMHKLVFIVFAVLRDQKPFKLKTPEQHAVEQGFVKAA

SEQ ID NO: 75381 - protein, 429 aa, unidentified
MNYTPQNAKIASITEKTLIVGIDVGSETHYARAFDWRNYEYSKKPFAFNNDEAGFAAFKAWMEDMADKHGKEAVIPGMEPTGHYWLNLGAYLQEQGMKPVHVNPHHVKKSKELDDNNPNKNDRKDPKTIAGLVNEGRFSYPYIPTGIYAEIRNLSNLRIQTQEELTRIKNRIARWFSIYFPEIKDVYKNPDAVSGMMVIKKAPLPCDIKELGVDGVNQVWRDVKLKGAGLKRARTLVSAAEHSIGSTEAPGSARIEIRNLLNDYEVYKNRMDDLMREIEAKLSEIPYIDKLMEINGIGLKTISCFIAEVGDIRRFDNPKQLQKLAGYAIVADSSGKHNGESRISHRGRKRLRYALYEAAISVIGKNKEFREIHDYYRTRKQNPLKKMQSVIAIACKLIRIFYTILTKGVDYDGQKMLSDIVRPETIMAA

SEQ ID NO: 75382 - protein, 387 aa, unidentified
MQKPHDNSKVCRAAFVQDSTLVVVIEMALTSWLVAGMIPGVDREPLKKIAPDPEELLQLLYRWRDEAIKAGREITRIAVAYETGRDSFWLARWLRARGIDAHVIHATSVAISREHRRAKTDRIDTAMLRRGFLGWLRGEPGHCSLAIVPTVAEEDAKRPHRERESLVQERTSTVNRMKSILIQFGVRNFNPVLRKASEKLDAVRTPEGIPLPPNAAAALRRHMERLRVIKEQITAIERTRLQRLQRDPADKMNAMVFLLVRIIGFGVETAEQLVHEILFRDLRDRKAVARYAGLTGSPDESGSKRREKGLSRSGNGRVRTILIQLSWRLLKLQPGSELVLWYQKRTADAKGSRKPMIVAFARKLIIALWRYVNTGLLPEGFELKPAA

SEQ ID NO: 75383 - protein, 361 aa, unidentified
MSSMPEVPPLGHDSDADEVILGVDTHKDSHVGAVITTLGVLVASEAFPATAVGYRQLLTWARSLGPLRRAGVEGSGSYGAALTRHLRGAGIKVIEVNFPDKATRRRRGKTDAIDAEAAAQAVLSGRASATAKASDGPVEMIRMFKLAKASALKSRTQAINQLKAVLVCADPALRESLAGLGPCTLVRRCADLDPATPNDVVSAAVYTLRRLAQRILHLTEEIRDLEKRITAAVNTHNPQLLERHGIGQDSAAAMLIAAGDNPDRLNSEGSFAALCGVSPVDASSGKTKRRRLNRGGDRQANAALYRIVLTRLRWDADTRAYVQRRLAEGKTQREAIRCLKRYVAREVYQIITASTGLPSPA

SEQ ID NO: 75384 - protein, 265 aa, unidentified
MTYVGIDVSKVTFVVAYSSVKTNKTRTFKNTVNGVHEFVQTISASEHNCVLEATGNYSALLVYLLSEAGITISLENPLKIKNFARVMLTVTKTDEIDARLIALYGEKMQPAPYKLRSDAILVLKQKRTVLRQLKKQLVATRNLKGSMEVLPFFDPKCKKTIEKTITFLEKQIKEMEEELASLAQGEYKKQMDLLTSIKGIGVTLAAPLIVATGRFSYFDNAKQLTRYLGLSPTYQQSGTSVNVKGHINRNGDSSLRSQLLSLIHI

SEQ ID NO: 75385 - protein, 341 aa, unidentified
MDKELYFGVDVSKKTLDLAYYDGETIDWKNAHIKVSNDDAGFKKIGSWVAKVGKDFDTFLFCMEYTGLYNQNFRLWLESKEYIYGMVEPRKMHRFEPDLDDDQRSLDRIKTDELDAFRIAIYCEQNHKKILRNPSKLPSPVYFKLKRLLAERKQNTKQSTLYKQQLHDICAYDTDLSVERKKLLLKNMQENQKAIDKEIDSYMNEDTSIRKNYNLLTSIPGIGCIIALETIVLTENFTAISNPRKYACYIGIAPFKKESGTSVRKKTGVSKKGFSEAKADLSIAVLSAIKNNPSIRDYWIRKRKEKCGGIVLNAVKFKLVLRMFAVIKRGTPYVETDAYKN

SEQ ID NO: 75386 - protein, 343 aa, unidentified
MKITTVGVDIAKTVFQVHGVDEQGAPVLRKQLKRGQVLRLFANLTPCVIGMEACRGAHHWARQLQKLGHTVRLMAPQFVRPYVKTNKNDMADAEAICEAVSRPTMRFVPMKNGEQQAVLSLHRARQGFVRARTAQANQIRGLLEEYGIVIPQGICHISKRLPGILEDGESDLPGLFRRLLQRLGEHLKQLDLQVRELDSQILLWHRQHEGSCRLAQIPGIGPLTASALVASIGDAKSFENSRQLAAWMGLVPRQHSSGGKTLLLGISKRGDGYLRMLLVHGARSVLRVAERKADYGTSWIAGLVKRRHPNIAAVALANKNARIVWAMLKHERNYDARYQATAA

SEQ ID NO: 75387 - protein, 319 aa, unidentified
MEAPKVSFEQVVSRGCGLDVHKKVITATIDGEGIKKQTREYSTITSSLKELREWLLDNGITHVAMESTGVFWKPVYNILEPAGFTVWIVNAAHIKYVPGHKTDKKDSAWICKLLLAGLLKPSYIPAKEQRELRDLTRFRTKLIQNNASHKNRIMRQLEDANIKLSSVLSSTSGVVATKLIDKLCDGEIITMEDVESVYHKKLDASKEEIYEACQGFITEHHIYMIDIFRQEIKNGEQSIEKLNQRIKDILQPYENVLELLQKVPGISCKSVEDLVAEIGLDMNVFPTEKNLASWAGICPGNNESAGKKKAEEPRKGTSK

SEQ ID NO: 75388 - protein, 349 aa, unidentified
MSEISRIGLDTSKAVFTVHAVNAAGEAVVRLNLRRAQMIPFFRKRPATVVAMEACGGSHHWARKLTALGHEVRLIPPQYVKPYVKRGKNDRIDAEAICEAAGRPGMRFVLAKTEDQQAQGMVLKVRATLVEQRTQLINALRGHATEFGVVTGKGTAKVAALLAAIEAEATIPAVGKEMLALLGEQIAHLDGRIQALEKKVNAMHKANAISQLLATAPGIGAIIALTFAIDVDPAAFESGRHLAAWLGLTPKQHSTGGKQRMGGISKAGHERLRALLVSGAMAVIQAAERPGSTLATEWLRRLLARKPRKVAAVALANKMARMIWAMMTTGEAYRRPAAAGAARRQAVIS

SEQ ID NO: 75389 - protein, 349 aa, unidentified
MEQFVGLDVSQKLTHVCVVDREGKAMWRGSSSTTPEDIAAAVRAHAPGAVRIGFETGALSTWLWHGLKKIGLPIVCLDARHAKAALSMQVNKSDRNDAFGLAQIVRTGWYREVGVKSIESHQIRAVLGARAQLVGMRTDLRNQIRGLLKVFGVVLERHSDKSFEDRVKEVARAAPDILATSLRSLLAILQPVCTQIALLDRLVMTQAKGTAMARHLMGVPGVGPVTAMAFVTAVEDPARFRKSRSVGAYFGLTPRRYQSGEVDASGRISKCGDPLVRAYLFEAATALLTTCKKWSALKAWGLRIAKRSGINKARIAVARKLAVILHQMWTTGEDFRWSNKGNETEVAAA

SEQ ID NO: 75390 - protein, 344 aa, unidentified
MEIYTIGIDVGKTVFHLVGLNQRGEVVVRKQLSRSQLLRFTANRKVHLMGMEACGGSHFLGRALQEQGQEVRLIPAQYVKPYVKTNKSDYIDAEAIAEAVGRPTMRFVPIKSDEQLDMQSLHRVRERWVMRRTAVVNQIRGLLLERGITVRKGRRYLDAALPAILEDADAKLSGTLRLLVAQLNLELDQLAARLEEADALIKQAAQASEACRRLDAIPGIGPLAATAVIAAIGNGAAFRKGREFAAWMGVVPREHSTGGKQKLLGISKRGNRYLRTLFVHGARAVLQFREKQSAGLKAWLAQLTSRSHHNVAVVALANKLARMAWAVLATGVAYRPPLLAAASA

SEQ ID NO: 75391 - protein, 450 aa, unidentified
MVRKPQVIEDQEHERVFERVAAVDVAKASGMACTRMPNSSRPGTRHSTVWEVPAAMNAVLALADRLVADGIEMVTLESTADYWRIWYYVLEAAGLRVQLVTASQAKNLPGRPKTDRLDAMWLARLTEMGLLRPSFVPPAPIRVLRDYTRARTHLVQDRTRCWQRLEKLLEGALIKVSAVASKLTTVSAQDMIRAMIAGERDPAVLAALARGRMKAKHGALVEALTGMFDDHHGELAQMLLDQIAFCDTRITALTARIGQHLAQIPAAWGVDADGSTGPSAGTGPGAAALPAARRLAEVPGISLELACSIIAETGLDMSRFATAGHLVSWAGLCPSARQSGPRNRTAAKGQGDGYLRGHLGQAAIGAARTATFLGERYNRIARRRGKAKAQVAIARTLLVITWHLLADPAARYTDLGPTYYQTKIDKNRKARSHIRQLEALGYTVTLTQTA

SEQ ID NO: 75392 - protein, 410 aa, unidentified
MDTLIERCAGLDVHKDSVTACVRLPAAGGGREQVLATFATTTADLLALRDWLGALGVTVVGMEATGVYWKPVYYVLEERVQCWLLNARHLHNVPGKKTDTLDAVWICQLLEHGLVRPSFVPPPAIRELRNLTRYRKAQIEERTREAQRLDKVLQDAGVKLSSVASHLLGVSGRAMLQALVEGTRDPATLAELARGTLRKKLPALREALHGRFSRHHALLVGAILTKLDFLDEVISDLSAEIEQVIAPFAAEVALLDTIPGVDRRTAEAIVAEIGVDMSRFGSAARLASWSGFCPGNNESAGRRGPGTTRKGSKWLRTHVVEAAKAASRTKQTYLAAQYARLRPRRGTGRATVAVGHSILVAAFYILDRHQPYRDLGPDYFRRRHSREHHARRLARQLQALGYRVTLEEAA

SEQ ID NO: 75393 - protein, 418 aa, unidentified
MNEDGNTRVSRRYVALDIHKHYCVVAGVDREGRVLLQPVRVEHADLEGWLKKNLRASDHVVIESTTNAWYVYDLLTPLVERVVVANPIQVKQIARARVKTDVRDTFILARLLAANLVPEVWVPPIHVRQLRQLLSQRRQLVETHTQIVNRMHSVAHRHHLTHARGKRFNEKTTAWQKDKRLSKVEQFQLELEMENRVYIEKQIGRIGKEVAKMSHQKPWADSMTYLMQLPGFGVITGMTVLAAIGEIQRFESARHLASYSGLTPGLEQSGTKYREKGVTKEGRKELRWAMVEAAQRAVKSDPVWKTRFLEMQKRMHRNQAIVAIARRLLELVWYVLTRRQPYRHFSQERIAYKYLTWAWQMDEAARDGLTRQQFTRYYLMRLGIGHDLTRIALNPKYLRKIASEAELLALRPELDRIE

SEQ ID NO: 75394 - protein, 339 aa, unidentified
MNVMIGIDPHKASHTAVAIGRDEDQIATIKVRSTLRQVDQLLLWAEPFEKRTWAIESVGGLGYLLAQQLVARGEDVLDVPATLASRIRVLATKRSNKNDPNDAHSIAIAALRAPTLRSVEPADHAEVLRLLSKRNMDLGRQRARVICRLHSLFAELVPGGIAKEMYVSDAEAVLDKVTPASPAQQMRFELVLELIDDVRRLDAQIKDSHRRIRMAVKASRTSLTEIYGVGPIHAGSIIGYSGDIRRFANRDAYASFNGTAPIERSSGGRVVHRLSRRGSRKLNHALHMAAVTQIRNPSTEGRIYFERKVAEGKTKKEALRSLKRQISNAVFRQLLLDAR

SEQ ID NO: 75395 - protein, 357 aa, unidentified
MTQVKKLDFSGTTIFCGIDVHKKNWRVNIQDSEFELEDFSQNADAALLHKHLSRKYPGADFKICYEAGFSGFGAQRWLKREGMDCLVVNAADVATSDKEKRQKNDKADARKLCEHLQTKKAKSVYIPEVQWEHSRSLVRARERIVSNQTRCKNRIWQLLHFSGLSLPKGYEAGQYWSKNFIHQLEALDCGSETLKTTLKLYIRDYQQTKSLLLEATRTIRKLCKEPAYEKHITLLRSIPGIGEINAAIILLELQDISRFKQFDQLSSYVGLVPDTSDSGETRRTKGITHRSNYYLRTAIVESSWNVIRKDPALLQKYKQYCRRMNKNKAIIRIGKHVLARINYVLKNKKEYVTGVVA

SEQ ID NO: 75396 - protein, 433 aa, unidentified
MKTRQKPQSITENKLIIAFDISKDKLNCYSEYPTTDKSKVNYLEDEFCNRTDTIKSKLMQWVRLSEEGDYDGLHIVAEATSVYHRKLFRTAHRMGITTSLVNTESVSKLKVVESNDSGKTDQKDPRIIFTLAALGKTLTHRQISGEYALLRQWNKIIFDLEKKMVSLRCQLHTIVSELFCDYTFNKDFLYSTSGQALVFLYGANPQKIVADDYSVFVKKMKREVPRIKGQTLQRIYEDALMSVQHCLSTEYTALLSHQVRTAIDDYNRFKTRKEEARFVVEGLYNKLLKENPLYPKPTQGVISGYWLGRLFGEIGPIEDFQTVRRLLRYAGLNIREQSSGTTKGRNKVSKKGRVMLRVLLSQVVFPLVKKKALYGDYYHGKKNGNMPGTKANTAVQRKFLKMLYGWSKSGKAFDPNRLFACESKYKTEMKLAS

SEQ ID NO: 75397 - protein, 304 aa, unidentified
MKRIAVDLAKSVYQVAESVQVGRVDRRRRLDSGAFARYVQEQLEPVEWVMEACGTAHHWGRLMQEKGHRVVLLHPRYVRPYRRRNKTDRNDCDAILEAARCQGIRPVPVKSVQQQQMQQLHKLREGWKKSRVQRINLLRGILREAGVEAPNGIKPLLRHACELIERPEVQTLRGALQVVLAEINLYEQSMRECEAQLARWHADDEIVHKLDEVSGIGLLTASALKTAVGKPERFASGRHLSAWLGMTPNEYSSGERRRLGRISCKGNVYVRTLFIHGGRAALLAAKRCRARTPERLTRRYTGAL

SEQ ID NO: 75398 - protein, 341 aa, unidentified
MNIKRIGIDLAKQVFQVHGVDGQEKVVLRKQLRRAQMLDYFKTIPPCLIGMEACSSAHYWARELQKLGHTVKLMAPQFVKPYVKSNKNDANDAEGICEAVARPTMRFVAIKSIAQQDIQAVHRIRSELLQQRTAKVNQIRGLLAEYGIVVGRRVDVLHNALPLILEDAENGLTPDFRVLLEGLLQDLATLNGRVDELDKTIKTLASSNTDAKRLQQIPGIGPITATALVCAIGDGKQFKRGRDMAAWLGLTPRQHSSGGKDRLLGISKRGDAYLRTLLIHGARSVIKVAGQKDDPRSCWLQNLCSRRNKNIAAVALANKNARIAWALLSKETDYLPEGEPA

SEQ ID NO: 75399 - protein, 420 aa, unidentified
MKAYNVDNFAVLIGMDWADKKHDICEHPTGTNKYHYTVIKHTPEALHEWAMDIKQRYPEQKIAIVCELKKGPRIYALAKYDHLTLFTVNPCAVAKYRQAFTPSGAKDDPSDAFVQVEILTLHMDKLSVIEPESAAMRTLSQLVEYRRSLVQDSVDLSNKITATLKNYYPQVLEWFKEKDTYIFCDFIQKWPSLTAVKKARKQTLLDFFESHNSHYSTVNNARLDSIKNSMPLTLDEGVIVPNQMLVEVLITQFKVLLKGIEKLDKAIKSAYKAQQDKKIFDSLPGAGPQLAPRLLVAFGSNRARYNDAAELQKYAGIAPVIERSGQKMWTHWRYSCPTFLRQTFVEWAGFSIRYSFWAKAYYEQQKAKGKPHNSIIRSLAFKWIRIVFRCWKTNTPYDESTYLAALKRRGSPLLKFAVNS

SEQ ID NO: 75400 - protein, 347 aa, unidentified
MNFYNTTHLHYCGIDLHARSLYVCIIDHDGKTLLHKEISANPESLYRLIEPYIDDLVVGVECMHCWYWVADFCEDHGIHFILGHALYMKAIHGGKTKNDRIDSYKIAKLMRGGNFPLAYVYPREMRATRDLLRRRTRIVRHGADLKAHIVNTTSQYNLPPNKVNLKNVSARDQLKSTFQNPEAQLNIDLDLNILECYHRELSKLEWHLEQQAKHHNPVCFSLLRSIPGVGRILALTILYEIGDIQRFESVQNFASYSRLVKCKAESAGKTYGTQGNKIGNAHLKWAFSEAAVLFLRGNPDAQKYLQRLQKRMNKAKALSAQAHKLGRAVYFMLKQEKVFDENKFLAG

SEQ ID NO: 75401 - protein, 344 aa, unidentified
MKKSNVIGIDLAKNVLQVVKISKHGELVTNKAVSPSKLKQVLAKSIPSIVVMEGCGSCHYWGRLALSFGHEVRIINPKKVKGFLQGQKTDANDALAIATAATQASVKFSQVKSEEQQTLQTLETSRKFLDRELTALNNHIRAYLYEYGITMRRGRKSLRETIALVLDHLDTRLPQCLKNTLSLLWERYLSTLVQLKEAKAYKATLVKQVEPCKRLLALESVGEVGAAMLYANIGDGKEFKNGRGASACIGLTPQQHSSGGKTIMLGINKKGGNKELRAVLYQGALSVISRLPDEPQTVKQAWLIALVKRVGVKRACIALANKTVRTAWALLATGESYQPVMLEK

SEQ ID NO: 75402 - protein, 350 aa, unidentified
MAHFVGLDVFVKETSVCVVDDAGNVVWERKVPTEPDDIAVLLTSVGGDYVRVGIEAGPLSQWLVNGLAEAGLLVICVETWHMKALLQAQQINKSDRNDARGIAQMMRVGLFKPVHVKTLAAQEQRMLLTSCKLVQRKLIDIEPDMRGTQRNFGLKVGVVSTIGYEARIRQLVEGFPRLAAIIEPLLTGRRVMRQQLATLHKLLLDTVRHDPVCRRLMTAPGVGPVVALTYRASIDQPQRFVHSTAVGAHVGLTPRRHQSGEIDYDGGISKSGDSMLRTVLYEAAQVLLTQSRHWSWLKAWGMKVAQRCGMRRAIVAVARRLAVELHRMWTDGTDFRWGSEPGTAVAVATA

SEQ ID NO: 75403 - protein, 343 aa, unidentified
MSTYYYIGLDIHKRTISYCIKAIDGSLIGQGKIEADRKSLGEWVQGLPGPWVGAMEATIFTGWVYDFLKPHAVALKVAHPEMLKAITAAKKKNDRADAEKIADLLRVNLLPECHMLSEEIRDLRRVLRYRNHIVRTAVKMQNKISGLLMEVGVSYSKRRIHGRKYFHEILERVEEIPPSVKELLKLSRSGYELFRTFQKRLVETLRTNTLIHDRVQRLMTIPGVGEITALTWVLEIGDPGRFASIRQAVSYCGLCSAQRESAGKEQRGPISKKRNKHLQTMLIEAAKLAPHWNEQLAIVHERELKKGNRNRATLAVARRLVAYMLAVDKKQADFKLPAEMQAA

SEQ ID NO: 75404 - protein, 345 aa, unidentified
MTQYKRIGLDTSKAVFTLHGVDQQDRPLLRITLRRPQLLAFFKRLPPTEIAMEACGSAHYWARELTSLGHEVRLIPPQYVKPYVKRGKNDRNDAEAICEAAGRPGMHFVPVKSVTQQAQGMVLKVRETLVGQRTQLVNTLRGHAAEFGVIAAKGIRQAAPLLAAIDAETTIPPEAKDMAAVLGEEIEHLDTRIKQIEAGLIAAHKANEISQRLATIPGVGPVTALTLATEIDPAAFESGRHLAAWVGLTPKEHSTAGRQRMGGISRAGNERLRVLLVIGATSVIKAAVRPGSKQMTDWLRALLQRKPRKVAAVALANKMARVAWALMMRGNVYRRPTAAAGAAAA

SEQ ID NO: 75405 - protein, 264 aa, unidentified
MKLYSGMDLHSNTTHIGIMDEKRQRLIDRKVRNDPELILRFLEPYRASLEGIVVESTYNWYWLVDTLRDHAYRVHLAHPVANQQYHGLKHSDDRHDAFWLAELLSLGVLKEGYIYPRELRSVRDLLRKRVQMVNYRTAMILSVKNVIHRNRGITVEASQIKRLGQEGWAEVVKGDEALWLATRSSKEAIDCLTQQIQQIERWVLRRVKLEEPFSRLLSLPGVGEILAMTILLETGPIERFSKVGQYASYCRLVSSQWTSNDKVK

SEQ ID NO: 75406 - protein, 307 aa, unidentified
MFVGIDVSKDRLDVHVQPSGEAFAVARQGEGLDQLVERLRALPAALVVLEATGGYETVVAAALAAAGLPLVVVNPRQVRDFARAAGQLAKTDRLDARIIARFAEAIRPAPRPVPDAAAQALGELVARRRQIVEMIGAENNRRRHLSHKRVLRGMARIQALLQVQLSEIEREIDDSVRGTPAWRDKEDLLKTVPGVGSTIARTLIAELPELGSLDRRKIASLAGLAPLNRDSGTLRGRRTIAGGRSTVRSALYMAVIVSIRHRLPLAQTYNRLRQAGKAPKTAITACMRKLVTILNAILRDQKPWAAA

SEQ ID NO: 75407 - protein, 357 aa, unidentified
MQNKNTEVDFSNQKFFLGIDVHKKNWKITIRTSQMELKTFSMNPQPEDLANYLQRNYPNGEFWSVYETGFCGYWIDKQLRQHGIKNIIVNAADVPSKGKERVNKDDIIDSKKLARELENGTINGIYIPDDYYEGIRSLCRLRYSVTKEQTRIKIRIKSLLTYYGKEFPENYELKNWSGKFINFLEGIEFNQVTSKQTLNHLIEELKDKKQRLAKIIRDLRDSTNTAGLGNKIKQLMSIPGVSFITAITFYTEIMDMRRFKRLDELCSFVGLVPSTYSSGDRERVLGLSNRQNKYLRNLLLESTWIAVRNDSALTMKFGELTQKMAKQKAIIRIAKKLLNRMRHVWLNDVEYVKAVVK

SEQ ID NO: 75408 - protein, 360 aa, unidentified
MAKARTLVGLDVHASKVVAAVLDAETGELQFFGMEMDVDRVAGFCAALPGQVRAAYEAGPTGYGLARELVKRRVQCTVAAPSKIPRGSGERVKTDRRDAELLVRLLLAGKLHPVRVPGPEEEALRDLVRARETVRQDLMRCRHRLSKLLLRRGIRFEDGDAWTDRHRRWLDRVVLEWPAAQATLLDARGAIDVLCHRRECLEGEILAILPSSPWSMQIGRLRCLRGIDTLTAVGLCAEIGDFERFAKPGQLMSYIGLVPSEATTGQQRKLGSITKTGSAHARRLLVEAAWHNRKAPRIGKTLTERQDGQPPAAIAIAWSAQRRLYRVWTRMQARNKRRTLIAAAAARELAGFCWAICQIE

SEQ ID NO: 75409 - protein, 346 aa, unidentified
MMIIGCDYHPSWQQICWVDTVTGETGERKLEHASGEAEKYYRGLPAPALVGMESTGNCQWFIEMAAAAGHDLWIGDAAKIRACEVRAQKHDRRDAVLILKLLLEGRFPRIWVPSSQEKDLRQLLIHRYKLVRIRAQVKTELQHLAMNQGVTKKRKLWSKAGEKVLRELPLAPWTSRRREDLFKVREMLSAQIDLLDRAVVEVAEKNEKARLLMTQPGVGPITSMAFVLTMGDVSRFQRGKQVASYLGLIPREYSSGGHQRFGSISKQGNWFMRMLLVEAAQNVVRYDPGFRNEYLHRCHNKAKGVAKVAAARKLAIRLYWMLRTNTGYPGVVRVESSSRVPLVSAS

SEQ ID NO: 75410 - protein, 372 aa, unidentified
MHQSSTLYVGMDVHKESIAVAYVAKDHDAEVISLGTFGTRQCDIDTLIRKLQSKAKHLVFVYEAGPCGYWLYRYLAKKDYVCWVVAPSLIPKKAGDRVKTDRRDAMQLARLMRSGDLTPVYVPAVDDEAIRDLSRAREDTLRDLKAAKLRLKAFLLRHDIRYTGRANWSPAHLRWLSEVVCPTPAQQIVFQEYVQTVTEQSERLGRLELELHEQVKTWRLAPVVEALQALRGVQFTVAVTTVAELGDLTRFENPRQLMNYLGLTPSEYSSGGRRQQGGIPKTGNTHARRALVEGAWADRYPAKVSRHLQLRLAKLPTAIQAISWKAQVRLCKRYRQLMAKGKHANQVVVAIARELSAFMWAIAKQVAGSPKA

SEQ ID NO: 75411 - protein, 344 aa, unidentified
MAQLNTIGVDLAKNVIQVSVVTPHGKELSNKALTRKKFSEFLTTQSKSLVAFESCATAHHWARVAKQSGHEIRILPAISVTPFRQGHKTDQNDALAVAEAAKRPHIKEAPLKSLEQQGLQAIQRSRELLIGDRTALSNHIRGLLLEFGIAIPKGFCHLHRAVPDILEDADSGVPDMFRSTLFLMHERLLLIKRDIDQLTEQIKVLVKSNDACKRLLDIEGIGPIGAVLLFATLGSGEAFHNGREFSAYIGLTPKQYSSGGKTNLVGISRHVANKRLRSVLIQGARAYIHHVKEPQTPKDKWLMAMVDRAGYGKASVALANKNVRTAWAMLTQGSEYNKLEGQAA

SEQ ID NO: 75412 - protein, 340 aa, unidentified
MKEITTIGLDLAKNVFQVHGIDESGQVVVRKQLRRAQVFGFFAGLPRCVVGLEARATAHHWARELRALGHDVRLIPPNYVKAYVKRNKNDAADAEAICEAVQRPAMRFVPVKTADQQATVMLHRARELLVRQRTMLVNALRGHLAEFGIVAAKGLHKVEGLIEIVKHGSDDRVPDAARRVLIVIANLIGDVGKKIATLEAQILAWYKSHATCRRLATIPGIGPMIATAIAAAVPDPSAFRNGREFAAWLGLVPKQNSTGGKLRLGGISKRGNGYLRRLLINGAHTALYWSKAAKADPWMISLRARKHRLVATVALANKTARIAWAVMSKEQTYRQRGAAA

SEQ ID NO: 75413 - protein, 433 aa, unidentified
MSASTGCDAALWLCGSEKGRTMSAAVYRFYVGIDWATEKHRVVVLDAERRVVREREVCHEGAALESFADWLTQLAASAVETVAVALEVPRGAVVDVLLARGFHVFALNPKQLDRFRDRFTVAGAKDDRRDAQVLASALATDQPAFRRLEPEHPLLLELRELSRLEDDLQEELGRLTNRLREQLHRYYPQLLHLVPAADEPWLWTLLERAPTPSVAQHLPRATVRTILSRHRIRRVDTDAVLATLRAPALPVAPGTVQAAQRHLAVLLPRLRLIHQQRAECATQIEGLLERLGESQEHRDVPILRSVVGVGRVVAATMLAEASRLLAARDYHGLRAQTGVAPITRQSGRRTLVCMRYACNPRLRQAAYHWGQSAARHDPVSRAHYERLRARGHSHARAVRGVVDRLLHVLIAMLAAGTLYDPARRRLPVGEAVA

SEQ ID NO: 75414 - protein, 392 aa, unidentified
MYIVGIDIGKNHHEASIVSPEGKQIGRSLRFATTYKGADSLMSFIFKNIGNSPCVFGMEATGHYWYPIYSFLKAKGYTIYIFNPIQSDSLRKMYIRQTKNDSIDSFLIAEVIRFGQFGTTSMADENILAMRQLCRYRDSVISSRTEIKLRIGTIMEQIFPEYEKQFSSLWVSTSMGILEKYLTPENIENAPIDELFEIIKDKSHNRLTRAKAISIKEAAADTFGIKIAQDAFSFQLKQLIDRMNFLDKQIEALDCQILEYYEKFDCYLHTIPRIGMIAAATILAEIGDINRFKSSSALVAFAGIDPTVRQSGEFSSTHNHMSKRGSPYLRHAIFLAATTCSFHNSPLNAYYKKKREQGKHHLTATGAVARKLTTVIYAVLRDGKPYEPKSFC

SEQ ID NO: 75415 - protein, 397 aa, unidentified
MLNPLSMQLRVGVDVGSRCHTVAIGLSDGSLLEEFEIPHTAEGFQEFFARIEACGRCYRVPVAVAMEGYNGHIRPLDTLVRARGWRLFNVNNLKLARFKEIFPAAAKSDRIDTRKTLELFQLGDHLPMAGDVLQEVMATPAENDILKRLSRRRLVGERTRVLNAMQADLQAVCPGLLEITRDVGNLWFLNFLTCRKGLLKLAGVRRTSLLKVRSIGANYADTIQVWQGRAYFAPDASLVGDMIQQDAARILELKKQIKALEDQMAKVAEKSSIAGQLASIPGYGSICTAEMAGEIGTIERFRKEASLALYLGMATLDRSSGKSRGSKPPRHVNTRAKAAMMIAVDRHRKLVPQSQRYYERKRAEGKKHNQAIRALGRHLCRVIFKMLTQNRPYSISP

SEQ ID NO: 75416 - protein, 413 aa, unidentified
MSHTSFGWYVGIDWATQAHQVILLDAERQVLGERSVPHTGGALAELADWLTAVCGGAVDRVAVAIEMPRGTVVETLLERGFAVFALNPKQLDRFRDRYTVAGAKDDRRDALVLAASLITDQPAFRPVRLDDPQVIRLRELARLEAELHQEEARLTNRLRDLLHRIYPQVLRLSPAADEPWVWALLELAPTPVDARQLTRPALSKLLRAHRIRRLTADTVLAHLQAPPLRVAPGTVEAVGEHIGLLIPRVRLVHEQRAHCRRRLERVLATMAEHAPGQCGEHRDVEILRSLPGVGRLVAATMLAEASQLLAQRDYHALRAQGGIAPVTRQSGTRARVDMRYHCNHRLRNALYHWGRVSAQCDRLSRQHYQVLRGRGHNHGRAVRGVVDRLLLILMAMLRSQTSYDPTRRRAYAA

SEQ ID NO: 75417 - protein, 389 aa, unidentified
MADWFAAEGVTAIAMEATGSYWKPVWYVLEDRAGQGRQGQGRQGQGWELMLVNAHHVKILPGRKTDVLDAEWLAELLEHGLLRGSFVPPPVIRQLRDLTRYRKRLIQDHTSECQRIQKTLEDAGIKLDSVASDVLGVSGRAMLAALVAGERDPNVLAELAKGKLRRKIPALRQALRGRFTDHHALLIGLSLAHTAHLERAIAQLDDRVDTLFATHTGPDRDSEPGVPFVRARDRLDTITGVGKRAAETIIAEIGVDMTRFPTAAHLASWAGLAPGNNITGGKRGSGKTTHGDVWLTDILVQCAWAAARTRDTYLSAQFWRLARRIGKKKAAIAVAHSILVITWHLLADDCDYTDLGGDYFTRRNTDRQRDRLVGQLHNLGYRVTLDKTA

SEQ ID NO: 75418 - protein, 313 aa, unidentified
MKKTICGVDVSKARLDVCIEPGHRLASFNYDTAGIAELAKFCREHAVDLVVMEASGGYERRAFIELWEQDISCALTNPRSVRRYAEAMGILEKTDRIDASVIARFADAKGLAPTPLPSQAQQRLKALVARLRQVTDDLTVQKQRRSSMLDNTEMQASVDEVIALLKRQSRSLEGEIASMIDDDPLWAKLADTWRELKGVAGRTVAWLHADLPEIGTLSNKAIAKLTGLAPIANDSGKRKGKRPTRGGRAGVRSILFLVAAIAARYDRSLAEFRDRLLKAGKEKMVVRIALARKLLVRLNAKAREARAQYANAT

SEQ ID NO: 75419 - protein, 338 aa, unidentified
MFYVGLDLHAKYITICVLDENGKVYARWTVRQLDQMMDRLRALPGSWKVCYEASTGYGMYYEMLSEYADHVAVAHPGLLRLIFQSKRKNDRRDALKLAKLLYVGEVPMVHVPPAQVRAWRELITFRRKLIEKRTRAKNGIRCLLRSLGIQAPRKPGLWTRRGIAWLWQLELANDMHALKRDTLVEEIHALTKQIARVEKRLDQYAASSVGVQVLRSIPGVGPRTAEAVVAFLDDPRRFPHSKRVGSYFGLVPCQDQSGNTNRLGHITRDGSSTVRQLLTEAVWQAVRRSPTVRAYCERVQRGDPQRRKIAVVATAHYLARVMWSMLKHGTLWQEKAAA

SEQ ID NO: 75420 - protein, 465 aa, unidentified
MAKREQSQVSGNAGRKLSRTLTLLNPDAAGIDVGASEHYVAVPPERDQQAVRRFGAFTEDLHKLAQWLLQCGVRTVAMESTGVYWISLYQILEDYGLVVKLVNARHVKHVPGRKSDVQDCQWLQQLESFGLLSGSFRPEAKICILRSYMRQRQMLISNASRHIQQMQKALTQMNLKLHQVLSDLSGQTGMRIVRAILQGERDRLKLAALKDPRVKSSAERIAKSLEGDYRAEHLFALRQAVELYDYYQEKIGECDEAIKKEMQSLETRAAPDSVPPTPLKRKARSRHHAIPFDSQAELYRIMGVDLTRIDGLNEATVQLILSELGLDLCKKWPSEAQFCSWLGLCPNNEISGGKVLRRGTRRVINRVANALRMCAESLLNSKSALGAYARRMRAKRDSKIAITATAHKLARLIYRTLKYGHEYNDIGQAQYEAKYRTNAIKSLRKRARQLGIQLVDLHPPTIVVP

SEQ ID NO: 75421 - protein, 338 aa, unidentified
MSVTTIGLDISKQFFQVHGGDADGRAILRKKLRRNQVAAFFANLPPCVVGLEACCGSHYWVRVLSRCGHRVRLIAPQFVKPYVKSNKNDANDAEAICEAVSRPQMRFVPAKSVEQQDIQSLHRVRGRLVSSRTGLANQIRGLLSEYGIVLPQHVSQLRRGLPLILEDASNELTAFSRRLFASLHNELLALEEKIGALDEQIESVYQTSEPCQRVAAVEGIGPLTATALVAAMSDGKAFKNGRQFAAWLGLVPRQHSSGGKARLLGISKRGDTYLRTLLIHGARSVVSRASRKTDRRSLWIADKQRRLGTSKACVAVANKNARIVWSLIAREEVYRRAA

SEQ ID NO: 75422 - protein, 337 aa, unidentified
MSVYVGIDVHRKRSQVAVVAEDGTVQVNKNVVNGSEPFLRLIGDLPSGTPVAFEAAFGWSWLADLLEDYGFEAHMVHPLRCKAIASARLKNDKVDAAILAQLLRADLLPEAWIAPAKVRQLRALLRHRISLVRLGTQLRNRIHAVAADHGYDRSASYWTGPGRGWLAELDLPAASREIITDCLAVIDGLAPVIDRIDGELHQHARTDPRVKTLRTLPGVGEFTALVMVAEIGDISRFGSARKLASWAGLTPTVRGSDLKVRHGNISKQGSAWLRWVLNQAAQTAKRSPEFAGSYQSIAKRRGKKIATIAIARKLLTRAWHLLTEMQATDPATPPRRS

SEQ ID NO: 75423 - protein, 342 aa, unidentified
MEQYVALDVSLKEISVCIVDSNGDVVFEGKTAAEPAILVELIRSKAPQVKRVGLETGATSPWLFHALASAGLPIVCMDARHAHAALSIRPTKSDRSDARGLADMLRMGWYREVHAKSVTSHERRTILGARHQLVTMRSELDAQIRGILKTFGLILGTGNKDTLIQRAEKLAAGHPVMSGLVAKLAEVRRHVTSQIAAIDRDIRHLVHTEPTLKRLMSVPGVGPITALAFLSAVDDPRRFKHARDVGPYLGLTPTRYQSGETDRQGRISKCGDTFTRTCLYEAAHVLLTRVQRFSPLKAWGMRLAKQIGGRKARIAVARKIAVILHCIWTDGTEFWWTREKAA

SEQ ID NO: 75424 - protein, 343 aa, unidentified
MDHFAGLDVSVKETSICIVDDTGRIVREVKVASEPEALLQELAKSAYRFKRMGLEAGPLSQWLFSALAEAGLPVICVETRHMRAVLKAQINKTDRNDARGMAQMMRVGLYRPVHVKTLRSQKLRMLLTHRKLLQSKAIAIDNDLRGTLRNFGLKVGMAGAVKFEARIKELVENFPDLAVLVEPMLVVRRVLREQIGILHRRLLAIVRDDEVCRRLMTVPGVGPVVALTYRATVDVPARFRNSKAVGAVFGLTPAQHQSGESERPGAISKCGDEMMRVMLYEAAQIMLTRTNKWSWLKAWAMKIARHRGMKKAIVALARRLAVIMHRIWVDGTEFRWTREVAAA

SEQ ID NO: 75425 - protein, 305 aa, unidentified
MSIKVVGIDLAKSSFQVCKLNGTSCEFNKSFTRNKLKLWLIQQPSATVVMEACATAHYWGRFCSELGHTVQLIAPKYVTAFRNGQKTDKNDAIAVASQQPNARFIALKSVDEQALQSIERIRQHLNDSMTATANMARALVAEFGLEIPKGVSAFKRRIPEILEDAENTLPDILREHIAKTFDLYETLSRQKAELESQLANHLKCHESCQKLEALEGVGPVNALGLYLSLGATGGNFKNGREASACIGLTPKQHSTGGKVVLLGISKNAAQKRLRSNLIQGALSVARQVEKRELKKNKRSLAQVPY

SEQ ID NO: 75426 - protein, 348 aa, unidentified
MRFYTQQHQYTCGIDLHARSLYVCILDDTGQNLVHKNIKASPEVLLKLIADYQDDLIIGVECMFSWYWIADFCADHGIEFVLGHALYMKAIHGGKAKNDKIDSEKIARLLKGGMFPYAYVYPREMRSTRDLMRRRIKLARERGDLMAHIKNTLSQYNLPEHPKNLRYEKQREPMRHAFPDPSAQRSIDLDLARIDFYDGLLAKLEWYLKQSAKSFDPNTILRLKSVHGIGDILSLVILYEIHDIARFPRVQDFVSYCRLVKCQRESAGKIHGTGGAKIGNPYLRWAFGEAAALFLRGNPEAQRWLEKKTRKHNKAKAMTILAHKLGRAVYFMLRRKSLFDQDRFLVSS

SEQ ID NO: 75427 - protein, 410 aa, unidentified
MEQVIERCAGLDVHKATVAACVRVARAGRTRQQEVRTFGTNTADLLALRDWLSTHGVTHIAMEATGVYWKPIYYVLEDEFTLLLVNAAHVKQVPGRKTDVADCAWLAQLLEHGLLRSSFVPPRPIRDLRDLTRLRKCLIQERTRGANRLHKVLQDSGIKLSSVATDILGMSCRAMLSALMGGTTDPDQLAELARGRLRSKLPALRQALVGRFRAHHAFLVGRLLAHIDYLEESIVDISGRIAESLSPFATMVERLVSIPGVGRRTAEVLIAETGADMSRFPTAAHLSSWAGMCPGNDESAGKRRSGKTRRGNPWLRDALVEAGNAASHTKTTALAARYRRLMHRRGHRKAVIAVGRSILEISYYLFSRATTYQELGSNYFDAQHSERLKRHSLALLQRLGYRVTLVPAPA

SEQ ID NO: 75428 - protein, 523 aa, unidentified
MATKSRTKRRRSARSHLIHKPHGTLHPRVQEVGPEHFGIVSVDCAKARSKWMLADFYGKVLVPPTPVEHTRNGLTAMVQAIRHVIAQFDLRDVIVAIERTGQYHKPVQRTCVQAGFDTRLVHPLTTKQFRQPANPANKTDDTDLSAIHLATVNGFGLVEHPADPVSARLQLLARYRRDWVEKKTALRCQIHEHLQVIMPGYAKCFDDIYECHIPLLIARSLGSATSILRAGLSGLTQQVRQASIRPHRPTLEKILAWAQTAVAAPDEASIRHQIMIELDDDRVIKLRAVRKVEGELAEVLVQTPYVLLLGIPGINVVSAAEFAGEMGPIQFYTKARSITGRAGLFPSRYQSDEVDRADGKLVRCANRRLRQAIMMIADNLIECNDHFRVMAAQWKLEGRDAREIRVRVAGRFCRIAYQMVAGRTSFRHPCCQQRDYILRKMITFYMEHNIDISRIMKDLDAAVAQIPGAAHREEGAALAEALDELQKKRGSGPRSLAEILPAVLAKLGVKLIESSKSGEANLS

SEQ ID NO: 75429 - protein, 368 aa, unidentified
MRFYDHPHRFYCGVDLHARTMHVCILDHNGQVVLDHNLACRPDAFLHAIAPFRDGLVVGVECMFAWYWLADLCAAEHIPFVLGHALYMKAIHGGKAKNDKIDAGKIARLLRGGNFPLAYTYPKGMRETRDLLRRRTYLVRKRADLLTHLQILNSQYNLAPFPKKLSFAANRAAMAVAERFTDPSVQHSAAADLALIDALDTRIGTLELYLTRTAKVDDVQTYHRLQTIPGVGKVLALILLYELHDVRRFAHVGQFLSYARLVRCQHESAGKKLGTGGKKIGNAHLRWAFGEAACLFLRGSERARKWKQKQQAQRGEAKALAILAARLGRAVYHMLRKREAFDEARFWDGRGLTGTSSLSRPEDCHAGH

SEQ ID NO: 75430 - protein, 355 aa, unidentified
MKKVDPTIWQDKPLYVGIDMHRKRWHISIRSADGQVLFSQRIEGRWPVLKHRLEKYPGAQFMAVYEAGYFGFWLYDELTAYGVTTCVTPPSLIPSASGNKVKTDRLDSDRLAKLLQAGLLTSVHVPTEQERAHRQVVRRRRQFIQDRIRVKNRIKAELRLYGLELSGETKGPWTQRLMTQLRAIRFADAFHQTSFIALLAHHDFLSSQIDLLAGQLKTLAESEIYQERVEILTSIPGIGWLSAMEILLELQDVARFQRAEQLAAYVGLTPGQHSSGEHVRLGRITRQGKSIVRTLLVLASWRLIDKDGAMREKYERIKARAGGKRAIVAIARTLLVRLRRLLLNREPYVLGLVSG

SEQ ID NO: 75431 - protein, 341 aa, unidentified
MSQATTIGLDLAKQVFHVHGADSSGRPLFSRRIARAKLAPFFAAQPKCTVAMETCGGSHYWARELQRMGHEVRLIAPSYVKPFVKRQKNDAADAEAICEAAQRPTMRFVPVKSEEQQASAAVFRARDLMVRQRTQTINALRGLLAEYGWIAPKGLFHVARLIARIEDPACDLPQAARSVFLLMIDSIGEQDKRIRELDREIARRAREDADARRLMTIPGIGPITATALLALAPPAESFRNGRDFAAWVGLTPLQRSTGGKQKLGEITKMGERTLRRLLIIGSAAVVLHASKRGAPQGSWLAQMLTRKPRMLVTVALANKTARIVWAVLAKGEVYRAPVVAA

SEQ ID NO: 75432 - protein, 478 aa, unidentified
MQEKRHIGLDLGVKSKSKVFIIDQAGEKVRPEFSIWTNPQGLDYMMEQALKGTTSKDILLDLTMEPTNVAWFGAAVYLRRKYPQVSIYRVKSEKAQDLRKFYRKHTKTDALDAQTLAKMPVVDSDSLQEVYIRPKKILALHTRCKQRAKLVKEATAKKNSICDQIELGFPRIVDCFSSKFTTPFILFCERYANPFKVRRLGKEKLLKLLIKLGFRQDVSALAENIYQRTEEACILFGNEDTVIDYKDFQDRIRSEFKIFKTLQKEIDKVTEKVQGLYKTCFPKKRLNSIPGIADVSGAVIASTIGDPLRFSSARSVVGYLGYYPKENSSGLSSKKGLRMTKAGPNMAKGTLYLAADTARLIDPPLGKVYYEQMVVHGNPHTKAVCRVVRALIPRILRVMKEDRDYVICDIEGNSISKKEGRKIVKEQFFVPEEVRQRLSNRKRMPLNKKGRTKPQCARGSKAPQIRVDSSRRIVFSLN

SEQ ID NO: 75433 - protein, 392 aa, unidentified
MPRDAEYTPLATSRPFPPARSADGWSRLIPRRHAGVGLERDATSDLSESRSTSRRHPGERHVRALDNVVRALRAPERRVPFVYEAGPCGFGIYRHLTTHGEACTVVSPSHIPKRSGDRIKTDRRDGNALARLHRAGELTAIYVPTADDEALRDLVWAREDAVGVSTQAKHRLKAFLLRQGRRYPGRAGWTLPYRRWLADLSFPSAPQHIVLQEYRDTIDEAERRLARLTDQLWQLVPTWQWAPVVDALQALRGVSFVTAVGLVAEVGDLRRFQHPRELMAYLGLVPSEYSSGPSVRRGAITKAGNPHARRLLAEAAWAYQGIPRIGRQALYRQEALPQSVRDIAWKAQLRLTARFRRLVTRGKAKPKVATAVARELTGFIWAIAREVPPPSA

SEQ ID NO: 75434 - protein, 356 aa, unidentified
MSRDIKYIGMDVHKEAIVIAMLNGSGKLVMESVVETKASSILQFMNGLRGELHVTWEEGTWAAWLYDLLKPHAHQVLVCNPRRNALLKEGSKSDKVDARKLADLLRTGMLRPVYHGEHGLRTLRELARGYQTISKDLNRVMNRVKALYRSWSIPCAGTQVYAPRYREQWLGKIEHAGVRRRAELLYQQLDGLQSLRRTLRPELLAESRKHKAAKLLRQIPCIGPIRAARLLALMQTPHRFRSKRQLWTYSGLGIETRDSAQYRFVRGQLQRAKKPQQIRGLNQNHNHEMKEIFKGAATRASCGVGPLRDFYVALLDKGMKPEMARLTLARKIAAIALTLWKKEERFDAEQLKPQAA

SEQ ID NO: 75435 - protein, 390 aa, unidentified
MIYAGIDVAKDKHDCIISDSDGVILSEPFTIRNNRIGFDDLFQRLTDCSEDLSILKVGLEATGHYSDNLLEFLMSKGLTTSVINPLHTNLYRKSLSLRKTKTDQVDAHSIVTMLRTENLKPYSQSSYHVRELKSLTRYRFSLVQDCAQLKSSYARLCVILFPELEKLVPSLHMVSVYALLSELPNAKAIADCHLTRLTNLLTTASKGHYDRNKAVEIREAAKNSIGSHSDVKSLELQQTIQRIEMASKQIGQIESKINPIIDLLKSPILTIPGISYRMAAIIIAETENFHNFGSAEQVLAFAGLEPSVYQSGQMTSTHAKMVKRGSKYLRYALFNATKYVCHWEPTFNTYLAKKRAEGKAYNVAVSHAAKKLTRVIFHLVKTNQHFVSQG

SEQ ID NO: 75436 - protein, 410 aa, unidentified
MKVAGIDVHKKVLMVVVVDASTPEVKPARRRFVTMPSELHRLLTWLREQGVEEVVMESTAQYWRSVWLELESHMRLHLAQAFSNRAPRGRKHDFKDAERLVRRLIADELILSFVPSGEQRIWRSMTRMKLQLTRDRVRLQNQIECLLEEMRIKLSIVVSNLLGASGLRILHALANGETDPRKLAQLGGERLQCTEEQLVDALTGRAQPVHGEMLALQLQRLQLIDQQMARLNSMIAAAMKAQQDAVIRLAEVPGLGVDSAQQIIAEVGAQASTFPSAAELTSWVGTCPGKEESAEQNHSSRSAKGNKYMRRVLNQAAHAAVAKKGSHFQAVFRRLLPRLGYQSAIWAVAHRLCRLVWKILHEGVRFIEQGHQVGPREKRKRAQMLARALRKLGYEVTITPINQLTANPVV

SEQ ID NO: 75437 - protein, 347 aa, unidentified
MKIVGCDFHPSFQQIAVLETSTGEIEQGRLCHNDGEAEQYYRQLEGPALIGMEAVGNSLWFEQLMQRLGHELWIGDAAEIRASYVRRQKTDKRDAGHILRLLMEQRFPRIWVPSAAERDRRQLLLHRHKLVGMRTRVKTELQHLALNQGMQKKRKLWSVQGRADLEKLSLEGWTRKRREDLLAVLELLEDQVEKLDDAVKEIAADDRQAQLLMTQPGVGPMTALAFVATIGDVRRFKRGKQIASYLGLIPAERSSGDKRRLGAISKQGNVFLRTLLVEAAQSAVRHDAEFRREYRHRCHQKPTGVAKVAAARKLAVRLYWMLRTDSDYAQRLQGSHAGQPESSCGRS

SEQ ID NO: 75438 - protein, 383 aa, unidentified
MKSVCGLDVHKDSVYLCILSEFGELIEKVFGVLTFQLEEMRDLMLHHHVVEVSMESTSVYWIPIWRVLSPHFKLNLANPYFIKQLPGRKSDVKDAQWIAECTMKELIRGSFVPPEIIQQLRQYDRRIFDLNEEIVRKLSKLDAVLQRCNIRLSNYVSNVDSKSYKAVVRAISQGITAPEELVKLIHGRIINHHGINVVTASLKGVVSLAEIDMISQLRDELDMAEAHKEKCQARMLEICEREFPEELRRLQTIPGIKERTATSLIAEIGTDMNKFETANHLASWSGLKPRNDESNKKIKSRSITHGNVYLRKTIIECAWAASRTKDCFFSRFSYHQTQVRKKNKMKVLVAVARKMLIAVWHVLHDNTNYIDFTTDRKTSRTKG

SEQ ID NO: 75439 - protein, 347 aa, unidentified
MRFYTQQHQFYCGIDLHARTMYLCILNRDGEILVHRNMPVEPEPFLKAITPYRADVVVCVECIFTWYWLADLCAREGIPFVLGHALYMKAIHGGKAKNDKIDAQKIAVLLRGGMLPQAYVYPASMRATRDLLRRRIHLMRKRAELLGHIQNTNSQYNLPEIGKKIAYKANRDGIAERFPAPAVQKSMEVDLALIDHYDHLLRDMELAILKTAKQHDATTLYLLRTVPGIGEILSLVLLYEIHDIARFPRVQDFVSSCRLVKCAKESAGKRYGTSGTKSGNAYLKWAFSEAAVLFLRNHPQGQKYLARLEKKHGKGKALTVLAHQLARAVYYMLHRATAFDMQRFFQS

SEQ ID NO: 75440 - protein, 408 aa, unidentified
METVYSVCCGLDVHQASVSACLRRVATGGTIGTETRQFATTVQGLTQLSQWLTEAGCPVVAMESTGVYWKPVFHILSATVEVWVVNARDVKQRRGKKTDRADAQWIAELLAYGLIEPSFVPPPQIAALRDLIRMRTALVHTRTQVKNRVLAVFEDTNVKLASFVSDPFGVSGRKMMDALVRGHRDPKALSQLARGVLRRKIPQLSIALEGTFTDHHGLLVRLNLELIDQINAQIQQLDGRIEQLMEPLEKETKQVQSIPGVQKTASRIIISEIGTDMSRFGSSPRLCSWAGMCPGNNESAGKRKSGKTRKGNRYLRRVLAECAWAAGKTDTFLGRTFRRLQARIGGKKAAVAVGHKILTIVYHLLTEGTTYDDGRYNRLSRKQENRQFKRALSTLEQLGYQVQLTPAA

SEQ ID NO: 75441 - protein, 356 aa, unidentified
MNKRSKLNFSGQPIYIGLDVHKKSWSVSIFTKHGEYKSFSQTPKAEALMNYLQHHFPGAQYHSVYEAGYCGFWIHDQLREKGIQNIVANPADIPTQDKERRNKRDRVDCRKLARGLRSGDIKGIYTPPRWTLEDRSLIRTRLSMGRKQGRCKNQIKSMLLFYGVNIPEQREMGHWSRRFIRWIEGIRMQRASGDVALQIHVEELCYLRQVMAKLNRAILALSRTDEYRGWVSLLRTVPGISTLTAMIVLLELGEINRFPSLDHMCTYVGLVPDVRGSGEKEHVGGMTTRGHSYLRWLLVEASWVAVRKDPAMMEAFNEYCKRMKKSKAIIRIARKLLNRIRYVLKNEAEYVPCVIE

SEQ ID NO: 75442 - protein, 346 aa, unidentified
MNNNDPRYKLYLGVDTHLELHVATLINELGQVVKNKAFSADISGYRELFSWCNSYGFLQKAGIEGTGSYGAELTKFLLKNHIDVYEVMRPNQMERRLKGKTDVIDSENAARSVLSGEAKVIPKSHTGPVESLRSLLLTRNSAVKARTQAMNQIRALLVSGPDELKQSLYLSKPEACAAACLARCSSSSEPLLISLELLAQRWRFLNDQVKKLDKVLKKLTMSTAQSLVSRFGVGSNVAATLLVAAGDNASRLRKESSFAALCGVNPIPASSGKTTRHRLNRGGCRSANNALWTVAMVRMRSDPRTKDYVARRTAEGLSTKEISRKLKRYIARELFPLILKDLATLA

SEQ ID NO: 75443 - protein, 317 aa, unidentified
MANHKETFIGIDVSKKQLDVAIRPDAKHKVYPNNEQGIGQLASFLKPLSPSLIVLEATGGIEVPCVGVLAAEGLPVVVVNPRQIRDFAKATGRLAKTDAIDAQTIARFGETVRPEIRDLKSPEMQELAALNTRRCQIIQMITAEKNRLATATKWTREDIKRHIAWLKESLHEVNDELNKSIRNSPVWREKDDLLQSVPGIGPVASATLLSQLPELGMLNRKQIAALVGVAPLNRDSGMMRGKRCIWGGRAGIRCALYMATLVATRFNPIISAFYHRLCNAGKAHKVALTACMRKLLTILNSMVRTNTRWSPVSSANA

SEQ ID NO: 75444 - protein, 370 aa, unidentified
MENRSMFVGLDVHKETIDVSIAEGHRDGEVRHYGVIASDLEPLDKVVRALRAPNRRLHFVYEAGPCGFGIYRHLTGRGEDCVVVSPSMVPKRSGDRVKTDRRDSLSLARLHRAGELRAIYIPDATDEAMRDLVRAREDAVIVGTQAKYRLKAFVLRQGRRYPGREGWTIAYRRWLADLSFPTAAQHTALQEYRDAIDETERRIERLTEQLRHLAPTWRWAPVVAALQALRGVSFITAVGLVAELGDLTRFRNPRELMAYLGLVPSEHSSGPSVRRGAITKAGNPHVRRLLAEAAWAYQGIPRIGRQHLYRQEQLPKVVCDIAWKAQLRLTGRFRRLVARGKAKPKVATAIARELTGFIWAIAREVRPTSR

SEQ ID NO: 75445 - protein, 372 aa, unidentified
MNNTTVYVGMDVHKESFTLADYTIETEKSSHTRRTSADYKEVMKFLEYLRTIYGNDTSFICGYEAGCLGYTLYHQLSDHNVNCVILAPTTMLEQRSGKRIKTDKRDAELIAKCLAQHNYSPVHIPTAEDEQTKEFLRMRDDHKIALKKIKQQILSFCLRHGYHYEGKTNWTVAHLKWLKALGTEVLYKEILDEYLLTYDFLIDKIERLDKRIEELASKEEYRDSVKRLCCFIGVQTHSALSILVEVGDFKRFASAEKFSSYLGLVPGEKTSGDDRNRLGITKAGNRHVRLLLTEAAQCYGRGTAGHKSKALKAKQAGNDPKVIAYADKANERLRRRFYKMVLGKSKQHNVAKTAIARELACFMWGMMTDNIV

SEQ ID NO: 75446 - protein, 349 aa, unidentified
MAEPRISYTGERIDVGIDVHKETYTVTCLRQRQIVKTATVPADPARLAESLPRWFPGARLFSAYEAGFSGFVLHRVLTTAGITNIVVNPASVAVAANDKVKTDRRDAKKLARELADGRLRGIYIPTEAEELARLLPRTRAQLVAHRATITRQIKAKLHQFGLITPGSRRLMSSRYLREIAAWELPPELHVSLTLLADQWRFATRQLLEVRRLLREQAKAQAALETVYRSVPGIGEVVARTFATELGDMTRFANERALFSYTGLTPSEYSSGAAIRRGHISRQGVSRLRHVLVETAWRALSGDPILQAMFDRIAATRGKQRAIVAIARRLIGRIRACFRHGTPYAVGTVG

SEQ ID NO: 75447 - protein, 419 aa, unidentified
MNKLYVGLDLSLKDFKVSIIDQEGVVATKPFAATNDLYGSQVLIEAIEDCCKRLDVSTVFIGFESTSVYGWHIQHLLADSPTLKPYHPNIICFNPKIIERFKESLGNLPKNDYVDANTIAERLRFGRLPKSCPVDFRYLALQRLTRHRFHIVDNIVREKSYFLSNLFLKFSGLCQEKVFSNNFGAVATELFQEYLTVEDIATRSLDDLIDFIMEHGKKHFDDPKATASALKEAARKSYRLNSSVDNSLNFVLRSCLENMKALEKQKKAVEKAIEIELPFFKNEYLCLTSIKGIGPVIAAGLISEIGGISRFDNDSALAKFTGLYWSEYQSADFVADDTYIKKTGNVYLRYYFVQAAEQLRKYLPEYTAFYSRKFKESKTHHHKRALVLTARKAVRLIFALLREEKLYNPSARKGEVDIT

SEQ ID NO: 75448 - protein, 371 aa, unidentified
MNSIVYVGMDVHKESYTLCCYCYDTDKVEYKQTIPSDYKLILKYIESMRKVYGEDATFVCGYEAGCLGYSLYHQLKEHAVDCKILAPTTMAITNTNRVKTDKRDAGNIARCLAFRTYSEVYVPDDEDNSVKEYIRMRDDQKLMLKKIKQQILAFVLRHGKKYEDGKTYWTIAHMKWLKNLDLTGLDKETLSEYLVTYEYLTEKIERLDNRIEELASGEKYKEKVQNMGCFLGIKTHTALSMIVEIGDFNRFEKAPKFAGFLGLVPSENSSGDDRNRYSITKAGNSHLRRLMVEAAQSYTRGNIGHKSISLKQRQQGCSAEVIAYADKANERLRRRFYKMTLNKGINRNVATTAIARELACFMWGMATGNIG

SEQ ID NO: 75449 - protein, 341 aa, unidentified
MKNSTTISIDLAKTVFQVALFNKYGVMKSNNKMSQAKMVQLIAQHPEAVICMEACGTAHYWGRRFQQSGHKVLLVPAHIAAKYRTGNKNDANDALAIYESIKRPKTYFVQVKNLDQQDLASLLKLRQGYVKQRTQTANRIRGLGLEYGVKIPQGIAKIRKDLPCFLEDADNELTTSSRFILRNLLDQLLLLDGQIDESTNRLVARAKEVPVCTRLTALPGVAWIIASALYARLGDGSAYKCGRDASASVGVVPAHSGTGGNNKLLGITKRGDRCLRSLLVHGARSVVSRIKDKQDELSCWIREQLSKNHLNKTAVAYANKLVRMAWAILKSGEEYRTPLAQ

SEQ ID NO: 75450 - protein, 374 aa, unidentified
MIGCDLHDKKMLLKVAQGRNEPETRSFRNSEDGRRRLIDDLRRRSAEAGGARVVLVYEASSLGFGLHDQLTGAGIECHVLAPTRIERSPRHRRSKSDERDAQRLLEIVRAHVLAGNALPAVWVPDPQTREDREVVRARLALREKTTRVKCQIRALLKRHQVVPPAGTGRAWSVKHRRWVQGLALDGGGLSRGVRVTLGDLWRQLIFLEEEMTILDWEVARLAGTRRYAGAVRALCRRDGVGLLTAMVFLTEMGDLSRFENRRQVAGYLGLAPSSAESGEKTDRKGHITHQGSSRVRKVLCQAVWSRLRVDPAARGAHARLARGQPKRRKTATVAMMRQLAVWMWHTGRDAQEVAGVVRSSAGERSGRGSGAAAG

SEQ ID NO: 75451 - protein, 386 aa, unidentified
MQTVADRPEAPTAIRTDLGAIFVSLELSRSTWLVTSLSPGGGEKMSKQVVRGGDVAGLLEHFARLREKALVRTGRVFPFVVIQEAGLDGFWIDRALQNEGIESHVVDPASIATSRRRRRAKTDGIDGEALVRALLAYKRGEPRVCAMVKAPTPEEEDRRRLCRERKVLIVERVQHVNRVKGLLFSQGISGYEPLRRDRRERLDTLQTGDGRRLPDHLKAQVRRELDRLELLLEQIKAVEAERDELLAAQRTAAPAAMLLDIKGIGPEFAAILWSEGLFRHFDNRRQVASYAGLAPTPWQSGSVDREQGVSKAGNRRLRTALIQLAWLWLRHQPQSALALWFEERVRRNGGRLKKTAIVALARKLLVALWKYVTAGVVIEGAVMKRT

SEQ ID NO: 75452 - protein, 418 aa, unidentified
MRRVIGMDLHRTFAEVVFWEDGRLRWYGRVDMTPSGLEGFGRSLTSNDEVVLEATGNTMAVVRVLRPYVARVIIANPLQVKAIAHAHVKTDKIDAGVLASLHAAGFLPEVWLPDAETERPRRLVARRNQIVRHRTRVKNETHAILAAHLVPPCPHAELFNRPGRDWLARQVLPDDERAAIARHLRELDRLGEDLAALDRDIGVAVVDQPAVRRLLTITGMNVAVAAGLVAAIGDIRRFPSPQQLVSYFGLNPRVRQSGLGLAQHGRISRIGRAHARALLVEAAWAAAKAPGPLHAFFLRIRARRGHQVAAVATARKMAVLAWHLLAKETDYLWTRPALVAHKLRALELQAGRPMQKGNKRGPAFAYNIKALRNQEMAIAEQAERAYEHLVGQWQPKPTMKRRGPNMAARPRGAPRQHG

SEQ ID NO: 75453 - protein, 357 aa, unidentified
MKFKRIAIDTFKHVFILHGVDEQERPVLRRELKRAQVESFFAKQEATAVVLEACGGSHHWGRLLSRLGHQVRLIPPQYVKPFVKRAKNDRNDAEAISEAASRPTMCSVVVKTVDQQANGIILKHREMLVGQRTQAINALRGHAAEFGVVAAKGIVKVAALLTVLATDDAIPATARAMFEQMGAHIEMLDQHVAALDGELAVLHKANPVSQMLAAIPGVGPLGAITLALTVEPGNFASARHFAAWLGLTPKEHSTGGKQRMGKISKAGNERLRQLLFVGAMSVIRFAKPGSKSASAWLLQLLERKPRKLAAVALANKTARIIWAKLAKVPANRLRLAGMPAEGVMARGEAYWRQPIAA

SEQ ID NO: 75454 - protein, 359 aa, unidentified
MNATTVAVDLAKNVFELAVADQHWRVIERHRLTRGQFERWFANRAVCRVVMEACGSAHHWARWLIALGIEVRLLPPRYVRPYVKRNKTDAADAAALLEALRCADIAPVRIKSVEQQALQSLHRTRSLWMATRTARINALRGFCREFGIVIAHGSRVGVEQIGRVLADPHSAIPPLLRATLPLLVEEVRLLEARIAQLETTLGVAARESHACTTLLSVPGVGLLTATAAMAATGGSVAHFKSARHFAAWFGLTPKEHSSGALRHLGRISKRGDRYLRMLLTHGARSVLRAASVAHRAGRPLDALRQWALAVQSRSNHNKAACALANKLARICYAALRDHAPFDRARLTRKITRQAFTLPA

SEQ ID NO: 75455 - protein, 344 aa, unidentified
MEITTIGLDLAKSIFQVHGVDATGQVVIRRSLRRAQMLPFFARLPSCLVGMEACGTSHYWARELIKLGHQVRLMPPAYVKPYVKRGKTDAADAEAVCEAVTRPTMRFVPLKSPEQQAALSMHRTRDLLVKQRTQLVNMIRGLLAEFGIDIPKGLERALLMARRIVDGEAPDVPMEAAKIVGTLSQQALDIHIRLREIDHDLLVWQRGNDVARRLMTIPGIGPVGATALAASITDPHQFRSGRQFAAWLGLTPLQKSSGGKERLGRISKMDDKYLRKLLILGMTSLVRRAKYNPKTVDQRLADLLARKPVRVATVAMANKTARIVWAIMARGETYRAGHRPALAA

SEQ ID NO: 75456 - protein, 462 aa, unidentified
MRAIRTPTAPGSSEELQTGNKGARPRASFSDHPAELFSPRHRQAGETREVARNVLFAGIDWASAEHAAAVHDDAGRALASFMVAHSEEGLDKLVGRLRAFGEPGELTVAIERPDGRLVDRLLEAGHPLVAVSPNAIKAWREGEVVSGAKSDPGDAAVIAEYLRLRFHLLKPLRPFSDHTRALRAAVRARGDLVAQRTAAHNQLEATLDAFWPGAKEVFSDVTCKIALAFLQRYPTPASAERLGDKQMAAFCKKHGYTGRRSPAELVERLRRAPVGIAAGAETAARKVAVLGYVAVIASLNAAIKDLDKEVATRLGEHPDGEIFTSLPRSGSISAAQMLAEWGDCRQAYAGPEAVAALAGMSPVTKKSGKHKAVHFRWACNKRFRTAVHIFADNSRHGSDWAAGIYAQARARGADHPHAVRILAPAWIRVIYRCWIDGVPYDPAKHRAAVALTTNSDVTSQAA

SEQ ID NO: 75457 - protein, 371 aa, unidentified
MNSILYVGMDVHKESYTVCSYSFEHDEVEYQQKLPPDYKMVLKYLEQLRKRAGENVEFVCGYEAGCLGYTLYHQLSSHGVNCVILAPTTMGITNTARIKNDKRDAGNIARCLAFHTYSEVYVPTVEDESVKEYVRMRDNQKKALKIIKQQILALVLRQGYRFELGKNYWTQKHLIWLRALDMGGISQEALREYLITYDYLTDKIERLDARIEELASAERYQESVKKLSCLIGVKTHTALSVLVEIGDFNRFAKADRLAGYLGLVPGEDSSGNRQRHTGITKAGNNHVRRLLVEAAQSYTRGAVGHKSLALKKRQAGNPPEVIAYADKANERLRRKFYRMVLKNKSQRNVAATAIARELACFMWGMMTDHAA

SEQ ID NO: 75458 - protein, 344 aa, unidentified
MDYFAGLDVSVKDTSICIVDDAGKIVREVKVASEPQALLAVLKIPPYRFKRIGLEAGPLSQWLYSALAEAELPVVCVETRHMQAVLKAQINKTDRNDARGMAQMMRVGLYRPVHVKTLRSQKLRMLLTHRQLLQSKAIAIENDLRGTLRNFGLKVGMVGRVKFEARIKELVENQPDLAELVEPLLIVLRALREQIVVLHRRLLAIVRDDEVCRRLMTIPGVGPVVALTYRASVDVPARFRKSKAVGAVFGLTCSKYQSGEIDRSGRISRCGDEMMRVMLYEAAQSMLRSKKWSWLKAWAMQIARRRGIKKAIVALARRLAVIMHRIWVNGTEFRWTRDQALAAA

SEQ ID NO: 75459 - protein, 320 aa, unidentified
MSATSVVVGIDVAKAYVDVAVLGGDFAAQRFENEAEGHSALAAALQPLGVALVVMEATGGYEAALACALQATGLPVAVVNPKQARDFAKAMGRLAKTDRIDAGTLAELAAVLVRRDDLARYLRPLPDAQQQTLAAVVTRRRQLLTMLGAERQRLQLAIPMVRPSIEAMIHAIRAQLDDVEAQMVGHVREHFAELDRLLRSASGIGPIASATLLATLPELGRLTRREIAALVGVAPIANDSGTTRGRRRVQGGRFETRRVLYMATLTATKHNPAIRAFYQRLVAAGKLPKVALVACMRKLLTTLNAMVRSNKPWDSSLHHA

SEQ ID NO: 75460 - protein, 483 aa, unidentified
MATQHKNKYKPAVMPGPVEIPDAEHELVIERVAAIDVAKAAGKVCVRLPGKSGRRFSRVWDVPARTGAIGELAEQLIETGIEKVTVESTSDYWRIWYYLLEAAGLSVQLVNARDVKNVPGRPKTDKLDAVWLAKLTEKGLLRPSFVPPAEIRRLRDYTRLRADLTRDRTRYWQRLEKLLEDALIKISSVASTLVTLSTRDMIEALIAGERDPYRLAELARGKMKAKRSELIAALDGRFDEHHAELARMLLSQIDVLNTQIDTLSARIEALIAELPDDTGAIDHGTGGDAPGASTGTDLAAEPNTGGANPIRVDPAIDAQCVLSTVERLDEIPGISAGNAQNILAEIGTDMSRFPTPKHLVSWAKLCPRTIQSGPVTRAGKTGKGNPYLKGALGEAATAAAKTNTFLGQRYRRLVKRRGKLKALVAVARSILVIIWHLLVNPATRFHDLGPDYYTNRIVTERRLRNYVAQLAAMGYRVTIEPAA

SEQ ID NO: 75461 - protein, 391 aa, unidentified
MICVGIDVAKDKHDCFILSSEGEVLADVFTIPNNAEGFDLLLQTIRRCTRPADKIKVGLEATGHYSYNILGFLLNKGLPTFVINPLHTNLYRKSLSLRKTKTDRVDARTIATMLMSDLDLKSYTDTSYHNEELKSLTRYRFDKVRERAKLKQSVSRLVTILFPELEKLVSTLHMASIYELLSEFPGAHQIATAHLTHLKTMLLDTSKGRYDRDKVTEIREAARGSIGSQMPAKSLELKHTIQLIRELDAEIDEIENEISSIMDEIHSPITTIPGIGTRMGAMILAEIGDFHNFDSADKILAYAGMSPSTYQSGQLTNCYSHMEKRGSRYLRYAIFNATKYVCLWDPTFAAYLAKKRAEGKHYNVAISHAAKKLVRLIYAMERSGETYRPAA

SEQ ID NO: 75462 - protein, 409 aa, unidentified
MRYYLGVDWADQTHAVWVVDERGTKVALRTVPHTAEGLSAWGRELDEWRAQGIELWAAIERPEGRVVDFLLDHGVVVYPVNPKALDRARDRFRQSEAKSDPFDARVLAEFLRTDHAHLRALRPSSEAAQELKLLTDDYQRQIRQQTRLVNQLTTTLKAYYPRGLEVAELTTALAREFLQAYPTPATLTALTERQWQRWARAHRLSETRTQELWAVLQRPQLPVPPHVVRAKARLMQSLVAQLTVVMEGVSAYREAIEDFFARLPAAQWIRTLPIGDHGITAPTLWARLGDAPGRWESFRHLQAQAGTVPVTIRSGKQQVVRFRFACDKSLRYVIDHVAFLSLRWSEWARAYYDEQRARGHSYRQALRALSAKWLKIIFVMWERQVPYDEQYHLATMTRQQLRLRQKKVA

SEQ ID NO: 75463 - protein, 382 aa, unidentified
MQTAQTHFTSIELILAVALELASNSWKVAIQDGQRAKASVHTVSAKEPLERLLQVLDAVSRMREKWGLPENIRIVFMYEAGQDGFWIARALTDRGFEAHVVNPSGIPVEKQAKRAKTDRLDAIMLVERLRSWLRGELSKMHMVHIPSPEAEAQRHLIRDRGELQKEINQHLDRIRKLLRTQGTWLQVNDSELEKLVTNQVRCYDGALLPAEMLSRFQREVERLKLARRQFDELNETIEQQLPEPVRERIATLQRLKAVGPVSARRLVLELFWRHFQNRKQVGACVGLCPMPYDSGKSKQDQGISKAGAAKVRALLIELAWGWLRHQPQSELATWFKHRTLGTGQNKRMRRVAIVAVARKLTIALWQYLEHGAIPAGAMLKAG

SEQ ID NO: 75464 - protein, 349 aa, unidentified
MTVYVAVDFHAREQTVSYCDLADGEIHRRKLRHQHDDVRAFYQQFTGEVIVAFEASGYSAWFEQMLAELGHTVWLGNPAEIRRKAPRRQKNDRRDADLMLDLLLKGDFPRVHGFSEESRTVLRQLRYRHKLVKVRTIAKNSLHAIGINAGLPLKRRLLTEQGIAQLQALSLSPVLTQQRDEWLELIASMNDRIATVEAQLQQRAKDDAAIALLQTHPGIGLLTSLALRYTLLPTSRFSTTRQVTAYVGLDCMEDQSAERRRMGSISKAGSKLLRFLLNEAGHTAARHDPELKQFYRRLLHRRDKPKAKVAVARKLLVRSFIMLRDQIDYAEFVRRGVAARVAREAHSLP

SEQ ID NO: 75465 - protein, 425 aa, unidentified
MKVTYQTCCGVDVHKSFLVATIIKTSGGVEPDYQKKRFSTFNNSILEFKQWLLDNECLYVCMESTGKYWVPVFNLLEDEINVTIANPKWVKAVKGNKDDTKDSKWIGDLFRLGLVKGSYIPCKKIRILREFTRYRYKLVSCRSSEKNRYQNALTVCNVALDSVVSDIFGKSSTSIIDYLLEQSDNSINHEEIASKLLRSLKSKEDAVIESIEGYQMTDSQKCRMHLVRAHMDYITAEINDIDREIESLLSSDPDYENAIQFLMTIPGVKRASAITIISEIGIDMSQFCTSKRLCCWAGLVPGSNESGGKKKSVRITRAGVYLKPALVQCAHAAVKSEKSPYYKKKYESLTKRRGKKRAIVAIARMILTAIYQMLSTGEEWNPSDLYKIDMPEALIEKQKAKAIKQALKLLEREGLYPPPKEPLAS

SEQ ID NO: 75466 - protein, 329 aa, unidentified
MKVQQIIGADLSKKTIDLVCHLNNHHLKVDNCTSGFKELLQWLEKQNIKLCESMIVMEHTGYYSFCFEDFLHQNHIAFTKVNALVIKRSIGIVRGKSDKVDAGRIASYGHEKQFKLTAAEVVSQELKRLQMLQSTRLRLVKQRAGLVCAIKEYRCIGISEKDLILKSQLQMVKEFEKQVEKLDQEIQLIIDKNESLKQNFNLLQSIKGVGKVVATAAIIKTNNFSRFTNARKFACYCGTAPFEHTSGTSIKGRTRVSHLADKQMKVLLDLSAKSAIQFDKELREFYNRRLEMGKSKMSTINIVRNKILYRMFAVVKRQTPFIEDYLQTA

SEQ ID NO: 75467 - protein, 395 aa, unidentified
MFIVGIDVAKRSHEVCMITSDGQTVQRPFSIRNNCTGYNLMLEKIRKHTNIKSQIVFAMESTAHYWLALFTRLRKDGYHVILLNPIQTSAMRDMFIRKIKTDAKDSFIIAELIRFGRYAESNVAQDRLLALKELCRNRFYLVDMAGDLKRKLIALIDRVFPEYEAQFDTIFCKSSVALLKKYPTPQKLSNAHLDKLTELLWNSSNGHFGEWKARELKELARNSFGVEDCDGAYSTLILLMLDQIQSLSGKADALEKEISRLFQSFDTTVTTIPGVGPIIGAVILSEVGDISRFSSADKLAAYIGVDPSVNQSGEFQAAHAHMSKRGSPYLRRCIWMASQVAVQRDPMFRAYYEKKAAEWLKYMTIIGHVTRKMTAVVFAILRDHKVYEPVLPTAA

SEQ ID NO: 75468 - protein, 408 aa, unidentified
MQAVHERCAGLDIHKKTVVACVLTGSGKQIRTYGTMTRQLEALADWLAAEQVSHVAMESTGVYWKPVYNLLENRGLELLVVNARHIKNVPGRKTDVKDAEWIADLLRHGLLRASFIPGRDERELRELVRYRRTVIEQRAHDVQRIQKVLEGANIKLSDVASDIMGASGRAMLERLIEGEDDPVALSQLAQKGLRKKQDQLQQALAGSIGAHQRAMLRHLLDHVKFLERQIEELDGQIQERTRPFEQVIDHLDAIWGLGRRSVEEILAEIGVDMSRWPTHRHIASWAKISPGNHESAGKRYSGRTGMGNRWLRAILVEAARNVSRNPHSYYAALYHRLSQRRGKKRAMVAVAHSLLVAIYHMIKDGTLHHDLGSDHFERLDRGQIARRAVRRLERLGYQVTIQEAASAA

SEQ ID NO: 75469 - protein, 327 aa, unidentified
MTASPLGLDVSKLKFNACLVRQGGKLRHKVFANNAEGFAQLSDWLKQQAVTQVHACLEATGTYGDSLATYLHAQAHLVSIVNPAAIKAYAQSHLSRTKTDRVDAALIAGFCAERKPPAWHPPAPEVQELQALVRRLESLTEMHTAEENRLSSGLSVKSVRESVEVLLAHLSAQIKKTEALIRDHIESHPKLKRQRELLDSIPGIGETTAAVLLAEVADFSQYGSARQVAAFAGLVPRERQSGSSVRGRPRLSKIGNARLRKALYFPAITALRCSAFFQSWAEGLRQRGKSKMSVIGAAMRKLIHLAYGVLKTGQPFDPEWTRKEKTA

SEQ ID NO: 75470 - protein, 359 aa, unidentified
MDGSKDQPQMTVGLDLGDNYSYLCLIDTQSGEIMEEGRLPTTSEALERRFSSERPMRIAIEAGTHSPWVSRVLEECSHEVLVANPRKIRLIYANKQKTDEVDAENLARLARLDPKLLYPLRHRSEGSQAHMAIIRSRQALVGARTQLVNHVRGAVKSFGARLPKCPARSFHKRASEHIPEALLPALGPILEQIGSLTERIRDYEKQLEVISKEHYPETELLRQVEGIGPLTALTFVLTLEDPYRFAQSRSVGAYLGLVPAQDQSGDRDPQRRISKEGDEMLRKLLVGSAHYILGPFGSDSDLRRHGEKIASRGGKNAKKRAAVAVARKLSVLLHSLWVSGEVYEPLRNTYRSGGQEEAA

SEQ ID NO: 75471 - protein, 402 aa, unidentified
MNKPVLSLDVSKGKSIAAMYLSCNEPVGKPFLVEHTRQGLGTLINELVKLEQKAKCRPEIIMEATGNYSKPIAQSLFEEGYSVITVNPLETHEQKRRSIRKIKTDKIDSHRIAQLYYMKQHDPMHIANPAIAEIKNLCRQYERLNVLYVDTQLRFRSIVDLLFPQYYSVFSELCNESSLRLIAAFPTPEAVLSAKKSEILKHIQAKYHRKEWPESIYQKLKAAAKTSLSYKVAQHSNIRVLREYTNILMTQRKVLDDIRAQIVAAAKNIPVYYLLRTIPGVGEMTAAVIIAEIGDVKFFINAKKLIAFAGLDPSVFESGTYKASKNRISKRGSNYLRKALFQATMSGICIRNKKPVNPVLYELYSRKVAEGKKKMVAIIAASSKLLRIVYGIWRNNEPFSLN

SEQ ID NO: 75472 - protein, 342 aa, unidentified
MTIVAGFDVHRRQITFDALDTETGELTRGRIDATPAAVERWVAGFERREVQVALEACTGWLFVSRALERAGAIPHLAEPVETSALRGRKRRAKTDREDARWLRTLLGEGRLPESWIPPEHVREWRSRARLRKTLIEERTQWLQRVQATLFHHGITGAPAELRSTTGREFLAALELPADARERITIALAMIDSLDRQLRPLESELRKLARRQTGCRALMSQFGMGELTALMTLCELGDVQRLSASRKAVRMAGLDIGVHRSDRRSRVGKLNRQGSPQLRWALYEAALSATRPKSPDHQDYLALKARGLTHTRASLTIARKLARRSFHILQELGPAALEPTTTT

SEQ ID NO: 75473 - protein, 396 aa, unidentified
MKVLNCRYETSINMSTQVEFPLFFDRCAGIDVHKESVVVTVKVNESPDQTRTFGTFTEDLISLRDWLSSNGIRHLAMESTGVYWKPVFNILEEDFEVMLVNARHIKYVPGHKTDCKDSAWIAKLLMSGLLKGSFIPPQQIREMRELYRYKKKLISQRVAERNRLQKILEDANLKLGNVVSDVFGKTGWAVICALIDGQTEAVSLASLAKGSLRKKIPQLICALNGRITEHHRFMLQTSRLALENIQQQIDRIDRRLDEYLSHHTTEVELLESIPGISHETVKGIVAEIGFDMSVFPTANHLASWAGVCPGNNESAGKKMSSRVTQGNRSLKTALVEAAWSAAKMKKGWLRNKYYALSVRRGKKRALMAIAHKILVAVYHVLSSHSPFKEPVLRITN

SEQ ID NO: 75474 - protein, 345 aa, unidentified
MSTTIGVDVAKSVFEVAVSNRPGRIVKRHRLSRGQFARFLATRAPATVVMEACGMAHFWGRQAVASGHRVVLLPPHAVRPYVPRNKTDRADATALLEAARNATIHPVPVKSVTQQALTGLHRLRSTWLATRTARINIVRGLLREFGVTIPVGARQVVPRIAALLAGPDDTVPAVLHPALAAVISELRELDVRLRTVEQQLTAIAAAMRAVERLRTIPGIGLLTATGLVAFVGDARRFPTARHFASYLGLTPREHSSGLRRRLGAISKRGDTYLRMLLIHGARAVLCHAKKAITPARLQRWALHLERLRGHNKAAVALANKLARIAWAVWTSGTEFRVAHLTPTPA

SEQ ID NO: 75475 - protein, 467 aa, unidentified
MPRVRPHPHRRGPAVTLPPELHQVNLNAAGIDIGAAHHYVAVPPGRDPDGRDVRTFGAFTADLIALADWLTRCGIETVAMESTGVYWIPLFEQLTERGFEVKLVDPRQLKHVPGRKTDVLDCQWIQQLHTFGLLAAAFRPADQICALRSYLRQRGMLVRYAAHHIQHMQKALEQMNCKLTHVVSDIAGLTGLAIIRAILAGERDPHVLAQLRDRRCKADEATIARALEGTWRREHLFELRQAVELFDFYRAQIAACEAEIEAQLGQFADQSGGQPLGDATRGRPAGRGALSFDARQHLQRLTGVDLTRIDGIDAPTALKLVAEIGLDMTRWPTEKHFASWLGLAPGSKVTGGKQFSGRTKPSANRAATALRLAAHSLHHSRSALGAFYRRLKGRLGAPKAITATAHKLARLIYRMLRFGTEYVDSGQDYYEQRYQRRVVAHLMRRAQQLGYQLIKNEPVSVATTSPA

SEQ ID NO: 75476 - protein, 417 aa, unidentified
MQTVTTIGVDIAKSVFQVHGIDAAGQVVIRRQLRRRHVLTFFQKLPPCLVGIEACASSHYWSRELQVLGHTVRLMPPAYVKPYVKRQKNDATDAEAICEAVSRPNMRFVETKTAEQQSCLMLHRTRHLFIRQQTAVINSIRAQLAELGIVAPVGRRGVDQLLVIVAYPSDKRLPEIARICIAALGAQLQMLKLRILEFDRLIRAWHRSNEVSRRLDRIPGVGPALATALVASIPDPKVFRSGRDFSAWIGLVPKQNSSGGKDTFGFQGLATVLTSESDPELLSACRLSGGRAAAFKSRSGCITKLADSPGGLTGTRRIGALVFHVLDKRTQFGQDLTSPWIVQKDPWHGDGEGRQERLQSAFNNRRFGKRTGHLCESQTLDRDPEERGVVVRDQRPGDDRLHRPVAINKGPGRNRPV

SEQ ID NO: 75477 - protein, 428 aa, unidentified
MEAVVERACGLDVHQATVVACLLVGEAGKKPRREVRTYRTLTRELMEMCRWLEEQQCTHIAMESTGVFWKPVYAVLERAPTPFELIVGNAHHIKNVPGRKTDVKDSEWIATLVRHGLIRPSFVPPKDLRRLRDLMRYRRKLVEGRTAERNRVLKLLESANIKLASVASDVFGTSGRAMLDAILANSKTPREMAELARGRLRSKLLDLELALEGSVDEHHRLLLRLQLERVDELDVDVDRLDAVIRKHLAPYKQQITLLQGIPGVDWVTSATLIAEIGADMNVFANDRALAAWAGLAPGNYESAGKQTKGRTRRGNVHLRTALIQAAICAARTKGTYLKDKFHRLKARRGSMRAAVAIGHKILLAAYHILSTGDSYKDLGEGYLDALDKHRTARHLVHRLHALGFDVTVQATSTTSLPPDLDDAVLAPG

SEQ ID NO: 75478 - protein, 313 aa, unidentified
MNRTPSPGRFVGIDVSQRTLHVADSRQQAVSTVPNEESGHRQLVVELADAELVVIEATGTYHRRLAGALVRAAIPYCVLNPRQARDFAKATGQLAKTDRVDARLLALFAERMRPRACQPLSESRQALRELVTRREQLIAMRTAETNRRHQQRFGASVREHIEWLNAQLKSMESQIAALVRTEPQWRHDLRRWQSASGVGPVLGHTLLATLPELGQLNRHQIAALVGVAPLCCDSGTYRGQRRIWGGRAQLRRCLYMAALVGTRFNPELKVFYERLLSRGKPKKVAITACMRKLLVCLNAMQRDAVDYRPGALA

SEQ ID NO: 75479 - protein, 354 aa, unidentified
MIIIGVDYHPGFQQIAYVDPDTGEFAERRLAHREEAEQFYRDLAGRGISVRVGMEASGQARWFEGLISELRFELWIGDAAEILTKRVRKQKTDRQDAQLILRLMLEDRFPRIWVPSWENRDLRQLLWHRHRMVQARTRIMNQLQAVALNEGLRCKKRLWRDKGREQLESFRLAPWASRRRRDLLELLDRLSPMIAELTQAVEQEAEKCPEAQRLRTHPGVGSLTALAFVLIIGRAERFQCGKQIASYLGLVPLEESSGQRRRLGHITKQGNSLLRFLLVEAAQVTVRSDPEWRSKYFHLAMRRGRKIAKVAMARRLAVRMYWMWRKGWDYEQMTKFSSHAGQPGHRDGVKLNTE

SEQ ID NO: 75480 - protein, 426 aa, unidentified
MTKKGKKSTPSPENMPILHPHAAGIDVGAEEHWVGVPADRDAQPVQKLSAFTCDLHRLADWLTACRITTVVMESTGVYWIPLFPILEARGFEVALVNARHVKHVPGRPTTDRFDCRWLQKLHTYGLLAPSLRPPEDICQLRSLLRHRDHLLRMTVKHIQHMPKSLDQMHLHLPHGMSEVTGVTGMRMLRAIVAGERDPQTFAQYRDYRMQSNEETIAKALEGDDRAEQVFTLTQSLALYDFTQQHIAACDQDIERVLATFDSLVDPAEHPLPPPTTAPRRPQRNEPAFDLRTHLYRITGVDLTQVPGLQAPTIHIVLAEVGLNRHTWPTDKHFASWLGLCPDHQISGGKVLSTGSRRVQNRASRALRMAAQSLRTSPSYLGAFHRRMRSTLGPATATTATAHTLANISNSSAKFEYTLFGLRVSEM

SEQ ID NO: 75481 - protein, 421 aa, unidentified
MNQLAQMAFTAYVGIDWADAKHDICVQAAGSEDRELDRMAHKPEAIEAWAQALYQRFGGPIAVALELTKGPIVSALQKYDFFVIVPIDPQRLAKYREVFTPSGAKDDPTDAQFALDYLMRHPEKLTVLKPQSVPMRKLSYLVEARDRLKGDQSRFVNRLIQALKQYYPQPLDWFSERNTVVFCDFLIQWPTLEQVKRARKSKLETFFKDHNVRFAHVIEDRITAIKAATPLTHDEAVIHAHRLQVEVLVEQLRLTIQAIKRFDQEIVATAERLPDYDLLFSPLPGAGKVIAPRLLAAFGEDRERYPCAAELQRHAGIAPVTNRSGKSTWVHWRWQCSKFRRQSFIDWSAQTINKSAWAGAYYRQQRAKGASHQAAVRALAFKWIRILYRCWQDRTPYDESKYLEALRRSGSPLLKQLAEAA

SEQ ID NO: 75482 - protein, 465 aa, unidentified
MSQLRKPILPRQAKGEPAQPQPPKLDALAQINHHAAGLDIGDAEIYAAVPESASDPAVRVFRTFTTDLQALADWLAACHVDTVAMESTGVYWIPIYELLEERGFQVYLVNARQLKNVSGKKTDILDCQWIQQLHTYGLLQPSFRPPEDICARRALIRHRGNLRRSCAAAIQHMQKALQQMNLKLTNVLSDITGLTGLAIIRDIVAGVRDPLKLAAHRDAHCRKSAAEIAASLTGNYKAEHLFVLQQALAAHDFYQAQLAACDVETESLYHTLDPQVDAMAQPLPPPRRPHSRRGNEPRFDLRTELYRLAGVDLTTVDGLDGLTVQAVLTETGMDMTPWRTSKHFASWLSLCPENAKTGGKIIKRGTRPGANRAALALRLAARSLHHSDSALGAFYRRMCSKLGKPQAVTATAHKLARIIYAMLKSKQPYKDPGADHLEAQVQERKLKQLQRQAKALGYELTPSAA

SEQ ID NO: 75483 - protein, 364 aa, unidentified
MLIIGCDYHPGFQQIACVDTETGELNEKRLAHPEQAEQFYRELQQRGITVRVGMESSGHSRWFERLLRELQFELWIGDPAVIRTKRVRKQKTDRQDAQLILQLLMENRFPRIWVPDAANRDLRQLLWHRHRLVQMRTRVMNQLHVVALNEGLRRKKALRRTAGRKELESTTLAPWARRRRQDLLDLLDQLTPKIQELTHALEEEVEKRPVTRRLMTHPGVGPLTALAYELVIGTPERFHCGKQIASYVGLVPEEKSSGDRRRQGHISKQGNVLLRFLLVEAAQVTVRSQPEWRSKFFHLAMRRGRKIAKVAMARKLAVHLYWMWRQGCDYGQLQKLGSHAGEPGNPDGEQSITDVMIGHPAPNN

SEQ ID NO: 75484 - protein, 455 aa, unidentified
MVMPTATSVDWLKEDLAAGFSRLWLLVGYSGKLFFLTGYKEPGYMGKVTQGAPGLLLFLRRTVMIIVGIDVASEKHDYFMLRKETGEVFNSSAITIPNNEAGYKKLHKDIQTFCGAMGDSKVRIGLESTGIYHTNIIAFLLEQNYETMMINPILTNMVRKASKVHTPKNDNLDAQTICKYLVDNESGFVPYTPSLYHIQTLKTLSRKRFYIVEDLRKAKLAVNNLIQLVFPEFKTLFSDIYCGSALSVLKAYSSPQKLARAHTAKVAALLHGSCKCTADQLIEAAKHSIGLKLNSYAFELVDAIEELEHIQHRVANYNAQIKHYVNELCPNLLSIPGVGYATAGLIAGEIGDINRFSSTDSLVSFSGIDCTVYESGKYKAQHCIPSKKGSKYLRYALFQVSRVIWQWDPIFKEYYNKKAVEGKHYYVILGHIQKKVIRVIYSVMKSGRSYVPHTA

SEQ ID NO: 75485 - protein, 347 aa, unidentified
MNYIGVDCHISSLEFAVVNEMGTLTKKAKVNTGVKEFMAFVKSIPKPRKIFIEEGELAAWMLETSMRFGEQLIITDPKINKWIGKAGQKNDRIDAQKLAQLARGKYVKEVYHPINDRRRFKDLVFAYHDTVKSQTRIKNKIKAHFRRNAIRCSGDTVFSEKYRDKWRQKLPTNQVTHLIVEELWVQLDQLRQSKERLKRHIKIQSKQYPEIKKFRTLPGIGLIHAATISAIIETPYRFANKKKLWMYAGIGLMERSSGEKVYSKKLTRNYNRPLKNAIKKAAQAAILAKDNQFRRQYLRLTIEKGIASHRAKLTVARSMLATLYGMWKKGEAYDPQIDKKRDKGIKK

SEQ ID NO: 75486 - protein, 454 aa, unidentified
MQKQDSYDYYVGIDCAQNKHDFAMKNNQDKFLIKKGHFSNTLQGYEKFLNTVLSKCLDKDKILFGMEVTGIYGTNLYERLKSDGYHVVMISPDSVKNYRDYKRLNKTDKIDSACIAELLLNGDAQIVHVEKNGYTDLKAYIRRRNALKVTCTQETNRFLAKVCLYFPDLLKVFPSGRATLKAIFSIYPTPYSIIEADFDELVSVLQKASKNKFGVDKANELIHAARNSIVVRKSISDGELYNIHSLIDSIDSLESEIRNLEKIIDSKAEEFPAYHVLLTLTGCGKITAATIVAEIGDISRFHKASQIVSLAGLYGDNSKSGSSVNKRGKISKKGSRYLRHAIYMVAEFARRNNPIFKAYFTRKKNGDRTKHTLAVNAVANKLCKVIYSLMKNQSTYIIQYRDLAKLSESTQNEFFQNAETDFSAKTRRKKYLYEDEYGELHEFVFKSLKTALIE

SEQ ID NO: 75487 - protein, 334 aa, unidentified
MHKADRTRRHEGSDMDAVLGIDIAKAKFTVALRTPDGKQRRKTCPNTPAGFEELAGWLTRQHVTHVHACLEATGTYGEALATWLSDAGHRVSLVNPAVIHAYARVHLTRSKTDDVDAGLIAQFTATQQPSLWTPPLPEIRTLQALVRRLDALYGMHTQETNRLAAGVTVAAVRASIEAVLVNLDAQIAQVTQLIREHIDRHPGLRHQRALLTSIPGIGDATAAVLIAELFDKPYTSARQAAAFAGLVPRLHQSGTLQGRAHLSKIGPARVRKALYFPALTALRFNPTIRAVRLRLVAAGKPKMVIIGAAMRRLIHIAYGVLKSGKEYQATCSHP

SEQ ID NO: 75488 - protein, 344 aa, unidentified
MEHFAGIDVSLKDSSICVVDAAGRIVREAKVASEPEALVAWFRGLGFAVTRIGLEAGPLSQWLHAGLSGAGFEAVLLETRHVKAALSAMVVKTDRKDARGIAQLLRMGWFRPVHRKSADAQEVRALLVGRKLLQSKLRDVELSIRGILRGFGLKVGEISKGRFAARIRELVAGHEMLETVTGAMLAAREALLAEFMRLHRRMLAIVRADAVCRRLMTVPGVGALVAVTFKTAVDDPGRFSSSKAVGAHFGLTPKKYQSGETDVTGGVSKVGDAMVRTALYEAANVLLSRTTRFCALKVWALAVARRRGAKRAKVALARKLTTVLHRMWVDGSTFRWSKEAPAAA

SEQ ID NO: 75489 - protein, 341 aa, unidentified
MTLYIGVDIHARQQTVSYLDTADGTTGLVELQHERDDIKGFYSQFQGEVIIGIEACGYTNWFEELVEQLGHQLLVGDAAEIRRLARRRQKNDRRDAHLLLDLLVHNEFPALFRYSRESREMLRQLRYRHKLVKLRTMVVNTLHALAINAGLSLRAQLLTKGGRKQLAGLQLSVIAQQQRDELVSLADELTRRIATVEQWLQAQAKSDVRVQRLQTHPGVGLLTSLCLVHTLGDLSRFPSTRKVAAYVGFDPMEDSSAERKAYGGISKAGSRLLRYLLVEAGQTAAKDDEHLKQFYRRLLPRRGKARAKVAVARKLLIRCFIMGRAEIDYAEFLRRGKREAE

SEQ ID NO: 75490 - protein, 411 aa, unidentified
MRRVIGIDVHRTFGEVVFWENGRLRHAGRIDMTRTALEGFGKTLLASDEVVLEATGNSMAVSRVLAPFVARVIIANPLQVKAIAQAHVKTDKIDAGTLASLQAAGYLPQIWTPDAETERKRRLVARRYQVVRHRTRLKNEVHSILHAHLIPKCPHADLFNARGRAWLAAQQLPDDERGAVDRHVRELDRLAEDLVLLDREIAQDAIEDSAVNRLMTITGVNLAVAAGIVAAIGDISRFNSPQKLVSYFGLNPRVRQSGLGAAHHGRISKIGRSHARAMLVEAAWAAAKAPGPLHAFFVRIRARRGHQIAAVAVARKLTVLCWHLLTKGEDYLWARPALVANKTRAMQLQAGHPQQKGSRRGPADAYNIKALRDREMLIAAQAEQSYERFVSQWKPRRPKTGARAPQLGKTK

SEQ ID NO: 75491 - protein, 317 aa, unidentified
MSNPETFVGIDVAKAWLDLAWLSGQTLRIDHSDEAIAGLVERLRLQPPTLVVMEATGGLETDVASALAAAGLPVAVVNPRQVRDYAKACGRLAKTDRIDAMVLAAFAAAIRPQVRALPDEDTRALGELLARRRQLVEMRVQEKLRLQRASPMQRVSLNEHIAWLDERIARLDIDLTHALRTSTAWRDKDDLLKEIPGVGSLTRATMLAWLPELGTLQRRQIAALVGVAPFNRDSGKHQGGRVIWGGRAQVRRTLYMATVASVRCNPVIREFYRRLRAQGKPAKVALTACMRKLLTIMNAMLKHQSRWTPALDTQHSC

SEQ ID NO: 75492 - protein, 344 aa, unidentified
MTISELARTVAGNITRFRILQGREKGVALMSEEKQQVFIGIDVSKKELEVALRPMGNRSVFSNNEEGIAFLVDFVRSCSPMLVVLEATGGLETGAVGALAAQGCPVVVINPTQARDFAKATGKLAKTDSIDAHVLAHFAEAVRPEVRGLKDIETQNLEALNTRRRQIVEMLTAEKNRLLMAPSWTRGDIRSHIDWLEKCLSRVNKDMNKLLKKSPVWREKDEILQSTPGVGPVLSVTLLADLPELGKLNSKQIAALVGVAPLNRDSGTFRGRRAIWGGRASVRSILYMSAMSAIRFNPIIKEFYQRLRSAGKIHKVAVTACMRKLLVILNAMIRNGHCWNAACP

SEQ ID NO: 75493 - protein, 482 aa, unidentified
MSSNKKQGKTRQPKTQAQLGRRKKQKGMCLADRPCLEPNAAGIDIGAREIFVAVPPDRDECPVRVFDTFTEDLQAMARWLKACGITTVAMESTGVYWIPLYDILEAHGIRPCLTNARHMKNVPGRRTDWHECQWLQYLHSVGLLRAAFRPEAEVCAVRAVIRHRGELVQMAVQHVQHMQKALTQMNLQIQHVISDLTGTTGLAIVDAILAGERDPAVLAQRRDPRIQATAETIQKSLVGNWQPEHLFVLRQSRLLYKTYQQQIADCDQEIEKLVGAFAPRVDPAQKPLPADRKRNRNASKKRNKRGLPANGFDLRTEAYKLFGVDVTQVPGVETSVLPLFSEVGRDLASRWPTAPHFVSWLNLCPDNDISGGRVLWRGTRKGQNRAGQIFRMAAYSLHRSPTPLGNYLRRMKAKLGPKAATTATAHKIAVIFYTIVTKQVEYDESIWAARDAQRQKRLEHKIRRQARQLGYQLVPMQEKPAA

SEQ ID NO: 75494 - protein, 386 aa, unidentified
MRHMEQVETAQTGATVFVAMELSKMAWLLAVQGSPSGRASSHRLDGGDVDGLLALLRRLAAREQGASGEKEQVVLGYEAGYDGFWLHRRLAAEGIACWVMDPGSLQVDRRARRAKTDRLDAVMLLRALTAWCRGDRAACRMVQVPSAEREDARRTHRERQRLIAERVQHVNRIKRLLATQCIHDHQPLRRDRRERLGALRTGDGLVLPPCLRREIEREFLRLELVREQIVAVEAERDTAVAAPATDDADVAKVALLAKLGGIGTELATVLVREALYRPFANRKEVASYAGLTPSPFASGDRHRDQGISKAGYPLLRKSMVELAWLWLRYQPGTALAQWFTKRVGEICGRIRKISAVALARKLLVALWRYVTTGLVPEDARLKPAAA

SEQ ID NO: 75495 - protein, 362 aa, unidentified
MAHGIRWVGLDVHAHESTMAIFDQATGEVATRRVVGRSHELLPWLRGVERPARMVYEAGPTGYGLARRARSEGIEVVVCAPGRSDRHPSDRVKTDKRDAVRLARRLAAGELTLVTVPSVEHEQLRDLVRCREDIRADLMRARHRLGKFLLRREIYYDGPANAWTQRHRRWLAGLRFADRASQLTMADYLHAHDVLLARRDRIEAELELLAAASSWAETIARLRCLRGIDTLSALGLCAEVGAFDRFEHPDSLAAYLGIVPSENTSGEHRRQGSITKAGSSHARRLLIEASYHYRRHPAIGPALERRQRGQSAPIVNIAWHAQRRLNARWQQLKHARRKPNGVVAVAIARELAGFCWEIALAD

SEQ ID NO: 75496 - protein, 360 aa, unidentified
MFTERTSVGLDVHARSIVGCGFDTVTGELSRRRVCPTLRGVTEWLAELPAPVAVAYEAGPTGFGLARQLTAAGIRCVVVAPSKLQRPPGDRVKTDARDARHLANLLRMDQFVEVRVPGVEQEAARDLVRAREDVRGDLMRSRHRLSKLLLRHGIVYSGGHPWTGVHEVWLRGQHFDLPGLQLAYDTAFETVLLTTARRDRLDKAIAQMAANSEYTPVVRRLCCLRGVSTLTGFGLAVEIGDWQRFTGSTIGAYLGLVPTESSTGSKRVQGSITKAGNTHARRLLVEAAWHHRKAYRPGLTMQARWNLAPAAARARGHQGNQRLHDRWEVFTERKKRPVIANVAIARELAGWCWSLAVMDG

SEQ ID NO: 75497 - protein, 358 aa, unidentified
METKRYIGIDLHRNCFTACVRLENGRNYLSEWKLEDLPRFAKKLRGSDEVAVEMTGNTRFFHEAVAPHVARFVAVDPNQFQVISHSVKKTDPNDARNLALYLAKDLLPEVRIKDKTEAQIASLTQTRDTLVKLRTALKNKINNILSAHGIPVAKEALSSDKALKAVLEMPFDEMVAIELQVIVEQIRALHQSIAKLEQTIKERGQQLKGHHNLTSIKGIGSLGASILLSVIGDIHDFADEGKLAAYFGIVPRVQNSNETERSGRITKRGSKLGRTTLVQCALIAKRYSPYLARYYDQIKSRRGGGKAIIALARKPRHHLSDLKERLGIRRFLELCSGGGGLNAGPDGMLDTARRTRAR

SEQ ID NO: 75498 - protein, 317 aa, unidentified
MNNTEIQTPVNVGVDVGKANLDIALHPSGQFHTIPNTEAHIRHFVKILQNYNVERIVVEASGRYEHALVQACDQAGLPIIVVNPISVRRYAQAIGVLAKTDRIDAQVIARYAATLKPEIKPIPDKTSQKIKDLLIRRSQLLEMSTMEKNRLQILPKYLHRSIKSLLRMLQSQIENVTRQIDQEVAKVDQWRTKMEIMTSVPGVGKVLAYTFLSELPELGSLNRKEIAALVGVAPINRDSGKLNGKRRIRGGRHRVRTVMFMAMLSSIQCNPVFKRFYERLKAQGKIPKVALIACMRKMIVVLNTMVKNQEPWRENKA

SEQ ID NO: 75499 - protein, 469 aa, unidentified
MKRQRQRRKQRDRTRPTSSPSLLQRINPNAAGIDCGAAEHYVAVPADRDPTPVRAFPTVTAGLHRLADWLTACGITTVALESTGVYWIPVYEILEARGLDVVLVNAQHVKNVPGRKSDVVDCQWLQELHSVGLLRGSFRPTAEIAVLRAYVRHRETLVQSSATHVQRMQKALLEMNLQLPTVLSDLTGDTGLGIVRDIVTGQTDPQALARHRDPRCHASEADLIAALTGNYRPEHVFVLRQNLELYDAYQRQLATCDAAIEAHLHTLSANAPPPARPLPAARKRKKPRGNEPRFDIRTPLHQLTGVDLTQLDALGPYNALRLLAEIGTDMSRWPTEKHFTSWLTLAPHNKISGGRLLSSKTQPSANRAAGVLRMAAMSLGRTNTALGAFYRRLAYRVGKAKAITATARKLAILVYRTLKDGLVYRDPGAAAYDAQHRDRVVRRLRQQAANLGFTLVNCTTGELLEPAVS

SEQ ID NO: 75500 - protein, 420 aa, unidentified
MSKKVTKSKNLINGKTLLVTVDIGKKINYGYCRFPDGSEIEPFDFYNSGVGFKKFWHEIEQIKRGSSLEEIVVGIESTGCYGEPLLHFLNKRKGVELVQINPMHTKRVKDLQGNSPQKSDRKDPKVIADIICLGHVLSVVLPEGVPAILRRLIHARERETSRRSVAYNHLQDLLFRIFPEFGRVMKDISTKSSRCLLRHYPLPVQIVELGREALAALLYQVSRGQLGMDRALELYRAAINSGGIDKDPEGLLLELECLLDLIELCNSTIARLENRVSQLLREVPCSQYILSIKGIGEIITAGLIGEVGDFKQFGSIGELLKYSGLDLYEISSGIHHGERHISKRGRCLIRKLLYFAAICTIRKGGAMHQHYQRHREKGMPTPKAMVAIMRKLLGIIFALVRDHSEYIPDYEVNKKIKLAA

SEQ ID NO: 75501 - protein, 458 aa, unidentified
MAKKGKKNEKGHKVVKLESLKQINLHAGGLDIGASEIWACVPEGRDEISVRMFETFTVELHRLADWLEACGVQSVAMESTGVYWIPVYELLEERGFEVKLVNARHIKNVPGKKSDVQDCQWIQQLHTYGLLSGSFRPTAEMVALRAYIRQRANLIRYRSVHIQHMQKALHQMNIQLTIVLTDITGLTGMQIIRAIISGQHNPVELARYRDPRCASSEETIAKALTGHYLAEHLFSLQQAVELYDFYNQQIAACDKEIEQKYSAIKPVIPADAPPLPPPSRRSRSKHEPDFDLRQSLYQITGVDLTEIDGLQALSVQQIIAETGTDMSKWPTAKHFASWLTLAPRNDISGGKVLRSRTIKSKNRAAQAFRMAAQSVSRSNSALGGFYRRLRAKHGSPKAITATAHKIARIFYHMLKYRQPYLDPGHAHYEQQHQARLLKNLKRKATSLGFDLVPKLAVS

SEQ ID NO: 75502 - protein, 430 aa, unidentified
MEIVYPRSCGVDVHKSFIVAVICISESVKPKYIKKRFSTFNNQLIQFRDWLIENNCQNVCMESTGKYYIPVYNALEGHISNVVVANPKWVKAIKGEKDDNKDAKWIADLFKFGIVRSSYIPEKDIRILREFTRYQYKLVNMRSSEKNRFQNALTTGNCKLDIVFSDIFGKSASAIVDTILSNDPYTSEDILSKVHARCKASHEDVLSAVDGIQLTQFQKARIRIVQKHMEYLDSLLDEIQHHIDLMVANYEEYIQILCTIPGINRKSAITIISEIGTDMSQWSSHRKLAAWAGLAPGCNESAGKKKSVKISKAGVYLKPCLVQVAHAAVKDKNCDYYATKFKKISKRRGKKRAIIAIARKILIAVYHLFKTGEVFNPTDMADVETTKKQRIEYIKNNLRNAFNQLSRTGLSEAEILQLIRKESTNSPQIE

SEQ ID NO: 75503 - protein, 357 aa, unidentified
MTVLAESVDAVIGVDTHRDTLSATVVTPIGAVVGEQQVAATAEGYRTLLEFGRERVPGVRCWALEGAGSYGAGLGAFLNKHGEQLVEVARPKRPARAAGRKSDRIDAVRAAREALSREHLSVPRSRGDREALRVLVSTRASAVTARTRAINHLKALIVSAPEELRAELRGKTSDAQISYCAVLRPRPSRDIEHRATVRVLRSTAQRILTLRQEADELEAEIQPLVAAMQPDLLRLPGVGPISAAQILISWSHPGRFRSEAAFAAFSGTAPIPASSGLTNRHRLNRSGDRQLNRALHTIVLARTRIDPDTRAYIARRSSDGKTTREAKRCLKRIVARQIYKLLKAPGGNPPPTPLDET

SEQ ID NO: 75504 - protein, 355 aa, unidentified
MSHLNSEIAVIGIDIGKNSFHVVGQDRRGAIVLRQKWTRGQVEARLANLSPCLIGMEACVGAHHLSRKLQLFGHNARLMPAKYVRPYSKGQKNDYRDAEAIAEAVQRPTMKFVATKTTDQLDLQALHRVRERLVSQRTGIINQIRAFLLERDIAVRQGLRFLRAELPGILATRADVLSPRMSRIIEQLAGDWRHLDARIEGLSGEIETLARQDQHCERLMTVPGVGPIISSAMVAAIGTGDVFSKGRDFGAWLGLVPKQISTGDRTILGSISKRGNRYLRALFVQAAWVVLVKLGPKHWERYGLKSWIEAAKQRLHHNVLAIALANKLARIAWAVLNKGRAFACVKADAMASRPA

SEQ ID NO: 75505 - protein, 338 aa, unidentified
MTPFEYFVGVDIASETFMACVGTAPWKLVAKPMKFENHVEGCASFLGWLKEHGFEFENTVVCMEATGVYSEELAYFLSASDYAVAVESPLNIQRKFPMNTSKTDWLDCQYIAEYACRYVDKLAFWQPKDEILEQVQLLLTTRQQFSVQLAAHKNALHAVNRKKVSSAVAKQAHQDIIQQIGKLIHDIDAEIRRLLESNPTFKQTLLLLLSVPGIGLQLAAHLLILMQTSLDPRELAAYIGICPYQHESGTSVYAAPTSRHFGPPALRKLLYLAACSVRTHSKLFQQYFLRKTAEGKSGKLVLNNIQNKLLKIACAVVRSQKPFIKNYVSVNPLALQNT

SEQ ID NO: 75506 - protein, 346 aa, unidentified
MNHIGMDGHITTLEFAVVNEAGRLVKADRVATSVNGFIGFVKTVPRPRTIYMEEGTLAAWALETCVRFGEKLVITDPKQNHWIGSSGQKDDPLDALKLAQLARGGYIKEIHHPVGQRRRFRELMIAYHDTVRSTTRIKNKIKAKFRQNGILCTGATVYSETYREEWKGKLPQETTLLLILEGLWRQMEQSEQTEKELLAAARAQAKRYPEIKHFEALPGIGFIHAATISAMLETPYRFADKRKVWMYAGLGIMRRSSGGKVYSEKLSTDYNRLLKYTMKQAAEAAIQAKDSPFRRKYLDMTLLHGIAPHRAKLTIARDMLATMWAMWRKGEKYSPEIREKAAYKQG

SEQ ID NO: 75507 - protein, 409 aa, unidentified
MQEATQHDAVDVFVGVDVDVDVGVDVGKGQHHAVALDRNGKRLYNKALPNDEVKLRALIAELKTHRRLLFVVDQPSTIGALPVAVARAEGVLVAYLPGLAMRRIADLHAGEAKTDARDAAIIAEAARSMPHTLRSLRLADEQLAELTMLRGFDDDLAAQLTQTSNRIRGLLTQIHPALERVLGPRLDHPAVLDLLERYPPPSALAAANEKTLANRLTKLAPRLGKNWAAEIVQALNEQAVIVPGTQAAAIVMPRLAQQLAALRKQRDEIAAEVERLVLAHPFWPVLTSMPGVGVRTAARRLTEAAQKAFATAAHLAAYAGLAPVTRRSGSSIRGEHPSRRGNKVLKRALFLSAFAALRDPVSRAYYSCKIQQGKRHNQALIALARRRCDVLFAMLRDGTIYPPKSAPDA

SEQ ID NO: 75508 - protein, 424 aa, unidentified
MKVTYQTCCGVDVHKSFLVATIVKTTGGIEPSYQKKRFSTFNNSILEFKQWLINNNCHDVCMESTGKYWIPVFNLLEDQINVTIANPKWVKAVKGNKDDTKDSKWIGDLFRLGLVKGSYIPCKKVRILREYTRYRYKLVSCRSSEKNRYQNALTVCNVALDSVVSDIFGKSSTSIIDYLLEQSGTTINHEEIASKLLRRLKSKEDAVIESVEGYQMTDAQKYRMRLVRAHMDYITAEINDVDKMIENMISSNPDFENAVQFLCTIPGVKRDSAITIISETGTDMSQFSSSKRLCCWAGLTPGSNESAGKKKSVRITRAGIYLKPALVQCAHAAVKSDKSPYYKKKYDSLVKRRGKKRAIIAIARMILTAIYQMLSTGEQWNPSDLYKIDMPVALVEKQKAKAIKQAKKLLQREGLLPPDEPLAS

SEQ ID NO: 75509 - protein, 320 aa, unidentified
MPQMAWLVGIDVSKDKLDWCIRGAARATAANTAAGCAALAKELGRRGIRLAVMEARGGYERPMAAALRQLGIRVLIVSPKRVRDFAKAAGRRAKNDPIDADTIAWFGEIFIREGGAQPDPAREQLAALVAERQDIVAMRVQCLNRDEHQSPALCRKLRKDMIRFLDQAIAKLDAAIAALIAQSQPLAERAALLASVPCLGRQTVAALLAWLPELGEIPNAQVAALVGVAPFDDDSGKHRGARHIAGGRRELRNILYMAVLGGATQHNPTLKAFYQRLLAKGKLAKVALVACIRKLPTILNIMVARNQPWQPPAQHGPELA

SEQ ID NO: 75510 - protein, 406 aa, unidentified
MLYIGIDVAKRSHVAAAMGDGGEVAVEPFEFRNTQKGFERLLERLARRGVSAEGSLVGMEATGHYWVALFDFLAANGFEVAVINPIQTDAWRRVDTVRPAKTDGIDALLIADLLRCKRFEPSALGDEATEELRQLARYRFELVQELTALKNRATAILDRVFPEYERLFADKFGPTSSALLKECATPADVLAADPEALAGLLAEASRGRLGRERADEVVEAARSSVGVSFGSRALAFELRVLVERMEFTRGQISELEAEIARALSETAGRHLTSIPGVGPALAALIAGEVGDAARFETPSKLVAYAGMDATRRVSGESLDSPGHLSKRGSSYLRWALMQGADRARRFDPYFGECYARKISQGKHHYVALTTVARKLAAVCLALMKEDRDWSPDPPAGHLPGHLSQKR

SEQ ID NO: 75511 - protein, 332 aa, unidentified
MNLVSTLGIDLAKNTFSVHGVNSKGQVVLRRTVSRGKLPELVAQLPPCLIGMEACAGAHEWARRFSRCGHAVKLMAPKFVVPYRKSGKNDDNDAEAICEAVTRPNMRFVPVKSVEQQADLGLHRVRQGFVEERTATLNRIRGLIAEFGYVLPIGAEQIRRQVPAILESLPVRVGRCVRDLLEHADRLATKVLEYGREIRLGIRDNNLARRAQIRQGIGPITASALVATVGNGRDFKNGRQFAAWLGLVPRQYSSGGKTRLGHITKRGDPYLRTLLVMGARAVLQRAAREADPLSRWALAVQKRRGYHRACVAVAAKNARVAWALLATHTAAA

SEQ ID NO: 75512 - protein, 375 aa, unidentified
MNNNNTLYVGLDVHKESITVAYAINSEPVELMGKIGTSPTDIQNLCKRLRSKSSQVSIVYEAGPCGYGLYRRLVKSGFDCMVCAPSLIPKKPGERVKTDRRDAIRLVRSLRAGDLSAVYVPGIEDEAFRDLARAWASARDDLRHARQRLKSFLLVHGVHYVGRADWGPAHRRWLSKYSFESPWRQLAFDEHRRTIEDRQALCERLESALKEAVTEWRLYPVVEALQAMRGIQFITAVGLISELGDLTRFEHPRQLMSWFGITPSEYSSGGSRHQGSITKAGNSYARKLLVEAAWSYRHPARISPAIQKRQENLPRPVIDRAWDAQLRLCKRYRKLQAKGKNVNITIVAVARELAGFIWDMGRIAMSVAQQPQCHK

SEQ ID NO: 75513 - protein, 393 aa, unidentified
MYLNIGIDVAKDEHEACILNDKGEQIGKYIRIKNFKSSIEKFRQRIESTASELDLIPRIGMEATGIYWYTVYCELSKYYEIHLFNPSQVRGFAAVNVRGAKTDKIDAKTIAGMLRFGEAPKICYGDKMRLELKEYCRFRFKLISLMANLKKRLTRNIHLIFSGYDQFFSSIFIKTSIAILNEAPRPSDMLEMGEEKLYELMRKTSRNHFNPEKARELLEMAKDSISLDFIEEALLFEIESLLKLIEYIEGQIKKVETRILAAWETVKDKHYLQTIPGVSDLMAAMIWAEIGDIENFNHPDQIVAFAGYDPKVKESGNKKVILGPSKRGSRVLRWVLGRAVVQAKMFNPVIEQYFKKKISEGKHYNTALCAAAKKLIRIIWSVEKNKRAFQIPT

SEQ ID NO: 75514 - protein, 342 aa, unidentified
MQAPRHIGIDLHRDKFTCCVRLENGRNYVTDWKLEDLPQFVKKLRPSDEIAVEVTGNTRLFRDGVAPHVARVVAVDPNQFRVISHSVKKTDPNDARNLALYLAKDLLPEVRMKDKTQAQLASLAQTRDTLVKLRTALKNKINNILSAHGTNLEKEALSSEKKLKEVLAMAFDPMIRIELKVLVEQIRSLNQSITELDKTIEDEGRKLEGHKNLTSIKGIGPLTASILLSVIGDINDFADEGKLAAYFGIVPRVSKSNETEHAGRITKRGSKLGRTALVQCALIAQRYSPYLKRYYEKIKARRGAGKAIIALARKLLGIIYRTLKNKWVFEDFTNFVLAEEAA

SEQ ID NO: 75515 - protein, 400 aa, unidentified
MNKKKRYLRFCGIDIAKNKHVLCIIDREGQTIVRSQSFANNKEGFQTLLECLKSTGRAGSILVAMEATGHYWYGLHDFLTVNGYQVAVLNPIQTAMQARKGIRKCKTDKIDAFHIAMLLKNGEYKAALVPGELGMTCRQLTRLRYSLVGQGAKLKQLVWARLHPVWPEYEELFANPFCATGRKLLTVAPTPADILQLGQADLGELIRKTSRGKYGPAQAKKTWLAAANSAGMQRGLEGTRIGIRTLLHQIETMAPIRKKLEEDIRELAKRLPAYIFTLPGIDPMRAVSIFGETDPIKNFKSPDKIVAFAGLDLTVYQTGNYDAPHRHISKRGSPFLRHTLWAMAFQAIYREGDLRDYWLRKRADGLTHKAAVTAVAIKLCRITWRILTDKRDYLPQGYPN

SEQ ID NO: 75516 - protein, 406 aa, unidentified
MDGRCIGLDVHRDFCEVAVWDAGEVRSAPRVPARPGPLEQFAQQLGPADRVALEATGNALAIARIIRPHVAEVVIVNTRRLAAISDAKQKTDRRDARTLAQLLAARIIEGNWQPDENTRVLRRLVARRASLVVNRTRAKNEILAVLHRNLAPHPPMTDAFGVAGRRWLDQLVLAVDERDTVNAALRQIDFLTEEIATIEHHLAEFALASEHARRLLTVPGVGLTTATTFLAHAGDITRFPTPGRLVGYFGLDPKVRQSGNHDARPGRISKEGPALARHVLVEAALTAVRSPGPLRGFYERVRARRGHQIAIVATARKMTALFWHLLTTGHDYAYSPPTSTNKKLRTIELKAGHAREKPGGPHTPINRERRRELERQTMQQAQTAYERTVAAWHRIQRERKTTQARA

SEQ ID NO: 75517 - protein, 444 aa, unidentified
MKSKGYQKHMEKKKMLAGKRIVGIDPAKEKHQAAVLNEEGIQMGRSFSFPVSHEGYSEKLWKEIGKILGDYGTEDLAFAVETSCALWKTLTDYLSQRGYTVLMVNPLTTYHSRPLMNHDFSKTDPKDALLIATNARNGNYTVYQHFTPEINKLHRLSITYDKLTKDRQKAIARLRAFMEEVFPEFLNCIPVDIETSLYLLDRYFLPEHFGSLSVHEEELNVRRISNGNHGTETLKKLKEYAQKSIGSRVHEEEEVLRSILDIWIMQVRQSGSGRAAIAKAMIELARKTEYFEILTSLKGISDISAARFIGECRDLSLYAHYKQIEKHAGANLRLMDSGKYQGARRISGIGNKRLLKLIYLMTTQTARFIPEVRIKFIKRQLKKKCYRKNIIASSSQLLKLLMALIKERRPYAFREETAQELEKLEMKYSEIQNTQKKEAVRKAA

SEQ ID NO: 75518 - protein, 343 aa, unidentified
MQAVTTIGLDIAKSVFQVHGVDSGGQVVLRRQLKRRYVLAFFEKLPPCLVGIEACASAHHWSRELQSLGHTVRLMPPTYVKPYVKRHKNDAIDAEAICEAVTRPNMRFVATKTREQQSCLTLHRTRHLLIRQQTSVINAIRAHLAEFGIVAPVGRNGVEQLLGVVADASDKRLPELARASVAALGDQLRALKAQILQFDRLIMAWHRSSEASRRLDDIPGVGPALATALVATVADPQAFRSGRNFSAWIGLVPKQHSSGGKDRLGSISKRGDRYLRGLFVAGALAVIRYAKIHGTKHRPWLTALLTRRPTKIAAIALANKIARMAWAMMARGERYKEPVALAA

SEQ ID NO: 75519 - protein, 341 aa, unidentified
MHNRQNYLYVGVDLHKEHHTAVIINCWQEKLGEIQFDNKPSAFSKFLLEVETYVSAGITVVFGLEDVGGYGRALAKYLVDHEQVVKEVNPALSFLERKSHVTTQKSDSWDAECVARILINKLNQLPDAKPNDLFWSIQQLVSRRNALVKAQSALKNQLHIQLNHHYPSYKKFFSELDGKTALAFWQQYPSPFCLEGANIKQLTAFLLDVSNNTCSVKKASDILKLVKEDGQTMKEYQETRDFLVRSIVRDIEFKKKEMKYIERELKRLVNLLDYQLETMPGIELVTASALIAEIGDVRRFPNANKLARFAGIAPVYFGSGGKGKTHKSKQGNRRYTLYFII

SEQ ID NO: 75520 - protein, 337 aa, unidentified
MGLYCGIDLHSNNHFVTVIDEEDRRLYERRLPNDLAITKAALEPFRRQLVAVAAESTFNWYWSVDGLMEAGYQVRLAHTGAVVQYDGLKHTDDEHDAFWLAHLMRLGILPTGYIYPKSGRGLRDLARQRMRLVQHRTSHITSVQSQVWRSTAVRLRSETIKGKGKQPWPELLDPDVALSVETGRAAIDALSAQIERLEELLLKRVGLLPQFQLLKTVTGIGPILALTIALEVGDIKRFPGVGEFASYCRCVDSRRLSNTKKKGEANRKNGNSYLAWAFMEAAHFAIRNLPAAKRFYERKRRQRNALLAVKALAHKLARACFYILRDQVPFAPDRLFA

SEQ ID NO: 75521 - protein, 465 aa, unidentified
MKHNPGRHRRRPRVSPSVLERINLNVAGIDCGSAEHFVAVPPDRDPTPVQSFKTFTGDLHRLADWLAACRVTSVAMEATGVYWIPLYEILEARGFDVVLVNAKHVKNVPGRKSDVLDCEWLRELHSVGLLRGSFRPVDAIVALRAYLRHRETLVQSAGTHIQRMQKALVQMNVQLPIVVSDITGVTGLRILRDIVAGRRDPHALAQHRDPRCRATHAEIVAALTGNYRPEHLFVLTQNLQLFDACQDQLAACDTAIEAHAHTLTARVDAPAAPLPDARVTRKPRANEPRFEIRIPLHQLTGVDLTQIDGIAPYTALKLVSEIGMDMRRWPSEKHFTSWLTLAPKNKVSGGRLLSSQTQPSANRAAAILRIAAMSLGRTQTALGAFYRRLAFRVGKAKAITATARKLAVLVYRTLKGDLAYCDSGADAYDAQQRTRVLRRLRQRAATLGFDLVNRGTGEVLEGAVS

SEQ ID NO: 75522 - protein, 341 aa, unidentified
MATTRVIGLDLAKHVFQAHGADDAGHVTFRQRLRRDKVLEFFAAQPPCLVAMEACGGAHYWGREISRLGHDVRLIPASYVKPFVKRQKNDAADAEAICEAALRPTMRFVTIKSEQQQASAVVFRARDLLVRQRTQIINSLRGHLAEYGRVVAQGPGHVTKLIAQVEDPASGLPPAASLALGLLIGMLRTLDEQIARMDTEIARRAREDEVARRLTTIPGIGPVTATAMAALAPAAEAFRKGRDFAAWMGLTPVQKSSGGKQKLGRTSKMGERTLRRLLIIGACAVVQQATRRGAPQGSWLAQILTRKPRIVVIVALANKMARTVWALLAKGGIYQAPTVAA

SEQ ID NO: 75523 - protein, 366 aa, unidentified
MDEVKFYVGLDVHKDSIAIAFARAHLRDDPQFVGTTRYSVISLTKALSKLGKPAELSVCHEAGPCGYGLVRALREQGYRCEVVAPSRVARRPADRIKTDRRDALLLARLHRAGELVPVAIPEPADEAIRDLVRAREDAVNDQRRMRQRLKSFLLRHGHAYTGTRWGPKHELFLSKIKFEEPAQHIVFTEYRMAVRFATELVERLTQSLRAHAETWRWLPVVKGLMTLRSIDIISALTIVAELGDLRRFPHPREFMGYLGLVPSEHSSGNSKQRGRLTRTGNRHVRRILVEAAWNYRLPARIGESLQPRLEGQPRHIIDIAWKAQVRLCHRFRRLRSRGLHQNKTCAAIARELCGFIWDIGTRLQPA

SEQ ID NO: 75524 - protein, 322 aa, unidentified
MEQVYYCGIDIAKSKFDCAIRLNNGKYKDKVFKNESEGFSTFINWLAHHGFSHVHICMEATGIYWEAFAEYLADKGLTVSVINPAQIKAFSISLLVRNKTDREDARVISDFCFERKPAAWLAPSASEQSLWTLVLRLESLQKMRTQENNRLHVARENVTKSLTDHIAWLNNEIEILQGDMLLLINGNAEMKQKKTLLESIPGLGVQTAAVLLSFGIHPGRFVNARQAAAYAGVDPRLNESGSSVKGRPRLSKTGHAFLRKPLYMPAMTTLFRTAWGKHFYARLTAAGKAPKLIIGAMMRKLIHVAFGVLKTEKSFDQSLHGV

SEQ ID NO: 75525 - protein, 348 aa, unidentified
MKITTVGIDLAKNVFQVHGVNEQGKAVLKRQIKRDQMATFFVNLPPCVIGMEACGGAHHWARKLQGFGHTVKLMAPQFVKPYVKTNKNDAADAEAICEAVARPNMRFVPVKNIEQQAVLSLHRVRQGFVGARTALANQIRGLLAEFGLVVPQGISHVCGKVPELIEDASNELPGTFRLLIQRLLDHLKELDRQVSELEAQIKTSHRASEASRKLEKIPGIGPITASALVATIGDAKSFDNARQLAAWLGLVPAQSSSGGKATLLGISKRGDTYLRTLLVHGARAVLWAFRSKADQSGNAWLQKLLERRNANVAVIALANKNARIVWALLACGREYEPEFKRQPVGANA

SEQ ID NO: 75526 - protein, 321 aa, unidentified
METATAYVGIDVAKEKLDIAVHSSDQQWTFPNSDAGIGRTQSCLQKLNPALIVVEATGGIEVPLVAALAVARLPVVVVNPRQVRDFARATGRLAKTDTLDASTLAHFAAAIRPPLRPLPDAHTQEISAVLTRRRQLVEMLTAEGNRLGAARSEAVRRRISAHITWLEKELATVDDDLDSSIRNSPVWREKDELLQSVPGVGPVLSTTLLAHLPELGSLNRRQIAALVGVAPFNRDSGKFRGKRAVWGGRSAIRAALYMATLVATRYNPIIRAFYHRLCTAGKPKKVSLTACMRKLLTILNAMLKHRTPWHYADIQTFGPCS

SEQ ID NO: 75527 - protein, 420 aa, unidentified
MEMIKPKKFKGVNGKTLIVTADMGKEKHFGYWRCPNGTDRKPFAFRNNRRGFQEFWEHVSEAKKLHNMEDIVFGYESTGSYAEPLVHFMRAHGMHMVQTNPMHTKRLKELQGNSPNKTDQKDPKVIADIIALGHALTVVIPEGPAAELRRLTQARDRSNKRSVALMNQIQCLVAIIFPEFLQIMKNVKILSARYLLAHYPAPHDIVRYGLHNLIHTLRKVSRGKLKEDRAKALYEAARTSIGVTEGQASIIREIRELISALETIEGFTESIEKEMTHYLKQIPYCSSILSLKGIKEVTAAGLIGEVGDFRKFPTLSEVMKLAGLDLFEISSGRHRGTRRISKRGRPLLRKLLYFAALNTVRKGGIMHHHYQQHLERGMPKTKALIAVARKLLGIIFAVARDQSIYEKNFSKSLFHLKEAA

SEQ ID NO: 75528 - protein, 372 aa, unidentified
MMKSTRYVGLDVHGETIAAAVGEGHGKARSLGQFPNRPESVRRFIEQFGGSEGLKICYEAGPTGYALYWQLTKMGIDCEVVAPSLIPRKPGDKIKTDRRDAEKLALCYQSGTLTPVWVPDAAHEALRDLVRARAAAKRDESRAKHRLTKYLLRNGLRHPEDRRAWTHPWWRWVQAIKFDFETQQVTVGDCVAEVLHQTERLGRLDLAIDRAIESAPPEKRAVVDALQAMRGVAKLTAVTIVTEVGTFQRFRKPTELMGYTGLVPSEYSSGGREAKGRITRTGNAHLRHVLGEAAWHARHRPWLNVRLRKTLPTLPAGVSEIAWKAQERLHRKFTRLTFHRKPPAKVATAVAREFVGFIWAIGRLAESHASAK

SEQ ID NO: 75529 - protein, 346 aa, unidentified
MAIVDPARAVTGGVDTHLDLNVAAAIDHIGGLLGVAEFPTTSSGHKELLAWLKTFGPLAQVGTEGTSSYGAGLARYLRRAGTEVVEVDRPNRQSRRRTGKSDPADAVEAARAALSGRAQGAGKLKDGNVEAMRALVVAKRSARDTKIKTMNQIRHLGFTAPDELRERLAGVSRKNLAATAAALRPREGGDQVAFATKTALCLLGRRVLALDAEKEHLEDLLSKLVENTAPELLGVYGVGVGTASALLVTAGDNPERIRSEAAWAHLCGAAPIQASTGKVTRWRLDRGGDRHANAALYVIVLARMSADKRTRAYVERRVAEGKTKPDIIRILKRYVAREVYHYLPRP

SEQ ID NO: 75530 - protein, 403 aa, unidentified
MRVPAAADKAWAGIDVGKRHHWVCVVDRDGRQLLSARVANDEAGIAAVIGSVTGLAAQITWAVDIIGAPSALLLAVLSQSGQHVRYASGRLVAAMSGAYTGEGKTDPKDAFVIAETARIRRNLPVIGHKGELVCNLSLLTAHRADLIADRVRMINRLRDVLTSIFPALEREFDYSSCKGALVLLTGYACPARIRRTGQARLASWLRQRRVRGYTSVAARAVTAAQAQQITLPGQDIAADIIAELAGNLLALDQRVAELDKQIAAMFAEHPQAEIIQSMPGFGPVLGATLLVTAGDLAAFPTPGHLAAAAGLVPVPNDSGRRSGNLHKPRRYSRPLRRVFYLSAQTSMMREGPSRDYYLKKRHHARTHNQAVIALARRRVDVLWALLRDNRIYAATPPAPAKAA

SEQ ID NO: 75531 - protein, 358 aa, unidentified
MDGSKEHPHMTAGLDIGDKYSYLCLIDQQSGEIMEEGRLRTTPEALKRRFASERPPMRIAIEAGTHSPWASRVLEECGHQVLVANARKLRLIYANKRKTDEIDAENLARLARVDPRLLYPLKHRGEDSQAHMALIRSRQALVGCRTQLVNHVRGAVKSFGGRLPKCPARSFHNKAPEHIPDALRPALGPILEQIGSLTQRIRDYERKLEEISNAHYPETQLLRQVEGIGSLTALTFVLTLEDPYRFAKSRSVGAYLGLVPARDHSGDRDPQKRISKEGDQMLRKLLVGSAHYILGPFGQDSDLRRHGEKIASRGAKNAKKRAVVAVARKLAVLLHSLWMSGEVYEPLRNAHRAGGQAA

SEQ ID NO: 75532 - protein, 449 aa, unidentified
MGKGSGITRGDRRRNAKKARLRALVPHGNAVAGLDLGEKRQALAVTGADGQVLARRSPQVSVHDLGPYLDWAVRQARAAGCAGLSVACEPTGSRWMAVQDLCAARGLPFVCVQPLVSHIAREQEDLTGDKTDEGDSGLIARLARELHCYEPEHLEGAWAELREEGRRRAQLITNATAAKQLLRDKLGLVAPALLEAACEPFDSATWLASLEVVLERCDADAARVTAMSFEAFAARTAAVLREWGGRRLGGTCRQLFAALGDDRGVARMRRAALRRARGALADLKYARGRRARAEADMITLLGELGVDADRICEIPGLSPVTLAAILAETGDLRRHESSSSVVKHAGMSPARNESGGFRGQAKISRRGRPGLRLAAWRATWAVLRHCDVLAAKHAALTSRDDDSRLTAEQARVACAASLLRWIWSLMVHGTCWDARIAGGQLSHHRAIAA

SEQ ID NO: 75533 - protein, 427 aa, unidentified
MNYTQNDKIMSITESTLVIGIDIAKQFQYARAFDYRGIELSKVKPFENTAEGFKTFQEWLKLIAKEKKKDNIIVGLEPTGHYWFTLGNFLKDLGIKLVLVNPFHVKRSKELDDNSQTKNDLKDPKTIAKLVIEGRYSEPYIPEGIYSELRIAMGMRESLSKNLNIIKNKVDHWLDKYFPEFNDVFANWEGKAALMSLTEFSTPEQVLSTGVQQIVATWKKEVKRAVGIQRAVRLVEAAKISIGIKEGLKMAKKELEANLEQYELYLKQNEQLEIEIEELAFQVPGVKEMVSMKGVGIMTAAGFIAEVGDIKRFTHPSQIQKLAGLNLIENSSGKHKGKTSISKRGRSRLRALLFRVIMPLVSKNNEFKMLHEYYTNRKENPLKKKQSLILLCCKLIRIFFTIITKKVEYNPQKLIRDTGFNLQLKVA

SEQ ID NO: 75534 - protein, 366 aa, unidentified
MKKISTVPTFKSEIFKEQQLTIGLDLGDCWSFYCVRDEAGQVILEQKLPTTPEAMKHAFGKIPRSLMALETGTHSPWVSRLLTQLGHEVLVAHAQKVQLITKSSRKDDRHDAQTLARLARVDPELLGPVRHRSVQAQIHLTVIRARAELVSARTALVNAARGLVKSYGERLPKCGTQQVSRELAAGLSAELREVLVPLLREIESLNERIKEYDERMEKMAKEVYPQVSLLKQVKGVGTQIALTYVLTIEDPYRFPKSREIGCFLGLRPGRRNSGKSEPQKHISKEGDRYLRTLMVQGAHYILGPFGEDSDLRRWGLKLAERGGKNAKKRAVVAVARKLAILLHRLWVSGEVYEPLRHSQKAMRAVA

SEQ ID NO: 75535 - protein, 365 aa, unidentified
MNATAGLPIVGVDLAKIVFQLAVANGAWQVTEQHRLTRTQMERWFANRAVGLVVMEACGSAHHWARWLNALGIEVKLLPAAYVRAYVKRNKTDAADACALLEAARCADIVPVKVKSIEQQALQGLHRTRSLWMGTRTSRINALRGFCREFGVAIAQGSRTGVEQMSRVLADPASAVPILIRGTMKLLIEEIRLLEARISQLERELTALARQSPACTTLLSIPGVGLLTATAMVAATSGQVQHFKDARHFASWFGLTPKEHSSGATRHRGRISKRGDRYLRMLLTHGARSVLRAAGVAALAGKPLDSLRHWALQVQRRTNHNKAACALANKLARICYATLRDAQPYRQPTTRLSKKIGRSAYSLAN

SEQ ID NO: 75536 - protein, 337 aa, unidentified
MVKIIRIGIDTSKHVFQVHGVNTAEQPILRKTLRRGQMERFFASLPPTLIGLEACGAAHHWARVLQGLGHEVRLLPPQYVKPYVKRGKNDAADAEAICEAMSRPSMRFVPVRTTENQADLMLHTARDLLLKQKTMLINAIRGHAAEFGVTGRKGANSITALRTLIAATEAVPEPAREIFAQLFEQLDSLDRQANELERKLLAWHRGNERSRRLATIPGVGPIGAAALTMKVPDPSVFESARHFAAWLGLTPKDHSTAGRLRLGVITRAGDETLRRLLVNGATAMIKHAKPGRSSPWLLGLLTRKPKKLAAVALANKNARIAWALMTRGEVYRHSLPA

SEQ ID NO: 75537 - protein, 344 aa, unidentified
MSKLDTCGTEVSAKELVVALRHEEALQPLKTFPNTAEGHQSLIRYLQRAGRGVRVCLEATGLYGLDLALALSAQAGIEVMVANPRAVRHFATALMQRSKNDQLDAGVLEQFAARMPFQPWTRPSPAALALHALARRLGQLVEMQTAEKNRQHAAELSPAIPAAIRRDLARSLRAQERAIERLTREARKVIAPEPDLAERFALLDSVPGIAETSALQILAELAVLAPDLEARQWVAYAGLDPRQYSSGSSVQKKTRISKAGNKHLRRALYMPALVAVQHDPHLRAFYQHLLERGKFKMQALVAVMRKLLHAFHGMFKTHQPYDGAKLFQLKPTSAPEVPLATTAA

SEQ ID NO: 75538 - protein, 340 aa, unidentified
MSEKEAILGIDISKEKFSAALLKGEKKSQVKEFANNLEGFEQLKKWLEQNQLERVHACLEATSTHGHSVATYLHSLGHIVSIVNPARIKGFAQSRLSRTKNDQADATTIARFCAALKPQAWTPPSPEMAQLQSYSRRLRALEQMATQEKNRLKTTVDESLIEDIEAHLVFLETQIDNVKKRQKELLNEYSSLKSQADLLTSIVGIGEPTAMTILAEIGDINQFSSARQLAAFAGLTPQEHQSGTSVKGKTRLCKIGNPHLRKALYFPALSSMRHCSPMKDLRERFLEAGKNKMQIVGVVMHKLIRIVYGVLKSGKPFDQTKLALPNVVLEEETDFLPASP

SEQ ID NO: 75539 - protein, 482 aa, unidentified
MKSKPQEKNKRATNHPTQHHWHEMNRKQRREMLRKMQSEDLRLEVIHPDAAGIDIGNESHYAAVPPSRDSQPVREFRCTTAELKAMAAWLQQCRIRTVAMQSTGVYWVAVYDILEEAGLEVYLVNARDTKNLPGRKSDVQESQWLMKLHTYGLLRNSFRPPQEIRTMRTYWRQRNDLVQSAGRHILRIQKALTQMNIQLANVLSDVSGVTGQAIIKAILAGERDPHKLAAFRDCRVKASEEQIAQSLEGNWQPDLLFLLKQEQDGYEFCQKQMAECDRQLKLYLQRREDRSHGAPLPEEKRKGRLNKKRANKPQFDLREGLFRMTGTDLTRIDSVDVMTATTVISEAGYDMSKWETENHFVSWLRLCPDNRISGNKVIGKGRLPTNNPLSIALKMAASTLRQSKTYLGAQFRRLRTRLGAPIAIKAMAAKLGRLIYRMLRYGMKYVDQGAAFYELQHRQVQIKQLKWKAAKLGFQIVGAPAA

SEQ ID NO: 75540 - protein, 403 aa, unidentified
MMNAVGIDVSKGRSMVAVARPGEVVASPFIVSHTQSGIHELIDQLSSLDGETRIVMEHTGRYYEPMAQRLSDAGFFVSAVNPKLIKDYGHNSLRKVKTDKADAKKIARYTLDNWLDLRQYTGMDTLRKQLKTMNTQLDFFTKQKTAAKNNLIALLDQTYPGVNAFFNSPVRSDGSQKWVDFAKSFWHVDCVRTLSTASFMQRYQKWCHRHGYNYQPDKAKAIFDTSTELIAMLPKNAMNKMLVMQGIDQLNAVSAIIEQLKAEMNTLASDLPEYPVVMAMPGVGPSLGPQIMAEIGDISRFPHKSALTAFAGVDPGANQSGNFEAKSNHASKRGSPRLRKALFMVMDCLIKTSPPNDSVYSFMDKKRSEGKPYLVYMTAGANKFLRIYYGRVKAYLASLSSAE

SEQ ID NO: 75541 - protein, 459 aa, unidentified
MADDMSSKQDSEEEVEGLPALRRNVAGIDIGSAQHWVCAPKRGGVGREVETFGATTPELERMAAWLQERNVESVAMESTGVYWIAPHEVLERHGFEVVLVSTKELASVSARSKTDRLDCQWIQRLHSCGLLHGSFRPGEQVCMLRTLVRDKGNLVAEAGDWLRRMQKSLDQMNVRVHRALSDIDGATGMSIIRAIVRGERDARQLAKLRDPRCRRSEYEIAQELTGHWREDHLFSLRQAVKMHDAIQERIAEYEQEILRKLAEMEREDCRGQKPPDLQNKQKAKAIKKRGEEPLRQALYRVTGVDLTAIDAVGAETVNVVISEYGWDLSRFPTEKHFVSHAMLAPRMGTSGGKPVKRRKRSSTSNRVGAALRMAALSLRHSETALGAYYRQIARRIGGDVAVFSTARKLATLIYRMLRWGQPYVDEGAAAYEHRYQQARIRRFASVAKELGFQLTPMHG

SEQ ID NO: 75542 - protein, 402 aa, unidentified
MNCVGIDVSKGKSMIAVMRPFGEVVVSPFEVCHTASELSELARLLKSLDGETRVVMESTGNYHAPVAWLLHGAGLYVSVVNAMLVHDYGNNSLRRGKTDKKDAVKLANYGLDHWLTLPRYVPEEDARLMLKTCYRQYQQYSKVQTMLKNNLISLLDTAFPDANRLFTSPPRADGSEKWVDFVAAFWHCECVCGLSEKAFTAKYQKWCKKHGYNFSEDKALGIYASACGHFGVMPKTDTTKLLVEQAISQLRATSAALAALKQEMQSLAASLPEYPVVMGMFGVGPTLGPQLIAEIGDVRRFHSKKALVAFAGIDAPPYQSGQIDVRSRSISKRGSASLRRTLFLVMGVLLQCAPMDEPVYQFMNKKRSEGKPYRVYMMASANKFLRIYYASVKAYLDSLEHD

SEQ ID NO: 75543 - protein, 364 aa, unidentified
MLDSTTTVTVGLDVHARSIRLAAIRGDQLLEERTLAYDEEAVERLLRRWPVVRCCYEAGPTGFGLQRHLVERGIDCQVVAPGLVPRRPGERVKTDSRDARKLARLLAGGLLQPIHVPSPALEAARDLVRAREDARLDRMRDRQRLSKFCLRHGRALPTSSWTVVRRKWLDEQRFEFPAQQQTFDTYVHAVDLVDARIEQLERAIRETAEQEPWRALVARLRCLRGIDTLTALALVAEIGDFNRFNTAEEFMAFVGLVPSEHSSGEKRRQGSITKVGNGHVRRLLVESAWHARRRPKVGYELARRQRGQDAAVIERAWRCQQRLYQRWQRMAGRGKPHQKIVVACARELAAFVWAIATEQPLRNT

SEQ ID NO: 75544 - protein, 354 aa, unidentified
MVTIISDDLPRIVVGVDSHKETHQAAVLDCTGALLGNERFAASTAGYLELEAWLATLGRIQRVGIECTGSYAAGLTRFFRERQVDVFEVNTTHRATRARRGKDDAIDAEMAARKVLSGEASAQAKDTTGDIESIRLLKLSRESAIKARTIALLQIRDVLITAPAELREWIESAGGARHRVNRAWALRPDLERLGEPLQAAKFTLRQLSRRVKFLDEEIAGVDRQLAALVERCAPNLLQCRGIGTQHAAQLLITAGQNLERLHSDGAFARLCGVAPVPVSSGKTNRMRLHRGGDRQANRALHLIVIARLRLDPKTQVYMARRQAEGLSKMDAVRCLKRFVAREVYRELKRDLLQN

SEQ ID NO: 75545 - protein, 414 aa, unidentified
MQVEYDRCCGLDVHKDTVVACVIAPGAGGKPVKVTRTFNTMTGELKALAQWLTAQAVTHVAMESTGVYWKPVYNVLEEGQFELLVVNAEHLKKLRGRKTDVADAEWIADLLRHGLLKGSFIPSAQQRAWRDLTRYRTTLTDERSREVNRVQKVLEDANIKLGSVASNVLGVSGRAMLEQLIQGQADPATLAELAKGRLREKRDLLEQALTGTFQAHHRFMLIQHLSHIDFLDEQIAKLDKELEEQMRPFQAALTRWDQIPGINLRVAQVILAEVGTDLRQFEDAQHLASWAGMCPGSNESGGKRKSGRTRQGNTWLRRALVEAAHGAARTKDKYFKNLYHRLAGRRGKKRAIVAVGHSLLVTGYYMITRGQDYQDLGANYFDERNKETVKRQAVKRLEKLGFQVELKAAPATVA

SEQ ID NO: 75546 - protein, 392 aa, unidentified
MYIVGIDIGKNHHEASIVSPEGKQIGRSLRFATTHKGADSLMSFIFKNIGNSPCVFGMEATGHYWYPIYSFLKAKGYTICVINPIQSDSLRKMYIRQTKNDSIDSFLIAEVIRFGQFGTTSMADENILAMRQLCRYRDSVISSRTEIKLRIGTIMEQIFPEYEKQFSSLWVSTSMGILEKYLTPENIENAPIDELFEIIKDKSHNRLTKAKAISIKEAAADTFGIKIAQDAFSFQLKQLIDRMNFLDKQIEALDIEIMKYYEQFDCYLHTIPGIGIIGAATILAEIGDISRFKNSSALVAFAGIDPTVRQSGEFNSTHNHMSKRGSPYLRHAIFLAATTCSFHNSPLNAYYKKKRDQGKHHLTATGAVARKLTTVICAVLRDSKPYEPKKFC

SEQ ID NO: 75547 - protein, 484 aa, unidentified
MSEERRLVGVDLGIASDHTVRVLRGDGSEVARRRALPTVESLTAVEAAALTGAPAGTRLEVVMEPTGPAWLPVAVFFTARGHRVFRVSSAKAADLRRFLSRHAKSNGIDADTLARLPLLAPGSLQPLELPDCPQAAALDRRVRACDRLTAQGALHQRRIKDLVRQLLPNTPLTGDLSRTDLAVLERWADPRALLTAGRARLLAVIAKTSRGQQGPARADRWRAAAAAALELYGDHPAIAFTDLAAEVLTEVRLLQAVRTELAGHAAARAEAYRFTDPAALAASLPGLAEVGAPTVTAIIGRAGRFRTGKQFRSFTGLAPRASETGNTDRKGQPMSKAGNRLLRTTLIRAADNARRQDPQLARIYYVQMVERGAEHLKACCVVAAHLAERLHTVLVRGMPYVICDTDGEPVDPAAAKKIIAEQWTVPAEVRARRRSHKPTSRAGKAPQQVLNGHDRSDTRRVDKRGDLPRGTSVLAPRTPVKATT

SEQ ID NO: 75548 - protein, 418 aa, unidentified
MKVVFPTCCGVDVHKSFLVATIIKTPENSLQPSYQKKRFSSFNSDLNRFADWLYENDCMDVCMESTGKYWVPVFNILEKREIRVVIANPKWVKAVKGNKDDTKDSKWIGDLFRIGLVKSSFIPDKDIRVLRELTRYRYKLTSMKSSEKNRFQNAFTVCNVALDSVVSDMFGKSAAAITDYLTSDENFNAKHCVSLLQGSLKKKADDVLQSIEGYEITAEQKTRIGIVRDHLRYIDTLIDRVDACINTMVDKYEGYIVLLCTIPGVDRSSAITILSEIGVDMAQFGSSKRLCCWAGLSPGNNESAGKKKSVRISRAGVYLKPALVQIAHAAVKDKSSPYYALKYERIAKRRGKKRAIIAIARMILTAVFVMLSNLEEWNPVDLYRIDMPEHLKEKQLAKAVKQAVRFLETQGIAVLDSA

SEQ ID NO: 75549 - protein, 402 aa, unidentified
MDKYAGIDIAKRTHWMCVTDGEGRFLMEPRPYENDADGLSRMVADLDLCGGDVAVGMESTGCYWRSCYKVLAEGGYPVSVINPVVTCAERKSGNLGRAKTDRVDCLVVADALRKQGIAPTPSPDADAAQLRDLCRFRRTVSESLSRAKIQTVALLDQVWPEYGKLFSDKFGDSSRAVLRRLASGDMDSDGLADDLRGASRNRFGAAKASDVLESLRSTCGVPATDALRLQLRLLLDQLDFCAAQLAEIDAEAGSLLDAVAPTLPTVPGIGRATAAQIAAEVGDATRFRDAKSLVAYAGLDPTRRQSGGFDPDRNRISKRGSAHLRRSLYIAAQASLRADCEFRDFYDRLRGRGYSHRYAVCAVARKMLCVCWALMRSGEEYSRDRHRARGKAPEGASPVDAG

SEQ ID NO: 75550 - protein, 386 aa, unidentified
MQKLNDLSRCLTPLKPDGTLIAVIEMSLSSWLVAGIVPGVERQPLKKLEADESALLKLLNRWREEAKKAGHRIERIAVAFEAGRDGFWLARWLRARDIEAHIIHASSVAVSREHRRAKTDRLDTELLKRAFLGWLRGERDHCKMVAIPTIKDEDAKRPNRERESLVGEQSRIVNRMKAALVRLGIRGFNPKLKKAVERLDGLRTPEGEPIPPNTLAELRRDMARRRLVSDQIRQIEDARLERLEQAPSDGPHAMARLLARVIGVGIETADMLVQEVLSRNMRDRRAIARYAGLTGSPDESGRKRREKGLARSGNARVRRGMIQLAWRFLMFQKDSTLAQWFRARTENARSTRKTMIVALARKLLIGLWRLVREGAVPDGVVLRPVS

SEQ ID NO: 75551 - protein, 343 aa, unidentified
MDYFAGLDVSVKDTSVCIVDDAGRIKREVRVASEPDALLTVLRNPAYRFKRIGLEAGPLSQWLFSALAEADLPVICVETRHMRAVLKAQINKTDRNDARGIAQMMRVGLYRPVHVKTLRSQKLRVLLTHRKLLQAKAIAVENDLRATLRNFGLKVGMVGTIRFEARVKELVDKFPDLVALVEPLLVVRRVLREQISILHRRVLAAVRNDEVCRRLMTVPGVGPVVALTYRATVDVPARFRKSKSVGAVFGLTPARDQSGESDRPGAISRCGDEMMRTTLYEAAQVMLLRSAKWSWLKAWAMKIARHRGMKKAIVALARRLAVIMHRIWIDGTEFRWTRGATAA

SEQ ID NO: 75552 - protein, 254 aa, unidentified
MYNYIGIDVSKQTLKVFDETKEYEVPNEKGLKTFKKLLKKDYGKEWIETKLIYEPTGPYSNYLREFASTNKLKVYEVNPKKSANFAKVLGNRSKTDAVDAKMLYRFHLLLKESELFIPEIDKITEQLGSFIHSYEIIQKTRTMLSNHLHSMEYKSGADTKIKESIKKEIKHLCEMEENLEKETEAFVENNPETREDLNNLLSIKGIGVISAINLLYLFRKYSDTNRNEITALAGLDPVQRQSGSSLNGGRKITC

SEQ ID NO: 75553 - protein, 311 aa, unidentified
MEHFVGIDISKRHFDLHLNPEGQSHHFDNNTAGLRQCVKLLVEIRPQRIVMEATGGYETNLAVTLHKAGLPVVVVNPRQIRHFAKAVGQLAKTDKIDAEIIARFAAQVQPPLRDFLGDKARKLKALVARKNQLVAMHVAERNRLEHAVDKAIVRSIKRSLKSLERQIEQLEQHLVDAIALDEELQHKADLLDSAPGIGPATAALLVAHMPELGTLNRRQVAALAGVAPMNRDSGAFKGKRMTGGGRSQVRAGLYMPVVSAVRWNPTIRTFYQRLVAKGKTKMTALVAAMRKLLTILNLMIAKNEPWNPNYA

SEQ ID NO: 75554 - protein, 411 aa, unidentified
MCKEIEGFPLTKIRKGVYTMFYLGIDIAKVNHVASLIGEDGSVLVKAIKFTNSNEGLQKLIDSISEYDQSQIYCAMEATGTYWLSLFSALTDKDFNVSVFNPYQIKSFRGAYSNRKQKNDVIDSIIIAEFLRFNGIEQTCLPNDDLLALKNLTRYRSNLVNNISKAKIQIKGILNKVFPEYSDVFSDTYGDASKQILLNCPTPSEVANFNTRKLANLLKKASRGRHGTDTVRKVKELAKNSFGIKFTGDACSFEIKQLVSQIIFLENQVDELNLKIKELYSKLDSHLESIPGIGKAIAPVILAEIGDINNFSTPSKLTAFAGIDPSENQSGNKKSTDEKTSKRGSPYLRHAIYQAAFIASNNDPVMHDYYVKKRAEGKHHYVALAGVERKLLGIIFHVLKENRDYRPSKFS

SEQ ID NO: 75555 - protein, 359 aa, unidentified
MYFSGLDAHLRYVTVAVLDRLGGVALETTVPTREPDRLLAVLAPFRPLEVVVETCPFWPWLYDLLVPAGIGFHLAHAKALRAIATAPQKSDAVDARLLARMLLSGLIPEAYPRSADQRELLRLLRHRTALVRFRTRLAGRIHSQLHQQRLSLPREKLLRRATRAWLEATAWPRLTVEQRAIVTTHVELIDHLTPLIRALERRIAAAAAGDATAPLLATIPGIGPYRSLLLAAELVPISRFPRAEQLVSYAGLAPVTRSSGGHTHHGSIPPAANRWVRGALVSAIPSHVRYAPTSPVTVAYEQLKARLGWRVARVAAARKLARVVYVMLTRRTPWHGVPAAGDVRDEVQNSHVAPTTSFC

SEQ ID NO: 75556 - protein, 344 aa, unidentified
MDHFAGLDVSVKETSICIVDDTGKIVREVKAASEPQALLKVLGNPTYRFKRIGLEAGPLSQWLFSGLAEAGLPVVCVETRHMQAVLKAQINKTDRNDARGIAQMMRAGLYRPVHVKTLRSQKLRMLLTHRKLLQSKAIAIENDLRGTLRNFGLKVGMVGKMRFEARIKELVESLPDLAELVEPLLIVRRTLRGQIVILHRRLLAIVRDDEVCQRLMTTPGVGPVVALTYRATVDVPARFRKSKAVGAVFGLTCARYQSGEIDWSGRISRCGDEMMRVMLYEAAQAMMRSKKWSWLKAWAMQIARRRGLKKAIVALARRLAVIMHRIWMDGTEFRWTREQATAAA

SEQ ID NO: 75557 - protein, 342 aa, unidentified
MEVLHSRCCGLDVHKKSISACVIIREHGTLQKLERRFGTFIGELEDMAAWLEEHKVTHVAMEATGVYWKPVWNVLEGRFDLMLVNPQHIKALAGKKCDRRDASHLTDLLQHGLLQGSFIPSAPIRHLRDLTRNRARTVQEAARIKSRIQKVLEEANIKLGSVATDVLGVSGRLMLEGLVTGKQSPAELADLAVGVLRKKRDELVQALSGKTNDHHRLMLDRLLRALKTREREIAEDEKDIRRQIEPFRNAVLAWTQLPGIDEVTAWSLVAEMGADMAPFDTPEQTASWACVCPGNHESAGKQRDGRTRKGNPWLRNAICEAAWVVSSIPCKRFSDLIDSRPR

SEQ ID NO: 75558 - protein, 382 aa, unidentified
MRFVGLDVHRDFCEIAICEGGRVRSGGRVPTSPEGLQILADSVGPEDHVALEATGNALAIARALEPHAARVIVAARNELRAIAEAKVKTDRRDARTLARLLAAGLLHGCWLPDEPTRALRRRLARRAQLVRQRTRAKNEIHAALMRNLKGRPPMSDVFGRGGRVWLAELELPADERETVDGCLRQIDYLDSEIALIERGIAEHALGSQAIKRLMTVPGVSLMTATTFIAAVGDIRRFPDPRKLVSYLGLDPKVRQSGTGAAHHGRISKQGAAQARQMLTEAAIVAVSTPGPMRAFYERVRARRGSQIAIVAVARKLAVLFWHLLTREQDYAFQRPSLTRKKLRGLELRAGAQRHPGRRDLDLTRFGGHVGAALCSLLLDHDG

SEQ ID NO: 75559 - protein, 350 aa, unidentified
MRKYYIGLDVHCAFIEAAVVSAQGKLVERRRCETTIAALWNILNDVGGELHVALEEGPLADWLWRNLHERVKRMVVCEPRRNHLIAKESDKDDAIDAEKLANLLRGDFVKAVHHPESLERTLLKQQLMLYHDRVRGRVREANRLMALFRRHGVFIKEKDLGVTKRKGLLASLPASLREAVSGLWDGYELIGAQEHALRGQLHRTAKHDELLRRWLKVPGIGPVRAVTLLAFLDTPHRFRSKEALWRYLGIGLERWHSGNGPMRVRVGQRCNRMLRETILGAAKSAMMAEKNPFFEQYRRRSQAGISFKNARRNVARSQASVLWGMWKNGSDYDPSRVGVPAAERKQPVSV

SEQ ID NO: 75560 - protein, 411 aa, unidentified
MEVLYPRCAGLDVHKESVVACVRLQEGSAIRRDVQSFKTTTEGLLALSAWLSSHVCTHVAMEATGVYWRPVWHILSDGEFVLTLANAAHVKNVPGRKTDVKDAVWLADLMAHGLIRGSFVPDRQTQEMRTMLRTRKQLGRERSSHIQRLQKTLEDANIKLDSVITDILGVSGRAMVEALIAGETDPEVLAGLADRRLRASPQELREALRGRVTSHHRFMLQLHLDQVDALDRAVARIDDQVKADLDPFRQAVKILKTLPGLNDLGAQCVISEIGIDMSRYPCDDHLISWACLCPRNDESAGKKRSTRMRKGSSWLKATLIQCAWAATRVKESYLQAQFYRLRARRGAKKAIGAVAASILRAAYHMLKNGTVYQDLGADHFAKHNKTASTRRLVRHLQHLGYDVQLTQIPAS

SEQ ID NO: 75561 - protein, 302 aa, unidentified
MECYNNALGFKLLVEWSENTTSLSIKELSFLIEPTSIYHERLVAYLYALDATVFMANTGRVRKFAEGIGVLSKNDIIDANVLARYGLMATKLIAWKPVPKEIAELQSLINRLSTLEKELQREKNRQEKMNECNDAHPIEKRSITKSIKRLEKEIKSFQIHIRNHVNETESIKKDFDLMVSIPGVGEKTAWIVLLILRSRNFQSASEVASYVGLNPIEKRSGKSEYRKPRLSKAGNSDWRKALYFPAMVAVRKNPDVQALYDRLLAAGKTKMCALGAAMRKLIHICFGVLKHQQPYQVQLQST

SEQ ID NO: 75562 - protein, 389 aa, unidentified
MQKLNDLSRSPNPLDPDGTLIAVIELSLSSWLVAGIVPGVERQPLKKLAVDESALLKLLHRWREEAAKAGHRIKRIAVAFEAGRDGFWLARWLSARDIEAHVIHASSVAVSREHRRAKTDRLDTELLKRSFLGWLRGERDHCKMVAIPTTKDEDAKRPNREHESLVGEQSRIVNRMKATLIRLGIRGFNPKLKKAAERLDGLRTPEGEPIPPNTLAELRRDMVRRRLVRDQIRQIEDARLERLKQAPSDGPHAMVRLLARVIGVGIETADMLVQEVLSRNMRDRRAIARYAGLTGSPDESGRKRREKGLARSGNARVRRGMIQLAWRFLMFQKDSTLAQWFRARTESARGTRKTMIVALARKLLIALWRLVREGVVPDGVVLRPENGGH

SEQ ID NO: 75563 - protein, 538 aa, unidentified
MATEVGRLCSGVLLERRSVAWFQVPCAEQWLTVEATQLIPFGRVSSNAQLGRCLQLRKRATMKKQEDDVPRPQEAKAKPRRRNKGMCLQDRPVLEPNAAGIDVGAREMFVAVPSDRDEKPVRVFATFTEDLQRLTDWLVQCGVTTVVMESTGVYWIPLFEILEQRGIHPCLVNARHMKNVPGRRTDWHECQWLQFLHSVGLLRAAFRPEQDICAVRTVLRHRSELVLAASQHVQHMHKALTQMNLQIHHVISDITGATGLAIVDAILAGQRNGTELAQLRDPRIKVDTETIRKSLEGNWRSEHLFTLGQSRDLYRIYQQQIVKCDLEIEKMLQRFEPRADPAVRPLPPDRKRNRDGRKKRKKNGHPHPEFDLRTETYKLFGVDVTQIPGLDENALPLFSEVGRDMSRWPTAAHFVSWLALCPDNDISGGRVQWRGARRIKNRAGHLFRLAAFSLHHSPTPLGNFLRRMKAKLGPKAATMVTAHKIALIFYTMVKNQVEYDETIWTTRDSQREKRLETKIKRQARQMGYELVPIVPKAA

SEQ ID NO: 75564 - protein, 363 aa, unidentified
MNHTAPINTATNSTASIAWLGLDAHSKNCVLGQLDDQGREVQWWKFPTQPEKLIAQIQAIPATDKRLMLEESNLARWLGQLLQPHVQQLVVCDARRNHLISQDPHKHDRRDAFALARLLRLNEFKPVWQPVEPHRVLFKRSAQAYENAVQRQTRLKLQLKALFQHWGLFPTGSTVFSKPGRAAWLKQLPYDALRSQALILYELLDQALASQSQTRRLLIQTGRPFPEVKRLRTVPGIGLVGGHLFVAYVQDPTRFKKFSQLTRYCRLGIRDRTSDDKPLGYQQLDRQGVGTLKAITYRAYLQAAKRKQGPVWDFYEFSRRHTGSTTHARLNTQRKILLTLWTLWLTGREFDPETFSRSQLIDV

SEQ ID NO: 75565 - protein, 350 aa, unidentified
MKVTTIGIDLAKSVFQVHGVNEQGKTVIKKQLKRQQVAEYFVNLPACLIGMEACGGSHYWARKLSAMGHTVRLMAPQYVKPYVKSQKNDAADAEAICEAVGRANMRFVAIKTVDQQSVLALHTARSGFVKGRTALSNQIRGMLAEFGVVIPKGLAHMAGRVPDALEDAGNELTRMVRLLIQELLEQLKTLDKLAKEIEQKIKVWGRQNQEVQRLEHVPGIGPITATALVAGLGDVSHFEDGRQVAAWLGLVPRQHSSGGKTVLLGITKRGDSYLRTLLIHGARSAILAAQRSKEGPPAWLASLLARKHPNVAAVALAARNARTVWALLMHKRDYDTKYAVDKHLGAAVAA

SEQ ID NO: 75566 - protein, 340 aa, unidentified
MINNFLGIDISKDRFDVSLSFISNKGKRETRKRSFKNNDHGFQGLLSFLQKHNVEQVKACMEATGCYSEALAEFLHNTGHFVSVVNPACIRFYAKSKLIRQKNDQTDAEIIADYCQRQEPIRWASPSPELKKLKHLYRCSAALKDELTLVNNHLEKKERLPKEVANAWEDLAMNIKQKIERIKNSLRELLNKHKELLENFQLLLTIPGIGEESAVAILAEVPNIKAFKDARQLAAYAGAIPRNITSGTSVHAKPRLSKSGSRTLCKAMYFPAIVAKNHNPTIMTFCKRLKEKSKHNMAIVGAAMRKLLHIVFGVLRSKKAFDPDHIKNYRARSLAESLVL

SEQ ID NO: 75567 - protein, 341 aa, unidentified
MEQYIGLDVSLKDTFISVREGGKRIWRGKCASDPTAITHVIRKQAPNVSRVVFETGPLSVWFYHALTAQGVPAVCIDARHAKAALDMAANKTDVNDADGLAHLAEVGFYREVRVKSFDSMLVRTLVAVRRQMLKMTIQISNQIRGVMKTFGLVVPKSAGSVFDGHIRILLATNAGLERIVLPMLEAWQAVRARVAQLSKQLIASARTNEQCQLLMSIPGIGVVTASSFIAAIEDPANFTKSRSVGAWLGLTTRRYQSGEVDYAGRISKRGDNHLRTLLYEAAMVILTRTTADSALRVWGLKLKERAGFKRAAIAVARKLAVTMHTMLKTGELFDRSAGAAQ

SEQ ID NO: 75568 - protein, 309 aa, unidentified
MKQEKVYVGIDVAKAHLDLAWEQDHCRLPNDARGHRALVKRLRQWSTSVHVICEASGGYERGLVLALAQAQIDCSRVQASRVRQYARACGLLAKTDAIDARLLARFGEAIAPRPTKPLPPGQEQLRELEDHRRHLVRLLVAQQNRRAQLSSKTLLGLNGRLINQLRKQIAQIEALLNASIEQNQELSSKARKLTAIVGVGSRTATLLLAQMPELGHLNRREAAALAGLAPFNRDSGSAHGKRTIFGGRRAVRCGLYMAALVAARHNPLLAAFYQRLRCAGKPPKLALTATMRKLLIVLNSALKTDPLQV

SEQ ID NO: 75569 - protein, 411 aa, unidentified
MELVHPRCAGLDVAKDEVVACVRVPDGREGRAQEVRTFPTFTSGLEALASWLAGEGVTQVVLEATGQYWKPIWYVLEEAGFELMLVNARHVKILPGRKTDVCDAAWLAELLEHGLLRGSFVPPAAIRQLRDLTRYRKRLIQTHSAECQRIQKTLEDAGIKLDSVATYVLGASGRAMLSALVAGERDPGVLAELAKGRLRAKLPQLRQALRGRFGDHHALLVRLALEHLEQLETSIAELDTHIDRVLGPFAQARDRLDTITGVGKRAAECIIAEIGIDMSVFPTAGHLASWAGRCPGNNLTGGRRRSGKPTRGNRWLGEVLIECAWAAARSRDTYLAAQYWRLARRIGKKKAAVAVGHSILVIAWYLLTDNCDYQDLGGDYFVRRDAERQRQRAVAQLQALGYRVVLEPAAA

SEQ ID NO: 75570 - protein, 476 aa, unidentified
MSYENGNIYRNGNQALKEALEQYRPSQILYVPLEIGKYNHKAKIVNFLGDVLIKPVEFANSKNGLKFILEKIKDAQKIASAEKIFCGCESCGHYHLNIVYHLKQFGLPIEPINPRDVRKENPNKDAKNDLIDLNAIARTMIYNKGTRQVIPEGVYYKIQRASRTRMNLVRRRTSSRNIITGLVDRIFPGLWDKDDSVFSQRFGKASLLLLEHYPYPKKITLLGEKRLSRFLRKNNTKLGEETAKKIVQKAMDCLSKPEEELEMDILSLRCHIKVLYQYEEVIQTLEKEIALLLLQTPGTYLLSIPGIGVEYASQFTAEVGDIRRFAYANQIICFAGICSRVFESSEYEAKGLPMTKMGSKFLRTTLNQIALSLNAHCNPFRSYYQRKREEKKDRPGIARIATGNRFVKLAFALMRKEELYRPRDLVDEKKYYVQLWKKILEKLEKIDLNLLPKENYLIKIKKEIEDKYGLKLSLEI

SEQ ID NO: 75571 - protein, 445 aa, unidentified
MLRIVYKRVAGLDVHKKTVVATRMRVTEDDRIEWETKTFGTTTPDLLELLDWLYEWDVTHVAMESTGDYWKPVFNVLEDTFEIWLVNAQHVKHVSGRKTDVKDSEWLAELMLHGLLKPSFIPPKPQRALREMTRYRTTLVQERTRIVNRVQKLLEGANIKLASVATDIMGASGRAMLAEIATGQTDAELMADLARGRMRNKIPELEKALTGIVQEHHRFVLAQQLDHIDYLDEKIEMISAEIGKQLESMSWPDEPSQPGVSESAEEGTGSADESELPLTWDAAVALLDTIPGIDRRIAEVILAEMGLDMRQFPTADHLASWAGLAPGNHQSGGKRYSGRTTKGNKALSSIMVQAAWGASRSKDTFLKSRYHRLAARRGKKRAIVAVAHSMLVSVWHMLTYQQPYQELGSDYFDERKKESKVNYLVRRLEKLTGGAVSIELQPVAA

SEQ ID NO: 75572 - protein, 399 aa, unidentified
MMTTATRYVGLDIHKHHVMIAAVDDQQEIMLAPQEVSIPHFTSWAQTHLYPTDQVALEATTNAWVLHDNLKPLVESVAVANTLQLKLIGASASKTDKQDALILAKLLAANLLPDVWVPPPPVRELRRLTQHRSQLLQQRSALKNKLHAILHQHNLQLPDGDPFSATNQSWWTELSINPTEALQIRHFWLSLEHFSQLLTETETHIAQLSVNDHWNDAMTLLMQLPGIGLYTGMTILAAIGDIARFPTAPQLVGYAGLGARVRASGESYRTGKISKRGRRELRFALIASAWVAVRWSDYWRAQFHPLAQRIGKQKAIVAIARKLLMTIWHILTKREPDRHGDPEAAARAFMTWASHHHLARSQGVHRLDFVRERLAHIGILDQITSFQANGRAHFLKTDP

SEQ ID NO: 75573 - protein, 350 aa, unidentified
MAEGNRVVTVGVDTHKDAHVAAALDASGALLGTASFPAGARGYASMVAWMRAFGRVEAAGVEGTGGYGAGLARALDAAGVRVLEVSAPDRSERRRRGKSDGIDAEQAARAALAGTRCAPAKSRCAEMGALGALEAAYAGAVKARTAALNALQAQVVALPEEARAPLRGKGSSELVRACASMRPGAGSSPETLAKVALRSLARRARMLDEEAKGLEAEIDALTKALAPSTRSLLGAGPHVAARLLLAAGANVSRLRSEASFSMLCGASPVPVSSGRADRHRLSRAGDRRANSALYTMAITRMAHDGRTRSYVARRMSEGKTKKDAIRCLKRYIAREAYRALAQDMEALGMS

SEQ ID NO: 75574 - protein, 375 aa, unidentified
MKEKVRFLGMDVHAETIAAAIAEPDGEVRSLGTIPNRMESVRKLIKKLGPVEKLRVCYEAGPTGYVLYWQLAELGVQCEVIAPSLVPVKAGDRVKTDRRDAEKLARSYRSGDLTAVWVPDEGSEALRDLVRAREAAKQDQLRARHRLGKFLLRSGQRPPSGVRAWTHLHLIWVSQIRYAQVAQESTRLDYLHEVEHMRERVLRLEQAIAEAVKLASPALQEVITDLQALRGIAHISAVTIAAELGQVSRFAGARELMGYCGVVPSENSSGKRTRRGSITKTGNAHLRRIVVEAAWSYHRPPAIWAGLRKRQQSASQEAKEIAWKAQHRLHKRYARLAAKGKDKRKIVTAVGRELLGFIWAIGTKAEATVRQRIAA

SEQ ID NO: 75575 - protein, 311 aa, unidentified
MQITIGIDISKETVIAYRLPDNQSIQVANDRAGQKTLVRSIGKQNGSLVVFEATGAYHRCLEAALAANGTPFAKVNPRQARRFAEATGRLAKTDRVDAIMLAKMGAILGLKADQPKSEVLYLLRELLTARRALMKDKVAAKARLQTTKQTLLKNQIKARLKQIEIQIRQVDAAIAEKVELDEALSNKLAILISIPGIAETTAFSMLIEMPELGTLEGKQAASLAGLAPMSRQSGKWQGKERIQGGRAFLRRAIYMPALVATRRNPGLKAKYDQLIRAGKSGKVAVTAIMRKIIVMANALLRDCRKWSELRP

SEQ ID NO: 75576 - protein, 344 aa, unidentified
MKHNNVIAIDLAKDIFQVCVMPRHNQIKSNKAMPRAKLIAWLPQQSPSLVVMESCGGASYWARLAKSLGHDVMLIPARQVKAFRTGQKTDANDAVAIAVASQSPNIRPARYLSSEEQCIQAVEKMRNMLNKQKIQLSNQLRGLLLEFGLVINKGDAAFKSRIPEILEDAENELTVPMRQSLSQLWELYFVLESEFKQIDQRLRELIKQSEECQRLIKLEGVGPIGAVKLKLCLAQDHFDTGRQAAACIGATPQQHSSGGKVRLGSVNKVVYDKSLRSVLFLGARAKVSKLKTRPPKTEKERWMKALVERRGINCAAMALVNKNIRTAHALLKNKTDYMAVPLVA

SEQ ID NO: 75577 - protein, 363 aa, unidentified
MGDRIGYVGLDVHKEGIVVAVAEGGARGEVREYGRIANTRSALDGLARKLGREGVKLRFCYEAGPCGYGIQRQLSAGGHDCVVVAPSLIPKRAGERVKTDQRDAVSLARLDRAGELTAVWVPDPGHEAIRDLVRARLDAVHALRRARQQLAGFLLRQGCHYRRPAWTKLHHRWLAGLKFEQAMHHLVLEDYIAAVEAAEARRDRLTAQIAAMLPDWTLAPVVAALQAMRGMALVNAATLIAELGDLSRFANPRQLMAYLGLVPSEHSSGASVKRGGLTKAGNSAARRLLVEAAWTYRFPARVSRELLLRQEELPKAIREIAWKAQTRLCARYRRLARTGKPANVVTAAIARELAGFVWAIAGR

SEQ ID NO: 75578 - protein, 458 aa, unidentified
MRRQNRRPLRAAVAPKLGRHNPAAAGLDIGAEEIWACVPAARDTPPVRAFGTFTPDLHALADWLAHCEVTTVAMESTGVYWIPIYEVLETRGFEVALVNARHLKHVPGRKSDVQDCQWLQQLHSYGLLTASFRPAEDMRVLRAYLRQRAMLVEHRAGHIQHMQKALQQMNVQLTQVLSDITGTTGLQIIRAIVAGERDPQVLARLRHGRCQRSEAEIAKALSGHYRPEHVFALKQALALYDFYTAQVQECDTYIEQHYAAIKPVYDEQTPPPPLGPDPKPNSHAKNAPAFDVRACLYRILGLDLTATEGLEASSAQVLLSEIGTDLSKWPTEKHFASWLGLAPHNDISGGKVLRSKPLKGNRRAAQTLRLAAQTLGRTQTALGSYYRRLRARKGPTQAITATAHKLARILYHILTHRTPYHSQSQETYEQYLRQRAMRHLKRTATRLGFTLLPQPVAA

SEQ ID NO: 75579 - protein, 456 aa, unidentified
MHTASNAQGRDSRGLREPCLISTKAVIQMFYCGVDIGKYNHAVCIINEDGDTVLKLKAGNNAAGFSKLKAHLERLQLGPDMAEFCMEASGHYWLNLYCYLDQLGYRVGVINPIQSKALRNVYVRKTKTDPKDALLLADLLRLGRVPQTSLASETVIKLQTLSRARFEFVRQIGRLKNRILGTLDRIFPEYSDCFSDVFVRSSRELLKKYTAPEDLAEVDLSELAEFLSKHSRNRLGRERAEQIQALAKGTIGIHLAKDAFTLHLRLLLKQIEFIEEQITIIEEAIDQVMEELRPTPDTPYRHVIETIPGIGPVLAAAIIGELGDDVSKFKNAMSVVAYAGIDPSVNSSGEFEGTRNRISKRGSPLLRHSLWLAAVTARNYIPELKEYYEKKLREGKHYKVATCAVARRLTHIIYSICKNQRPFDPNHVWEAPRKKVNPDPYAVFKDRTTKKLLDFT

SEQ ID NO: 75580 - protein, 358 aa, unidentified
MTTVSNKQRWFNTIRLVKDDDLYVGIDAHKKSLHVALWLNDAPAIDFVMPPDTAKLIDTLNKIRVALRQVVYEAGPTGYSLARALQQVDISVSVVAPSKTPRQSAPDSKTDSLDARKLAEYAAKGLLRHITIPTKHQEAQRQLTRLRQQLVEKQTRVKLQIKGFLLQHGIDQPNGLSRWSCPAIENLKGIRLSEHLRYCLDMLIEELRFIAEQLKSAEQKIKDAFSEKPICDTVKLLTTHPGVGQIIATQFAAEIFNPKRFSDKTQLAKYVGLAPSIHQSGQTSRYGPILKTGRPQLRCSLIQGAWIWVQKDRDAHKTFCRLIHNTGHKNKAITAMARKLAVHLWMMARDNKPYNSAA

SEQ ID NO: 75581 - protein, 428 aa, unidentified
MNIENNIRQKQYRQIVREVRGSHEYLVVGIDVAKDKHHAFMGTATGKSLLRRLVFENNTDGFSKLLTQAEAVKVRNGLSKIVFGLEPTGNYHKPLGRHLIRCGHNVVLVAGSAVKHNRQLLDGRWDKHDTKDAANVADLVSRGKCLYYDLPSSKIDELRDLLSLRRRLKKEEHSLKMRIRNSLLAKFFPELDRFYSACETETLAIVKWCLDPNKIAGMEFDKFFQMVTKTTRGIAQTLRLRKIHRLAAESIGCPMGRAAEFEAKLLVEKLKQVRQEIEETKEFIQDVSIDFAEYSWLLTIPGFGPYVSARVLASIADPRRFDRDKQLLRLSGYDLCASRSGKDSAKAIPVISKNGNAELRYALYQAAHVASTQNRYFIIYFNKLLRGRERERGIKTKMRVKLAAKMLVIAWTLMKKQEPFNPDFLNID

SEQ ID NO: 75582 - protein, 346 aa, unidentified
MNYCGLDVAMKSSYLYITDGKGRKLASGEIPTAADMLRQRLRPYLRGGLAVALEAGNQSAWLHDLLVDLGAEVTVVNPTKLKLIAESRRKTDKIDARVLCELLRLDGLPEPVHMPGAETRSLRGLLVARRQLVAARTKLCNVVRGMLRQEGIRLAARELGTFVGWQKLLTRSFSGTHLRPILESYYASFEALTRSIQQLDRQVAQRERADRRAAQLQTMPKVGRIASLTFLAAVDQVDRFETSRKLVSYSGLCPTVRSSGERTEYGSISREGRSELRAVWVQIAHLVAADRSRSTARLRRWYRKVASHRGKKTAIVALARKLLSIAYRLLRDDTVYRSSMVCRPAT

SEQ ID NO: 75583 - protein, 315 aa, unidentified
MAEEVYVGIDVSKAELVMAVRPSGERAQLANNASGIKQLVARLRELQPRLVVVEATGGLQRQVVAALWAAQIAVAVVNPAWVRHFAKGRGLRGKTDSIDADLLALYAERERPEPRPPADAETAALQALVMRREQLVEMVVAEEHRLQRATASLRKEIRHHISYLKGRIKDLEEDLDQTVRRSQSWRRKREVMGSAPGVGKVMCSMLLAKMPELGTLNRKQAGALVGVAPVPDDSGKRRGYRAIAGGRFEVRNKLYMCALSAIRANPDLKDLYERLLARGKTKKVALVAVMRKLIVMLNAMIKTDTLWRSPCQTPA

SEQ ID NO: 75584 - protein, 334 aa, unidentified
MIIIGVDFHPEFQQIAWVDTDTGELQEQRLQHREEAEAFYRELAARAVQVRIGMEASGHARWFERLMGELRIELWIGDAAEIRTKRVRKQKTDRQDAQLILRLLLEDRFPRIWVPSWENRDLRQLLWHRQRMVQTRTRIMNQLQAVALNEGLRCKKSLWRERGRQQLESFQLAPWASRRRHDLLELLDRLNPSIAELSQAIEQEVESCPLAQQLMTHPGVGPLTALAFVLIIGKAERFQCGKQITSYLGLAPLEESSGNRRRLGHITKQGSSILRFLLVEAAQVTVRSLPEWRSKYSHLMMRRGRKIAKVAMGSATGGSSLLDDAPGMGLSAVG

SEQ ID NO: 75585 - protein, 394 aa, unidentified
MVVSVGVDVSKDKHDCFIVSSEGEVLADVFTIPNTMDGFHYLLQRIRHCTAPQDKIKVGLEATGHYSYNILGFLLNEGLDTYVINPLHTNLYRKSLSLRKTKTDRVDARTIAAMLMSDVDLKSYTDTAYHNEELKSLTRYRFDNVRERAKLKQSVSRLVTILFPELEKLVSTLHTASVYALLSEFPGAKQVSEAHLTHLKAVLYDASKGRYGRDMATTFRDAARCSVGSVMPAKSLELRHTIRLIHELDAEIEDIEAAIQSMMDEIQSPITTIPGMGVRMGAMILAEIGDFSRFDSPDKILAYAGMSPSTYQSGQLSLSGAYSHMEKRGSRYLRYALYNATKYVCLWNPTFAAYLAKKRAEGKHYNVALSHAAKKLVRLIYALEKSKRPYNTAA

SEQ ID NO: 75586 - protein, 321 aa, unidentified
MTYVGIDVSKATFVVAYSSAKSSKTKTFKNTTKGVHEFIQTLSADDYHCVLEATGNYSSLLVYLLSQAGITVSLENPLKIKNFARVMLSVTKTDETDARLIALYGEKMHPAPYKLRSDAILILKQKRTVIRQLKKQLIATRNLKGSMEALSFFDSKCKKTIEKTIAFLERQVKDLEEELANLAQGEYRKQMGLLTSVKGIGVTLAAALIMATGGFAYFDNAKQLTRYLGLSPTYQQSGTSVNVKGHINRNGDSSLRSLLYVAAMASLRCNAECKKCFNRLRSNGKPGKVAVVAVANKLVRQVFAVVTQEKPYIDGFKSAKP

SEQ ID NO: 75587 - protein, 403 aa, unidentified
MNSVGIDISKGRSTIAVMRPFGEVVISPFEVRHTGSELSKLAKQLKSLDGETRVVMEATGNYHASVAKLLHDAGLYVSVVNAKLVHDYGNNELRRVKTDRKDAVKLANYGLDRWLTLPRYIPEEDTRLLLKNCYRQYRQYSKVQTVLKNNLISLLDTVFPNVNRLFSSPIRGDGSEKWVDFVAEFWHCRCVSEKSERAFTSKYLRWCRKHGYNFREAKAHTIHAETCGHIDVIPKSETTKLLVEQAVAQLRATSTALAALKHEIQSLASQLREYPVVMDLFGVGPTLGPQLIAEIGDVRRFYSKKALVAYAGLDAPPNDSGDVTGRHKSMSKIGASSLRRTLFLVMSVYLQTAPLDEPVYQFMDRKRAEGKPYRVYMMASANKFLRIYYATVKACLESLEHTA

SEQ ID NO: 75588 - protein, 402 aa, unidentified
MKSKIAAIDVHKKVLMVVIGESKDCSQQQRFGTTREELERMSVWLEARGVQEVVMESTAQYWKPVWQALEPRFSLHLAQAQSNRAPRGRKHDFGDALRLGRRFQAGELILSYVPEPEQRSWRTVMRTRYQLVRDRVRLHCQIESLLEEAHIKLSSVVSDLLGLSGRRILEAIAGGETDATKLAQLGDRRLRCGREQLEQALRGRVQTVHQQLLALFLERVTLLDCQIEQLESLAREAMHAHHDAISRLSEIPGLGLQSAQHTLAEVGAQAQAFASPGHLSSWAGICPGRQESAGVSQSAGSAKGNKHFRRVLVQAAQAAARTKGSYLQTVFHRLVPRLGYAKAIWALAHRLCRLIWKILHDGVRYIEYGLITNPRTRKHLADKHLRGLRRLGFHVQITDAAV

SEQ ID NO: 75589 - protein, 376 aa, unidentified
MEHDSTLYVGLDVHKDSITVAYALGSGEVEVLGKIGTTKADIERLCKRLQSKASRICVVYEAGPCGYGLYRQLVHKGFDCIVCAPSLIPRKPGERVKTDRRDAVKLVRSLRAGDLSAVYVPTVDDEAFRDLARAWVSAKDDLKRARQRVKAFLLSHGVRYTGRADWGPAHRRWLSAFSFDSLWQQLAFDELRRTIEDRLAQCARLEAALREAVVNWRFYPVVLALQTMRGVQFTTAVGILAELGDLSRFAHPRQLMAWLGVTPCEHSSGDKRSQGSITRNGNSYARKLLIEAAWSYQHPARVSPEIQRRHEGIPKPIVDRAWDAQVRLCRRYRRLVARGKQKNIAVVAVARELSGFIWDISRLAMSLAIARDVVTA

SEQ ID NO: 75590 - protein, 387 aa, unidentified
MKTLHKRCAGLDVHKAEVVACLRVITNRKVGREVRRFPTTTQGLLALAEWLENAGCTHVAMEATGVYWKPVWHILEGHFVLILANAAHVKNVPGRKSDVNDATWLADLLAHGLIRSSFVPPPAIQELRDLTRTRRQLTREIVQHVQRIQAVLEEANIKLCSVITDIMGASGRRMLKAMIAGETDAEKLAALGHERLGCTRAELVEVLTGCVREHHRFLLEQHLRTIEQLEDSIAAFDARIEAALSPFDDIVERLKEVPGLAATATETVIAEIGTNMSPFPTAGHLLSWAGFVPRLDESAGKRRSTRIRKGAPWLKPVLVQAAWGAARKKNSYFQAQFLRLKARHGAKKAAIAVAASILTTVYHMLRDGTCQSRGQTRQPHPKSRLSC

SEQ ID NO: 75591 - protein, 312 aa, unidentified
MAQIICGGDVSAQSLDARIEPGGPFRSFPNTPEGCAALAVFCQEHRVDLVALEATGGYEQQPFRLLWAAGVPCALLNPRHVRRFAEAMGILEKTDRIDAGVIARFAAVRRIQPRPPATPAQEKLSALVTRLRQLVEARIVQTNQGRLVTEPLALASIKAMVDLIARQIAELERAIAELLQSDPLWQRLDAGFRTIKGVADRTVARLMAEMPEIGTLSGKAIAKLAGLAPIARDSGQSSGRRLVRGGRAGIRAILFVVAGCVRRFDPDFAAFDQRLRAAGKPPKVIRIALAHKLLVRLNAKAREIRADFALAA

SEQ ID NO: 75592 - protein, 352 aa, unidentified
MDKYMGLDVHSTSCTLAVISSQGRRLHEAVVETDASALRNAVKAIRGTRHLCVEEGTHSAWIHEILDPCVDELVVTRGLGSRALKSDRRDAFALADALRLRALPAVIFKPSARFAMLRELARTHRTICSDLVRVRNRLKATYRSRGIRVAGRAVYRKGERETWIARLDPASRARATLLVRQLDALVTLESDAQRDLIRESHRHPIARVLETAPGIGPIRAAELLAVVVTPHRFRSTKQFFAYCGLGIVTRSSADWIQVDGTWTRTRVPRTVGLNPNHNRTMKEIFKGAATTVISSRCCAPLCDHYDRLLEEGTKPNLAKLTIARKIAAIVLAMFKTEEVFDPERLGAHSTTT

SEQ ID NO: 75593 - protein, 441 aa, unidentified
MSKIMNPNAAGIDISTKEHYVAVPEERSKESVRCFQSFTRDLHELANWLKECKVETIAMESTGVYWYHLYTVLLGYGFEVYLVNAYHVKNVPGRKSDVSDARWLQQLHSFGLLKGCFQPDNITRSLRNYVRQRKQLITQMSREVQRMQKALEQMNIKLNNVIRDILGKTGMAIISSILDGERDPQVLAQYKDPRIRASKEKLIKSLEGNWREEQIFNLKQAYDHYFFLQGQLTECDKECERLVEGMSDDDVPGKEIKSGKNQKNSPDFNVSQHLYNALGVDITQIYGMKSINALAVFSETGPNLKEKFPTEKQFLSWLNVVPDNKITGGKVIYSRVKRKKNKAGQAFRDAASSLWKAKNPLGEYLRRKKAISGGRQAVVATARKIASIYYKMVTENVEFDPQVLKFKTQEYLNKRLRYLEKSLEKTKMLLADSEIVSEVVI

SEQ ID NO: 75594 - protein, 344 aa, unidentified
MATYYIGADVHSNNTDLAIEQGGRIVARYSVPTSIPSISAVLNSIQGKKILAMEEGPMAGWLYRNLHEKVDKLVVSEPRRNKLISSEGDRDDRIDSGKLAVLLRGNFLKAVHHTCDSHRAHLKHWVNLYHDRVRYAVRDINKIRACCRMHGVRIPRRVVRNPVRRRAWLSELDNSVLKAQLKMLWIGYDATREQVKIAKKQFSSYARKYPIIKSWSALPGIGVIRAATIFAYLDTPWRFKKRAKLHRYCGVGLVRITSGKDKKGRPKPPRLKLPWAVNRRLKNAVMGAATTAIERGDNAFKDYYKRMVSNGITPANARHSVARKMVSTMSAMWKTSNKYDETLV

SEQ ID NO: 75595 - protein, 399 aa, unidentified
MFYCGIDIAKYKHEASVIDINGKTLLDSIPFANDKQGCGKILAVFEKFEIAPDDVIIGMEATGHYWLSVYAFFLELGYTVKVINPIQSEAFRKMYIRQTKNDSKDSYIIAQIMRFGEYSATSLSEENIIALRQLSRYRLALVDACGDCKRRVIALLDQLFPEYDKLFSDTFGSSSTELLLNCPTPEDMLAISTRKLTNILNKASHGKFGKEKAEELKAAAKNTFGIAFAKDAFSFQIKQLMQQVVFLENQLSELEEQISNLLHETNQYITTITGIGDVLGAIIVSEIGDINRFERPNQLVAFAGLDVTVKQSGEFSGTKNKISKRGSPYLRRAIWLAAQRAAFCDPVLSEYYQSLRARGKHHLTAVGGVARKLCNIIFVILKENRPYLPTPTKNPKNLS

SEQ ID NO: 75596 - protein, 323 aa, unidentified
MPMMTPSTPRFNRILAFEVAKHELVVHTLPDDRQRRIANRAAAVRRLLRAALEHSDTPTLVVCEATGGYEKHVLDEACALGIACHRAHGTRVRHFARYMGAAAKTDAIDARMLALYAQNARDVRLYRQPAPEQKAARALKARRDELQHMLIAETNRIEHAEHGFVRANLRAHVRSLKMQIITIERELAALVAQTPRLAEQARLMQSVKGVGPETAAAIIAYFPELGSLSKGQAARLVGLAPIARDSGKAAAPRHIEPGRAALRRTLYMAAVVAMRCNPRLRIFAERLKTKGKPFKLIATAVMRKLVVILNAVLANGKPTLEYA

SEQ ID NO: 75597 - protein, 310 aa, unidentified
MEPIFIGIDVSKDRLDVHVRPGGEAFVVTRDGKGLEELVGRLQELGPTLVAVEATGGFETIVAAAVAGAALPLAVVNPAQIRHFAQAVGKRAKTDPIDAGVIAHFVEAVRPVPRALPDEASRLLAELVGRRRQIIEMMVAERQREKRAANVRVRKSLARHIAMLERELAAIDQDINTLVRGSPVWRVKEDLLASVPSIGKTLARTLLAELPELGSLDRRNIASLAGLAPYARQSGRWRGRSMIGGGRAAVRSATFMAALVASRCNPPLKDFYQRLVSVGKPKMVALIAVARKLLTILNAILRDNRPWQSA

SEQ ID NO: 75598 - protein, 347 aa, unidentified
MALTIVEARAITGGVDTHADTHVAAALDPVGGLLGVREFPTTPAGYAGLLGWLGGFGTVCLVGIEGTGSYGAGLTRHVTAAGVRVVEVDRSDRQDRRRQGKSDPLDAVSAARAAQSGRARGAPKGRDGTVEAVRALMVAKRSAGSERTQAINQARSLILTGPDDLRTRFARHTVAALVAETASLRPRPGDVVGYAVRVALRELGRRAEFPGGQLQRLDELIIPLVTAHAPGLLALYGIGPNTAALLLIAAGDHPERLRSEAAWAHLCAAAPIPASSGKTIRHRLNPGGDRQANHALWRIVFTRLGSHPATRAYAERRTAEGKSKAEIIRCLKRYVAREIYPHLRAAR

SEQ ID NO: 75599 - protein, 340 aa, unidentified
MEKRYIGIDLHRNRFTCCIRLGNERTYLTEWELEDLEKFVKKLRPTDEVAVEITGNTRLFFDAVSPHVARVVVVNTNQFRVIRQSVKKTDPNDARTLALYLSKNMLPEVRMKDKEHGQLASLTQTRDTLVKLRTALKNKVNNILSARGLNLAKEALSSEKKLAEVLELPFDEIVRIELRVIVEQIRSLNKSIAELEKTIGEEGSKLEGHKGLTSIKGIGKITGAILLSVIGDVNDFADEGHLASYFGIVPRVSNSNETERSGRIHKRGTKLGRTALVQSALIAANYSPYLKRFYEQVKARRGAGKAIIALAKKFLGIIYRTLKNKWVFEDFPNFVLAEES

SEQ ID NO: 75600 - protein, 389 aa, unidentified
MNTYHSYVGIDVGKTFHWVHATDAHGTTLVSKRIDQDEQELDQVFTTLTQAGPALVVVDQPKNIGALTLACARHAGCDTMFLPGLAMRRAAGILPGEAKTDARDAHVIALTARIMPEALRPVSHDPDRAELEALVAYDQDCLTDATRERNRLRALLHEVNPMFEAQLADRVDSPFVLGLLTRFGGPWGMRAAGQKKVRAWAARQKRVPATLLDHLIETAWAMARKPAGTDTKEALAIPAAARRITELDATRKHNEHLINQKLAHDPAYQALTTMPGVGPHTAATLVTTVDISLFPDHEHLASYAGLAAKTTQSGTSIKGETAARSGNKALKNALFLSAFAAVRWDPKARDFYDQKKTSGKKHNTIIIALARKRLKIMYAIMRDKTPYRT

SEQ ID NO: 75601 - protein, 316 aa, unidentified
MAEESYVGIDVSKAELVVAVRPSGERMTLSNDRAGIKRLVARLGELKPQLVVVEATGGLQRQVVAALWMAEIAVAAVNPSWVRNFAKGRGVRAKTDRQDAELLALFAERERPEARPPADAETQALQALVMRREQLLEMQVAEKQRLHRASGTMRKELRHHIAYLEGRIKELEQDIDKTVRRSEAWQRKREIVRSVPGCGQHFSAMVLAKVPELGTLNRKQIGALIGVAPMPDDSGSRHGRRAIAGGRFEVRNKLYMCAMVAARSNPVLKQFYARLVARGKPKKLALAAVMRKLIVTLNAMIKTNSLWRPPCPDLSV

SEQ ID NO: 75602 - protein, 402 aa, unidentified
MAYDFVIGVDVGTYFHHACALDSQGRQVLSKRINQHESSLRKLFGQFLADNASVLVIVDQPNNIGRLTVAVAQDMGADVRYLPGLAMRQLSRIHVGNSKTDVRDAYVIAHAGLNLPDSLRSVDRVEEVFIQLKVLNGIDEDLARAYTRLINQMRSALVGTFPAFEHVLRGQMIHRKWILNLLAKYGGPTKIRRIGKTRLAAFARSHKARNPEPVIDAMLAAIHGQTVSIAGSEYAELGVAMSAKDALAKLEHRKEIEAQVLKLIQDIPQTEILLSMPGIGPRSATQILMAVGDMSDFPDAAHLASYAGLSPRTNQSGTSIMSNSPNRAGNKKLKNALWQSSFASIRFHERSRQFYERKRKEGKRHNAAVVALARRRLNVLFAMMRSGELYRDIPTVQEAAAA

SEQ ID NO: 75603 - protein, 408 aa, unidentified
METIHPICCGLDVHQASVSACLRRVDAQGAVSVESREFGTTVKDLVALADWLVAEGCPIAAMESTGVYWKPVWNILASLLDVWVINARDVKQRRGKKSDRADAKWIAELVAHDLVQPSFVPPARIGVLRDLVRMRTVLVQGRTQVKNRVLAVLEDTNVKLASVVSDPFGVSGRKMMEALVKGERDCKVLSEMAMGVLRRKIPQLEVALQGGFTEHHAFLIRLGLESLDQSNRQIAELDAQIERLMQPLQEEASRLTSIPGVGQNAARVVLSEIGTDMTRFGSAERLASWAGLCPGNHESAGKRYSGKTRKGNRYLRRVIAECAWAASKTNTFLGRTFRRFQVRIGGKKAAVAVGHKILVIIFHLLNEGQLYDDGRYDSISQREQIRQRNRALTTLQRLGYQVALTPAS

SEQ ID NO: 75604 - protein, 422 aa, unidentified
MKIVGCDFHPSFQQIAVLDTTTGEMEQRRLCHRDGEAEHFYRGLEGPVLIGMEAVGNSLWFEELLKRVGHELWIGDAAQIRASYVRRQKTDRRDAEHILRLLVEQRFPRIWVPSSEQRDVRQLLLHRHKLVQVRTRVKTELQHLALNQGMQKKRHLWSVRGRADFQNLSLAHWAAQRREDLLAVLSLVESQVGKLDVAVEELAGRDRQARLLMSQPGVGPITALAFVVTIGDVGRFKRGKQVASYLGLIPAERSSGDKRRLGSISKQGNTFLRTMLVEAAQSACRYDEQFRKEYQHRCHHKPKGVAKVAAARKLAVRLYWMLRNQTPYRPAVHHEGSSFRGRLRPGRSVEWAPSHPAWAGCSKRIMAEVRAVSMDGGIRFHPVIRRGTRAMPRSPNTWLARTALRSRALFCALTTPSGLSTE

SEQ ID NO: 75605 - protein, 368 aa, unidentified
MGNERKRFVGIDLSKRTYEAVAITADPQTITRWNGKLDPRGRKCLLEKLNAGDIVALEAGTASFTIAKEIQGKPEIMVLVLNAANLAIIYASLKKTDKEDALKLARLVQKYTPEELPVVPIPTDQEMERRALVAHETRFRQDRVRLINRLHAVFLRAGFPDHTKSQLGITASREELIVSELDGFNLAEAMNLHHMIVEYEKILEDLDNQINDTVVACGEDAKILLSIPGFGIKTTMAVLAYAGDMRRFENPSQLVNYIGFSPRLYASGDIERVGSITKRGNPQVRWLLIQSAWCMVKSKAANPLKDRFEAMLKRGKAKSVAIFALARKLLELVFILLTRREKYRFIDPSLYTIKLRRAGFNLVGAESC

SEQ ID NO: 75606 - protein, 418 aa, unidentified
MADEIMAEETIRWFAGLDWGSATHQACLLDEAGTVVGERAFAHGGAGLAALCDWLVSLAGDPGSVAVAIEVPHGPVVDALLDRGFAVYAINPKQLDRLRDRISVAGAKDDRRDARVAAAGLRTDPHLFRRVLAGDPSVIELREWSRLAEEVQQERVRLGNRVRQQLWRYYPQLLALSDDVTAEWVLALWNMAPTPAQAARLREATLARLLRQHRIRKLDAPAVLAILRQPAIPVAPGVTEAAVLHLRSLVARLRLANQEFRQAERKLEELCTALSETQPTAQDSGPGDATILRSLPGVGPVTLATLLTEATGPLARRDYPALRTLSGVAPVTKRSGKSCIVVMRYAAQVRLRNAVFHWARVAVLNDRRCRGRYEALRARGHSYGRALRGVGDRLLGVACVLLRRGMLFDPDYGSSASA

SEQ ID NO: 75607 - protein, 318 aa, unidentified
MPQKTRFVGLDVAKSKVDACIRSEGLRLSAPSTPEGRAGLVAWVRANRVGRAVMEASGGYERGWAEALRAAGVEVRIVDPKRVRHFAKAAGRLAKNDPIDADTIAWFAEAFPDREAQPHDPARDEIDRLVAARTALKDAEDRIKQQGEHRPPAVVAKALAAIAKTIRAELRKVEGAIAAKIKANPGFARRAEIIASVPGLAAQTAAGVIAWLPELGHVTNQAAAALIGAAPYDDDSGGRKGQRHIKGGRRKLRNLLYMPVMGAATRHNPMLKAHYQRLRARGKEAKVALIACMRKLIVILNTMLARDQTWNPPVRAAR

SEQ ID NO: 75608 - protein, 344 aa, unidentified
MTTTITIGLDIAKRVFQVHGVDAAGEVVVQRKLRRSELLVFFKRLAPCLVGIEACATAHHWARALMALGHEVKLMPPSYVKPYVKRQKNDMTDAEAICEAVTRPTMRFVPVKSVEQQSVLSLHRARDLLVRQRTGLINALRAHLAEYGIAVPQGTAGRNLLATLVEDEDFDPIPPLARTALSPLVEQIKALDAAAHELEMAIKAWHRASPNSRRLATIPGIGPITASALAASIPDPSLFRSGRHLAAWLGLTPRESSSGGKQRLGRISKQGDPYLRRLLVVGATAVLRFAGGNRADSSSLLSWAARLKARKPYKVVALSLANKLARIAWAVMARGEPFQALPAR

SEQ ID NO: 75609 - protein, 403 aa, unidentified
MQVRHIFVGIDLGDKNSVARMAVDREKTERLGFVNNRQGRARLLREAKAKAAQAGGAKIVMAYEASSCGFVLSDEAEAAGIECWVLAPTKMEKSVEQRKHKNDDRDADDVVEKLRGHILAGNRLPTVWVPDPQTRDDRELIRTRLELTDKQTQIKSQIQMLLKRHGMEKPSGLGAGWTIGYRRWLEALQESDSLGCGSRQALSSLMRQLHFMEAEIERMQKPVERLAGEPRHKPIIDELIQETGVGLLTAMVYRTEIGYAGRFRRGRQAGKFAGLTPTSHESGQQNDRKGHISRQGPPRLRKVLCQASWVHVRHDAGARQIYQQLVLRNPKKKKIALVAIMRRLAVRLWHRMRKIELQLAEASQQTENPNRLKDELPIETVSTDTNGDAIVHPLLELDSRRGV

SEQ ID NO: 75610 - protein, 457 aa, unidentified
MTRRKHSRPARDIAPVHPHAAAVDIGATLHVAAVRPGCDPEPVRTFGTFTTDLHRLADWFEQCGVETVAMESTGVYWIALYEILDQRGFEVVVVNARDAKHVPGRKTDVSDAAWLQRLHEYGLLRASFRPKGEIATLRSYLRQRERLLEGAAAHIQHMQKALTEMNLQLHHVVADVTGVTGLRILRALVAGERDPDTLAAYSDPRCKAPAETLRAALVGNYREEHVFALAQALELYDIYQAKVTACDQRIEAVLERLKAANPPPTAALPPARPRRRQANEPGFAVREALHAILGADPTQIDGIGPSLALTLVGECGTDLSAWPSAKHFTSWLSLAPHNKISGGKVLSARTRRSGSRAAALLRLAAVAVGRTATALGAFYRRLAARVGKAKAVTATARKIGVLFYNMLRHGMDYADPGASAYEARYRQRVLSNLRRRAKSLGYVLQRADPASAAIAVS

SEQ ID NO: 75611 - protein, 366 aa, unidentified
MKETSTVRVNGNMIFKGHKLTIGVDLGDRWSYYCVLDEAGEILLEQKLATTPEGMKQTFERIPRSLIAMETGTHSPWVSRLLKELGHEVLVAHAQRVELISKSTRKDDRHDARTLARLARIDPELLGPVRHRSAKAQIHLTVIRARAALVSARTALVNAARGLVKSYGQRLPKCGTQQVSRELGAKLNAELREVLEPLLKEIESLNERIKEYDERMEKIAKESYPHVELLKQVKGVGTQIALTYVLTLDDPHRFPKSREVGCFLGLRPGRRDSGQSQPQMHISKEGDPYLRTMLVQGAHYILGPFGEDSDLRRWGLRLAERGGKSAKKRAVVAVARKLAVLLHRLWVSAEVYEPLRNSQKAMRAVA

SEQ ID NO: 75612 - protein, 351 aa, unidentified
MKEFIGCDAHKKYSVFVRMNEAGQYSRAVRVPHDLEGYRRYLATLPPGSGIGLETTANWYWMVDEMERAQHRPRLGDASLARARMGHRSKDHTLDGRGLAQLLRMGTFPDVWIPSAEVRDQRELIRLRLWLVRQRTRVKNRTQAILCNYGVLVQGVSDVFGMEGREAIEQGGVQLPDHTRQSVQQQLELLDTLNAHIDAVEQCTEKTLGETTETKLLQTAPGIGRILAPAILLHMGNVDRFATARHFSSYIGLVRRVESSGGHRWQGPKRQDANHYLKWAFTEAANCVVLNKSLAGSQVVQLYERVYGKTGCYGKAVTAVARHLAEAVWHMLKKGEPYRAPNFRAVPSTPR

SEQ ID NO: 75613 - protein, 364 aa, unidentified
MVGRREAKLKEHARRTSQNTQETISTIGIDVGKNTFHLIGLDIRGAIVLQQKVTRHQLGRRLSNIPRCLIGMETCSGTHFIGRQLTALGHDVRLIPAQYVKPFLKGHKNDYRDAEAIAEAVQRPTMHFVSIKTPEQMDLLALHRVRSRLVGQRTGVTNQIRGFLLERGITVRQGLMPLRKALPEILSSKSDALSPRMINLIGELIQDWRRLDERIAAVSSEIEALAKQDESCQRLMSVPGVGPIISSAVVAAIGNGAGFKQGRDFAAWLGLIPKQESTGDRTILGKISKRGNKYVRTLFVQAAHVVLERRPSTARQSLWPWIEQASKRLHRNMLAIALANKLARIAWAVLARGRAYQPRIPANA

SEQ ID NO: 75614 - protein, 364 aa, unidentified
MKKLTTKKSMTSKRLERQDEFSSYVGVDLGDKHSCLCILDRWGRIAEELRGRTTVKEFEEFFGKQPRSRVAMEAGSQSRWVCEIAKKHGHEVYVANPHKVQYISGGDDKNDPGDAYKLAELSYVRPSMLHAISHRKRQEQVHLEAIRARDLLVRSRADMINAVRGMSKAFAETLVQCSAESFTTKAAGKLPEDLRSATAPLLRVIDQLSEEVAALDQWIEHVARQQYPAYQLLERVNGVGTLTAVTYMLTLGDAGRFQRSRDVGAYLGMRPRQKDSGSSSPQLGITKTGDAYLRKLLVNCAHYMIGKFGADSDLRRFGLRLAARGGKNAKKRAAVAVARKLSVLLHRLWVSGEAYEALRNSQAA

SEQ ID NO: 75615 - protein, 371 aa, unidentified
MKKKILYVGLDVHKKSIDVALANGRANGKVRSYGKIDGSLDALDKLIGKLQSKDCVLEFVYEAGPCGYPIYRHLESKGHKCCVVAPSMIPKRSGDRIKTDRRDAINLVRLYRAGELSCIYVPSEEDEAMRDLVRSRDDFKRFERKARQRLLAFLLRHGLEFAGKKNWTKTHMNWLAGLKLSHRSQQIVLQEYVDAVKDCTQRVERTTEQIRQLVPDWSRADLVKAYQALRGVSLIVAATVVAEIGDMGRFKNPKELMAYLGLVPSEHSSGSRLRRGSITKTGNSHVRRVLTEAAWTYRMRARKTTTILKRQQGLPKSICEISWKAQTRLCTRYQRLFAKGKSKQTIITAIARELSAFIWAIDKELQQKTTT

SEQ ID NO: 75616 - protein, 307 aa, unidentified
MFVGIDVSKDRLDVHLRPEGQAFEAPRSSEGVEALAQRLQELAPELIVLEATGGFETIVAAGLAAAGLPLAVVNPRQIRDFARAVGRLAKTDPLDAAIIAHFAEAVRPQARAVPDEAARALGELVARRRQIVEMMVAERNRRRQLTQRKAIRTVERVLDTLQAQLSDIENEIDNAIRGTPAWRDKEDLLTSVPGIGPKIARTLIAELPELGQLDRRRLAALAGLAPFNRDSGKMRGRRCIAGGRGPVRSALFMAVLVSIRRHFPLAQTYHRLLASGKPAKVAIVACMRKLLGILNAILRDQTPWQNA

SEQ ID NO: 75617 - protein, 349 aa, unidentified
MIHVGLDMHKHFSKIETMDDSGRVLQKTTLYHDNKEAIHHYFRSLDKPATVAMEATRSWYWLYELMVEEEMEVKLAHPYKTKLIGEAKIKTDSIDAHVLAQLERTGFLPEAYVPPKSLREQRELLRYRLLLVLTRVRFKNRIHDIIDKLGIVHPYSDLFGTRGIAFLQSLSLPGLYQEELHRCLELLHFLDQKILEAEKDMKAILKEDPRAKLLMTIPGVSHLTAYLLLCEIGDINRFPSSEKLCAYGGLIPSTHQSGEKAYHGSITKEGNRYIRWALVEAAQKASRKDPALFVFYEKLKRNKGSGVALVAVARKLLTAVYHILKKGEPYRFRPIDKHYPGKPVGLSGH

SEQ ID NO: 75618 - protein, 389 aa, unidentified
MLHDHLSDGPAAIRTQFGAIFVSLELSRSNWLVTSLSPGKGEKMSKHSITAGDVAGLLKLFADLKRKALARTGQSYPIITIQEAGLDGFWLHRALQQEGIESHVVDPASIATPRRHRRAKTDRLDGETLLRALLAYKRGEPRVCAMVVAPSPEEEDRRRLCRERRTLIDERIAHVNRIKGLLFAQGISGYAPLRRDRRARLEALRTGDGRALPSYLTTQISRELDRLELLLDQIKAVEAEQDALLAAAGKGAGEQAAPDPVTMLLALKGMGANFTAVLWSEAFYRQFSNRRQLAAYAGLAPTPWRSGSIEQEQGVSKAGNPRLRSTMIQLAWLWLRHQGQSALARWFKAHSQRGRKTAIVALARKLLVALWKYVTAGVVIEGAVMKSAA

SEQ ID NO: 75619 - protein, 382 aa, unidentified
MKKLLYIGLDVHKDSISIAVAEPGRGGEIRSLGKMSNSLHAIEKLIARLRKQYGKDVRLSFCYEAGPCGFVLVRRLIQLGHDCIVVAPSKLARQSGDRVKTDKRDAEKLARAHRAGDLTAIYIPEATDEAIRDLCRARTDAVDDQRRARQRLKAFLLQHGYHYQGKAHWGQAHMRYLRELVLPHPAMKAILEECLMAVSDAGNRVARCEAAMSDLLPSWRLKPAVDGLMAFKGFKIVAAMITVSELGILPRFDHPRQLMGYLGLVPSEATSSNKRRQGSITKCGNPHARWLLIECSQHYANPPKVSKELSRRQERQPDSVLKISWKAQNRLHSRFNKLAARRLHRNKILVAIARELIGFIWEALRDLPCYQAQEAPSHKLAA

SEQ ID NO: 75620 - protein, 336 aa, unidentified
MTYFGIDVHKGTSTVKWFCPAENKRGRKRIETTPKAFAELLSSLPRPWIIAYEATRQAPALTKMLRKLDADELHLAHPRALREIGKLQKAKTDDKDAGLILTLLEVGMLPEAYLAPASVEDMREVSRGYKHLRQTCTKYLNALRHLFNKSGLSCDASKLLTHKGRQQVEKLLMELPALAAITGTMYWHLVQQLDEQCAALLELMYAQLKEHPAGAALLAIKGVGTVTAFGFLAEIGEPERFANCGRLHSYAGLVPKASQSDDRYSTGHLPQDCNKHLRYLAVCAANSAVRCKGENKAKTAYDQVKGKTDKRANVGKIAAARKILTDVLWEWRDAVK

SEQ ID NO: 75621 - protein, 441 aa, unidentified
MPSYVGLDVHKQLIEACFIDEQGKQLQRCRVAVTRQSIQTFVTHCLQPTDQIVLEATTNTWAISELIRTHVAKVTIANPLKVKAIAEAKVKTDKIDAAVLAQLLRCDFLPEVWIPDQTTRLLREKCAHRAALVADQTRLKNRIQSLLAQRLIPVCIPVLFNGRGRNWLSKLELNAQDRAAIDGYLRVLDQSESEEIALEKTLAQLSYDNDQVRLLMTLPGVGPAGAQALYAALGDWHRFKDGSHAASYLGLSPSTRQSANHCHHGSITKAGNSLARWLLTQAARQVVQHPGPLGVFFRRIHQRKNFNVAVVATARKMVTIAFLMLKNGEPYRYSLPAPTQRKLSAFRVAATGSRRSKSKHRLPMQSREPGTRVDSIPSLNEVYHSENLPPIVKADALQSAERRMLEQMEIADLPERIQVVQMRTRKCKKHAPKPNPNQLSK

SEQ ID NO: 75622 - protein, 416 aa, unidentified
MKISMGIDWSDKSHTICFREFKTRRILAEFEIEHSAAGIEQLENKVGALGCTPGDCLVAIETNEGMLVNYLFESGYPVHPIPPAAVKDYRGRRRRTGAKSDRDDAQLLSDMLCQDLDLYPPMDSTSPLSREIQVVYRARGQMVKHRTQVLNRLTCNLKAYFPVVLGLFSGLDRQITQAFLAAFPTQRAAQDAPAEDIRDFLEEQGYLRHDKIPEIIEKLHAPAIPVPDWQAEAGQYLTEALLAELAVLTEQIHKLEKRLAGLLEQHPDTVLFQSLPRVGLILAAGFVGELGDCRQTFDDASELQALAGTSPVTFQSGQTKVVRFRYACNKPLRNLLQQFARQSARADGSAWARGYMTHQLERGHSKSRAYRALANRWLVIIFRIWQDRTLYDENHHLRNIAQRGAKLPSLRLEKAA

SEQ ID NO: 75623 - protein, 355 aa, unidentified
MHDITPDAVVIGIDTHKDVHVAVAINGLGARLATASFPVTSKGYRQVAAWATEHGTVHAFGIEGTGSYGAGLARALAAKGLRVIEVGRINRQLRRRYGKTDTVDAESAARAVLAGDADGEPKVGDGTVEMIRHLKIARDTALKARTQAMVTLKTMLVNAPQALRERFIGITGKMTLIRAIAALRPGALVSTNASAKMALRALANRWLMLDAEIKEHEAVLEQLVRAHAPALMDAPGVSTGTIADMLIVLGDNPQRIRSEAAFAKLCGVCPVPASSGKTNRHRLNRGGNRRANAALYRVALVRMRHHPPTREYIQRRTAEGKSPREIRRCLKRYIAREIYQHLCAEKPLPAAAKGS

SEQ ID NO: 75624 - protein, 366 aa, unidentified
MKKVSIVRTEQSRNIWQQRLTIGLDLGDRNSWYCVVDEAGQIQLEQRVRTSAKGLQEVFGAMPRSRIALEIGTHSPWISRLLRELGHEVIVANARKVRLIGESRKKDDRLDAQTLARLARIDPELLYPVKHRSAQAQADLAVIRARAGLVRARTGLVNTARGLAKSYGERLRGCNVRNMDPEKAESLSPELQAALEPLLAAIESVSERIVEYNDRIEALAQQRYPQVELLKQIKGVGTLIALTFLLTLEDPHRFRKSRDVGGYLGLQPGRRKSGQSEPQMHISKEGDPYLRTLLVQGAQHILGPFGMDCDLRRWGLKLAERGGRNGKKRAIVATARKLAVLLHHLWVSGEVYEPLHNSARIVAAAA

SEQ ID NO: 75625 - protein, 343 aa, unidentified
MQVTTIGLDIAKNVFQVHGIDAAEKVVVRKQLRRRQVLEFFKALPACLVGMEACATAHYWARELTKLGHQVRLMPAKDVKAYVKRNKNDAADAEAICEAARRPTVRFVQIKSTEQQGRLMLHRARDLLMRQRTQVINAMRAHLAELGIVAAQGRDGIKELLKIIASEADARLPVDAHNTSLVVLAAELQAMQTLIGSIEKRIMVQHRLSEASKRLKSIPGIGLIGATAIAATVPDPKVFGSGRDFAAWIGLVPREDSTGGKQKLGPISKRGDRYLRRILVVGACAVLRYARHKPEKYPWLTKLLERKPFKVVAVALANKMARIAWALLAKGDTYRVPALAAAT

SEQ ID NO: 75626 - protein, 339 aa, unidentified
MQLYVGDDLHANNNFLALVDGEGKRVDQKKLPNDLFVIRAFLEPYQKDIVGIAVESTFNWYWLVDGLMDSGYKLHLANPSAIQQYSGLKHSDDKHDAFWLAQMLRLGILPEGYIYPREERPTRDLLRKRRHLVRLRNSLLLSLQNIISRNCGVQFRANEVKRLKEDRVSPLLESNEDLALAGKTSKEMIDQLTRQIYRIETFIVQRVELKEFYRYLLTIPGVGKILALTIMLETGPIGRFAEVGHYASYCRKVSSRWTSNQKTKGKGNQKNGNKYLAWAFSEAAEFARRYDAQARDYYTRKMRKTNFMVAHSALAHKLARAAYYLMKEQVPFMPEKLFS

SEQ ID NO: 75627 - protein, 351 aa, unidentified
MNDHSENRDIKVVAIDLAKKSFQLHGVDANGHKVMGKKLTRNKLKNFMVNLPPCLVVMESCSGAHYWGRLFQSFGHEVKLIAPQFVKPFVKSNKNDAADAAAIYEASQRPGMRFVAIKSVEQLDMQAIHRVRSQLVKTRTAAVNQVRGLLLEHGIDIPKGRAQVLRKLPGILEDAENGLSGRFRSVLHDLQEELRHIDQRIQRYDTQIEQIVRDSEQARLLLTIPGIGPQTATALLSSIGDIGQFKNGRELAAFLGLVPRQHSTGGKPTLLGISKRGDVYLRTLLIHGARAVLRYVDNKQDHTSRWAKELMHRRGVNIAAVAMANKMARTVYALLSKGEKYNINHIAAKSA

SEQ ID NO: 75628 - protein, 378 aa, unidentified
MPSENTVHVAIELSASSWLVAVRPPGAEKSRLHRIEGGETTALLALIAELRSRASTKLGRGVDVACCFEAGRDGFWLHRLLTAHGIAAYVLEPTSILVNRRARRAKTDRLDAEGILRVLAAWLAGDRQVCSMVRVPTPEEEDAKRPHREREHLVQEKLRIENRIEALLFTQGIRRRPSLRSWERDVAELRTGDGRALPPLLEAELDRLWRRLVLILELIREVEAERAAALAAAADDRIVQKITALQRIRGIGTNFSTVLVREVLYRSFANRRQLASYVGIAPMPYQSGGMDRDRSISRAGNPRARTTLIQLAWLWLRYQPGSALATWFRERVGRVQGRTRRIAIVAMARRLLIALWRYVETGVLPEGVEIRAEADATA

SEQ ID NO: 75629 - protein, 387 aa, unidentified
MSQVSDLSRSLAPFDQNTTLTVVVELSEASWLVAGMIPGIERQPVKKQEPDPVALLRLLERWRLEAIKAGKTIGQIALAFEAGRDGFWLARWLQARDIAAHVIHSTSVAVSREHRRAKTDRLDTAMLMRVFVGWLRGERGHCRMVAIPTLEQEDAKRPSRERESLVGERTRIINRMKAALARLGIRGFNPALRKAPQRLAALRTPEGVPIPPNTLDEFRRDMDRLAVVREQIDGIERARLARLEYAPAAGPHAMVRLLARVVGVGVETADMLVQEVLSRNLRDRRAVARYVGLTGSPDESGKRRREKGLAKAGNPRARRGLIQLAWRFLRFQSGSALAQWYRARTDGPKGARKTTMIVALARKLLIALWRMVTIGDIPVGVALRPTT

SEQ ID NO: 75630 - protein, 309 aa, unidentified
MKTTSIEVGVDLGKETFDACLSGSVRTWPNSPSGIRRFLDHLATLDRPVRVSCEATGGYTRRLVLACLHRTIPIALLNARNVRAFARATGCLAKTDRIDAGIIARYAETFDPPVLDPSWEREERLRQFHQRLDALIDARARCRTSLEFYDDPEIRTEINREIAALGKRIETYQARIDHHIAEDQEMSRKREILRRTTGVGPAVSTTLLVTFPELGTLNRKQAAALAGLAPMNRDSGAARGRRTIQAGRSKPRKALYMAALTAAHRNPMFAPQYKQFIDRGKPVKVALCAIARKLLVYLNTQLKMELQKT

SEQ ID NO: 75631 - protein, 331 aa, unidentified
MKFKHAIGIDVSKDTLDIICHVNGAYLKVLNNRAGFKQLLSWVKKQVGKELLATLFCFEHTGLYSLQLAVFLDELELFFAVESPLAIKRSMGLKRGKSDKVDAREIAHYAYLRREELQQYKMPSGHIQKMHILLSQRDLLVSHRAAIKSVQGEQHRILAVGENKVLFNVYEQTINHLTRQIEKIEVAIKALIASDPQLRKQFRLITSIKGIGDIIAYYMLVYTDGFTQFETWRQFACYCGIAPFDHQSGTSIKSAKQVHPVSHRKIKSLLFLAASTAIQFDAELKAYYDRRISEGKNRMYTLNAVKNKLVARIFAVVKRESPYVQIHLHAA

SEQ ID NO: 75632 - protein, 340 aa, unidentified
MSEITTIGLDLAKHVFQVHGIDAQGTTVLRKRLRRGQVLAFFSRLPRCVVGLESCATAHYWARELGALGHEVRLMPAQYVKAYIKRNKHDAADAEAICEAVGRPTMRFVPVKTAEQQATQLLHRGREQLVRQRTMLVNALRAHLAEFGMVAAQGLRNVGELIAIVRDDGDTRLPDVARQVLQVLSAQLEHIEAAIAALERQLLAWHKTNPVSQRLASIPGIGPIIATAIATTVADANVFRSGREFAAWLGLVPRQNSTGGKTRLGGITKRGNRYLRRLLINGASANLLRSKATKADPWVIGLRRRRPPLVVAVALANKTARIAWAVMLRQNEYQPRAVAA

SEQ ID NO: 75633 - protein, 346 aa, unidentified
MEHYAGIDVSLECSSVCVVDAGGKIVREAKVASEPEALIAWFGSLGLALARIGLEAGPLSQWLYAAMREAGLAVELLETRHVHKAFEAMPVKSDRNDARGIAQLMRLGWFRPVHCKSMGAQETRTLLTARKLVQSKLRDVENSLRGILRGFGLKVGKTTDRGFCGRIRELAAGQPSLEMIAEALLAVHAVLLREFNVFEKQVRRMARSDAKAKLLMSTPCVGPIVALTYASAIDDPTRFKSSKQVGAHFGMTPKKYQSGETDYTGRISRIGDASVRTALYEAAHIMLTKPVKGCSELKSWAMRIARRAGMSKAKVALARRLAVIMHRMLVDGTPFNPANKQIAAAA

SEQ ID NO: 75634 - protein, 320 aa, unidentified
MSHESTSVLPRSSAGVDVSKEELEVCIFPGGEYRTFSNDEAGVADAVEVMQSLPNVSIVMEATGGYERLALYAFQEAGLAVALVNPRQVRDYARSMGQYAKTDRIDAAVLAKFASTEAFRITEKSSEKQRKLESSLLRRRQLVVARAAEKNRDEHFTDKLLQKSVKQVIKFYDRQIEIIEKQLQKLLQEDVVWKAKWEILASVPGVGDTTAVTLLAELPELGVLNRQQIASLAGVAPFPKDSGKFRGKRCIFGGRRPLRTSMYMAALSARRCNPTIKAFATRLHKSGKPHKVIQVACIRKLLTILNTMVKNDTPWQSKVA

SEQ ID NO: 75635 - protein, 330 aa, unidentified
MSGFVGIDVAAKTFDVVVRIDGKASKVEQFSQTPDGHAAAVRKLQKLAPELIVMEATGIYYLDLAVALAKANLPVSVINPKSFHHFAALKLNGNKTDAVDAALLAEFAQCMSPRLWRAPPDELLGLRDIGRQLNRLTASRTQAKNRLHALTAKSTTLPMLIEDEQEGIEQLESRMKRLTKAALALIAGNAMLAAHFEHIIAAKGIGETSAIAILAELCVLPPTMKAPQISRYAGLDVRQTQSGSSINKPARLSKAGNVYLRAALYMPAMSAARHDVRAKAFYEALTGRGKKKMQAQCAVMRKYLTGIWACMQAQTAFDSTLLFSEKHIQN

SEQ ID NO: 75636 - protein, 338 aa, unidentified
MDYYAGIDLHSNNSYIAIIDNDNKRVFKKKVKNDLENVLHVLEPHRKEIKGIVVESTYNWYWLVDGLMEKSYKVHLANPSAIKQYEGLKHSDDVTDAFHLANLLRLDILPEGYIYPKKERPVRDLLRKRLQLVQQRTAQILNFENLLARNLGTRINLDEINKFTEEDVEDIFQQEQLILSGKASVATINFLGTRIQQIEKAVHKVAKLKSEYKLLMTVPGIGKILALTIMYEAGPMERFTKVGNYASYCRCVGSERISNGKQKGKGNRKNGNKHLSRAHVEAAHYAIRHYEYVKRYYQRKMAKTNIVVARKAIAHKLARACYYIIRDQKAFDPGKLFV

SEQ ID NO: 75637 - protein, 351 aa, unidentified
MKELMAGIDLHSNNIMVGIMNQEGGRVTHQKLPCKLASILSFLAPYKERLERLAVESTYNWYWLVDGLQAAGYPVVLANPAGFSPYNGLKHADDRSDAFFLAEMLRLKILPLGYVYAAEQRPVRDLLRRRMSLVQQRTALMLSFQSLYTRTTGGSLTLSRLKELEAQEAQRLYEHPANQLIAGLQLEHIEQLDASIERLEKAVLQVARTLPCYSRLKTLPGVGVILGLMITMEIGDIKRFAGPGEFASYCRTVRAQRTSNDKKKGENNRKCGNKYLAWAFVEAANFARRYDAASRKWFDRKAARTNSIIATKALACKLAKAAWFLVAEDTDYDGRRVFPHLAAGPTKNMKP

SEQ ID NO: 75638 - protein, 350 aa, unidentified
MKKNRQSILKKSMPIYSKVINYLEAMRFHYGDDVLFICGYEAGCLGFTLYHELTAHNVKCVILAPTSMPVPGGKKRVKTDKRDAAMIARCLAHHDYSPVHIPTQKDEQVKEFIRMRDDHRLALKKIKQQILSFCLRHGCHYNGTQNHWTQTHLSWLRTLRVEELHQEILEEYLLTYDYLTAKLGRIEQRIEELASEEEYRENVHKLTCFLGIKTQTALSVITETGDFRRFPDACHYAAFLGLTPGEDSSGGDQNQLGITKAGNRHVRMLLVEAAQSFARGKIGYKSSVLAARQEGNSPTVIEYADKANERLRRKYYRMTLKNGKKSNVAKTAVARELACFIWGIMTEHYA

SEQ ID NO: 75639 - protein, 435 aa, unidentified
MEEVEDEPLFCDRVAGIDIGKATVMVTIRVPSEARAKGRQQETREFGTTRRELLALADWLRGWQVERAGMEATSDYWKPVLFTLEQEGFDCLLYQASQVKALPGRPKTDKLDSVWLARITEQGSLAGSFVPPEEIRRLRTHTRYRRKLVQMRTAQKERCEKLLEDAHLKLSSVISDIHGVSGRDMLRAIAAGERNPKVLAQMARGVMRSKIARLEQALDCSFFTGEHAFILTMMLDSIDSLTAQAGVLDARIADMCQPYQRQLEQLDEIPGFGTTTAQDLIAEIGTDMNVFPTAGHLASYARQAPRVKESAGKRKGKNATGRGNPYIGGALGEASISAGRTQTFLGEKYRRLTRRMPKRKAQVAIMRSQLVIAHALLSDPDARYQDLGPDYYERKADIRRRARNHARALERLGYKVTLEAIDPGTGELHLLATAG

SEQ ID NO: 75640 - protein, 341 aa, unidentified
MEYCGIDLHAEYSQICILDEDGEVMETSRVRTSQKALERFFGRDRMRVAMEAGGTSPWVSRLLESLGHEVFVCSPRRVRLIAESTLKNDKVDAEVLARLVRLDPEFLKPIQHRSEEAQLLRGNLKVRSAMVEARTKWINTIRGLLRSFGYKVSGKAPQTFTERVDLMKLPDDLRAVIAPLLEQLDLLTGEIERRNEHLEEMVKDLPEVAHLREIPGVGPVVATYFVLTTDNPDRFKNSRDVAAFFGLRPSMRESASTTHFGRITKEGDPEMRRLLVQSAQALLRTRADSQLKQWALALAERRGKGKAVVALARKLAVLMHRLRVTGEVYQAFPHNGAARAA

SEQ ID NO: 75641 - protein, 350 aa, unidentified
MAKTCELFIGIDLHKAYSQVAVIDSLGKVIEERRLSNNLETITGFFSGLKGRAKGVVEASGSWYWFVDHLKSIGFDIFLAHPLKVKMIASAKIKTDRIDAKILGNLLRADLIPMSYIASEEEIEQRSLLRFRFSLMQQKTKLKNSIHSILTKYNIAFNGSDLFSVRGIEFLKTLNNLPEYQKHFIGQYLELIEDLGKRIKNIDEKIKKEVGEDEDTKLLTTIPGVGNFTALLLKAEIGDITRFPSDHHLCSYFGLVPSVHQSGKTSYSGKITKQGDSSVRWALGQAALAAVRREGYLKECYEDISNRSGKPKAKVAVARKILSSAYFVLTRKQPYYKPSKKELLSDPKRS

SEQ ID NO: 75642 - protein, 351 aa, unidentified
MKYYTTTTEFNCGIDLHTRQMYICVMNREGEVLVHRNIRNNDFDFFLKLVEPYRHDLTVTCESCFVCFWLADACEDAGIKFVLAHAYYVKSIAANKHKNDKEDARELAECLRSNRIPPAYVCPRDLRPVRKLLRRRNKYVKNRAVLTGHSTCEVMAAGNQPLKISSNSKERWRDGIRDSFDNPLDSFTADAELFMIESYDRVIQQMEQRIEKHARDFKQQDYRILRTAPGIGKILALTILYETINIKRFPSEKDFVSYCRLVAGTNESGGKDFGGKGRKMGNPYLKWAFMQAAILSKRADPKMNAYYEKLARQKGKYVANAIIAAKLARAVYFMLDRKTGFSLEMMLKGKR

SEQ ID NO: 75643 - protein, 360 aa, unidentified
MAKARTLVGLDVHATKIVAAVLDAETGELQFFKVSGDVYEAAGLCAGLPRPVRVAYEAGPTGYGLARELARRGVQCVVAAPSKIPRASGDRVKTDRRDAELLVRLLLAGKLHAVRVPGPEEEALRDLVRAREAVRVDLMRARHRLSKLLLRHGIRFDDGSAWTPRHRTWLAGVTLPYAAAQATLLDASGAIDALAHRRDGLQREIVAMVPGSPWAVQVGRLRCLRGIDTLSAVGLCAEIGDFERFAHAEQLMSYLGLVPCESTTGQQRRLGSITKTGSGHARRLLVEAAWHYRKRPAVGKALAERQDAQPAEAVAVAWSAQRRLHRTWARLEARAKRRTIIAVAAARELSGFCWAITRIE

SEQ ID NO: 75644 - protein, 337 aa, unidentified
MKYCGIDLHSNNSVVIVSDEEDRIVFSKRLPNDLGQIGAALEPHRKDLAGVVIESTYNWYWLVDGLMATGYQVHLAHPSAIKKYEGLKHSGDFADAAYLAHLLRLGLLAEGYIYPREERGARDLARKRMQLVRYRTAQILSIENILIRQTGARMKGEAVKRLTAEQVEGLGFAPDVALAMEANRAVSQALGQQIAALEKRLKERVRLRPEYRLLKTVPGIGEILATTIMLETGSIGRFAQVGNFSSYCRCVDSLRESNGKKKGEGNTKNGNKYLAWAFVEAANFALRCCPQAKSFYERKKSKTNRILAVKALAHKLARACYHMLRDQKPFNVSRCFG

SEQ ID NO: 75645 - protein, 375 aa, unidentified
MAQGTRWVGLDAARVSALVAGQTQNDGLVKGEAAGRLPIVMGLDQHRAQITAEWIDLSSGEISRGRVVPADRASVRKFLKRFAGRDLEVALEATTGWRFVAEELERVGAGVHLAEPAETSGLRGPKKRPKTDWADARHLRELLLIGRLPESWIPPDHILDLRARVRCRHTLSHQRTECQQRIQSVLYHHGCPQRRALMTVEGREWLDAQPLPAAAREQITVAVAMINALDVQVAPLTARLYDYAKRQTGCKALIAAYYGVGGLTAVTILAELGDTRRFENSRDVVRYGGLDITVKQSDQHRAPGHLSRQGPPALRWALYEAAQQARHPRSPDREYYLQAAERIGGNRACLALARKLLKRCYHTLRDLGDHALTPA

SEQ ID NO: 75646 - protein, 411 aa, unidentified
MERIVERPAALDVHKESVTACVRVWDGRKLEEHMAEFRTTVQGLLALRDWLEALGVKWVAMEATGVYWRPVWAILEDRFELMLVNARHVKAVPGRKTDIKDAQWLCQLLEAGLLKASFVPPKPIRTLRNLTRCRKAQINDRSREAGRLHKILEDTGIKLDCVASDILGASGRAMLDALVSGTTDPEVLADLAKGKMRKKIPALREALIGRFDTEHALIVSQILAHIDFLDEAVDRLSVEIHERIAPFARQRDLLMTIPGVKRRAAEVLIAEIGVDMSVFPTPKHLASWAKVCPGNDESAGKRRSGKTGKGNKWLRATLTEAANAATRTKNSYLATQYQRLRARRGHSRAVTAVGHSILTAAWHMLQSGELYNDLGGDYFVRQNPDRITKRLVRQLEALGHTVTLEAREVAA

SEQ ID NO: 75647 - protein, 348 aa, unidentified
MDALVKVIGIDVSKAKLDCWALPAQEAWGIDNDDGGIAALLTQLRTRAPELVVLEATGGYETQAATALAAAGWRVAVVNPRQVRRFAQALNRLAKTDRIDAQVLAEFGRAVNPQVRPLPDAQTQELAALVARRNQLVQMRTQEKNRLPMTLPPLRPRVKEHVAFLDAAIARLEIDLTAKLRSSEVWCERRDLLLDVPGVGPILTCTLLAQLPELGQLNRQRIAALVGIAPFHDDSGKHQGRRTTWGGRREVRTVLYMATLAASIHNPVIRAFYQRLRGNGKTYKVAMVACMRKLLTILNSMIKHGHAWHYEIKSLDTRHGCSPGGRGVRSEGQLIRIATDVTQLGNAQ

SEQ ID NO: 75648 - protein, 430 aa, unidentified
MTASSSTTATTWVAIDVAKVMHQVLIETPDGRRRAMRVANTAAAIERLVTLLRAAPAPCVIAFEPTGDYHRALMHRLGLAGFRLQQVSSLAVARTRDAMYNSWDKNDPKDAQVILHLLKTGTTQRFVDPLVSGHHDLQEMANTYQQISLRKVRVQHAIVTHHLPLYFPEAERYLHSSRADWFTNVLRLTPWPAAVRQYTKPDFIAAARAAVRGHKADKTRWLADFYDTAGESVALPVHPDSAAIRMFRVVLEEYQQLCRRRKALEGDIVTRLAGHPDFERLQTVPGIGPILALLILAEAGDLRRFAHVRQFLKYCGFDLCTEQSGQFRGTTHLSKRGNARLRYACWMAGAVAVRMQQNSFRRKFEDYMRSDPLNRDRRRKAYTAVAAKMARVVYAVVTSGNDYRRFPEAARPGDRIPSPGAVEAHRRPRR

SEQ ID NO: 75649 - protein, 355 aa, unidentified
MDNLRYIGLDVHRDTISAAVLNREGQLIMQSVVPTRAPAILDLLDGIRGTLHVTFEEGIHSAWLYDLLQRRVARVLVCDPRKTSLLKSGNKGDLIDARKLAELLRNDALSPVYHGELSSLEVQRRTRSYTMLTEDTTRIMSRVKAVFRGLAIPYHGKSIYRPDRRESYLAQLPTEGLRQRVELLYQELDAVHRLRLRAKREMLAECRKHPAMKWLQSVPFLGKVRTAVLIGRVQTPHRFRTKRQFWSYCGLALETHDSAQYHVVHGQVERKPRFVQVRGLNWNHNHDLKDVFKSAATMAAVREGVFRDYYCGLLAKGIRPEMARLTLARKIAAITLKIWKEGETFNAEQVKPQAA

SEQ ID NO: 75650 - protein, 347 aa, unidentified
MYQDNVIALDLAKNVIQVCILDKQNEIKTNRELRRQQVLSWLAKQAPSVVAMEACGSAHYWAKQARALGHQPVLLSARFVKKFVEGHKTDKNDAVAIGIAVRQPNVKPVAIKSNDQLALQALEKMRQHYQDIALATSNMVRAIVFEFGLVIPQGEKAFRERLPDILEDAENGLPMMLRAPLHQQYQFWISLKQQVREAEKQLRAQLKTHEQCNELQKLDGVGPVNALNLYLALGTRGEAFKNGREAAACIGLTPKQHSSGGKVVMLGISQRIAKKQLRANLIQGALAKIKIVAKRAPRNTREVWMKQLIERRGLRRAAVALANKTVRMAWAMVHYQQPYQAPESVAI

SEQ ID NO: 75651 - protein, 347 aa, unidentified
MNTTTYSAGIDLHKGPLQLHVRDAAGTTVCQQTIRHDKRRCLLEALAPFGKAVLVSVESTYNWYWVIDLLRMQGIPYVLGHARDVHARMQGKHKSDEKDAAQMSQMVRTNVFPAAYACGPQWRATRDLLRKRQRLVEERTQHLQHAGCVADQYLLGEGPMADAGYTKSVIADVDKAVDTDLRMQEMLTTVIDELDKWILARAKVGDEALYALLRETRGIGPVVALTLMYEITDIARFPRAQQLASYSRTANPEYSSAGKRLGPGDCKRGNPHLCRALHILAVQSIKLYPEVKAFHRIMAKKKGRRTAKRIVAHKWALAIYYMWKRREPFDVKKFLGTAYTPRAQSSH

SEQ ID NO: 75652 - protein, 416 aa, unidentified
MKQKNVIEFEQVVERGCGMDVHKETVVVTIRGKGIKTVTKSYSTFTSSLIKLKEWLLKHGITHVAMESTGVYWKPIFNVLGDDFTILLVNARHVKNIPGHKTDKRDSRWLAKLLLSGLLKGSFIPDRAFRDLRDLVRYKTKLTGMVAADKNRFLRILEDANIKLSMVLSDVFGASGTKMINHILENEDYSPEQLLYYVHGRVKASREDIKEALTGYITDHHRFMMRTLLGNMAKTKSTIMEVEERIDAAIEPYKLEKELLETIPGVGSDVAIVIIAEISTEMDNFPDHKHLASWAGMSPGSNESAGKNKSGRITYGNKHLRTYLTEAGWAASRTKGTYLSSKYKSLVGRRGKKKTIIALGHKILIASYFIIKDKVEFKELGEDHLNNFRRDKLIAYYKNQIERLDPNIEFDKEEAA

SEQ ID NO: 75653 - protein, 364 aa, unidentified
MNSVYHTELSSHEETRCQFNGGRCAIKLGIDVHQDFYVVVTQEGGSNPKPPQRFCKEAFLHWAAKLKSTSGAEVYAVYEACGFGFSLQRQLSALCIQCYVVCPQKLDEANKRVKTDGLDAKALCLRLDRFVQGNRDALAIVRVPSEEEERSRAIHRQREQLVKVRKQIEAQGRSLMINHGLEPMQQWWKERTFSKLPLPGWMKELLGNTQPILIALQQKIAALTLQLQSAASAEQPRGLGKMTSVVIDREIGDWHRFNNRRQIASYTGLCPGEYSSGNTRIQSCVTKHGNPRLRAALVELAWRMVRFQPHYRGVRKWKERLANGALTTGAARKKAIVALARQLAVDLWRIRTSRLTQKQLGLEI

SEQ ID NO: 75654 - protein, 408 aa, unidentified
MEVLYPRCAGLDVHKDSVVARIRCVSQPLQDEVRTFATTTSALVELIEWLSAHGVTHVAMEATGVYWKPVWHLLEGDFELVLANAQHIRNVPGRKTDVSDAGWIADLLAHGLIRSSFVPPAPIQELRDLTRTRKQLVREISEHSARIQKVLEDANLKLGSVLSNVLGSSGRAILQALVSGETDPEKLADLAQGVARKKRPALVEALRGGIRPHHRGLLKVHLDLVAALQQGLTELDDTVGKALASIHESARLLITMPGVSDVTAHVIVAEIGVDMTRFSTDAHLRSWAGFCPRNDESAGKRRSTRVRKGAPWLKTTLGTAAWAAVRVKDSYLQGQFHRLRSRRGAKKAIVAVAASMLTAAYHMLKNRVEYKDLGAGHFARRDRHKIIQHLVRRINDLGCEVQLTPQAA

SEQ ID NO: 75655 - protein, 405 aa, unidentified
MTTEAVFAGTSTLKEDVTLCASVELGSTGWLVTSRASDQEKIQRTRIGTNDWQSLIALLGRQRKARQAGRVVCGYEAGREGFWPYRALREAGIEACVLDPASIAVNQRGRRTKTDRTDGILELEAIEALDLGRRTVARRVVVPTEDQEDARQPGRTRSRLVKDRTALIAYIKSALARVGADLPAANQPGWLERLAATRQWNGQPLPRNLVRDIELAHERLMLVCRQIDALEADQRAALLSCERSGKRRQLKSRQAAQAWEAQANPAERAVAGLAEQLYRLNGIGRVIALSLAGEVYWRDFVNRRQVGGYVGLGGTEHSSGAQRRELGISKAGNRRARFVLVEAAWLWVEHQPGSALTHWFKQRAPKGASPRQRRIAIVALARKLAVALWRYLNDGIVPEGACMKA

SEQ ID NO: 75656 - protein, 391 aa, unidentified
MTYIVGIDIAKYHHQCLVINLEGEVIHKPFSFDNNHQGFQQLLSVLISFDASKQIRIGFEATGHYGSNLKNFLHNLGFDFMEIHPILISRFSKASTLRKTKTDTVDVTMICSYLTSVDYQPYLIKSYHITSLKSLTRLRDALVKERSLQLQRLTNVLDLIFPEFKPFFNHSLKSVSCQYLLLNYGTPSKMSRMNQASYRKMASKLRRTISYAKFLQLKELANTTVGVEDSILTFQLNTILNLYHHQDRLVSETDELITYKYSLVDSKLHSIPGIGIISAAGIFSEVEDFSRFSHPDKLVAFSGLDCAYYQSGESEFTGKMVKRGSSYLRQYLMNSAMMVINHNPNFYDYYLKKRNEGKHHRVALSHVAKKLIRIIFKLETSQMDFNPQLMR

SEQ ID NO: 75657 - protein, 328 aa, unidentified
MDRSYLGIDIAKKTFDAALLQGDAIKAKTFDNNPAGFKKLATWLKTHAAGELFACMEATGAYGDDLAHFLHEAGHSVCVVNPLQPKAFAESELQRISNDKTCAAVIARFARARAQELTLWSPPSPEYRALKELQRRIDDLIEARTQELNRLKSCRDSSAAIKSIKAHIEFLDAQIQQLDAETKNRIDHDPDVKKKQQLLTSIPGIGNRTAAILLAELDGFTRYENVRQLAADVGVIPLNRDSGESVHYRPRMCKIGNAKVRKALYMPALCAIGKNPIVRDIYLRLTLAGKARMAAVGAAMRKLLALAFGVLKSGKPFDPNYRPEFHYS

SEQ ID NO: 75658 - protein, 343 aa, unidentified
MDHFAGLDVSVKETSVCIVDDLGKIVREVKVASEPDALLAELTNPAYRFERIGLEAGPMSQWLLSALAEVGLPVICVETRHMQAVLKAQINKTDRNDARGIAQMMRVGLYRPVHVKTLRSQKLRMLLTHRKLLQSKAIAIENDLRATLRNFGLKVGIAGKVKFEARIRELVDNQPDLAVLVEPLLVVRRVLREQIGILHRRLLAVVRDDEVCRRLMTVPGVGPVVALTYRATVDVPARFRKSKAVGAVFGLTCSKYQSGEIDRSGRISRCGDEMMRVMLYEAAQSMLFHSTKWSWLKAWAMKIARHRGMKKAIVALARRLAVIMHRIWVDGTEFRWTKEVVTA

SEQ ID NO: 75659 - protein, 416 aa, unidentified
MKLFVGIDVSSEKLDVCFLTDDNQLSILSEISVANDIEGASFIRETILEFNDSYHFDQIVIGMESTSMYSFHPSMFFHEDEKLKKLNTLVTIENPFRVKQFSRMFDENKTDRNDALRIADFLRIQRFTTSPIKEEKYMALQRLTRTRYQLIKQLIRTKQHFLENLTYKCNTLAREMRDESTSLFSATLISLMTEDFTLDELAELPLEAFCDLLQEKGKGRFKQPEKIAKAIQRAITMSYRLGALAQESINVVLSVLVREIRALEKNIKELDKAIEQVIVVIPEYQCLTSIPGVGKVYAAGLIAEIGQIERFEDQTKLAKYAGLSWKVNQSGNYQSQNTPLTKQGNRYFRYYLVEAANSVKNYLPEYKAFYQSKYKEVPKHQHKRALVLTARKFTRLVDTLLRKHQLYTPPRSVIEK

SEQ ID NO: 75660 - protein, 492 aa, unidentified
MPQLYKHSKLKKLNASSAASLEARPTPAKGKKKTRRPRKDPTEGLQVANPNAAAIDIGCSEHWVAVPPGQAQTHVRKFGCCTADLEALVAWLVQCRVDTVVLEATGNYWVVLYDLLEARGLRPVVVNPRYAKNMSGKKGDISDCQWMQKLHTYGLFANSFRPTEPMRALRTYLRQRETLVVAVGQSIQHMQKALTEMNVQLANVISDVSGETGLRIIDAILTGQRDPQALARLKDPRIRASTRELAHALEGHWKDEQLFVLEQARLSYTHHQEQIAQCEARIQQQMRALQSRWPQEPPEKPQAREAERGADFQPTEEPAKAQRKVAPFDLSAELRRIAGVDLSAIDGIGPVTAQIILSEIGTDMSPWPSEKHFASWLGLCPDHRISGGRVLGRSTRPVVNRARHALRLSAYTLEHSHSALGAKYRRLKRKLGAPKAIVAMAHHLARLIYRLIKHGHEYMDKGMEAYEAKYREQRIRWLEKQAKELNLKVVAA

SEQ ID NO: 75661 - protein, 397 aa, unidentified
MYIVGIDIAKRKHEAAVIDGEGTVIIKPFSFTNNCSGYNRLLAMLAKAKLPLDEVSFAMEATGHYWLALFTRLQKEGFRVQVINPVQTNSIRSFYIRQAKTDPRDALLIAEVIRFGHFSESTLHPENIYELRELCRGRHAIVSMQADVKRKVVALLDQVFPEYETAFTNMFSDTSMAILQTCPTPKELSEMPLEELCHLIEVSSHKRFRMAKAQELQALARGSFGFAMAGDVFSTMIRLYAKHLVFLKQQVREMDRKIAEIMETLDTPITTITGIGPTLGAYILSEIGDISRFSSAAKLAAYAGIDPTMRQSGEYNGVRNRMSKRGSPYLRHAIWLAASSAVLHDPALKLYFQKKRDEGKPYMASVGHACRKMVSIIYAVMRDNKAYTPHIPNEISA

SEQ ID NO: 75662 - protein, 463 aa, unidentified
MKHKKASGKGTRRSRPLLERINPNAAGIDCGSEMHYVAVPADRDPEPVRCFKTFTGDLQQLADWVVSRGVKTVAMEATGVYWIPVYEILEARGLEVLLVNARHVKNVPGRKSDVSDCEWLQELHSVGLLRGSFRPVAEIAALRSYVRHRETLIESAATTINRMQKALVQMNVQLHVVISDITGATGQRILRDIVNGQADPQHLAKHRDGRCRASEADIAAALTGNYRPEHLFVLKQNLELYDEFQRQIKACDTQIEDHLKALAAQASPPQAPLPAARTRRKAQNNEPKFDVRTPLHQLSGVDLSQIDGIGPYNSLRLISEIGTDMSRWPTEDHFASWVTLAPHNKITGGRLISSRTQPSANRAADILRVAAMSVGYTQTALGAFYRRLASRIGKAKANTATARKLAILVYRVLKGEIVYKDQGADAYNARHRETVLRRLRRQAAMLGFGLVNGHTGEVLEGVS

SEQ ID NO: 75663 - protein, 339 aa, unidentified
MQVTTIGLDLAKNVFQVHGITKDEEVLFNRPLRRAQLLPFFSKLEPCLIGMEACSGAHHWARELTELGHDVRLIPPMYVKPYVKRGKSDAIDAAAICEAVTRPAMRFVAIKTVEQQALLSLHRARDLLVRQRTQLINGLRGMVAEFGVYIAKGVARIIGFADDILMGEVLDLPEIANEVIHNLCEHLMALHTRIRWYENRLKLVAKEDSRVRLLRTIPGVGAVTASAIIASIGDGHQFSNGREFAAWLGLTPANKSSGGKEKLGRITKMGDQYLRSLLVVGMTSLVRQTKSHPERASKWLTSLLERKPARVATVAMANKTARIVWAVLTRNEPYTPHTA

SEQ ID NO: 75664 - protein, 374 aa, unidentified
MNEFSKYVGLDTHKETIAVAIADVCGGKARYYGEIANTSEAINKLVTKLSADGDALSFCYEAGPCGYGLYRQINRLGHHCSVVAPSLIPTKAGERIKTDRRDSERLSQLDRAGELTPVWVPNQEQEAMRDLTRLREDMKGLERVTKQRLNAFLLRYSRRYDAGKSRWTQAHFRWMEGLKFDVAVQQIVFQEYLEAVKESEARVAGVEKEMEKALKSWELAPVVEALMALRGVKLITAMTIMAELGDITRFDSPRQLMSFLGLVPSEHSSGPTRRQGGITKTGNGHVRRVLIESGWSYRFPARKTAHLQRRAEKCSMEVQAISWKAQKRLCGRYTHLLGRGKLKVQVCTAIARELVGFIWAIACEVMGKHIVSAR

SEQ ID NO: 75665 - protein, 422 aa, unidentified
MSYCPVAGIDVSKRFSDMCILSPDNKIFAQEKIYHDETSINRANALLQKAERLFFSKPVIVMESTSHYHLILFQFFSEHGYDVIVVNPLQSNSMKDFSIRKMKTDRVDAFKLAMMYRTKTLRPSQIPQTATRALRQLCRHRAELLNDVSSYKNRLTALLDQTFPGYDKVFSDVGGVTSCAVLARFPTPTILLVEEESELVEVIAAASKSGYGFAKKKAGLLISAAQKAQTLGIHSCADETLIVCTIQMLRTLSESVLQIETAIDNLLAQIKEMRNNVSLLQSIPGIGSHSAALLLGEIGDISLFKKPKQLAAYFGLDPTERQSGSFRGTKNKLSKRGSPYARAALHMGVVNSICKRGKDSAANPVLLSYYEKKCKNKPAKVAQAASMHKLVFIIFAVLRDQKPFELKTPEQHAVEQGFVKAA

SEQ ID NO: 75666 - protein, 403 aa, unidentified
MVLSTPQERIWVGIDAGKGHHWAVAVDADGESVFSTKVINDETQILALVRTAQAKADEIRWAVDISGRASTLLLALLVAHGQHVVYVPGRTVNRMSAAYQGEGKTDAKDARVIADQARMRPKGFARLDTPSELVTTLRVLTNYRADLIADRVRLINRLRDLLVGICPALERAFDYSAAKGPVVMLTEYQTPAALRRIGVKRLTAWLEHRKVRNPGDVAAKAVEAAQSQTIELPGEKRAAKLVRDLAHQLLALDERIKDNDREIRETFRADERAEIIESMPGMGPILGAELVAIVGDLSGYLDAGRLASHAGLAPVARDSGRRTNNYHRPKRYNRRLRYIFYMAAQTAMMRPGPSRDYYLKKRGEGLLHTQALLALARRRVDVLWAMLRDKRLFTSAPPVTQAA

SEQ ID NO: 75667 - protein, 347 aa, unidentified
METAYDGRQVVGMDLHRRRSVLVRMTEDGRRLGTARITNSPAELRAAIAEAGAAPRVVLEATYGWYWAADVLAAAGSEVHLAHPLGVKAFSYRRVKNDERDAADLADLLRMGRLPEAWIAPREIRELRELTRYRHKLVGLRTSCKEQVHAVLAKLGIPVTASGIFGAGGELWLDGLALPQPYKGKVASLRMLAGELNREIALLDTVIASLLERHDGYHAIQALPGIGPVLGAVIVAEIGDVRRFATAGRLCSWAGLTPRHRESDVKVARGHITKQGSPILRWAMVEAIQRLPADTPIRARRDAIIARRGKEARNIAKTAAARQLLACVFYALRDGHVRSLDRQRQAA

SEQ ID NO: 75668 - protein, 367 aa, unidentified
MSDGMASVALDAARTSAPGFALGVVPGAIVAGFDVHRRQITFDAVDTVTGEVWRGQIESSSPAVEEWVGWFPGRVVHVAVEACTGWLFVCRALARCGAVPHLAEPIETSALKGRKRRAKTDRADAKWLRQLLLEGRLPESWMPPEHVRQWRSRARLRNTLVNERTGWVQRIRATLYHHGINGAPDDLRSLAGREFLACVALPVDAEERIGVALELIDMLEIQIHQIERDLRQLARRQTGCRALMTQYGMGELSALVTLCELGDVSRMHASRQAVRMAGIDIGVHRSDRTSRLGKLTRQGSAELRWALYEAAQSACRPASPDYADYHALKARGLSHTRASLTIARKLARRSYHLLRELGPAALEPIDH

SEQ ID NO: 75669 - protein, 331 aa, unidentified
MKFKSFIGIDVSKSKLDAYLKINHLHAIFNNNEEGFKELVEWVMENSGLVLARELLFGFESTGIYSSELALFLDKHPLPFYIMSGLELKRSLGIRRGKSDKADSKDTAEYLYEKQEKIEPTFLPSQTIQDLKKLFNYRERLVKERAAFKTRLKEYETIVSRNKLKVYLKSHTTVIACLDKQIETIEKEIQKLTHSEELLMNQYKLLNSIKGIGPQTALALIILTGGFTKFSSWRRFASYAGTAPFPNQSGTFNGRTKTSKLANKRIKTLLTLCAGTAIQYSTEMKNYYQKRVGEGKSKMSTLNIIRNKLLSRAFAVVNRNSNYVDTLKYAA

SEQ ID NO: 75670 - protein, 408 aa, unidentified
MNAVGIDVSKGKSMVAALRPMGEVALLPQEFLHTEVGLEQMAYAIIALGEDTRVIMEATGRYHEPVAAALHEYGIYVCVLNPLFIKQSGGGSIRKVKTDKADAMKIAKYGLDNWVDLREYTPMDTVRQQLKLCSRQYNLYMKTVVSLQNNLISLTDKTFPGVNELFSSPERADGHQKWVDFVMTFYHCDCICRVSENAFAERYQKWCKRKGYHFSAEKAQDVYLGSCGHFTTLPKNDNTKLLITTAAQQLLAGKMTLAALRTEMTRLAKQLPEYDIVRAMYGVGETTAVQLMAEIGDVRRFLRRSSIVGFAGVDPAVDQSGKHSAKSVPTTKRGSPHLRKTLYQIVCTYLKKSPVDEPVYQFLDKKRSEGKPYFVYMTAAQNKFLRIYYARVKECLEAFDAQQDTSQR

SEQ ID NO: 75671 - protein, 455 aa, unidentified
MPRKRTKDCPELKPVNVGAAAIDIGSRMHMAAVNPVCTDVPVRSFGTFTQDLHDLADWFKACGVTSVAMESTGVYWIPVYEILEQCGFEVILVNARYAKNVPGRKTDVSDAAWLRQLHSYGLLRGSFRPDAEIATLRAYLRQRERLVEYAAAHIQHMQKALMEMNLQLHHVVSDITGATGMRIIRAIVAGERNPDVLATYRDVRCHSSIATIRAALVGNDRDEHVFALSQSLELYDVYQAKMLDCDRKLEVLIAALSNKGAKPVGKLSKPRIKTKQVNTPTFDVRTALYGVLGVDLTEIHGLGPSLALKLVGECGTDLRAWPSAKHFTSWLCLAPGNKISGGKVLSSRTRRSSSRAAALLRLAATTVGRSDTALGAFYRRLSSRAGKSKAVTATARKIAVLFYNTLRHGMSYKDPGADQYEQQYRTRVLANLQRRAKSLGFVLQAIPAEAEPAVS

SEQ ID NO: 75672 - protein, 412 aa, unidentified
MLFVGDDWARDHHDVELVDEHGKKLAAKRLPEGLAGVSELHALIAQHLPEQWADLPPGEAAARVKIGIESDHGVWVQALIAAGYEVFAINAFSVKQYRARHSTSGAKSDAADAHLLAEIVRLDRAHHRPVAADSDQVEAIKLAARTHQTMIWERSRHVLRLRSALVEFFPAALEAFPDLDAPDALELLAVAPDPDTAARLSPSRIVASLRRARRRNVQERAHHIQQVLRASELRQSPPVQHTYAAIVTVQVRLISTLNEQVDALAAVVEHHFGLHPDADIYASLPGLGVILGARVLGEFGDAPDRYLDARARKNYAGSSPITRASGKKRLVQARYARNKRMADALRQWAFCSMRGSPGARAYYDELKDRKIGHQAALRQLANRWVGILHGCLKTHTLYDEDTAWSHHKTAAA

SEQ ID NO: 75673 - protein, 427 aa, unidentified
MRKTSKSEKEVENVAAYVGIDWADNAHEVRMLIVETSQVETMKLKQEPESLREWVERLRERFNGRKVAIVVEQRKGALIYALMSYEFLILYPVNPATLARIREAFNVGGTKTDSTDAELLLDLIRLHRNKLRAWVPDDADTRLLQMLVEERRRLVDEVTRETNRLKSTLKQYYPQALEWAGELNEEMALDFLTRWPTLGSIRRAGSNAIEKFYRDHRVRSEEKLERRLKSIKEARELTSDQAVLIGSKTKALVIVQLLRVLKKSIGRINKQIDELFEKHPDHQIFSSFPCAKKVLAPRLLAAFGSDRTRYESASEIQSFSGIAPVTKRSGKSKSVNKRLACPKFLRQSFHEYAGQSIKQGGWARSYYRELRQRGMKHHAAVRSLAYKWIRIMYRCWQNQEPYDETKYITTNGRPERAGRLQGCGLDC

SEQ ID NO: 75674 - protein, 363 aa, unidentified
MIESTTVTVGLDVHARSIRLAAVRADELLEERTLAYDEEAVEQLLRRWPAVRCCYEAGPTGFGLYRYLAERGIDCQVVAPGLVPQRAGDRVKTDARDARKLARLHAGGLLEPIHVPSPELEAVRDLVRAREDARLDRMRDRQRLSKFCLRHGRLLPTSAWTVIRRKWLGEQRFEHTAEQITFDTYLHAVDLVDCRVEALERAVRETAEQGPWRELVARLRCLRGVDTLTALSLVGEIGDFSRFRSAEEFMAFVGLVPSEHSSGEKRRQGSISKVGNSHVRRLLVESAWHARRRPTVGYELARRQRAQDALVIERSWRCQQRLYQRWQRMAGRGKPHQKIVVACARELAGFVWAIATDQPLRQI

SEQ ID NO: 75675 - protein, 343 aa, unidentified
MKVSRIGVDLAKNVFQLHGVDRHDRVVFKRRLKRDQWLRVLLDNTEADCVIGMEACAGAHHWARELQSRGYRVRLIPPQFVTPYVKSNKNDANDAEAICEAMSRPNMRFVAVKRVEQQDIQATHRIRAELMTQRTAKANQIRGLVTEYGLVAPQHLSSLRSAIPCWLEDAENGLTIRFRALLHDLWQDLLGLDDRVARLDAEIEVIARTDPLAQRLQQLRGVGPLIATALVASVGNGQQFGKGRQMAAALGLTPKQHSSGNRERLSGISKRGDVYLRSILIHGARSVVSHAKHKEDRLSRWVTQLAERRHPNVAAVALANKTVRMAWAMMRTESDYDPEFVVV

SEQ ID NO: 75676 - protein, 404 aa, unidentified
MEVLYKRCCGLDVHKRSITACLITPEGRKMRTFGTMTEDLLELADWLTKEGCTHVAMESTGVYWKPVYNLLEGLGMDLLVVNARHIKAVPGRKTDVADAEWIADLLRHGLLRGSFIPDKEQRELRELVRYRQSLIRERVAEANRIQKVLEGANIKLGSVASDILGKSGRSMLKAIISGTDDPSLLAAMAKGRLKNKTAELKRALRGLLDQHQRKLLATQMRHIEFLDQEIEDLSEEIKKRMHPFEEAIALVDEIPGIGRRVAEQVLAETGLNMERFPTDAHIASWAGVAPGNNESAGKRKSGKSNKGNKWLKATLVEAANATSRTKDTYLSAQYHRLAARRGKKRAALAVAHTILVIIYHMLKKGTSYQELGANYFDKRDEKAVVLRSLKRLEALGYKVVLEAA

SEQ ID NO: 75677 - protein, 472 aa, unidentified
MSKGSGISRSDRRRNARRERLRGLLPRDGAVLGIDLGDQKQALALIDHDMRVLWRRSPRCAAHQLGGPVADAVAAAAAAGMSRVTVACEPTGSRWMQVQRLCREAGVALVCVQPLVSHIAREQEDYTGHKRDEPDAVLIARLACELHCYIPEELDESWAFLRQLGRRRAQLVTTATASVLRVRDFLSVAWPSAVTAAGDPFKSMTWLAALEVATSRCGADPARLAGAGEDEFLALVRDAAPGWGTPRPDRRIARKVLALADDPGAVAWSRRGLFRRIRDELGDLQRARRQLKEVEADMTALLAELGLARLGDIPGLTLAGAAVILAETGDPRRYETSSSMVKHAGLSPSDNASGASEGASRISRRGRPSLRVAAWRATFAMLNWNPVMKAKYETLVAGAEESARAAAGSAHPGSARAAQAARTARAARAKARVACAASLLRWIYFMTVHGAGWDPVAASGGRFAPQDAQQAA

SEQ ID NO: 75678 - protein, 385 aa, unidentified
MSTSRSGLGPSSVLVTPDHAGNVVGVDPHKRTLSATVADPHGGILASGHFRVSGDGHRALEAWARQFGQIARWGVEGASSWGRHTAVFLVARGYDVRDVCANRTPRSDRARQRGKSDTLDSERIARETLAHPLLPRAFKRAGQDSGPEELHELLSLRHNQRRSILTSRQHLLNEAEHLLSSLPLEQREQLPDTKAVRPRLAALAARNRRRRHDQPTTLRLKLLDDYRAQIANLDAQDKQVTAELAALVKTSGSTLGELCGLSTVLVAELLVEVGDPRRFTIGGFARFNASAPLAASTAEGPGEPVRHRYNPGGNRRVNRTLHLMALTQLRCEPRAQAIYTNARKRGHTKKEARRILKRHLSDVIYRRMIRDLAQPAADHPLLIAA

SEQ ID NO: 75679 - protein, 429 aa, unidentified
MNDKTDRLYLFRLMRSSVRGSEKHLLVGIDVAKSNHHAFFGTSNGRTLRKNLVFDNSSNGFESLRSLARDLQSQHGLIEIVYGLEPTASYHKPLAEYLIRQGEQVVYVSNLAVKKNRALLDGRWDKNDKKDAANVADLVGQGRCLYYEVPEEKLRELRSLIAFRNKLKKQEHALQMRLRNNLFAQYFPELERIYIRARQLDEVVLSIVEHCLDPREIAVMDFDAFLKLITTRTIRIKKEKRLRELWEGAKNSAGCLLHDAARWEAKNLVSQLKTLRKIVEDNEDRIKAVAQQYPEYLSLISIPGFGPVVSAMVLGAIGDPFRFENQKQVLRLAGFDLCAARSGKKSDGVKPVISKQGKAALRYALVQAATVASLWNPTIRHYFIGLIKGRELERGIKLKMKVKLAAKLLIIAWTLMKRREQFNPSCFPG

SEQ ID NO: 75680 - protein, 338 aa, unidentified
MNYIGIDLHKQTIVLCVMDQGRSVLCRKRLSCSTPEAITAFFQGVQPFQAVIEATASYEWLFRLLEPLADRVVLAHPRKLRIIAESTRKNDKLDAQVLAEFLALDMIPEAHRPSPRQQEHRILVRQRQYLRGRMTGARNKIRRILSNYNGDRPDLFTQIGLSYLSKASVSPSDRFVLDQLYAEWEHHGRQLDEIDQRLKEFARSAPIHEAEARAVLETIPGVGTVTVDVVVSELGDVRRFRSAKKVCAYAGLAPGQRESAGHSKQLGITKEGSKLLRWVLVEAAWQLVYRTQRWKAVFEALSRRTGKKKAIVAVARRLLCVMFSMLRSGRAYQMALAA

SEQ ID NO: 75681 - protein, 462 aa, unidentified
MTVPRNKGNRKHEIASATPLPAIRPMVAGLDVGSSEHWVCGPGRADGTPNVRGFGTTTDQLNALADWLAEQGVESLAMESTSVYWIPIYELLESRGIEVVLVNARQLHHVPGRKTDVSDCQWLQLLHSCGLLRGSFRPGEAITRLRALHRQLANLVAERTRCVQWMQKSLDQMNVQVHRAVTDLTGVTGMAIVRAIVGGERDPARLARHRDRRCGKSAAAIARYLTGTWRDEHLFNLASTLRLFDALETEIAAYEAQLLQEVAALHPPARQAEPVPPHPNPAKEKAIKARGEQSARTTLWRFAGVDLTRVDGLSAGAAQVVLTEVGPNLAAFPSEAHFVSWLRLCPRTPISGGKPLKKRRNGLGANRLAGVLRMAATSLQRSKTALGASFRRIARHKGGAVAVFATARQLARLIYRMLRYGHDYVDIGQQAYDHQFQTRRLAALTESARTLGYTLVPKLAAR

SEQ ID NO: 75682 - protein, 410 aa, unidentified
MQSAPTTLPRTPDGGLTSGIDWASSDHAVAVVNTDGLQVDRFITEHNQAGLLAMTRRLRKLGVGEVAIERPDGPVVEALLEAGFTVVVISPNQVKNLRGRYGSAGNKDDRFDAFVLADTLRTDRARLRPLVPDSPQTVTLRQTCRARKDLVAHRVAVANQLRAHLQLVFPGAVGLFADIDSPISLRFLDRFDCQERADWLSPKRFEAWLASVGYCGRTDPAVLHARLVAAPRGAAGTTATVHITRAMTAVLRTLVEQIKALSEQIDEQLAGHVDAHIFTSLPRSGTVRAARLLAEIGDCRARFPTPESLACLAGVAPSTRQSGKVRAVGFRWACDKQLRDAVCDFAGDSRRGNPWAEHLYQQAIARNHDHPHAVRILARAWLFVIWHCWQDGVAYDPTKHRALQNLGLPA

SEQ ID NO: 75683 - protein, 411 aa, unidentified
METIVERPGALDVHKAQVTACVRTPGEGGKREAHFAEFATTVAGLLTLHDWLEAHGVTQVTMEATGVYWKPVWAILEDDFELLLVNARHVKQVPGRKTDMSDAAWLCQLAEAGLLRASFVPPKPIRALRNLTRYRKTQIQERAREANRLHKALEDTGIKLDCVATDILGKSGRAMLDALVNGTTDPEVLADLARGRLRAKIPALKEALEGRFDRMHALWIGAILSHIDFLDEQIASLTEAIAEQIAPFEKAVELLCTITGVQRRTAECIIAEIGVDMSIFPSAKELASWAGQCPGNHQSAGKRRSGKTRNGSKWLDWALEEAALAATRSKDTYLAAQYARLRPRRGHKKALGAVKHSIIVAVWHMLSTGELYNDLGGDYFARRDPEKTTKRLVAQLERLGHSVTLTDAIAA

SEQ ID NO: 75684 - protein, 370 aa, unidentified
MTSVKYIGMDVHTESTSIAVRNSLGKIVMEGVIETRANTILQFLDGLRGDLRVVFEEGTWATWLYDLLKSHVTEVLVCNTRKNAVRKGSKSDRIDARKLAEQLYMNNVKSVYHGERGLRMMKELARSYLTITKDLVRVMNRLKALYRSWGIPCAGTEVYAPRYRAEWLAKISEAGVRRRAEHYYQQLDALWPLRQEARRDLLVESRKHKIWKLLRRIPAIGPIRAAILIAVMQTPHRFRTKRHLWTYSGLGLETYDSAEYRAVRGQLERSRKQATVRGLNKDYNHDLKDIFKECGAPHSLKNVKLPEMCSWFAKPSSVAVSDILNFTFLHSIGMAAIRWPNPLLRGTDATFSISEVSPQVPVTSPFRADR

SEQ ID NO: 75685 - protein, 348 aa, unidentified
MYYVGVDLHKHTSWFYVIDDDGKRISSKNISNNLEILKKYFEQLPKPFTLAVEATYNWYYFVDLAREYADTVFLANSFELKAFAKRHKKTDKIDARLIATVMYKGFLPIVTIADKETRMIREVLRYRMSIVADRSKNIFRLKALLDKLGYCSTGNFTTYKKLVDIEKYELPEIYKNLALKFIDQIKYLNKQEFNISKDIELLSMQDEAIRNLMSINGISHFSASLIKTEIIDVGRFKTFNRLCAYAGLAPRVSKSANKTYVGPLNNNRRKNLQWILIETAFHYIKGYPEKKKRYEEIKKRKGSNTAKVALARDMLKMIYIVLKENRPFYSNKNNIKIQLVAASALCGV

SEQ ID NO: 75686 - protein, 426 aa, unidentified
MNCKQNQRINQVEETSLVVGIDIGSTNHYARAFDWRGIELARIFKFSNSGEGFGRLSHWMQSICERHGKTKIIVGIEPTGHYWFTLGRYLREQGIKLVMVNPYAVKQTKELDDNDPSKNDGKDPKVIAKLVLDGRYSIPYVPTGAYADLRILSADRQRIVKEIGQIKNRFARWFAIYFPEYCEVFGSYESKSSMLLLRVASTPESIVALGVEGICRIWKDAKIRAVGVKRATTLYETAKRSIGHDQGTSAAKLEMALLLEDYEAKAKQLAFVMAALETTLREIPEAEKLLAIKGIGIVSVAGFLAEVGDLRRFESPKQIQKLAGLSLRENSSGKHKGQTTISRRGRDKLRQVLFNAVIPLLATNEEFRSLHQYFTTRTVNPLKKKQSAIALCGKLIRVFYAIMVHGVEYDGKKMLADIHRKGPMTA

SEQ ID NO: 75687 - protein, 322 aa, unidentified
MDGTTANSNVSFVGIDVSKNKFDVMILPEGTHSTHPYDREGINEFLARLPNHHCTVVLEATGGFERRLAADLVDAGRQTAIANPRQVRDFARGLGVLAKNDRVDARVLAIYAQHVQLRFHEKPSEKQGELTALVVRRRQLLELQVAESNRLEQATVKSAVKSVRHVLDLLRKELKKLDDEIASLIADDDDWRSKSELLQTVPGVGPATSASLVAELPELGKLNRQQIASLVGLAPFSRDSGQFRGQRSIWGGRGAVRSALYMAAFNARRCNPVIRAFADRLQQSGKRSKVILTACMRKLLVILNTMMRNKTAWKTNAVLQNT

SEQ ID NO: 75688 - protein, 310 aa, unidentified
MDKVFVGIDVSKDRLDVHVQPSGEAFVVARDEDGIRALIDRLGAAPPALVVLEATGGLQVKAAGALAAAGLPVAVVNPRQVRDFARATGQLAKTDRLDARLIALFAAAVQPQPRPLPDEAAELLRALIARRRELIELRVAERNRLRQGASAWVQRDLERSIAALTKRIEAIDVEIENHVKGSPIWHVQEDLLRTVPGVGKTVSRTLIAELPELGKLTRRQIAALVGVAPFARDSGIFRGRRMITGGRPGVRAMLYMAAVSATRCNPIISAMYKRLIAAGKPAKVALTACMRKLLVILNAIARDQRPWHHA

SEQ ID NO: 75689 - protein, 408 aa, unidentified
MNPLYVGIDVSSKSNVVYLMLPDGNKHSNFSVANSHDGSTQLVKRILSVITSLSLDTVIIGLEATSVYGDNLVYFLREDATLAPFGRKIHVLNPKQVKKFKEAYNDLPKNDYVDAFIIADCLRFGRINKEVYLGDYRYKALQNLTRARFYAVQNLIREKQRFLNVLFKKYSTMTQEKVFSDTFSATAIAVYEEFESAEALAYMDLQELTDFIMKKGKNRFPDPDAVAKAIQKAARSSYRLPKTINDSVNQVLSISITSIKALESQIKEFDKAITAQSELLSNVLISIPGIGPVISAGIMSEIGDINRFPSQSQLGKYAGLAWTQHQSGDFEAETTHQIQSGNRFLKYYLCEGALSLVRCDTEYSNFYHSKYKEVNRYQHKRALALTARKFVRLVFRLLKDNRLYRAAE

SEQ ID NO: 75690 - protein, 331 aa, unidentified
MSFKKNIGIDVSKLTLDVCVLPDGWIHLAENDKKGITDLIRLLKKECRIKPSEVLFAFEHTGFYSYQLAVFLQDKGYEYVMLPGLEIKRSLGITRGKSDKVDAMKIAEYTQLRQHKIVPTKLPGKEIEQMKRLLSLRDRLVKQRAGFKATLNEARRAFSPKENPIYFQIQENLIHQLDQEIERLDQVLLDLVAHNPQLKVQFDLIISIKGVGPQTALNMIAVTHAFTKFPNWRAFACYAGTAPFPYQSGSSIRGKTKVSHLANKKIKALLGNITGSAIQHNPEIRLFYQRRIDEGKHIMSTQNIIRNKLLSRIFAVVTRGTPYVDTMKFAA

SEQ ID NO: 75691 - protein, 314 aa, unidentified
MRNCIGIDVAKQNFDLHSLKTGQDRRMENSTDGIRQCVALCNKIRPKLIAMEATGGYELALAATLQAKGFAVAVVNPRRIRDFAKAAGQIAKTDKLDARIIAQFAATMEPMQTEQINENTQKLKALVARRSQLVGLHTAESNRREHADGKEIRHSIAAVLKVIEAQLKTIDRQIKEHIENTPQLRQRSEILDSVPGIGPTTAHMLVTELPELGRLNRRQIAALIGVAPMARDSGTFRGKRMTGGGRKKIRSRLFMPTLVAVRHNPILRAYYNKLLSRGKCKMVALVAVMRKLICILNTMAKNNQEWNPNSIKIT

SEQ ID NO: 75692 - protein, 285 aa, unidentified
MKPELSVVGIDLAKSVFHLVGMDERGKIILRKRLARGEVMPFMAKLPRVLVGMEACGGAHYWARQLREQGHEVKLMAPQYVKPYVKTNKNDLRDAEAIAEAVTRPSMRFVPIKNVAQQDLQALHRVRERLMGARTALVNEMRGLLAEYGIVLPAGINAFRNALAAKLEAEHAKLTPLSQELFGKLCAEFKKVEAEVAYYDEKLQAIATTHPESQRLLTIPGIGPITATALIAAVGDVGGFTNGRQFAAWLGVTDCNRNWSGLQSMEIWDRIICIYRSLQDHIICL

SEQ ID NO: 75693 - protein, 408 aa, unidentified
MLFVGDDWAEDHHDVEVMDASGRRLAKARLPEGVAGITRLHAMIGQWLGDDTEDVAAQVKIGIETDRGPWVQALIAAGYTVYAVNPLQAARYRERLAVSGAKSDTADAHMLADMVRTDSHQLRPVAGDSAEAEAVKVVTRMHKTLIWERTRAGQRLRHALREYFPAALAAFEDLDAADTLELLAKAPDPASAARLSLAQISAALKRARRRDIAAKAAAIQAVLRAEHLGQPAVVTAAYAVSVRALVALLVTLNEQVKALQGQVEAHFGRHPDAEIILSQPGLGAVLGARVLAEFGDDHARYASAKARKNYAATSPITRASGKKKTVAARFVHNDRLIDALMTQAFTSLQNSPGARAYYDQQRTRGASYNAALRQLANRLVGILHGCLKTGTVYNEATAWPHHLNKAAA

SEQ ID NO: 75694 - protein, 403 aa, unidentified
MVFLGIDWAEAHHDVCLLDEQGKVLGKRRVVDGLEGVRRLHELVAEHAEEPEQVVVGIEIDRGLLVHALVAAGYQLYAINPLAVSRYRERHGTSGAKSDPADAKLLADLVRTDRHNHRPLAGDSELAEAIKVLARTHQNLVWSRQRQVNQLRSLLREFYPAALEAFGTDLAAADAIAILERAPTPYQGRSISQAKITSALRKAGRERNLESKAAEIQTGLRAPQLEAPALLAQAYGRSVASTIRLLRQMNQELAALEQELAASFELHPDTEIYLSLPGLGKVLGARVMAEFGDDRTRFKNPKARKSFAGTAPITKSSGRRKTVLRRLACNHRLLDACYLWAFASLRRSPGAKHYYQRLRNRGQSHPQALRALANRFVGILHGCLDHRELYREELAWPLLRAAA

SEQ ID NO: 75695 - protein, 388 aa, unidentified
MQFAADRLEAPTAIRTDLGAIFISLELSRSSWVVTSLSPGGGEKMSKHTVRGGDVAGLLKRFAQLREKAKGRTGKVFPLIVIQEAGLDGFWIDRVVQNEGIESHVVDPASIATSRRRRRAKTDGIDGEALVRALLAYKRGEPRVCSMVRLPTPEDEDRRRLCRERKVLIAERVKHVNRIKGLLFSQGVSGYEPLRRDRRERLDALQTGDGRPLPPHLKAQVHRELDRLELLIAQIKTVEAERDALLAVEQTTAPVPPAMLLGVKGIGPEFAAVLWSEGLSRPFENRRQIAAYAGLAPTPWQSGSVDREQGISQSGNPRLRTTMIQLAWLWLRHQPDSALALWFHDRVKRNGGRLRKTTIVALARKLLVALWKYVTAGVVIEGAVMKTA

SEQ ID NO: 75696 - protein, 324 aa, unidentified
MMYVGLDVHKRVCHGTVMDKEGHVVKRERFSNDPVSLRSFMKDIGEAKVVMESGYCWQPIYDRLEEAGYDVRLAHPLKVKAIAEAKIKTDEIDSETLAHLLRADLLPESYVPPKEIRDLRELVKRRAFLVGMRTRLKNRIHAELAKRDIDPGSPLFTKRGRALLASLGVDAVSQLLPVMETLDRQIGEISAVLKRAAVEDGRARILTTIPGVGYYTALLLVAEIGDVNRFPDAERLCSYAGLVPSVRRSGGSTVYGHITKEGSRWMRWALTEAVHSHLRYDTELTRFHKRLALRKPGQVATTATARKMLKSIYCMLKAGEPFQP

SEQ ID NO: 75697 - protein, 342 aa, unidentified
MAERVTDYRLSVGIDIAATTFTAAWLSPGGAPTPPVTHPQTPQGFAALQRQFAATGSAPDTTLVVLEATGSYWIALAVTLHAAGYAVSVINPLQAHHFAKAQLRRAKTDPLDAQNLAQLAAALRPAVWSPPPAVYHEVRQRLTARDALVTMRQQTRNQRHALVQWPVVVASVQEHLDGVIALLDARIADLEAEIAAVLAASDWAESLACLMSAPGIGMLTAAWLLVSTMNFTLCATPEAATAYAGLAPMPHTSGTSVRGQARIGHGGQSRLRTALYMATLAAVRYNPAIKAFYTRLRTAGKPSKVARCAAARKLLHLTWALVTKQERYQSNHRIVAPTLAAA

SEQ ID NO: 75698 - protein, 326 aa, unidentified
MTAPKLGIDISKKTFDVALIRDPETMKVKQRQFSNTPDGFRALQTWLAKQGMGRVHAVMEATGAYGLDLAECLHGAGHLVSIVNPAQIKAFGQSELQRNKTDRADAALIARFGWLHNPAPWTPPEPEQQELQSLVRHLDDLIEQRTQVSNRLSEGRLTKLVRESWEEILQALNERIAEVKRQINQHFDDHPTLKRQRELLDSIPGIGPETAARLLAEMPQLGEFDSARAAAAHTGLTPKRHQSGTSINAPARISKIGNPRVRYALYMPAMAALRSSKEFKELAARLTERGKKKMQIIAAAMHKLVRIAYGVLKNQQAYDSNYGSAV

SEQ ID NO: 75699 - protein, 390 aa, unidentified
MATPAQVDVWAGLDVGKGEHFAQAFASDQAGLEALLERAARYGTPGLVIDQPGSIAQLALAVAARRATPVAYVPGLVMRRAAGLYPGEAKTDRRDAYVLADTGRTRRKQVHWLDASSDGLLAQLRVLNGYDIGLAAGATRLASRLRGALTSISPALERAVGDRLHQAGARDLLAAYPTLTALRAASQSRIERTVKARSPRIAAKVSAAVAAALAAQDLTVPAEAATGRVIAELAADLDRVCARRDALAGEIEEAFLAHPFGELVASMPGIGPPTGARILGEIGDGSAFANGSKLAAYAGLAPVTRQSGTTLAGETRSRRGSHRLKNAMFLAAFAALRDPASKAFYDRKRTEGKRHNTALICLARRRCDVILRTGQPYRTGQSRAAGLIAA

SEQ ID NO: 75700 - protein, 330 aa, unidentified
MFLGLDIHDHEAQVAVVDDDGNLQDEIRLPIDRLTDLAAEYVGSEAAIEASGNYRAVYEMLDEHLDVTVANPSKNRLIADATVKTDRLDAKRLAHLLHAGMVAESYVPEDEIRELRDLVRTRKSLVDERTAEKNRVRAVLKRTNNTYSSELFGPTGREFLAELSLSTSDRAIITAHLAVIDELSTQVELLEEQIEQRVLESPAAQLLLTIPGVGQTTAAVVIAELGEIDRFDGDKQVVSYAGLDPVVHQSGETEIHGSISKEGPGALRWALVQSARIAVRCSEYFGNFYTRLKRRKNDKIAIVATARKLLVSIFHMLKRNEPYDPPEVSA

SEQ ID NO: 75701 - protein, 394 aa, unidentified
MATIGIDIGKRQHIAAVHHEGEREARKAILRFNSDRGGFAELARWLQRQGEVSRAVLESSGHYHLNLAAALQRSGVPVAIVNPLESKYFAKRRLQRSKSDPADARTLATLAMVDQPAVRDVLAGAELREAARFAMSLVDELGRIDQRICRLVELGFPELERAYDDPTCVSALAVLRSAPTAAAAARKRTATLAQAARPGGGRRIGAKKAEQIHTLAQDTIAAPELADQIGFQIRLLIAQHDLLEAQIAEAEAHLATLMDGELVRRLRTIPGAGPAIVATLIAEIGDIRRFSDFDKLVAYVGVHPAEKSSGEKGANPETSWRMSKAGNAYLRTALYRMAIVGIQHNPIIRSHYARKRAQGKSKMNAVGHCMRKALAIVWGVWRSGTDFAAPPSLP

SEQ ID NO: 75702 - protein, 315 aa, unidentified
MEQSSTAPSFVGIDVSKDRLDVHVRPVGQTFSVTRDSKGLEQLTDELRDLAPALIVLEATGGFEITVAAALAGASLPLAVVNPRQIRDFARATGRLAKTDTLDAQVIALFAERIRPEPRPLANADSQSLAELIARRRQVVEMIGMETNRLHQARNTRVQRMLRTTLRTLTGQLAQLDRDIDDTIRRSPIWRATDDLLTSVPGVGDVTAHTLIADLPELGQLDRRRVAALVGVAPVNRDSGQMRGKRTITGGRAGVRGALYMATLSAIRWNPVISKHYGSLVERGRPKKVALVACMRRLLGILNAIIRTQIPWQCV

SEQ ID NO: 75703 - protein, 321 aa, unidentified
MNIKRIGLDLAKNVFQIHAVDHREHVVLRKTLRRDRMAAFFTQLSPCLIGIEACGSAHYWARELTRMGHTVRIIPPRLVKPYLKGQKNDANDAEAICEAVSRPGMRFVAIRTERQQTLQAEHRVRARLIRARTALSNEIRGLLGEFGVVLPAGIAQLRKALPEIVSQQVQWDECFIRLLCELSEELQGLDERVARHDRRLQQSARDDIRIKRLLAIEGMGPVVASALVAAVGDGRQFRSGREMAAYLGLVPRQHSSGGKARLGHISKRGDRYVRTLIIHGARAVLNACQNKTDRRSQWLQGCRRDETGTSRRWRWRTRMPV

SEQ ID NO: 75704 - protein, 334 aa, unidentified
MTTSTTFIGLDAHKDTIVAAIFYPRRKQPDVVEFSNTEQSLRRFVRKVRRKTTKTVRACYEAGPLGFGLMRQLDALGFEACVIAPSKIPSKPGDRIKTDRRDAIKLAELFKADLLTEIHPPNEQEEAVRDLCRARQQTKENETAAKHRLNKFLTRRNKRYDGGGRWTRRFWDWVGALEFEHGVDRITFEHYVAVVRHFGEQLIALDRQIEELSQRDPYAEPVGKLRCFRGIDTTTAMTLVTELHNFERFESAPQLMSFLGLVPSEYSSAGHHKRGSITKAGNAHVRRVLGEAAWHYRHWPRVGAGLRKRRAGQSPSTIETADRPCADCTDDGKR

SEQ ID NO: 75705 - protein, 352 aa, unidentified
MPILEGRVDAVIGVDTHRDTHAAALLDPNGGVRATLEVPSDRAGHARLLQLAAAQAPGRRVWALEGTGCYGAGLTGFLLDHGEWVVEIDRPKRSRGRNGAKSDALDAVRAGREALAREQLATPRQRGHREAIRVLHTTRTAIVDTGANARRQLKALIITAPEPLRDILRGRTWLQQARACAALVAVPSDPVEHRATVRALRMTAQRVLAARLEAKQLEAELRQLITVMAPVLLAQRGIGPISAAQVLISWSHPGRFRSEAAFAMLGGAAPVEASSGQVVRHRLNRGGDRQLNRALHTIVMIRQTHHGPTRAYTSRRIAEGKSERDIRRCLKRTVARQLYRLLERTAANQATT

SEQ ID NO: 75706 - protein, 349 aa, unidentified
MRRPTEKVIAGIDLHNNNLVIGLINQDGKRLGHQKLDCDLEAVVRFLKPFKSRLQSMAVESTFNWYWLVDGLRAQGYPIDLANPAQIKQYSGLKHSDDTSDAFHLAELQRLKILPKAHIYNAQLRPVRDLLRRTNLVHQRIALLLSFKSLYARTTGRTLPLSELKAMEPADGPKLYEHPANQLIAQVQLEQIEALDRGILRVEKAVLKCAREIPLYEKLLTIPGVGKILGMTITLEVGEIARFKTDGDFASYCRAVDSRRLSNGKQKGENNQKCGNKYLSWAFVEAANFARRGDESCRRWYDRKAAKTSPVIATKALACKLSKAAWHIMAHQTEYDAKRMFPELAMQPT

SEQ ID NO: 75707 - protein, 339 aa, unidentified
MDKITTVGVDLAKGVFQVHAVDEQGAVIVRQALKRSKVLAWFARLQPCLVGMEACATAHYWARELRKLGHDARLIPPAYAKAYVRRNKSDAADAAAICEAVGRPSMRFVTIKTEQQQAMAGLHRVRDLLMKQHTMLINQMRGLMAEFGIVVRKGAPHVGELVAILADPEDQRIPAPLRDGLSATAAVLRTIDRKLEDIDRQIVAIGRDDATYRHLITAPGYGPIVASAICAMVVDPAAFRSARDFAASLGLVPRQDGTGGKLKLGPISKRGNGYLRRLLVNGAMAVLRGKRAKDDPWRAKLLASKPRKVAAVALANKMARIGWALMMRQEDFRRLPAAA

SEQ ID NO: 75708 - protein, 420 aa, unidentified
MSPISDQRFAAYVGIDWADTKHDVCLQAADDNKREFSCVPHQVACIDEWAKGLHQRFDGMIAVALELAKGPIVAALQKYDFFVLFPVNPSTLARYREAFKPSRAKDDPTDAELALDLLLRHPERFAPLRPQSVAMRSLLSLVEQRRELVGDKTRLTNRLCDALKQYYPQALDWFAQRDTVVFCDFLTRWPTLLAARRARRTTLEAFFRAHHGRRARLIEARLESIRAAIPLTEDPGIVVPCRLHVLALVAQLRTLLAAIELFDREIATVACTLPDYALFQGLPGAGLQLAPRLLAAFGEQRDRFHGAHELQQYSGIAPVTERSGKKSWVHWRWQCPKFLRQTFVEWASQTINRSFWAGAYYRQQRARGSSHQVAVRALAFKWIRILYRCWQTSTPYDETTYLNALRKRGSPLLRNLELPG

SEQ ID NO: 75709 - protein, 394 aa, unidentified
MAFKIFRKNCCGLDVHKTWIHACIGITDTNGRTEYKQARFSSFTKGLQELADWLAKYDCNDVCMESTGKFWIPVFNILEKTCWVTLAHPKYTKPQKGNKTDRKDAKWICDLYMCDMVNPSFIPPPDIRQLRDLMRYRSKLTNAMTSEKNRALNCLTVSYLKLDDVFSDVFGKSSRSIIRYILEHPGETFQVAPFIDRRCKHPVEEIQAVIDGAISHQQAVKLRECLQHLDELEVHKTNVEKEILCLVQQYPYQLELLQTVPGFSGNIMTAIALISEIGADMSVFPSAKHLVSWAGCCPRNDQSSKKVKSTRISRAGVYLKPLLVQVAIQPFTANADKLSAAGAVEIRCQICDGRFLSMWAALFIFLGCPLPPCPKNLHVHNGRIVILASVAWIF

SEQ ID NO: 75710 - protein, 410 aa, unidentified
MEPILISCAGMDVHEKKVDVCIAHGPFDKPPKFEIRTFSTMTSDLEELMTWLNKYEVTTIGMESTGVYWKPIFNVMEDQFEIVLANAQRLKAIPRKKTDIMDCKRIANLLRYGLLPNSFIPPKEIRELRDLNRTRRKLVGMMTSEKNRLVKVLESANIKLSSVVTKIYGVSSLALIRSLLEKDKLSREEISKMAKGKLKKKVDLLEKAVNGKLTDHHRFLLEMHLQNIDHLAKQIKKLDEEIEKKMVPFQKESNLIQTIPGISEVNASAILAEIGVDMSQFPDEAHLSSWAGVCPGNNESAGKKKSGKTQKGNSFLKAALTEAAWAASKTKNTSYNAFYHNLVRRKGKKKTLVALAHRMLIDIYFVLKTGEPYQDMGAEAVHERTSKRKERSMIRSLEKAGYSVTRTATA

SEQ ID NO: 75711 - protein, 321 aa, unidentified
MPLSLGIDIAKKKFDAALLRDGKFKTKVFENTPTGFAALSDWLKQHGADKVHACMEATGILYEGLAVFLADAGHDVSVINPLQIKAFGESLLSRTKTDKADARLIARFCEALVPMRWLPDPPEIRQLKALGRRREALIEMRTQELNRDLSADSRVQESIQAVISVLNKEIDDIAKRIKDHINHHPDLKNKSDLLRSIPGIGDVCIEAVLSETNGFANFSKVEQVIAYMGLSPREKSSGSSVRGKSGLCKTGNRRLRKVLYMPALVAMQHNPMVKAFSKRLKEKAKNGKLIACACMKKLVQIMFGVLKNNQPFDPAYNVKFS

SEQ ID NO: 75712 - protein, 358 aa, unidentified
MQSNKISFKGQKIYVGIDVHLKNWSVTVITEKGLKRTHPQKADAKELFDFLNRHYPEGEYLAVYESGFSGFATYYALRDVGIDCIVIHAADVPSSQYENVMKTDVIDSEKLARALKGGLLRPIYIRDKENLDDRGVVRIRKTIQKKMAGDKTRVKHMLHQNGVTIPERFTKSAYWSGAFIKWLREDVRLLSSTRMSLDLLIEQVLGQKRMVLKCTKTLRELSQASKYKERFDLLMTIPGIGPIVAMCILTEVYDIKRFSNERQFASYLGLIPTCHSSGEKVSHGEKTFRGNKKLGPMIVETCWVAVNKDTRLSALYGSYCQRMKCQEAIIRVARKMSNIIFGVLKNNTAYVPLDVEIQ

SEQ ID NO: 75713 - protein, 310 aa, unidentified
MVMCFAGIDISKDTLDVHVIPDGLSFTVSRDDTGLEELVAKLQPMAPQLVAMEATGGFETMVAAALNASGLPAVVVNPAQVRHFAQALGKRAKTDPLDAAVIAAFAEAVRPRARALPDAETAALAEVMARRRQLTGMLKAEQARETRAASKRARQSIRRVIATLEAELQSLDADVDKMIRASAVWQVRVELLQSVPGIGPIIARTLLAEMPETGSLSRREIAALAGLAPWTRQSGQWKGKSMIGGGRAEVRTALFMAAMVASRHNPVLKAFRDKLVQAGKPKMVALIAVARKLLTILNAIIRDQKPWQTA

SEQ ID NO: 75714 - protein, 341 aa, unidentified
MNAIYYIGLDIHKKTIAYCIKKVDGTLVRQGTVCAERKALQQWQSELPGPWYGAMEATLFTGWVYDFLKPHAVDLKVAHPAMLKAITAAKRKNDRADAEKIGDLLRVNLLPESHMMSEELRELRRILRYRNMIVRTAVKMKNKMSGLLMEVGAQYSKKRLYGKKYFGELLERVEDIPVSVKELLKLSRSGFELYDGIQKKLVTALRENKKIKLRVQRLMSIPGIGEVTALTWVLEIGELDRFSSSRQAISYCGLCSAQHESAGKEQRGPISKQRNKHLQTTLIEAAKLAPRWNEQLAVLHEKELARGNRNRATLAVARKLVEFMMAVDRRESEFETTKLVA

SEQ ID NO: 75715 - protein, 377 aa, unidentified
MSNVAKYIGLDVHKATIAVAVAEGGPGGEVRFVGTVANDDDEVRKLVKRLATPGATLSFCYEAGPCGYGLQRLLIKLGQPCIVIAPSMMPRRPGDHVKTDRRDAMTLARLLRAGELTAIWVPDEAHEAVRDLIRARRSAQEDATAAKQTVRSFLLRHDRRFEGRSAWTKMYWRWLSEQRFDYPHQQLAFEELQKRVLEAQARVVRLESALGEAVASWHFAPLVRGLQALRGIKLVSAATLVAEVGDLTRFDNPKQLMAYVGLVPSEHSSGARTHRGRITRAGNAQARTTLVEAGWSYRLPAREERRYRERVADLPEEVQAIGWKAQVRLCQRFRRLSATGKPQPKVTTAIARDWSLCLGYRTPDGACDGQLISPVAT

SEQ ID NO: 75716 - protein, 375 aa, unidentified
MNAKVRFLGLDVHAETIAVAVAEADGEVRSLGTIPNRAESIRKLVKKLGPVEHLRACYEAGPTGYVLYWQLTELGVACEVIAPTLVPVKAGDRVKTDRRDAEKLARSYRSGDLTAVWVPDEGSEALRDLVRAREAAKQDQLRARHRLGKFLLRVGQRPAPGVKAGTQAYLAWVRQMRFSQIAREATKLDYLHEVEHMAERVARLEQAIVEAIEQASPQIQEVVKDLQALRGIAQISAVTIAAELGNISRFEGARQLMGYSGTVPSEDSTGKRKKQGRITKTGNSHLRRIVVEAAWSYRHLPRVGPTLGKRQQGVAEEIKEIAWKAQHRLHKRYSRLAAAGKDRRKIVTAVGRELLGFIWAIGIKAEAAANQRMAA

SEQ ID NO: 75717 - protein, 385 aa, unidentified
MQRNDLSRSLVAFDQNSTIMAVVELSLNTWLVSGVVPGVKRQPLKKQAADPERLLGLLERWRQEAIKAGHAIERIAVAFETGRDGFWLARWLRARGIEAHVIHASSIAMPREHRRAKTDRLDTEALMRAFLGWLRGEARHCRMAALPTLAQEDAKRPSRERESLVAERTRLVNRMKATLVWLGLPNVNIKLRKVAERLGDLRTPEGEPVPPNTLAELRRDLERLVMIRVQIKAIEQARLQRLTAAPAQGTHPMVLMLAKILGLGIETADMLVHEVLSRRLRDHRAVARYGGLTGSPDESGSKRREQGLAKAGNARVRRGMLQLAWRWLMFQKNSALTQWYRSRTANGRGDTRKTMIVALARKLLIALWRYVTAGEVPHGVVLKAA

SEQ ID NO: 75718 - protein, 396 aa, unidentified
MISVGIDVSKGKSTVCIMKPCGEILESPFDIGHTADELDSLISLIKSFDEETRVVMEDTGHYHLPVATYLSSHNIFVCCVNALRMKKFCSQSIRRAKTDKIDSIKIASFGITYWNELVKAYPSNVIYDELKFLARQYYQVTGMLVKSKVNFSNLLDQVMPKINDVLSNQGENHKLTEFVSRYIHFQNILDMGEMKFTSDYCKWAKKKGYRLNERKAAEILALAQNGIPTLPNSQSVKIAVSEAVKLIHSIEESRNTILAQMQDLCNTLPEYSVVKEMDCIGDTLAPRIIAEIGDVRRFKNKHSLIAYAGIDAPPYQSGSFHASERHISKRGNSYLRKTGYEIMQSLIKHKPADNAVYDFIQKKRSGGKCGKEAMIAGLNKFLRVYYGKVMEFYSEH

SEQ ID NO: 75719 - protein, 344 aa, unidentified
MSSIKVLGIDLGKSSFHVIGRDYSDNQVIRKKFSRSALIHYLHQLSPCTIAFEACGGAHWLGRQCESMGHKVKLIPPQYVKPFVKSNKNDFIDADAICEASTRPNMRFVSVKSEQAQIISAIHKARHGYIKDRTACMSRIGALLLEFGVALPTGHSVMKQLFSWLAQQRQPLPPLLMQELVELHEHYLLLNANIEKQDKKLKQLVEGDPVAQLLKTIPGIGDMTASLCVANISSATDFKNGRNMAAWLGLVPAQYSTGGKPKLLGISKRGNKELRTLFIHAARAVMSRPEKTGKIYGEWLMNLRATKPFNVATVALANKLARIAWAVMKTKQAFSDNALAPGLQ

SEQ ID NO: 75720 - protein, 344 aa, unidentified
MNYHTALDVSLRSVSICIIDDEGTIQFEAKVPSEVDEIVACLRRFSQEISSVGFEAGTLTQYLTYGFQAAGYEVICLEARQVSAALSAMRNKTDKNDARGIAQILRTGWYSRVHVKSMESHLIRALLSGRKTILKKCVDLENEIRGLIRLLGIKLPGPLKHGAYDALVRQAVEEQACMASTLIPLLDARLVLYKTYLKLDNQVKALVREDTICQRLMTVPGVGAITALTFKVGVDDPRRFKSSRTVAAHFGLTPRRYQSGEVDNPGRISRAGDPDVRSALYLAAHALVTRSKEWSSLKVWGIRLIKTKGRKRAVIAVARKLAVILHRMWLDGTDFRYGSTEAIN

SEQ ID NO: 75721 - protein, 374 aa, unidentified
MPTTNLQNSIGFNEQKFYIGMDVHKKSWAITIRSMGIQIAHFTQPPSPEALSGHLKKNYPGGLYYSAYEAGFCGTGIHEQLCALGINNIIIHAADIPTTDKQKKNKTDVHDSRCIAENLEKDNLQGIHVLTREQQELRSLFRLREGKVIDVTRANNRLKSYLFYYGIQLPAEVSKSEYLGNRALAWLSNLELAVEAGTISLKYYVEALQYQRQQLYQLTKQLRQQVQSCHAKTYECLLTVPGIGAVTAMGLLAEIGDFNRFTDPDEYCSFIGLTPWEDSSGDTIKTLGMQPRCNRHLRPLLIEASWTAVKKDRNLFAYYSKHAVKNSKKAIVKVARKLALIAKGVAQKQQPYDPDYLNKTKNTKSGKVLEVKTE

SEQ ID NO: 75722 - protein, 371 aa, unidentified
MPSARQLAERGKARKGRSIVRGAEPFSSKTSNGCLGTSPHSQARGVRRGKGTRLERPSEGQTVFVGIDVSKARLDVAFRPEGACFQVSNDEAGIGDCVRRLQALRPELIVVEATGGFETALVAGAAVVGLPIVVVNPKQVRHFAKAIGRLAKTDSIDAGVIARFAEAVRPEVRPIQNEAGELLTALLSRRRQVLEMMVAEKNRLVTMQERHVRQRITHHLHFLKQELRELDKDLDKEVRSTPAWREKEDLLKSVPGVGPVLARTLLAELPELGQLDRKRIASLVGVAPMNNDSGSLRGQRRIQGGRAQVRTVLYMAALVASRFNPRLKRFYDSLRARGKTGKVALVACMRKLLVILNALVRTGERWNAEAT

SEQ ID NO: 75723 - protein, 378 aa, unidentified
MKRIIRIGMDVHSKSYNLCALESIWGQKDRILAEAKVAATADEVARFIKALAKRYGLDEKTDILCGYEAGCFGYSLYHQLRERKIHCVILAPTTMPAPRGPRIKTDIRDAFEIARCLINGNYNHVYVLDDVDNDVKEYLRMRDDHKIAFKRIKQQIGAFCLRLGFQYSEGTRWTKRHLAWLRQLPLRAMQKETLDDYLLTYMHLEERLAQFDRRIEELASRERYQEKLKSLGCFLGMSTYNSLSLLVEVGDFERFAKAPQFSAFLGLVPGEHSSGDNINRLSISKAGNTHLRSLLIEAAQCYCRGIIGYKSKALKARQAGNAQEVIAYADRANVRLRKKYYRMLRHGKKRNVIVAAIARELACFIWGMMTKSYEREVA

SEQ ID NO: 75724 - protein, 439 aa, unidentified
MPTPYLTVLDPTAAAIDVGSEQLHVSIAGGPPKVFGTTTGELYALRDHLLVQGVHSVAMEATGIYWLCPYEVLEKAGLEVVVVNGKYVKNLPGRKTDMSDCQWQATLHAHGLLKPGFVPPEHIRRLQDYLRLRSDHIVMAGSHEQHMQKALERMNLKIHDVISDLTGVSGLKMVEAILAGQRNPVALVALCDPQIQKHKTKELRAALEGTWKEEHLFALRQAYELWQSYQQKIAECDQAIEAVLQVVAGPEDPKNPAPPATKRGGVNAPQISGLHAMLWRLCGGKDPTQLPGVADYVLLQLLSEVGTDLGKNWKTEKHFTAWLGLAPGSRQSGKRRGSQRRSRNRAGRLFCVIARSVGRSVDKALGGFYRRLKGRRGGLVANLALARKLAELFWRLMVHGVNYVEQGLKKYEEKVAQTEQRLLQKLARKYNMVLQPKLP

SEQ ID NO: 75725 - protein, 455 aa, unidentified
MPKRTTGDRPELNPVNVGAAAIDIGSKMHMAAVDPACTETPVRAFGTFTQDLHDLADWFKACGVTSVAMESTGVYWIPAYEVLEQHGFEVILVNARYAKNVPGRKTDVSDAAWLRQLHSYGLLRGSFRPDAVIATLRAYLRQRERLVEYAAAHIQHMQKALMEMNLQLHHVVSDITGATGMRIIRAIVAGERNPDVLATFRDVRCRSSIETIRAALVGNDRDEHIFALTQSLELYDTYQAKMLDCDHKLESSIAALTDKGAKPVGKLSRPRVKTKQVNTPSFDVRSALYGVLGVDLTEIHGLGPSLALKLIGECGTDLKAWPTAKHFTSWLCLAPGNKISGGKVLSSRTRRSSSRAAALLRLAATTIGRSDTALGAFYRRLSSRAGKAKAVTATARKIAVLFYNTLRHGMAYRDPGADHYEEQYRSRILANLKRRAKSMGFVLQAVPSDPEVAVS

SEQ ID NO: 75726 - protein, 416 aa, unidentified
MPLALPEARFFTGIDWASAEHAVCVLDAAGKIAAQFTIAHSAEGIASLVRRLARYGDPADLPVAIERPSGRLVDLLLEAGHPVVPVSPNAIKTWREGEVLSGAKSDAGDAAVIAEYLRLRYHRLQPAAPYCDETRALRTAVRTRDDLVQMRVAATNQLAALLDAHWPGAKAIFADVESPISLEFLTRYPTPAAARHLGQKRMAAFLVKHGYCGRRPAAQLLARLRDAPPGTTGDALTEALRDAVLAVVTVLQALNGAVKDLDRSAAAHLGEHPDGAIFTSLPRSGQINAAQMLAEWGDCRQAYAGPGSVAALAGVSPVTRQSGKHRGVGFRWACNKRFRRAITTFADNSRHASPWAAQVYADARAAGKDHPHAIRILARAWIRVIWPCWVNGVPYDPARHGAAAALAEQTSSQSAA

SEQ ID NO: 75727 - protein, 430 aa, unidentified
MKSNTQNAKIEAITETTLVLGIDVGSETHYARAFDFRGIEYSKKPFKFSNNEAGFMTFKAWILNIREKHGKDKVVPGMEPTGHYWFNLGKFLQDNEMKPVLVNPHHVKKSKELDDNNPTKNDRKDPKVIAGLVREGRYMIPYLPDGVYADLRTASNMRFQLQAELTRIQNRISRWFNIYFPEYKTVYGQPDAKSGMLILKIAPLPEDILTLGIDGVNQIWRNAKLRAVGKARAKTLIEAAEHSVGSKEGALSARMEIRMLLEDYESRNVRLQEVMALIEELVKQIPMAEKLLEIKGVGIKTVSGFLAEVGDISRFDNPKELQKLAGLALVENSSGKHKGETTISRRGRKRLRYLLFEVAMSLVAKNPEFRELHVYYTTRKRNPLKKMQSLMAVATKLIRVFYAMLTKGVDYDPKKMISDIKRPAVYLQAA

SEQ ID NO: 75728 - protein, 336 aa, unidentified
MGLDQHRAQISAEWIDTITGEVFRARIAPADRAGVRKFLAQFRGEDLEVALEATTGWRFVVEELERIGAEVHLAEPAEAAALKGKKKRAKTDWADARHLRELLLIGRLPESWIPPAHILDLRARVRTRHLLSHQRTEWQQRMHAVLYHHGFPQRHNLLSLENRGWIAGLRLPAAAREQLDIALQIIDALDIQLVPFDQELHVIARKQPGCRARIDQTYGVGDLTAVTILAELGDVRHFENSRDVVRYGGLDITVYQSDDHRAPGHLSRQGPPALRWALYEAAHRARFPASPDRPYYEQLAARIGGNRACLALARKLLKRTYHILKELGDQALAPVS

SEQ ID NO: 75729 - protein, 412 aa, unidentified
MEVVHAVCAGMDVSKTDAKVCVRVAGAGRCKTVETVTTWGAMTASILDLREHLAAAQVTCVVMEATGDYWKPFYYLLQDLPGVEVMLVNARHVKNLPGRKTDVADATWLAQLGAHGLVRGSFVPPAPIRRLRDLTRTRTAITRERGREAQRLEKLLEDAGIKLSVVASDILGVSGRAMLEALIAGQRDPGVLADLAKRRLRPKIPELTQALQGRFEEHHAFMARVHLDLIDQHTAAIEALTARIEQVIEPFRGFRDLICTIPGISTLTADVIVAEIGDDMSRFPTAAHLASWAGTTPGSNESAGKVKSSKTRPGNPYLQGALGAAAMSCAQHPGTYLNAKYRRIATRRGPQKANVAVQHAMLVAIWNMGTNGTLYDDPGADYFTRLNPERARTRAVQQLESLGYAVTLANAS

SEQ ID NO: 75730 - protein, 366 aa, unidentified
MKKISTVATNRNEIFKEPKLTIGLDLGDRSSHYCILDEAGEVILEHGLPTTPKGIHQVFSRIPRSRIALETGTHSPWVSRQLTQLGHEVIVAHARNVRLIGESSRKDDQLDARTLARLARIDPELLGPVCHRSAKAQIHLTVIRARAGLVSARTALVNTARGLTKSYGERLRKCGTGQMNREIAKGLSQELRDALEPLLGEIESLNERIAEYDGRIEQIAKEVHPEVAVLKQVKGVGTLIALTYVLTLDDPQRFRRSRDAGCFLGLRPGRRNSGMSEPQLHISKEGDRYLRTLMVQGAHYILGPFGQDSDLRRWGLKLAERGGKNAKKRAVVAVARKLAVLLHKLWVSGEVYEPLRNNHKVVSAVA

SEQ ID NO: 75731 - protein, 358 aa, unidentified
MQTKGTTINFQGQNVYVGIDVHLKTWKVTIMLEDIVYKTFSQDPSAEILYNYLKKNFPGAKYHSAYEAGFCGFSVHRGLERYGISNKVVNPADIPTKDKDKKQKEDKRDSRKIAKSLRNGDLEGIYVPSQSMEELRGLVRYRKTIVKEVSRHKNRIKSYLHLNGIEISPAMNSASQHWSGKFTEWLKTIEMTTSYGNMVLQETLDTVDHLRKKLLKINKELRDINKNSEYSSILKFIQSVPGIGLIMSITLLSELENILRFKNIDKLCSYVGLVPSTSSSGEKEKVGSITSRSNKPLRSGIIESAWVAIRLDPSLGHSYVELCKKMKPNEAIIRIAKKLLNRIKYVIKNETEYVHSVI

SEQ ID NO: 75732 - protein, 390 aa, unidentified
MQALYPRPDEHAAIRTDLKAIFVSLELSRSTWVITSLSPGGGEKMSKHAVPSGDIPALLARLSQLKEKARARTGQVFPIIVIQEAGLDGFWIHRVLQQEGIESHVVDPASIATSRRRRRAKTDKIDGEALVRALLAYKRGEPRVCAMVQAPTPHEEDRRRISREREVLTAERVQHVNRIKGLLFAQGIGDYEPLHRNRREGLEELITGDGRPLPECLKAQISRELDRLELLIDQVKAVEAERDAVLAQAQASSGVPAPAALLLALRGIGPEAAATLWTEGLFRTFSNRKQVAAYAGLAPTPWQSGAVHRDQGVSKAGNPRLRTIMIQIAWLWLRHQPQSALAVWFRARIKRTGGRLGKTMIVALARKLLVALWKYATAGVLIEGAALKPA

SEQ ID NO: 75733 - protein, 331 aa, unidentified
MVESTPIVAFDQHVASVVAAVLLPGQRTPALHTLAPDLPAISRFLERLHLGDVRCCYEAGPCGFELQRHLRGRGIHCDVIAPALIPRRAGSRVKTDRRDAAQLAVLYRAGALTAIHVPTEAEEAVRDLLRCREDINADLLRAKHRLSKFLLRHGRRCPDGKLWSKRFFAWLAVQRWPFTALEQTFLSYRRAIDDLIARRRTADEDLRGALTIEPLASRVARLRCFRGIDDLSALTIATELGDATRFAAARQVMAFTGLVPSEYSSGATRSRGGITKTATRTYAAFSSKRRGITAIGRRSGHPSAGDNRPRRPRPVAAPGWRSIVSMRGTAA

SEQ ID NO: 75734 - protein, 418 aa, unidentified
MTKKLDTTFIQIVHPVCCGLDVHKKKISACLITIDEQGKEQYEIKEFGTFTNDLFVMRKWLTDNNCPIVAMESTGVYWRPVHNVLEGFMEVILVNARHIKNVPGRKTDISDCKWLAGLLRHGLLRGSFIPPKEIRQWRELTRLRRSYTESLADYKRRIHKLFETANIKIDSVVSDLFGVTGRNLISLLCDESELSLANIKKNAKGTLKSKSNELHSSIHGFFEDHHRFQLIGMMEIITNFEQKITEITKRLNSLTAGHQNLLDRLDEIPGINKKSAQSIVSEIGVILDDFICMAALASWAGLCPGNNESAGKRKSGRSSVRSHPFKTILIEVAWAAIKKKGSYYRAKYFKLKARRGAKKAIVAIAHRISKAIYNIIKHGATFKDLGEDYLTTQTKQRAIKNIKNRAKQLGYKLVPCMN

SEQ ID NO: 75735 - protein, 373 aa, unidentified
MPRYSTAFGMDVHLRSTTVCALDAETGEAVTRRFRGNPWGEVAEWMSGFPGPSLAAYESGYLGFAPQRELSGLGVDCVVAAVSKVPRSAADFSSKNDRNDAARMAKAILSHDISPVWVPSPEIEGLRDLAGAHDAATARLAAAKQRLLAFLARRGYAYGGTTPAGNPRRYWTYDFLRWLDKVRPADDGGIRALAALRNEVEAAAETRDDLLAEYRAAVAAGPLSAEVEALQSIKGCGFALAAAFASEVGDFSRFRSGRQVTAYFGLAPKQRSSADSVRLGGISGAGNALVRRLAVEGSWSYVQASHQPKLMPKGSGVPLGVRIHGRKGSERLLRRREEMLARGMPQAKANAATAAELVRWLWALGAMCREATE

SEQ ID NO: 75736 - protein, 312 aa, unidentified
MNTIICGVDISKAWLDAKVGPAGASGRFDNDPTGIAKLEAFCRHHGVELVVMEASGGYERLAFLLLWEKGQPCALVNARNVRRFAEAMGFLEKTDDIDAGVIAHYGEVKRVCPTQPPSPAQQRLKALVSRLSQVTGDLTINKQRRSAATDAETIASLDEIIVLLKRQQRRIEGEIASLIDDDPLWDRLDKAFRQIKGVASRTVARLMAEVPEIGILSNKAIAKLVGLAPIANDSGKRQGRRPVRGGRAGPRSILFLIARGAARYDPNLAAFYQRLQEAGKPKMVARIALARKLLVILNAKARDARIEFANAT

SEQ ID NO: 75737 - protein, 344 aa, unidentified
MNQIIRIGMDTSKHIFQLHGVDATEQVVLRRKLRRNQVLEFFAKLPPTVIGIEACGAAHYWARELRRLGHEVKLMAPQHVKAYVKRNKNDGRDAEGLCEAMSRPTMQFVPVKTEEQQAALMLAGVRQQLIARRTQLGNAIRGYAAEFGLTAAKGLDKIEPLLAQIAQDETLPEMARELLALQGRDYARLQIELKAIEAKLMAWHRANPDSRRLAQIPGVGPIGATALVMKAPDPRLFPSGRHFAAWIGLTPKDHSTAGKTRLGKITRAGDEMLRSVLVAGATAVIKQAKRGRGSPWLLALLKRKSPKLAAVALANKIARIAWKLMVTGESYDGARMFGVSAFAA

SEQ ID NO: 75738 - protein, 448 aa, unidentified
MKKHNTENGLPIIHVRAAGIDIGSRFHVVAVPTTLAEEPVQTFQAFTADLERMATWLVELGITTVAMESTGVYWIPVYEILETHGLQVILANARDARAVPGRKTDVNDAQWIQRLHACGLLRASFHPEREIAALRSYLRLRERHLDYAAAHIQHMQKALTHMNLQLQHVVSDITGATGMRIIRAIVAGERNATMLAAMRDLRCQSSVETIQRALVGNYQPEHVFALSQALAMYDAYQAQISLCDEQIAQSLQQLSRGKPRPSKALPKPRHRTRQPNALNFDVRTLLYQLVGIDLTQIHGIGPYLALRLVAECGTDLSRWRTAQHFTSWLTLAPGCRISGGKVLSAHTRKTKNRVTAHLRLAAVTIGRTNTALGAFYRRLSARIGKAKAVTATARKIAVLFYNAMRFGMEYQDPGADHYEQQYRERVVKGLHRRAAEFGFTLQAIEGVS

SEQ ID NO: 75739 - protein, 441 aa, unidentified
MSAKPRFSNVVGAKFSPVNPIDTQPFYLGLDVSLQTGMACLLDALGQEFVPRWSFRNNRPGAEELAQKVAEILTSRRATTLLVGMESTGIYGWHLACFLSEIPLLRAWNTRVYMFNPYRTLNFKKAMGDLGKTDRVDALVVAQWLRLGHLPAPFAIDAVYGPLQRLTRFRCHLSETITREKLYTLGLLFFAFSEFGSTAPFRDPFGATSQAVLEEFSLDELATEPLEELSAYVARSGHGRFTKPGEVARTLQQAARDSFRLDKVHDSALRLVLGVSLTNIKTLARQLKEIDAAITRDLKAIPIAACLLSVPGLGPVYTAGLLAEIQDIHRFKDHAALAKFAGLTWRPYQSGDFIAEETPLTKTGNTYLRYYLVEAANSVRVREPEYRAYYQVKYNEATKHHHKRALALTARKLVRLVDALLRAAQLYLPPGQRHGGRVAPA

SEQ ID NO: 75740 - protein, 452 aa, unidentified
MDKGNNGLSRGDRNRNARLAALRAVLPRDHAILGIDLAQSRQAAVLADHDSRVLARWRPRCSPWMLGELLDRALRKALAAGYSGITVACEPTGHRWMVISQLAAARGMPMVCVQPLVVARAREAEDYTRGKNDDRDAVLIARLAAQLHCYLPEQADQGWARLRHLGARRSRLIEASTMCVQQLRDLLEVAWPAVLPAAADPLESATWLACLSAALSRGDGDLGAVHATGQDAFIAAARGGLGAWGARRICRRIAVAVYAALADGTGVQAQRPGALERAFSVLGDWQTVRGELADVNARMLQALDAMGVLEVAGSIPGVSALQVAAILAETGDPSRFTTARAMVKHAGLAPCENSSGNHAGQAAISRRGRPALRLAAWRAVWSALRHNAVYAARYAGLTGRDSDRLTDQQARAAIAAALIRQVHAIITRRIPWDADIAAGRRHPGQEVTAQAA

SEQ ID NO: 75741 - protein, 410 aa, unidentified
MDPIVECCAGLDVHQATVVACVNSGASNKRSGKEVRTFGTTRAALEEMRDWLATSGCTLVAMESTGIYWHPVYAALEGHFDLIVGNAQHIKNVPGRKTDVKDCEWISDLARHGLIARSFVPPRPIRDLRDLTRYRRKLSQAQASERNRLIKLLESANIKLSGLISDVIGVSGQAMLLALIEGQETPAEMAQHARKRMRRKVDALAQALNGRIDEHHRFMLRMQFARIKAAEADLERIDARLRENLVPYADPLRQLMTIPGVNWITAATIIAEIGIDMNAFRSAGHLASWTGICPGNHQSAGKQKTGKVRKGNVHLKTALVTAAVVVAKTRANYLGEKHRRLRARRGEMRAHVAIAHKILVAAYHILASGSEYRDLGPGYLDRIDQRRTAGQLARRLRDLGYEVEIKPKAA

SEQ ID NO: 75742 - protein, 313 aa, unidentified
MSQPVVHVGLDIAKAHLDVCALDQPHPVSRRFANRAQAHAALVSWLQQWPARHVVCEATGGYERRVVAALQQAQIPVSVVNPRHARDFARAQGRLAKTDRLDAHMLAQFGQRLQPPPTPPRSAVQQQLAELVARRTQLRGLHRAEHNRLEHLQHPAVRRQLRAHLRSLERQIDQVDQWLDKLTHTTSELHKKVQCLRAVRGVGPITAITLLATVPELGTLNRRQVAALVGVAPLNRDSGLRRGHRLIAGGRAAARAALYMAALVAAFSNPRFKVFYQRLIAAGKAPKVALVAVMRKLIILLNQLLKNPEFQPT

SEQ ID NO: 75743 - protein, 347 aa, unidentified
MGKAHVDLRSVTTVGLDLAKHVFQIHAVDADGRIVIATALRRKDVLSFFEALPPCVIGLEACGSAHHWARELVKLGHDARLMPPNYVKAYVRRQKNDAADAAAICEAVTRPSMRFVPIRSIGNQAILMHHKVRELLVSQRTQLLNALRGHLAEVGIIAAQGRNGAYALAAAILEGDSSIPLCVRDALAPIIRELQALNDEIAVSDRTILELAKADRTARRLMSVPGIGPITASAIAASVQDVGAFSGPREFAAFLGLAPRQNSSGGKERLGRVSKMGNRYLRKLLVVGAHAVLFHRKAHQDGLRVWAAKLIETKPFKLVAVAIANKLARIAFAVMRDGSVYGSAIAG

SEQ ID NO: 75744 - protein, 346 aa, unidentified
MEHYAGIDVSLEYSSVCVVDASGTIVRETKVESEPEALIAWFASLGLGLARIGLEAGPLSQWLYAAMRQAGLSVELLETRHVRDAFKAMPVKSDRNDARGIAQLMRLGWFRPVHCKSLAAQEVQAVLTARKLVQSKLRDVENSVRGILRGFGLKVGNTTPRRFAARIRELVDGHPQLKTVAAGLLSVHAVLLREFQTFEKQVRALVRQDARARRLMSTPGVGPIVALTYASAIDDPGRFSSSKQAGAHFGLTPKKYQSGETDYSGRISKIGDAAVRTALYEAAHIMLVKPLKGCTALKSWAMRIARRAGMKKAKVALARKLAVILHRMLVDGTVFNAAARTMTAAA

SEQ ID NO: 75745 - protein, 355 aa, unidentified
MHAITPDAVVIGVDTHKDVHVAVAINGLGARLATASFPVTSAGYRELAAWAAELGIVHAFGIEGTGSYGAGLTRALIAMGLRVIEVGRVNRQLRRRHGKTDTVDAESAARAALAGEATDEPKLGDGAVEMIRHLKIARDTALKARTQAMVTLKTLLVNAPQELRERFIGITGKMTLIRAIAALRPGAPVSTTASAKVALRALANRWLVLDAEIKEHDAVLEQLVRAQAPALMEAPGVSTGTIAEMLVVLGDNPQRIRSEAAFAKLCGVCPVPASSGKTSRHRLNRGGNRRANAALYRVAVVRMRYHRPTREYIQRRTNEGKSPREIRRCLKRYIAREIYRHLCTGGAPVRDAKTA

SEQ ID NO: 75746 - protein, 362 aa, unidentified
MYIGVDTHKKAHVLVAIDDQGRTGGTHTMANTPSGWAGALRWTRDLDATCIWGIENSGSLGKGFAQFLLVHGEAAVHEIVPHRTAQYRKRGRSQDKTDHTDALAMARLLRAEAEDLPSVQPDDLSTELRLLSDHRDNLIAERTRLINQLHAQMLQIDPCYEEKSGTLTRIAGVRYCGDLEAPHADGVLRTRLLIVRHLVGQILQLAEAIETVETALKQRVQASETPIVHLCGVGTIVAARLIGELGCIPRVHSAAALAALAGIAPVAVSSGGKGGHRLNRGGNRRLNRAFHMIALSQLRCEPLARAYYMKKRAEGKTGRAALRCLKRRLVDVVYRLWCKGVGEQVDGAPTHMTDPVVCRSAA

SEQ ID NO: 75747 - protein, 396 aa, unidentified
MAQAAVQNTTATPVLYVALELSKDTWKLGITLDRVSKAKIRDVRARDLDGLLAEIEAAKKHFNLPENTLVKSCYEAGRDGFWIHRFLLAHGIENVIIDPASIEVDRRSRKVKTDRVDAQKMAQLLARHGDGERVLRVVRVPPLESVDERILPRDLKALKKRREQAANKIQASLFEHGVDLNPRLGSFKDKDFLTALKAARQWDGKRLPPECLRSVKRSWQLYSLLTKQIKELEQRQRQVLREARAEPEKATSAARKAAILSQLRGVGDIGSYVLTTEFFGWRDFDNRSQVGALAGLTGTPFQSGNMGRDQGISKSGNPRVRTLMVELGWLWLRWQPDSRTTKWYHEHVGKGGSRAKRKAIVAVARKLLVEFWHFVEHGVVPTGAVLKTTNAEGSPA

SEQ ID NO: 75748 - protein, 351 aa, unidentified
MTHQTTTEAITTIGIDLGKNTFHLIGMDARGRIVLRRQVSRGQLLQCVANLPICLIGLEACAGAHHVGRQLAALGHDVRLLPAQYVKPFLKGHKNDYRDAEAIAEAAQRPTMRPVPLKSAEQLDLQALHRVRSRLVGQRTAVINQIRGFLLECGIPVRQGPAGLREALPTLLSHRTDVLSPRMIHLIEDLAGDWRRLDERIETLTRDITAVARQDAGCQRLMGIPGVGVITASAMVAAIGTGAAFSKGRDFAAWLGLVPKQISTGGRTILGGLSKRGNRYLRTLFVGGAQVLLQRPRHWDGHGFGRWLAAAGTRLHRNVLAAALANKLARIAWSVLSRENGYNPEYVARMS

SEQ ID NO: 75749 - protein, 392 aa, unidentified
MVCVGIDVAKDKHDCFIISSEGEVLANVFTITNNRDGLESLMQRIRSCTCPADKIRVGLEATGHYSYNILGFLLGKGLPTFVINPLHTNLYRKSLSLRQTKTDRIDARMIAAMLMSDVDLKSYTDTAYHNEELKSLTRYRFDKVRERAKLKQSVSRLVNILFPELESLVPSLHMASVYAVLSEFPGAKQIADAHLTHFKTVLANASKGRYGREKAVEIRDAARRSIGSAMPAKSLELQHTIRLIRELNKEIAEVESTIKPIIDEMAPPMLTIPGISYRLGAMILAEIGDFSRFGSPDKLLAFAGLSPSTYESGKLKATGGYAHMEKRGSRYLRYALFNAAKYVCISDPSFAAYLAKKRAEGKHYNVAVSHAAKKLVRLIFALQTSGKAYQPA

SEQ ID NO: 75750 - protein, 467 aa, unidentified
MKNYDYNLFVGIDVSKGKADAAVLAVPELRSVKPRFLRKKLSFKFIKADVAEFLNTVRKYSSDPHCLHTYFALEVTGIYSTNVYSFIKENCNSDEEIHQLNTDFVNKWRESHNISKSDPLDAQTISTIIGTDDDVRYVSDSVFENKNGYQDLKALVHRHYQIKKLYSQETNRLIALCDCYFPELQYVFEPKSAAFLAVLSQYPTSHDIINASKNEVFSLVYEASKHRCNMDKIDKLFNYAQDTLVPHVSDYIRCVIFNTVESIFNIRAQLKLIEKDIRKLAATFNVYSLLMTITGCGPLTAAVIIAETGDIFRFKNADHYVSYSGSSPRNKRSGKSVEIMGKISKKGSKYLRHALYMIAEFARRHNPVLKHLFERVKNGNKKRHKLAVIAVANRIARYIYSIMKNESSFVIMHENIMRLPEETRNTFFNSISLDFPKNTRKQIYQYSDVNGEIHRFVYKNETTESIA

SEQ ID NO: 75751 - protein, 311 aa, unidentified
MLNEYVYIGIDVAKATLELSPFGKGKTSIENTRASIASLLRRVQKANTPVMLCCEATGGYEKLLIRMALEQDIPMALLNAKAVRDFAKSKGILAKTDRIDALVIKGFAEQNTPIRLESPPQWRDELKALVTRRETLISMREAERNRLDPKPEKVIVKSIGRMEKQLDKEVKCMEEAVSELITSHPALKAIMQRLQQVKSIGPNTAQTLIAVLPELGKVTDKQIVALAGLAPYNDDSGAHRGIRRIQGGRVQARRVLYMAALVASVHNPILRAFYWRLKERGKPSKVALTAVMRKLVILANRIASDPDFIPA

SEQ ID NO: 75752 - protein, 351 aa, unidentified
MLIIGCDFHTRYQQIAMAEDSTGELLTERRLDHESGEAEAFYRSLSGAVRVGIEATGAIHWFVRLLAELGHELWIGDSAKIRASEVRKQKTDERDAALILDLLLSKRFPRIWVPTPAERDLRQLLWHRHKLVSLRTMLGNQLHFLAMSQGLCRKKKLFTKRGRGELVALTLGPWARRRREELLKLLDQLDPAITELDRAVLEEAKRREDAVLLMTHPGIGPVTSLAFVLAIGPVARFHCSKKVASYFGLNPREESSGGRRRLGAISKQGNTMVRWLLIETVHHAVRQDPELRQDYQRLKFRRGHAVAKVAIARKLAVRMYWMLRSGAAYAQLVRRQGSPGATLVDASPSLG

SEQ ID NO: 75753 - protein, 391 aa, unidentified
MIFVGIDVAKDTHYAAVSDDSGAVLVKPFAFQNNAEGFCLLLKKLSEFDRSKLLIGLESTGIYSENLICFLYESGFRLAVINPIQTATLRKTAIRKTKTDKVDTMLIIKSLMVNSYRLYSQRDADFLKLKTLCRFRQNLKKSKARLKIQLAGYVNLVFPEFGKFFKSGIHIAASYALLKKYSSPKEIAALRTSTLCTLLSKASHGRFGKDTAEALKSLALSSVGVKNPYISIQIAQTIAQIELLEQQIKDLNSAIEEAMESINSVLMTVPGIGAVNAACILGEIGDIKRFSKPCKLLAYAGLDPTVRQSGQFTAKSTRMSKRGSALLRFALINSAWQLTLNDTTFKAYYDLKRSQGLNHYGALGHVAHKLTRVIFKLLTSDTPFIPAKLVA

SEQ ID NO: 75754 - protein, 362 aa, unidentified
MSSKKNKPTIFVGVDFHKKRFVCSFFDNTTGEIIQKSYDTTGLSYDEFTKAVLEYRRLGKQVKVALEMLTGSYYFYDKMIDSCDEIVIINSNKFKVIAESCKKTDKIDSSTIAVYYSKDLLPTVYIPENSIRQLRDLVSLRYRFVKERSGYKNRIHSLLLKNGITISKRSLGSKKRLIELQGLGLSKFYQKELNILIDQVNRLTEEVLEIERMMDELIEEESGDRVKEDIELLKSIPGVGDLSAKILVSCIADIERFSEEKQLASYVGLVPRVRDSGGVIHHGRITRKGNKIARTTLVQDALAMLKQKNGPLKGFYKGIKYRSGTGKAIIALARKLSTIMFVILKTKREFDYLKYRSKLCGT

SEQ ID NO: 75755 - protein, 413 aa, unidentified
MKEVYRRCCGMDVHKDTVVVCVLPPVGGEGKAIRKTYGTFRNDLIRMRVWLKQLKVSEIAMESTGVYWRPLWNVLEDEGFRLLLVNPAQVKALAGRKSDGRDAQRIAEFLQDRRLDASFVPPAEIRQLRMMLRHRIALLEQRNEVHNQIRDLFETAGLKLSSVVSDLLGVSGRRILEALIAGEQSPEILCWKLRGRLRAKEKLVKESLKGYFTEFHRSMLESHYKHYRFLTSEIGIFEERIARAMKPYDSQIDLLVSIPGVDRIVAWHLIAELGMDPTTFPDADHCASWAGLVPGQNESAGKQKSTRCRKGNRTLRRVLTQAAWAASHCKAGYMPAFFRRVKSRRGWAKAIVATAHKILTIAFNVLRTGTPYHDLGHDYFDRLNPARATKKLVARLEALGHHVQLSPLARSNA

SEQ ID NO: 75756 - protein, 353 aa, unidentified
MAHQVKALVDGVDQFIGIDHHKRHSEVTIKNRDGQIVNRGSITTSKEAIKAILGEADGKVRLAVFEAGPYYRPMYRWLDELVDHVVLGHPGRLKIISETVYKDDKIDSGKLTDLGMLGMVPEAYVCGDDAWDRRMLLRQRAALVRMQTGIKNRIHALVDLHPDAEPPRPEVSDAFGKLGMAWLGKLKLPEADRKRLDQLVRLYEFIHKEIGKSDAAVCKIVRSDERCQWLKTVPGIGDFFAALIMAEVDHVERFRDAKHFVSYMGLVPRRDKSGQVDRKGRMHKQGSKWLRWALVEAAIPATKTNLALKNHYDRICRRKGEDDGPKLAKVAVANKLAWIVYRLLVEKRPYEER

SEQ ID NO: 75757 - protein, 411 aa, unidentified
MKAWNQITHYAGFDWAKDHHDVIVLDGGGKIVADFRFEHTAGGWEQFREKLAAFAGVAVAIETKFGTVIERLQEIDCCIFPVHPQSAKAYRQRKVPSGNKTDHVDAWSLADALRLDGANWKQLAPQEPLIKELRLLCRDEVALIRDRTALITQLRQTLYDYYPAALEAFDDWTMPAAWAFILAFPTPEALVKGGKRKWEKFLHTHKLGRPETYQRRLEIFARADRFAGSPPAIHAKSRLAVTRAKQLQLLQTQINEYRQEIRRLFAQHPDAGLFESLPGAGEKIAPRLLSEIGDDRALFPDAQALQCLAGTAPVSFQSGQIHRVHLRRQCNKSLRNAVHLWANLSREFCPWAETYYKALRAKGKSHACALRALGQRWLKIVWKMANARAVRRGLARPQSDQARLLGVAACQ

SEQ ID NO: 75758 - protein, 341 aa, unidentified
MPDGTICWFRSSFNKYLHWDPELRFQSCFQKRVCNNLDLILDDLAPFKDQLKGLVVESTYNWYWLVDGLTDASYDCVHLANPSAIRQYEGLKHSDDQHDAFFLAQLLILGILPQGYIYPKQDRPVRDLARKRMFLVKHKTAHILSLQSLIARCSGQRISSNELRTFRREDLQLLLKEEHLVLSAQANLDSISFFKQQIHGLEKVIKNKLKLSQAFNGLLTVPGIGNILAMTIMLEVGDIGRFAKVSNFTSYCRCAPSQRLSAGKSKGSGNRKNGNRYLSWAFSEAAQMSRRYNQRFRRYHDRKAAQTNTIVAARALSNKLARVCYYIMRDQVVFNEQLILH

SEQ ID NO: 75759 - protein, 319 aa, unidentified
MESPQVSFKQVVSRGCGLDVHKKVVVATIDGEGIKKQTREFGTVTSSLKELRDWLLEYGVTHVVMESTGVFWKPVYNVLEPAGLTVWIVNAAHVKYVPGHKTDKKDSAWLCKLLLAGLLKPSYIPAKEQRELRDLTRYRTTLIQSNASNKNRIIRILEDANIKLSSVLSSTSGVVGTKLIDKLCDGNEITMQDVEDVYHKKLEASKEDIYEACQGFVTEHHVYMLQIIRQEIAATLQTIENLNQRIKAALSPYENALELLKKVPGISSKSVEDLVAEIGLDMTVFPTEKHLSSWAGMSPGNNESAGKKKAGEQPRETSK

SEQ ID NO: 75760 - protein, 440 aa, unidentified
MSDTTTTAPEPAWAAFVGLDWGSQKHAWILEPAGGKREQGVVDNTPEAIAVWAADLRQRFGGQPVAIALEQKRGSVVNLLLPYAHLVLFPVPASMSASYRKTFVPSGAKDDPSDAGWMLDLLLRHRDRLRRLEPDEPNTRLLLMLVEDRRQLVDDKTRLALRLQDCLKQYFPQLLQWFDVDSALVADLLKRWPDLQHLQRCHDGTLRTFFRQHHYGEERIVQRIDAIRAAVAATHDPAVLEAGSMKARHLIASMATLRDQITRLEYRRDELVASHPDAPIFASFPGAGRSTVPRLIAAFGTRRERYQSAFEVVCDSGIAPVHIRSGKIDRVSIRRACQDFTRQTFHEFAGQTIPQCEWAKAFYRAHCLKPEQHHAVLRALAFKWIRILFRCWKDRQPYDDQLYLTSLRRRRTLLGHDLASATSAGWTTVAGFSKLSEKNS

SEQ ID NO: 75761 - protein, 387 aa, unidentified
MDIAKDSFSAAGLDAEGNECFSGSYSMDSGGFGKFLEIVTVHCPDLQKMLIAMESTGCYHINLFSFLISRGIRALIINPLLIANFAKRSLRKTKTDRKDARTIAKFLMENKEEIFQLSVSPDLQDLRDLARERESLSHLISATKVEIKRVLRTIFPELESIADLYTRVMLRFLQLYPSARLVKAAKPKAIAQALKQPYVGNKLTFSAEDILGAARSSVATASPAKEIILKGKISTLLHLQGRLEAVERLLTNLCNATRVEDLKILRSIKGVGPKTGVPFLAEMGSVDNFSSPKKLIAFAGMDSSVCQSGKFIGKSKLSKRGNRHLRRAIYLMTAAVVSHNAFFKAYFLKRKREGLIPQKALLATAHKLIRVIFARLSHRTYFQVKMA

SEQ ID NO: 75762 - protein, 349 aa, unidentified
MTTQRLSYVGQSVYVGVDVPKDTYAVTCVCNKQIVKTATAKADPAGLTASLSQWFPGARLYTAYEAGFSAFVLHRALTKAGIMNIVVNPASIAVAANDKVKTDRRDSKKLALDLSDGRLQGIYVPTEDEELARLLPRTRAQIVEHRATIARQIKAKLHQFGLIAPASRRLISNRYLREIDAWPLPPDLRVSLTFLAEQWRFATRQLIEMRRLLREQAKAHPAIEQVYRSVPGIGEVVARTLATELGDMTRFANERALFSYTGLTPSEYASGPSVRRGHISRQGSSRVRHLLIETAWRALPRDAVLKEIFDRIAATRGKKRAIVAIARRLTGRIRACFRQGTTYAVGTYA

SEQ ID NO: 75763 - protein, 417 aa, unidentified
MEDGRQEGIRDADGYTTLVGMDAHSAKVSLCVMRWRRGDDPVVTREFTTDLKGLEATYAKRIPAGALTVLEASTNAFAIARRLKAIGHKAEVLASDAASGMGRPDRVNDRIDARNLAIAYTKGKARTVRVPSPEYARLREIWFGYRNAVKDTVRHSNRLWGFCSANGLDLPKRSPVLKVAGIEKAVNGKEWEGDGAFHARMMLSEYAHARETRAAYERRIEEAVASNPRMARAMQVKGVRYVVAFALSAFVEDVRRFESAKKLVSYVGLNPSVADSGTKEGRRRVSRYGRHDLKALMVEAAQSALSKGGLPMHVWARRKLASGMSRHAVVCALARKMVCHLWHVLMGHPSPMAEPEKAFRCKLSRLAGKVGKAKIEALGHESAAKFVEGVLATVRWQAAGDAAGDAAAGEGPPDRQR

SEQ ID NO: 75764 - protein, 351 aa, unidentified
MPRTSTVRAVTTIGIDMGKSTLHMVGLDSLGAIVLRERVSRGRITSRLANLPPCLIGIEAGMATHYVARDLAALGHDVKQVPPGYAKPFRQGHKNDFRDAHAVAEAVQRPTTRFVPAKTNEQLDLQALHRVRSRLVGERTAVINQIRGFLLERGIMVRQGQRFLRHLLPDILAKRTDVLSPRMVRIVSDLVGDWRQLDERIETVTDEIETLAKSDDNCRRVMTVPGIGPLISSAMVAAIGNGTAFAKGRDYSAWLGLVPKQMSTGDRTILGRLSKRGNGYLRMLFMQAARVILLRPTNWPKHGFGAWLVRAAQRLHPNVLAAALANKLARIAWTVLAQQRSYEARVTKAAA

SEQ ID NO: 75765 - protein, 420 aa, unidentified
MEEVTDEPAELVERVAALDIGKASLVCCVRVPHESRPGARRQEVRTYDTVTPALLELRDWLICQGVTRVVMEATSAYWKPPFYLLEDDIECWVVNARDVKNVPGRPKTDKIDSVWLCKLAERGMLRPSFIPARPQRQLRDLTRYRRTLTQERSREKQRAEKLLEDAQVKLSSVISDIFGVSGRDMLAALIAGQRDPHALANLARKTMRAKIGVLRQALTGHFTEHHAFLLAMMLDRVDALTAQIDTLTARIEEAIAPLAAQVAQLDEIPGIGVTTAQEIIAEIGTDMTRFPTPGHLVSWAKFAPKARQSAGRSKAATTGKGNPWLGGTIGEAAAGAARTSTFLAARYKRVVKRRGKKRALVAVGNSILTICWHLLSDPGAHFTDLGPDWHDRLAPQRRKHQLIAELERLSGKKVTLHDAA

SEQ ID NO: 75766 - protein, 356 aa, unidentified
MSYNSIFFIGIDLGDKQSVVITLDQDGEVIEESRISTTQKAFTRKFKGISSSRIAMEVGVHSRWASQTLKDLGHEVIVADARKLRLIYKNPRKDDRVDAEYLARLARLDPKLLSPIFHRSQEAQAHLAVLRSRNILVRTRTMLINHVRSTVKSTGARLPSCSTTSFHKQVPEFIPQDLLPALTPVLDHIATLTQQIYAYDYQIEKLCRDRYPETKSLRNVSGVGHLTALAFVLTLEDPRRFQKSREVGPCLGLVPRQDQSGEHDPQLHITKTGNGYLRRLLVHSAHYILGPFGEDSDLRRWGLKIAERGGKNAKKRAVVGLARKLAVLLHRLWITGEVYEPFFASGLKVSSELTVA

SEQ ID NO: 75767 - protein, 342 aa, unidentified
MRGFAARKFEGEDESMVTPALGIDVSKDRLDIELAAAGKPRAKCFGNSPEGWRQLMAWLKEQKIKRVHACLEATGRYSLGVALALCEAGHIVSIVNPAQIRDFARTKLGRNKTDGVDAGHIREYAEIFKPLPWIPPSPAMRRLGELQTIRAGIVSSLTEWKNRCESGLADDTVLALAKATIAHFAAQLAAVDKAIARTVADDSELSAKRDLLLSISGVGEVLAGLVLAELPGTNILRSSGQAVAYAGLNPRLHRSGSSIDRPTRISKIGNATLRAALYMPALSAMRHNPVVAALAARLRAQGRLKGKQIAVAAMRKLLVLCFGVLKSGKPFDPAVAMPTRGI

SEQ ID NO: 75768 - protein, 342 aa, unidentified
MKHYVGLDVSQRETAVCVVSEIGQLVFEGKAKSDPGALTNLLHKHAPLAERIGFETGAMASWLWHELRRVELPVVCIDARHANAALSVRMNKSDQNDARGLAELVRVGWYREVKVKSEKSQKIRAMLVARSRLVSMRRDIENQVRSLIKECGLLFPRAIGQQFRNRVSELLGEDHQLVSVVAPLLSIHEHICLQQGKFDDEVRRLAKSDETTRRLMTVPGVGVVTALTFRHTIDDPSRFRSASTVGAYLGLTPRRNQSGETDTSGKISRWGDRLLRTYLFEAATVLLYRTKKWSSLKAWGVKLAKRIGMKKAKVAIARKIAVILHCIWVDGTSFEWGQATPA

SEQ ID NO: 75769 - protein, 381 aa, unidentified
MAKNISRTVKKTATAVDVGAAQPRRADDGLTSVPPRYQAVVGLDVGDRQSSYCVLDLQGGVVAEGAVKTTDASFRVLFEGKGRMRIALEAGTHSPWISRLLSALDHEVLVANPRKLRLIAESDAKHDRADARLLARLAHVGPALLSPIHARSAQTQIDLTVIRAREVAVQTRTKIVNAVRGMVKSTGHRLPASPTLTFARKAMAACPEALQPALVPLIRLVQTLTDDIAAYDRLVVEKARTYPETEAIQTIHGVGPLTAVAFVLVLNNDRSRFKRSRDVGCYLGLRPKQRDSGMRTPELGITKAGDPLLRRLATQSAQYILGPFGRDSTLRRWGLSLASRGAKNAKKRAVVAVARKLVVLMHRLWITQEHYDPMRGIRVAA

SEQ ID NO: 75770 - protein, 286 aa, unidentified
MSKKKLDLCLRSNGKDILYDVIPNDLSSIKSWLTRTFEKFFLSEDSLVVCAEHTGQYTYPLVCATKSIGVYLCLEDAAKIKYCHGIPRGKNDKIDACRIAMYAERYNDCLQPYTASELIIQKLKNLSTERSMLVADRAKYQSQLKDQVDYMEHSIYIAKCNRVEGIINTFTDYIAQIDLEIKELINQAPVIAHQMDLLMSVDGVGERVALKMIMETDAFTSFTDPRKFCCHAGVVPFVYVSGSSQRSKNRVSNRADKSIKHLLHMAALSVSQVKNSPLKKYYDRKV

SEQ ID NO: 75771 - protein, 320 aa, unidentified
MSKDTFVGIDVSNPWLDVATRPATKQLRVSNDAAGISEIVSILSEQGPELVVVEATGGLESPLVAALSVGGLPVAVVNPRQVRDFAKATGKLAKTDALDAEVLAHFAEAVKPQVRELADEKAQHLSALLARRQQLIQMLTAEKNRLKRATKPVQCRLKAHIAYLDKELDEVDSELSDAIKESPLWREKENILRSVPGIGPVSSATLLSGLPELGRISNKQIAALVGVAPLNRDSGTYRGKRKVWGGRKRVRRTLYMAALVASRSNPVIRVFYERLLEAGKAKKVALTACMRKLLIILNAMIRKSTLWDEHRYVSQVQTSS

SEQ ID NO: 75772 - protein, 387 aa, unidentified
MGEDGRVLEQRRVSHSVAGIGELHALVAAHAEDGEPVAAGIEVDRGLVVTALLAAGYQVYAVNPMASSRYRDRHSVSGAKSDRGDAKVLADLVRTDRHNHRQLAGDSDLAEAVKVLARSHQSAIWSRQRQVNALRSALREYYPAALAAFGTDLAASDAVAVLSLAPTPDAGRALSRSKIASALRRAGRQRNTGQRASEIQAALRAGYLQAPPAVTRAHGAAARSAIRLISAHTAEIAELEEALSEDFEQHPDAKIARSLPGLGTVLGARVLGEFGDDRTRFTSPKSRKNYAGTSPITRASGRSHIVLARHARNRRLADALDQWAFCSLTQSPGARHYYDQLRARGKTHRQALRQLANRWVGILHTCLQHGQLYDEAAAWQHLKAAAA

SEQ ID NO: 75773 - protein, 364 aa, unidentified
MEAPVIGHRTSVGLDVHARSVVGCALDGDTGEVWERRLTPNYQDIWDWLRSLPGPVAVTYEAGPTGFGLARFLIAAGVLCLVGAPSKLQRPSGDRVKTDARDAAHLARLLHLGQIVEVSVPSAEQEAARDLVRAREDCRGDLMSSRHRVSKLLLRQGIVYCGGRTWTGKHEGWLRGQRFDAAPLQLAYDTALDTMLATVDRRNRLDEAIAKLAADSAYTPVVTRLGCLRGVSTLTAFGLAVEIGDWDRLTGRSIGAYLGLVPTEYSSGASRSQGPITKTGNGHARRLLIEAAWHHRQPYRPGVDLRRRWDAASPPARARGQQANRRLHTRWSRFDARKKRPVVANTAIARELAGWCWSLAVLDT

SEQ ID NO: 75774 - protein, 406 aa, unidentified
MELKPIFQRVIGLDIHQAQVTACAIIGNPDGTVEVERRQFGGFKKDRRALADWCATWQPDAVVMESTGIYWKSPYAALEQVGIRAQVVNARHVKQVPGRKTDVGDAEWLAMLARAGLLRGSFVPPAPLRELRLIARQRQKLVGMLASEKNRLHKVLTDGGIRLGVVVSDIHGQSARAMIKALFQGATPQEVLSLASHRLKASREEILDALQGDLSACHRFVLDEVMHHIEALEAQIARFDTRLLDGLAPQQHALALLQTLPGVDTIGAALLLVEIGDDMKAFGSADRLASWAGLCPGNNESAGKRKSGRTRKGNPYVRRVLCECAHAASRTQCALRTKFQNLVVRRGHKRSIIALAHKMLRIIYFMLSRGTYYRDAATDYEALSVQRNAARWIKKLIKFGFLPDPA

SEQ ID NO: 75775 - protein, 385 aa, unidentified
MAPPRMPEAVIGLDVGKSSHWACVATRDGEILLSAPVANREGDLDSLFGRFPDALVVVDQSRNIGALALARAKAAGMSAAYLPGLAAHGAARLFAGDAKTDERDAMVIAKTALGIPDALLPVGDPGPTVAAARALAAQRNFLTCENTRSKNRLRSILLESCPAFEALVDLSDGPQLRLMASLGGAWSVADAGPRRAAALTRGAARGKIEALVRSTASSTRPDAAAIAAEDRAVRLLARRISENSAEIEAITAEISALLEGDDTYRCLLTVPGIGPKTASELAISIDIEDFPSHDRLASYCGLAPRNRQSGTSISSVTASRQGNKRLKNLLIFSCNCLTRTEGRWGDYYARCRERGMPHGKALKALARKRLKVIYAIMRDRVPYAA

SEQ ID NO: 75776 - protein, 391 aa, unidentified
MIYVGIDVAKDKHDCFITNSNGEVLFKAFTISNNQDGFNILYQRIESVMEDVTKVKVGLEATGHYNYNLLGYLIDKGLTTYVINPLHTNLYRKSLSLRLTKTDKVDARTIAYMLMSDVNLKSYSNTSYHNEELKSLTRYRFDKVKERSKLKTSVSRLVCILFPELEKLVPTLHMASVYALLSEFPGAKHVAGAHLTRLTNLLSDASKGRYGKDTAITFREAARASIGSNMPAKSLELKHTIKLILELGSEIDEIENEIKIIMDEINSPILSIPGINYRMGAMIIAEIGDFSRFDSPDKILAYSGFSPSTYQSGQLDSAYSHMEKRGSKYLRYALYNAAKYVCHWDSTFAGYLAKKRAEGKHYNVAISHAVKKLVRVIYHLVKSNQQYIKVA

SEQ ID NO: 75777 - protein, 410 aa, unidentified
MEVLYPRCAGLDVHKESVVACVRLQDGGAVRRDVQTFKTTTAGLLALSAWLSEHGCTHVAMEATGVYWRPVWHILSDGEFGLVLANAAHVKNVPGRKTDVKDAVWLADLMAHGLIRGSFVPDRQTQEMRTMLRTRKQLVRERSSHVQRLQKTLEDANIKLDAVITDILGVSGRAMVEALIAGETDPDILARLADRRLRASPYELREALRGRVTSHHRFMLQLHLDQVAAVDRAVGRIDDQVKADLDPFRQAVKLLKTLPGLNDLGAQSVIAEIGVDMSRYPSDDHLISWACLCPRNDESAGKKRSTRMRKGSPWLKATLIQCAWAATRVKESYFQAQFYRLRARRGAKKAIGAVAASILRAAYHMLKNGTDYHDLGADHFAKRDKTASTRRLVRHLHHLGYDVQLTPVTA

SEQ ID NO: 75778 - protein, 436 aa, unidentified
MNTGVTSWSARSAFAGFDWAREHHDIVVVNAQGVVVEEFRIEESAEGWQRLREKFSVYPEVAVAVETSSGMVVERLLEAGCAVFPVNPKSAQRYRERKAPSGTKTDRVDAWSLADALRLDGHTWRRLLPDDPLTVELRLLCRDEITLIGQRTALVCQLRAALHEYYPAALSAFGDWTAPSSWTFIERFPTPQRLLAAGKRQWEKFLHTQKLYHSEALYEKRLAVFAAAESFCGSAAVTNAKSLLAVTLSVQLRTLQKHLDEYRRKITELFDRHPDHDLFGSLPGAGEKLAPRLLAELGDDRGRFDSAEGLQCYAGTAPVNYQSGQVRKSRIRRACQKALRGTVHLWSDLSRRSCPWAQAYYRQKREQGKSHACALRCLGQRWLKILWKMWQTRTAYDAEQHHRNQLRHGSWVLALVPAANPSAPGSQNPSQPVERL

SEQ ID NO: 75779 - protein, 355 aa, unidentified
MEHVSTIQSEICIGIDLGDRHSHLCVLDHATGEIQEESRIPTTKKALRRRFRGSTPCRVAIEVGAQSPWISRLLEEAGHEVIVANSRKLRLVYENDTKNDRVDAEYLARLAAADPKLLHPIRHRNLKTQQHRAVIIARDQCVACRTRLINTIRGLTKSLGERLPSASTRYFHRKMRPLIPEDLRPAVDPMLDALEILQQKINELEKLIDVMNEQEYPETALLRQVAGVGPVTSLNFVLTIEDPSRFKNSRAVGSYVGLRPKMKSSGKGDPELRITKAGDRMLRKHLVQAAQYILGAFGPDTDLRRWGLKLAGRGGKNAKKRATIAVARKLAVLLHRLWVSGEQYEPLRNSEPGSA

SEQ ID NO: 75780 - protein, 423 aa, unidentified
MTKRSSNPTDAVLVAIDMSKHRQEVLIERPEGGRRRRMTVMATKADYDRLATDLSDIGRPIIVGFEATGNYHRTLAHRLLSAGFELRLISSVALARTREALHNGWDKNDSKDAQVILHMLRIGATQRYVDPLAAGINDLQEMSKTHEAISKAKTQTWHRILTHYLPLYFPEIERFAGNSRSDWFLALLERFPTPASMTVLGQETFSREAWDLVGRKVSKARLINDIYETACASVALPVDEDSVSIAMFRMVIAQARNLIRQRDEIERTAHAMLAENRDYQLLRMIPGIGPINALTILAEAGDLRRFSHHRQFLKFCGLDLATRQPGTFRGRTMLSKYGNARLRRTFWMAAQVAARQRNNSFRDKLGRYTAGHADDADRRRKAMTALTAKMARVAHAVIKTGTEYRPFLERSDARWKDPSLQVP

SEQ ID NO: 75781 - protein, 410 aa, unidentified
MSRENDYSVLIGLDWARAKHDVCLQYADGTREFAVVKHSAEAIEQWIVQLHKVHQGQIAVALELSKGPIVYALQKYAFVTLFPINPTMLCRYRRALSPSCAKDDPTDAFIALELLIRYPDKITPLKMSDTKIRKLAFLVEERRRLVDEKKRYANRLINTLHQYYPQPLEWFSHRDSELFMEFIIRWPTLEKLKRAKPETVSRFLTSRGSFAKLVAPRLEAIKKAKSLTNDEVVIESNSLLAITLANQIRPIIAAIRTFDQKIETLFHTMPDARIYESLPGVGKCLGPRLLVAFGEDRGRFESAQEVQKYAGIAPVTERSGKTTWVHWRWGCSKFIRQTFIEWSAKTVRYSYWAQLYYEQQRKKGNTHQRAVRSLAFKWIRVLYCCWKSKTPYDETKYLKVLKERNSPLLG

SEQ ID NO: 75782 - protein, 372 aa, unidentified
MNYNTVYVGMDVHKESFSLCAYTIEAEKASHYQRTEADYKKVLNYLEFLRTIYGDDANFICGYEAGCLGYTLYHQLTANNVKCIILAPTTMLEQRSKKRIKTDKRDAEIIAKCLAQHNYSPVHIPTAKDEETKEFLRMRDDHKLALKKVKQQILAFCLRHNYRYDGNSHWTAAHLKWLKALTPEALYKEILDEYLLTYQTLSDKLERLDKRIEELSTQDEYKEAVKKLCCFIGVKTHTALSVLVEVGDFNRFASAQHFASYLGLVPGEDSSGNDQNRLGITKAGNRHVRLLLTEASQCYARGQVGFKSKELKARQSGNTPAVIAYADKANERLRRRYYKMVLNKCKKHNVAKTAIARELACFMWGMMTDNIA

SEQ ID NO: 75783 - protein, 424 aa, unidentified
MNQNQSFAAFIGLDKSDKKINVTLQRCSTARSQRSIIQGSAEALHAWVAALCARFLHQPVAICVEQPAAGLIHALMGYDFVVLFPINPVTLARYREAFTPSRAKDDPTDADLLCELVAQHRDQLKVWQPDDICTRKLRHLTQARRSSVNMRTRLSNQLKALLKGYFPQALELCGEDLTTPLACAFLQKWSSLQQLKKARPETIRRFYYAQNARRGDVIEKRLTLIAQAIALTNDPALIESSIVTAQALTLGLRAAHTAIARFDREIARTFTQHPDASLFAALPGSGTVYSARLLAAFGSRRERFESAEALLNFSGIAPVVKRSGQATKIHRRYARPIFLHQSFIEYANESIRHSLWARAFYQMHKAAQQSHWVIIRALAYKWIRILFRCWQERTPYDELRYLKSLQKHGSPLLQYLAQPNTQTV

SEQ ID NO: 75784 - protein, 338 aa, unidentified
MLSIGLDAHERTSSLCILDASGRTVKELTLKGHPRRVLQWLRELDEPFKICFEASTNYGWLYDELKAIAAEVLVAHPGRLRLIFRSRRKNDRIDAARLAKLLYLGELPLVHVPGVDVRAWRGLIEHRQRCVRERTRGKNGIRALLRTHGIQMPSRMRLWTHKGRAWLAELDMPTTVAALRRDQFLDDLEHHDRKIHRLETMLGTIGDRQSGMVLLQTIPGVGMRTAEAFLAYVDDPQRFRGRSIGAYLGMVPRQDASGGVNRLGRITREGPATVRQMLAEATWQAVRRSRTVRQRFERICQGRPDRRKKALIATAHYLARVMIGMLNTGEAWREEVTA

SEQ ID NO: 75785 - protein, 432 aa, unidentified
MDVVFPRCAGLDVHKKRITACRIVPDPTGQKAEGITELQPFGTMTRDLLALADWLTEASITHVAMESTGEYWKPVYNLLEDTFTVFLVNAAHVKNVPGRKTDKADARWLAKLMRFGLLQASFIPPKGQRDLRDLTRYRTKLVQERVREVNRVQGVLERANIKLASVIADIMGVSGRAMLEALIAGRADPATMAALAKRRMRSKIPVLEHALTGIVHDHHRQLLAMQLAHIDFLDEQIEALNAAIETSLQALSTAEPSREAQPLPLTFIRAVELLDTIPGIDQRGAEVIVAEIGIDMSRFETAPRLAAWAGVAPGNDESAGKQRSGKTRKGNRPLRAILTQLAHAAVRTKDTYLSALYQRLAVRRGKKRAIIAVAHSIMCSVFHMLSRNEVSREMGANYFDERRRQFTVDRLPRRIERLGYRVHLEPVAASAA

SEQ ID NO: 75786 - protein, 357 aa, unidentified
MSNVPVFVGLDYHQDAIQVCVLDQQGEVLMNRSAPNDVRELGRIVGPLGVVQRVAIEACCGAADLGEELVEQLKWNVSLGHPAYISKIKSSPDKSDFSDGRLLADLTRVGYLPRVWLAPARIRELRQLVNHRQRLVDHGRAIKLQVGAILREQRVKIHKDCGCRWSKAWTAAARDNLQLSEQGRWIVNDLLDELKHAREKIEKVQQRLREATEADAVVQKLMTQPGIGEVTAWVLRAYVGDFSRFKTAKQLARYCGMSPCNASSGKRQADAGLIDGCNKLLRLTVVQAAHRLIRNSQRWSDLAGSMRARGKAACVIVGAVGNRWLRNLHHAMKMDAQPTDTKQTNARLTDKKGTPRN

SEQ ID NO: 75787 - protein, 338 aa, unidentified
MNEITTIGLDLAKQVFHVVGCDARGKEVKRKRLRRGQVRAYFANLAACVVGMEACAGAHFWARELGALGHEVRLVPAQHVKAYLRGNKNDYNDARAIAEAAQRPDMRFVRVKTVEQQDVQALHRLRAGRVKERTALCNQVRGLLAESGVVLAQGVGRLRRRLPEVLEDAENGLSDDMRPLFGECYEQLCELDAHIESYTRALQAHAKRTAAVQRLQTVPGFGPVVASAFHAFVGDGRGFHRGRDVSAAVGLVPKHHGTAGKTVLLGISKRGDRYLRALLVHGARSVLQRASGKEDRLSRWVMGVQAERGTHKAIVALANKMARIGWAVLRQDTTYRAA

SEQ ID NO: 75788 - protein, 345 aa, unidentified
MKITTVGIDLAKNVFQVHGVDEHGKTVLRKQLKRDQVVAFFANITQCLIGMEACGSAHHWARKLRDLGHDVRLMATQFVKPYVKTNKNDVTDAEAICEAVGRPNMRFVPIKNIEQQAVLALHRVRQGFVKARTAQANQIRGLLAEFGLVIPQGIAHIAKRVLELIEDASNELPGSFRLLVQRLLEQLKELDRQVHEIENQIIIWHRTNDVSRKLARVPGIGPITASAMVASIGDAKSFKNGRQVSAWIGLVPKQNSTDGKTVLLGMSKRGDSYLRTLLIQGARSVIYAAQRKETPDDGWLSRLLKRRNANVAAVARANKNARIIWALLSSDREFRSDYATVIAVA

SEQ ID NO: 75789 - protein, 322 aa, unidentified
MAMLSFGGIDVSKDRLDITVLPDEQCSSVSNDAAGWAELVEQLRGSSITAIGVEASGGYERGVVRALLAAGMSVRQINPFKLRQFAKASGTLAKNDRLDARMIASFVAVMPTRPAQRQAPMIEQLAAMLTVRRQLSEQKVATENASRLLEGAMLQRLSRRRVAGLTADINLLDQRLVEIVTADAALAHRFRLLTSMPGVGAVLACTLIALLPELGQMSRKQVAALVGLAPYDFDSGKLKGRRCIWGGRARVRHVLYMAALSASNWNPGLKAFHDRLAATGKKPKVVIVAVMRKMITTLNAMLRDGTAWVDRYSGRRSATTAR

SEQ ID NO: 75790 - protein, 348 aa, unidentified
MDIVKQAVGIDVSQKELVVCLGRMDSDFTPELYAHKVFNNTEHGFKTLLLWVKTHTLESIKLRFVMEATGVYHESFAYFLDEKGYELSVVLPNKISNYIRSFNLKSKNDKSDSRAIAMFGLERKLDSWHRPKPIYREMKQLTRERDQVLHERTMVKNQLHAEKVEAHPNKRSIERLNERIKLLNSQEKEIKTEISDLIKADNLILEIVGIICTIPGIGLVTAAIILAETNGFELIKNKRQLVSYAGLDVRERQSGTSINGKARITKRGNKHLRKALYFPAWTAIRYDERFKLTFSRHVSKHGVKMKVGVVIQRKLLELVFALYKTRKPYDKEYLNEYEEGMKNKVAVV

SEQ ID NO: 75791 - protein, 383 aa, unidentified
MGAVARTQLRETPVKQNRTCVGLDVHARSVWACTVDDESGEMRTSRISPKTAEIVKWAQALPGEVEVAYEAGPTGFGLARALIAAGMQCHVLAPSKMERPSGDRVKTDKRDCEWIARLVRLGELPVVVIPSEGQEAARDLVRAREDVRGDLMRSRHRLSKLLLRQGIVYEDTAWTAAHGKWLRSQSFDKPGVQFAFDEAYDTVLTTLARRDRLDKAILTMAAEPAWAPVVARLGCLRGVGTLTGFGLAVEIGDWHRFTGNSIGSFLGMTPSEHSSGGSRSVGSITKTGNGHARRLLVESSWHHRKPYRLSAEMIRRRDGQSPLVRARADQANRRLNQRWRTFDARKKRPTVAAVGVARELAGWCWSLAVMDGEKDNSAMNRQR

SEQ ID NO: 75792 - protein, 345 aa, unidentified
MVEISTIGLDIAKAVFQVHGVDEAGSVVVRRQLRRGEVLKFFSGLAPCVVGMEACGSRHYWARQVAALGHRVRLLPPAQVKPYVKRGKKNDAADAAAICEAASRPHLQAVPVRSAENQAVLLLHRTRDLLVRQRTMLICAVRSHLAEFGVVAGQGKGNFTKLVERLESEEGEALPALARLALGSLTAQIADQEARIDVLEKEIVAWHRSDPASRRLASIPGIGPITASAIAATVPDLSIFKSGRQFSGWLGIVPGQNSSGGKQRLGRITKTGNRYIRRLLVIGATGLIRYRRTNIPGGAHWVNQLLARKPARLVTVALANKMARIAWAVLCRGQIYRQAAAMPAA

SEQ ID NO: 75793 - protein, 385 aa, unidentified
MKGKTFKPTDYEVFGGLDVDKRSISVTFTNHQGFIRSLRMPYSVEHLVNHVRKHFGDQKVAFAYEAGPTGYGLYDGLVAKAYPCLIASPSMIPKAPGQRVKTNRLDSRGLSENLRGGQLRSIHVPCALYRELRHLTQLRDTFVSEMVGMKQRIKSLLLFEGIEFPPAPAGRQWSFMVKDKLRKLECSKTVRFKLDQLLDSLEFSEKQVLKATREIRRFCRNDAELSQCIEYLMTIPGIGWIVASQLVARIGDWRELKNIRQLGGFLGLVPTENSTGERTDRGSITHTGDGRLRSKLIQASWSAIRQDGELRQFFRSVCQTHARHLACRVAIVAVARKLSVRLSVVLMKQRPYEVRQKVQSAPLTQEETSPQGTTRRLREPGEKNS

SEQ ID NO: 75794 - protein, 311 aa, unidentified
MSSIGIDVSKRLLDCSTALDEAKQFSNDITGVEQLIEWLHQLSITPTRVVLEATGRYHSLCASLLSQAGLPVIIANPRQVRDFAKAMGILAKTDKLDAKVIALFGERIQPKVLPLKEDQALLLEAHLLRRRQLLDMIGSETNRLSVAPKVIEKTISAHITYLKKQLVEVDDDLDKLISESPLMAKKFDILTSMTGMGRVTALNLLGNLPELGCVEHKKLSALVGLCPYSRDSGLMRGKRMIFGGRASVRKAIYMAALVASRHNEVIRAFYQRLVEKGKPKKVALVACMRKMLLILNAMIRDMKIWQPTSVV

SEQ ID NO: 75795 - protein, 378 aa, unidentified
MIATTRPEISVSEPTLFVAFELGKKEWKLAMTSGFGVDPWLRTIVSGDLRAVERALRDGRRRFGLPVAAPVVSCYEAGRDGFWIHRALTQLGIRNRLVDSASIEVNRRARRAKTDRLDALKLVRMLVRVCYGEKKVWSEVRVPTVMAEAARHVTRERTALTQDQTRVINQMRGWLATWGAALPSRRRGSWWASVRDWAGAALPAEVQARLARAATRLEVLAGQIAALEAQQHAAVTAAAPASAVRRLVQLKGVATTSASVLLDEGLVWRAFQNRRQIGGFLGFAPTPYASGESEREQGISRAGNTRLQAISIQLAWNWVRWQPLSALTQWYREHFGTGKRARRIGIVAVARKLVIALWRYVTIGVVPTGAILKVASRA

SEQ ID NO: 75796 - protein, 323 aa, unidentified
MMAEPAEIQCVLGLDVSRNTVTLCDGRTRHTVTIANDADALRTALLPYQGTATLAVCEATGGHEDTLLGVLLELAIPAHRADPAKVKAYIKSFGKRAKNDPIDARWLSRYGRDRAATLPRWQSADPTQQKLELLVARRLDLVAMRVQEQNRLKAPRSRLIADNIRDHLAELERHIEALNAEIGALIGESRDLALRAEQLRSVPGVGPVLAPLLLAVIPELGTLNRRQVASLAGVAPHPKDSGKASWHRSTTGGRRQIRPALFIAALAACRGDNPLAAAYKALLKAAKPKRVALTAIMRKIITIANARVRDAVRHQNEIMQINA

SEQ ID NO: 75797 - protein, 406 aa, unidentified
MTAATSFKVIIGLDVGKTGHHACALSADGSRRYFDKPLPQDESKLRDLFTSLQAHGPVLLVVDQPNTIGALPVAVARDCSVAVAYLPGLAMRKAAALHPGTAKTDKRDAFIIAETARTIPATLRKVDHNDEALSTLKALAGFDEDITRDCSRTINRLRSALLQIHPALERVFAGGTITRSAVLDLLEHYGGPTKLRAAGKSRVTAWINRRCRGDHTDLVAAIFHALDQQTVVVPGTSAIERTIPLLASNIKMFKKQRDLIAAEVNEVIDALPLYEILTSIPGVGVGIATSILMAVGDCSDFPDATHLASYAGIAPTTRRSGTSIRGEHPSRAGNKRLKNALFRSAWISTNCHEASRDYYQRKRREGKRHNAAVMCLARRRCNMIYAMLTRKEFFRDEPRTPILAAA

SEQ ID NO: 75798 - protein, 350 aa, unidentified
MVVVGADVHKRTHTFVAVDQAGRKLGEKVVAATTVGHHKALVWARAEFGNELVWGIEDCRHLSARLERDLLSAGQQVVRVPPKLMAQTRASARTRGKSDPIDALAVARAVLREPDLPVASHDAISRELKLLIDRREDLVAQRTSAINRLLWRVHELDPERAPKPRSLDLAKHRELLRAWLATQPGLVAELARDELADISRLTEAINALAKRITERVRVVSPALLALPGCAELTAAKLVGETAGVSRFKSESAFARHAGVAPIPVWSGNTTGRVRMTRSGNRQLNAALHRIAVTQVRLDGIGRAYYRKRRDAGASKTEALRCLKRRLARVVFHHLHTDHQTRNQPCQTAAA

SEQ ID NO: 75799 - protein, 386 aa, unidentified
MQKLNDLSRSLTALEPDGTLIAVIEMSLSSWLVAGIVPGIERQPLKKLAVDESALLKLLHRWREEAEKAGRRIERIAVAFEAGRDGFWLARWLKARGIEAHVIHASSVAVSREHRRAKTDRLDTELLKRSFLGWLRGERDHCKMVEIPTMQDEDAKRPNREHDSLIGERSRIVNRMKAALVRLGIRGFNPKLKRATTRLDGLLTPEGEPIPPNALAELRRDMERRRLVNNQIRQIEEERLERIEQAPCDGPHVMVRLLARVMGVGIETADMLVHEVLSRNMRDRRAVARYAGLTGSPDESGRKRREKGLARSGNARVRRGMIQLAWRFLLHQKNSALTKWFRSRTENARGTRKPMIVALARKLLIALWRLVREGIVPDGVVLRPVQ

SEQ ID NO: 75800 - protein, 412 aa, unidentified
MARVIGMDVHRDFAQVVVLDGDQLRHFGRVRLDKDSLTTFADRLMADDEVVLEATGNTFAIVRVLRHKVRRVAVANPLQVRLIAHAKIKTDKIDAAALAQLHASGFLPEIWVPDPETEALRRQFTRRSQLVRHRTRLKNEVHAILNANLIGRCPVTDLFAATGRKWLAEQALPIADRDAIDRGFREIDRVGNDLAALDRGLAAQSIDDKRLHHLMTITGIDVVSGLGLLATIGDHTRFASSEKLVSYLGLNPSVRQSGSGPARHGRITKRGANQARALLVEAAWAAARVPGPLRSFFMRVMSRRGSQVAAVATARKLAAIIWHVLNRQEDYVFARPSLVARKRRSAELRAGKPRQRGRRGIAAGYYCAETRAEERERLENAERAYERVVSGWRQAGPGSRPTNPSPESNTST

SEQ ID NO: 75801 - protein, 385 aa, unidentified
MTVRTVSRAATHGETVRCLFAIELSKQSWVIGFITPLSSRISRRILSGGDWKGLLELIEEVRARVSREMGRTVEVMSCYEAGYDGFWLHRQLEAHGVRNYVIDPASLQVDRRVRRVKTDRIDTERLLRSLMAYLRGEPKVWSVVRVPSVAEEDARRLHRERDRLICERVQHVNRIKGLCALQGIYDYHPLRPQAVARLEQLRTAQGGALPPRLKSEIKRELHRLEVVVEMITTLEAERDAIVEDEASTHVNAEKIQALHKLKAIGPEFAAVLVGEIFHRDFNNRRQLASYVGYAPSPFQSGNVAHDQGISKAGNRKGRTTGIELAWLWLRYQPDSDLSVWFRARVGTVKGRIRRIAIVALARKLLVALWRYLETGLVPRGAVLKG

SEQ ID NO: 75802 - protein, 407 aa, unidentified
MDVVYERCAGIDVHKEFLYICVLIGPGRGQKFKFKFGTFPHELIQLRQKLVELRVTHVLMESTGVYWMPVYDALEGFMEIVVGNAQHIMHVPGRKTDETDAEWMVKLLRCGLVKPSFVPPRPFRELRQLTRYRRAVVQARASEQNRVEKHLQIAGVKLSSVASCVFGVSGANMLKHIGEGKTDPTELAELALGRLRKKIPQLKNAFAGSISEHTQQLISMQMDQMNRLECTIAEVELKIDQKVSPYAEILARLDEIPGIDDRTAMDILAETGIDMSPWPTHRQFAAMAGLCPGNYISAGKRLKNRSRQGNPYLKSTMVQAAASAINKDGSYFQSKFKRLKQRRGHKRALVAIAHAMFVAIYHMIKNGAPYRELGADYVTQHENGSKKNDLVKQLEKMGYAVSLTETA

SEQ ID NO: 75803 - protein, 389 aa, unidentified
MEARSVNRLPPAGTHDDAVRCVLAIELSKKSWIVAVNTPLAEKISRHTLKPGDGKELLDLCERIRTRVARETKKRVEIVSCYEAGYDGFWLHRLLETHGIRNYVIDPASLQVDRRARRAKTDRVDVERLLRSLMAYLRGEPKVWSVVRVPSVAEEDDRRLHRERGRLISERIQHVNRIKGLLAIHGIYNYQPLRRDRMQQLERLRSADGRRLPPRLKAEILRELKRLELIIGMIKTIEAERDAIASAKTETEHGSAKKIQELAKIKCIGPEFATTLVGEVFYRSFDNRRQLASYVGLTPAHFQSGSMCRDQGISKAGNAKARTVMIELAWLWLRHQPDSPLSVWFRERVGKLKGRIRRITIVAVARKLLIGLWRYLETGLVPESAALKV

SEQ ID NO: 75804 - protein, 343 aa, unidentified
MSEVTTIGLDLAKNVFQVHGIDALGQVVVRRQLRRSQLLPFFGKQAACVVGIEACATSHHWAREIAKLGHEVRLMPARYVKPYVKRNKNDAADAEAICEAVTRPTMRFVAVKTEEQQSVLMLHRTRQLFVRQRTTLINAIRAHMAEFGIVAGVGRNGVERLLRLIEEESDERVPPAARQCLKALRAQLVLVKRQILEADRRILAWHRSNELSRRLETIPGVGPLIATALVASIPDPHAFGSARDVPAWIGLVPKQNSTGGKERLGSISKAGNRYLRSLLVVGALSVIRRAKQVGYTRRAWLADLMARRPVKVAAIALANKIARIAWALMVSGTRYKEPVPQAV

SEQ ID NO: 75805 - protein, 335 aa, unidentified
MDLCIGIDVSKAHLDLALMNASGAVLGTERITNESKAIRALLKRWHKQFGVTKANALFCLEPTGHYGYLLVEELMRAGLPTWLAHPLDIKHSIGSTRGKNDRIDAQRIADYARRHHDKARLLGPGSLRMNKLKQLLTCRRQLVTDKRRHQVRIKDLNRHVDRSLRALFDRLSQERIEQIDTQLEKIEAAIVDHIHADPRLREQYVLLLSVDGVGPVLAAHLLACTEGFTRFATARRLACQAGVAPYEHSSGSSIHGRTRVSPQADRVLKTLLHMAALGVIARAGELQDYYKRKRAEGKAPMLVINAVRCKILHRLFAVVQRGTPFVRTPLAQVIE

SEQ ID NO: 75806 - protein, 365 aa, unidentified
MNLNTATKAGQIIGTMNGLQVIGLDIAKNVFQLHSVDMSTGEIINIQIKRAKVQEYFVNKPPCLIAIEACGGAHHWAREFTAMGHSVRLLHAKIVRPFVAGNKTDATDARAIWLTVQQPGVKFVGIKSTEQQATLTLHRQREMMMKMCIMQTNALRGLLYEFGATFAQGRQALFKDVEKVLEGLADQLPQMVRDSLREQVARIKSVIEDIKAIEKRLKVQLRQDRQMQRIFQIPGVGLLTATAAIATMGEASAFKSGREFCAWLGLVPSQTGTGGRVRLGNISKRGDTYLRTLIIHGARSVLAHTKEPGPWLGALKGRRPASVVIVAQAAKMARTIWAVTAKEQDYKRDFQSVRPTAAAKAAVQA

SEQ ID NO: 75807 - protein, 412 aa, unidentified
MDVVYERCCGLDVHKRTVVACLLTPGPQGQPQKAVRTFGTMTGDVLALAEWLAAAGCSHVAMEGTGVYWQPIWNLLEDRFVLLLVNARHVKAVPGRKTDVKDAEWLADLLRYGLLAGSFVPDREQRELREVTRYRTALLRERAATANRLQKTLEAANLKLASVVTDITGKSSRAMLRALIAGETEPTRLPALAEGRLREKIPQLEQALVGRFGPHQRFLVAQQLDHLDFLDERIAQISAEVATRTQPLAAAVAQLDAIPGVGQRTAEVLVAEVGTNMARFPTADHLASWAGMCPGNRQSAGRQLSGKTRKGSPWLRAALAEAAQAAGRTKGSSLQAQYRRLAARRGKQRAMVAVGHTILRIAYHLLQDPASVYDERGAHDVTERTRQAIERDLVRRLQQLGNTVVLHPVGAT

SEQ ID NO: 75808 - protein, 352 aa, unidentified
MDYFAGLDVSLEMTSICIVDADGVVMKEAKVASEPDDLVAFFEQCGMAMKRIGLEAGAPSQWLYGGMAEAGLPVVCIETRHAKAALSAMPNKTDRNDARGIANIMRTGWFRAVHVKTQTAQELRFLLVARQTLVRKLMDIELAIRGMLRSFGLKMGVVSKRNFEARVLELAGDRAMLMRALNPMLTARRALALEYTKLQKVAMDFARDDDVCRRLMTVPGVGPIVALTYRATIDVPSRFRRSKSVGAHLGLTPRAYQSGEADWTGRVSKSGDAMARAALYEAAHILLIRVKRWSSLKAWGMRLVKNRGHKRAVTALARRMAVLMHRIWVEGTTFIWKTGDGQAITPKSVPAV

SEQ ID NO: 75809 - protein, 411 aa, unidentified
MVEVVVQRCVGIDVSKRDAKVCVRVQGRGSRKTSAQVTTWSATTPQILKLRAMLVEQQVELVVMESTSDYWRPFFYLLSEQLNVILVRATDVRALPGRKSDVSDAEWLADLAAHGLVRASFVPPESIRQLRDLTRARTFLFGERTREVQRLEKELEDACIKLTGVVSSLQGPSSRAMLEALVNREDDPAVLAELARGKLRARIDELTEALTGRVNDHHRFMVRFRLDRIDQATTDIDRLDQRIDELVEREGFTAARDLICSIPGIGKHGAEELVAEFGIDMEVFATPAQMASWVGVAPGSRESAGIKKRVRARPGNHYAKRALGIAAMSATRSKTTFMSARFRRIRSRQGYAKALIAVEHSIVIAIWHMLSNGEYYQDLGADYYNRRTPDRVLRRKIKDLEIAGYTVTKAA

SEQ ID NO: 75810 - protein, 332 aa, unidentified
MDIVYLSIIHQNKNAMSRVSFEQVILRGCGLDVHKDVVVATISGEGLSTETRSYKTFSSSLTELKEWLLSNGITHAAMESTGVYWKPVYKILECPQMKVWVVNARHIKYVPGHKTDKKDSAWICKLLLAGLLKPSYIPEREQRELRDLTRYRNKLIQHVSSNKNRIVRILEDCNIKLSSVMSHLDGVVATKLIDILIDKGHVTMDDIACVYHKRLEASPELLYQACEGFIEPHHTYMLQTIRKDIEQTESILSDLTSRIKEVLSPYENVIDLLRKIPGLDRKTVEDLIAEIGVDMEVFPTEKHLASWAGICPGNNESAGKKKVEEPLMATNS

SEQ ID NO: 75811 - protein, 350 aa, unidentified
MQYLGIDWGTRRAAWCALTRAGELQEGMISADEDGLLRLVARLGPDVYGCIEMMSGAAWVRDRLAECDWEIEIADARKVKAIAPLACKTDKVDARVLADLARRDLVPAIWVPSLDDRAIRERLRRRAHLIRLRTSAINRTFGLQTQWGLRRNLTALRKPGALDELADAGVPEVWRHSIATLLGVIDDLDRQLAPLERELRPLARADERAKLLMTIPGVAELLALTIASEIGDISRFPSARKLVGYAGLAPRVKQSGQSSHTGRLSKAGPATLRWAAVEASQHAWRPTNPWNGLYTDIKRRHGKANPAKAAVARKVLIASWHVLSLGEPFKPSASRTTDPVPASSSIRLAA

SEQ ID NO: 75812 - protein, 355 aa, unidentified
MNDAKYIGLDVHQATISVAVRDSDGKLVMEATLETKAETILQFVRGLRGSLHVTFEEGTCAAWLYALLKPHVTQVLVCDPRKNALLKVGNKNDRIDARKLAELLRANLLSSVFHEDTGLRAIRELARGYLTMTKDLTRVMVRLKALYRSWAIPCATKQVYAPRHRAEWLAKIKEASVRRRAELYYQQLDALRSLQQQVKKELLIEGRKHSATKLLRQIPSIGPIRAVLLLSLIQTPHRFRTKRQLWSYCGLALETRTSAEYRVVHGQLQRSKKPVAIRGLNKNHNHDLKNLFKGAALRAAAVERPFQEFYAALVAKGIKPEMARLTLARKIAAITLIVWKKGARFDAEQLKQQAA

SEQ ID NO: 75813 - protein, 386 aa, unidentified
MAHSTNIPQHSIDYDQTLILAIELSNKSWVLAAQVPGLSQTKAKRTIEPDKNHLLAAIEGYRSRAAAAGRSVKRVITSYEAGWCGFWLARWLMAHGVEVHVVQPSSVPVDRRMRRGKSDGIDAELLLRTLLAWLRGEPRVCSMVPIPHEADEDARRCVRERSELVSERVGLVNRIGAVLATLGTDDYNPLLQSRRRRLIELRTGLGDPIPPNALAKIGRLLTRLELVLTQIAELELERDAVARADAPDQAGRMIQQLISLRGIGVQSATVLVREAFVRRFANGKALGSYAGLTSTPYSSGGIDREQGIGKAGNRRLRTVMVELAWLWQRYQPGTAQVVWFRERVGSTGRRLRKVMVVALARKLLIALWRFVIDGLMPEGAVTKPSI

SEQ ID NO: 75814 - protein, 424 aa, unidentified
MVIVDEDERNLSVAVFCGIDWAEDHHDIALVDQDATLLAKRRIGDDAAGFAALLQLLAEAGDNPNEPIPVAIETSHGLLVAGLRATGRPVFPINPMSVSRYRDRHSVARRKSDAGDAFVLANILRTDLAAHRPLPADSELAQAIAVLARAQQDAVWARTDAHNKLRSLLREFYPAILQAFASKRGGLLRPETRALLAAAPTPRAAARLTLSQLRALLRRAGLQHGLDTEAERLKQMLRADYLHHPELVEEAFGQQALALLRQLDTACANAEQLATATAERFTQHPNAAIITSLPGLAELTGARVLAEIGDDRARFADARGLKAYAGSAPVTRASGKTTAVLHRRVKNQRLASVGYVWAFAALTASPGARAHYDRRKAAGDRHVAAQRNLFNRLLGCLHHCLHTRQTYNEAVAFPTQQATDTRAA

SEQ ID NO: 75815 - protein, 338 aa, unidentified
MYYTGIDLHKFTSYLTTIDSDGCIVKQANIKNVDYNFLQYFSDLAGEHQTTVESTCTWYWLNDLLNSINIPLILAHAKYVKAIAYAKVKTDKVDSHILAQLLRLNFIPQAHKISNENRTLRDALRARLKIVQRCTSVTNSMALVLAKYNLTEPEGLQNIPKLQYEQLSDHASLLKEQMLTLEKSLYPYLIPNEDIQRLLWIPGIGKMNAFTIVLEADDINRFADVKNFFSYCRLVPSARNSAGKSKQRSSKDGNRYLKIVFTDAATHAVQYYSEIRKYHNSLLRKKNKQIAKTIIAKEIAEIVFHILKNKTNFNNKFKGVELQHKKSLQWPRVVSPYA

SEQ ID NO: 75816 - protein, 343 aa, unidentified
MKLTRVGVDLAKQVFQVHGVDRAERSVWCKRLKRNRWIEEIEQNVEAGAEIGMEACGGAHHWGRLLQSKGYRVRLIAPQFVKPYVKSNKTDANDAQAVCEAMSRPSMRFVAVKTIEQQDIQAVHRVRASLISERVAKANQLRGLAYEYGLVAPREIAALRRAVPAWLEDATNGLTVRLRTLLSGLYADLQALDERVRELDKEIRAIGQENEAVGRVQQLRGIGPLIASALVAMIGDARQFKNGRQVAVALGLTPRQHSSGSKERILGISKRGDSYVRTLLIHGARSALRTAAGKNDRLSRWALALAQRSHANVAATALANKMARVAWAMLKHGTTYEPNGLAA

SEQ ID NO: 75817 - protein, 343 aa, unidentified
MQTITTIGLDIAKSVFQVHGVDAAGQVFIRRQLKRRTVLAFFEKLPPCLVGIEACASSHHWSRELQALGHTVRLMPPAYVKPYVKRHKNDATDAEAICEAVTRANMRFVATKTPEQQSCLTLHRTRHLLIRQQTSVINAIRAHLAEFGIVAPIGRNGVEQLLGVVADANDKRLPEVARACVAALGVQLRMLKAQILEFDRMISAWHRSNETSRRLDKAPGIGPVLATALVATVADPRTFRSGRNFSAWIGLVPKQHSSGGKHRFGHISKQGDRYLRGLFVAGALAVIRYAKIHGTKHRPWLTALLTRRPTKIAAIALANKIARMAWAMMVKGERYKEPVALAA

SEQ ID NO: 75818 - protein, 319 aa, unidentified
MVIGIDVAKAELVVARGSSGEVATYANDEGAVRTLVQELAGRSVELIVLEATGGYEVLGASALASAGLPVVVVNPRQVRDFAKATGQLAKTDRLDARVLALFGERVRPAVRALPDEQTRELEAVLTRRRQLLEMRQAERNRLLQGVGPGARPIQHSLKKHIAYLDRELELTETDLRRRIQESPMWRARDNLLQSAPGVGTVTSETLMAQLPELGQLDRRAIGKLVGVVPLNHDSGTWRGRRTIYSGRAQVRAVLYMATLAAKRCNPVIKAFYERLLAAGKPKKVALVACMRKLLTILNSMVRTSQHWRTPDHPVPTMAQ

SEQ ID NO: 75819 - protein, 372 aa, unidentified
MTSNIKYIGMDVHKESISVAVMNATGKFVMECVIETKASTILQCIDGLRGDLHVTFEEGTSAAWLYDLLKPHVTELIVCDPRKNASMREDNQNDKIDARRLAELLRIDHLSPVYHGEHGLRTLKELVRSYLTVTKDLARVKTRIKAIYRSSAIPYKGKEVYAACHRAEWLAKIKELGVRRRAEFYYQELDALRMLRQEVRRELVAESRKQKAWKRLCQIPAIGPIRAAVLLGILQTPLRFRTKRPLWKYSGLAIETCSSADHRSINGQLQRSKKNSVRGLNQNCNHDLKNLFKGAAVSASSKPGPFQEFYAALLAKGMRPEMARLTLARKIATIVLIVWNKGVCFDAQHLKPQTSRSAASDTPVVPAWRPLL

SEQ ID NO: 75820 - protein, 448 aa, unidentified
MTKRRKPSNRGQMTPPLVQPDAAGIDIGATEIYVAVPPDRDPEPVRSFETFTPDLIALADWLQACGIRSVAMESTGVFWIPLFQILEERGLEVCLVNARHVKNVPGRKTDVLDCQWLQYLHSVGLLHASFRPKQAVCALRALLRHRDNLVRMSCQHIQHIQKALSQMNLQLHHVISDITGTTGLAILDAVIRGERNPDTLAELRDRRIKASAETIAKSLVGDYRPEHLFTLGQSVASYRYYRKLMADCDGEIQRQLEDFESKAEPPPTQPAQKLSARRQVEENLTQQHWRILGVDLTAVPGISSPTVQVLLAEIGPDWSKFRSASAFASWLGLCPHNQISGGQVLSSRTRKVNNRAATAFRLAANSLHHSHSYLGEYYRRMRAKLGAPKAITAAAHKLARIAYHLLTTGQAYEESVFAAQETKSKQRAQTRLEAQARALGFHLAPIAG

SEQ ID NO: 75821 - protein, 335 aa, unidentified
MNLLVLKGVPMALKIVYKICCGIDVHKTFVVACIASTNDKGITSYESHRFSTYTSGLKTLLQWLLDRNCKDVCMESTGKYWIPVYNILESDCSIVLAHPKYVKAIRGKKTDKKDAKWIADLFKHDLVAGSFMPPADIRQLRDLMRYRFKLTCFKSSEKNRLQNCLTVSNIQLGNVVSDTFGKSAQAILDKLLENPADTSFDLEPLVYKSLKKKLPELRDAIDGYITPEQAGKLKVIKAHYENLESRKAELEELILALAAPYQQELTILQTAPGISSPFTAIGIISEIGTNMEAFPSAKHLCSWAGLTPTNNESAGKKKSVQVSKAVWMKSATCLA

SEQ ID NO: 75822 - protein, 445 aa, unidentified
MNSTVRYVGLDVHKDTVVIAVAESNAAPAEVLRVVQHEAGAVLKQLRKLGPLSSLEVCYEAGPTGFGLQRCLAAAGVSCTVVAPSLVPQQSGKRIKTDRRDACRLAHFLRSGDLTAVYVPAEETEAMRDLERARDDAKDAERTARHQLGKFLLRQGRRYDGGHAWTMRHWRWIEDQKFSHEGHQQVLLDYIRTAQRASERVRLFDLEIAVLVQSWSLAPLVRDLQAFYGISLVTAVGLAAEVGDYHRFPGADRFMSFVGLVPSESSSGGQRQQGGITKTGNRHLRRLLVEAGWQYYRCPRLAVSAALRRPREEVPQAVIDVADKARYRLMLQARKFKICGKSPKKSVIALARELAGFVWAAARLSLPVVEAHSRRSRQNENPTISPAGKRPQVGLSPPVRGACRVVLQPSVREPHDTPPSPFGRRKRSEKGTTRSSPKSKSNDCH

SEQ ID NO: 75823 - protein, 334 aa, unidentified
MWHVGIDLHRATVVIAAVNDAGEAKDAVTIRCEETALIVETIRKLGTFRAVIEASGTYRWLYDLLRPYGTILLAHPLRLRAMIQRRSKTDKLDAQLLANLLRINQIPLAYIPPEPYQQLRDLTRSRARLARQQAVAKVELRALLARRNWQSPYRTPFGVRGLAWFRKQDFGPMDNLIRDELLSRIEHFRRQRVIFDEQLVKVAEDFPQTEALTTIYGIGSYSALMIIAELGEVERFHKAKQVGAYAGLISRVRQSGGHCYRGSISREGSPWLRWILVPAAMKAVRKDEKLKSFSTRVRKRSSAKSARVATARKLAEICWKRLRRWHAEHATAPA

SEQ ID NO: 75824 - protein, 419 aa, unidentified
MNYVGFDWASRAHDVTVLDEAGGVLDRWAFPHSETGWVTTLDRLARHGSAAEVPVIIERTSGLIVDRLLAAGHPVVPVHPTAFYAARPRWGASGAKSDPGDSYKLADYLRTDGHRLRRLTPTDPGLHELQALVRLRDDQVRARTAATNQLTAILDTYWPGPKQLFMSLASQIALAFLTDYPTPTSAARLGEARMAAFCRRHAYRGGKSPAELLSRLRAAPVAPVGLPPVTLAAMVTAQVTVLKTLQTVISDVERLIAIRVVAHPRSNLFENLPGVGMINLAQLLAEVGPILDRVDSAEQAATECGAAPVTRSSGQTRGVYFRWAANTRARKAITSFAHNARMQDDWAAALYAGARARGKRNPHATRIVARAWLRVIWACWTSGQPYNPDRHHSSRFLHRCHPAGAQARSRCSPPPEERS

SEQ ID NO: 75825 - protein, 388 aa, unidentified
MDMIDAVSNAPIQTTISAIFFSMELSRSQWLITSLSPGGGERMSKHVMPAGDVGGLLEQLDAIRSKAEAKTGRVFPFVSIQEAGLDGFWIHRVLDREGIESHVVDPASIATSRRRRRAKTDRLDGETLLRTLLAFKRGDPRVCSMVVVPTPEEEDRRRNSRERKALVHERVSLVNRLKGLLFSQGVTGYESLKSDRWERFAELVTGDGRPIGEHLRAAAERILDRIELILAQLKTIERVRDSLVAQQPAADQSPACPAQLMTLRGVGPDFAEVLWSEGLYRHFDNRRQLASYAGLSPSPWQSGSINSEQGISKAGNPRLRSIMVQLSWFWLLHQPDSALSRWFHDRVKLDGGRRKKLTIVALARKLLIALWKFARHGVVIEGAVFKSA

SEQ ID NO: 75826 - protein, 352 aa, unidentified
MIVIGADTHKSSHTLVAVDATSGQRLAVVTVASTSSGAFDALGWARRVAADGRVWAVEDCRHVSGRLERCLVSAGEAVMRVAPRLMAGARAGGRERGKSDPIDALAVARVALREGIERLPVARLEGAELDVRLLLDHHDDLVAARSDQQRRLRWHLHDLYDDLDIPPGALDRSVWLDRIAGRLRRSPKTTRVRIARELVAHIRQATRRIHQLDREIAVLVNQVCPQLVAEVGCGPLTAAKLVGEIAGADRYSSDAKLARTAGVAPIPASSGRRHRHRLDRGGNRQLNLALHRLAINRARHDPQTAAYLTRKQAEGKTRKEALRCLKRHLARRVWHLLTNDPTKTPRTTAALT

SEQ ID NO: 75827 - protein, 347 aa, unidentified
MNTGTITAVGIDVSKHKSTVDARRPGGEVVLLPFDVEHTAEGLKKLITKLRQLDGEIRIIMEHTGKYWRPIAMTLKEAGFYVSVVNAILIHNFSDNSIRKVKTDRADAMKIANYGLTFWIDLQEYAGEDENRQLLKIQSRLYERTATTAGMLRNGLISLLDQTFPGANKLFRDESRNSRGHVKWIDFVLRFWHKECVAALSLATFTDTFQKWCKRTGYKFSASDAERIHAIARNAVATLPKNDSTKHKGALVAYAGVDASPYQSGSFDSKSRHVSKRGSPHLRRVLFVIMSMTLIRANTANPVFCFMDKKRAEGKHFYVYTVAGSAKFLRIYYAKVKEYLNALEETA

SEQ ID NO: 75828 - protein, 465 aa, unidentified
MTTHKKWMNRKERKELTRRLQSENPGLEVMHPQAAGIDVGNSAHYVAVRPDRDPEPVRRFECFTSDLHRLADWLKSCRVETVALQSTGVYWIPLYEILEEHGFEVYLVNARHTKNLPGRKSDVQESQWLLKLHTYGLLNNSFQPPAEIRVLRTYWRQRAEHVSGAATCIQRMQKALTQMNLQLANVISDLSGTTGQAIVRAIVAGERNPQELAQLSHPRIEASREEIAKSLEGNWRPELVFVLRQEVEMYDTYQQRIAECDQQLQKHLASFADTVLPQSPEREPKEKKAKPTKNAPRFDLGSELQRITGVDLTRIDGIDVMVTQTLLSEVGMDMSRWNTEAHFSSWLGLCPDNRISGDKLLGKGTRHVVNRAATALRLAARNLIRSRSYLGAQYRRLRTKLGAPKAITAMAHRLARLVYRMLKYGQRYVDKGTEYYENRYRQQQIHLLQKKAAKLGLQITVAVQS

SEQ ID NO: 75829 - protein, 342 aa, unidentified
MHIASIGIDLGKTTFHLVALDEHGKPVIRKKFSRKQILAYTANLPHSLIGMEACAGAHFIGAALRDQGHEVRLIPAQFVKPFVKSNKNDFIDAEAIAEAVSRQNMRFVPIKTDDQLDLQALHRVRDRLVHRRTAVINQIRGFLLERGITFARGPANLRNQMATILENAEENLTPRMRNLLDRLWQEWKQLESDIKTANDEIDLIASKDEACQRLRQIPGVGPLVSTATIAAIGNGAAFRKGREFAAWLGLVPRQHSTGGKARLYGISKRGNIYLRRMFIHSARAVLRVKYDTGGLGRWAHQLEERTARNKVIVAVANKLARIAWAVLFKGEAYRHSAICAQA

SEQ ID NO: 75830 - protein, 358 aa, unidentified
MTIMPDHSTPVIGGVDTHGETHHAAVIDPLGRHLADREFPTTTAGYRSLESWLRSHGTVNVVGIEGTGAYGAELARILTRSGLTVIEVDRPDRKTRRLRGKSDPIDAYAAASAVASGRATGTPKSRDGIVEAIRALRVPYRSAVKARTQAINQARQLLVTAPESVRAPLLNRSWRDLARACAQLRPADLSDPVGATKAALRHLGRRILALSDELAVLNQVLADLTARAAPELLALKGVGPDVAGQLLATTGDNPERLHSEAAFAHLCGVAPVPASTGRRDRHRLNRGGDRAANRALHTIVLTRMRWDPRTRAYVERRTQQGLSKKDIMRCLKRYVAREVYKTLIGPSTSAAPIFTMTA

SEQ ID NO: 75831 - protein, 394 aa, unidentified
MKLVGIDVGKNSHHFCVMDKETGEFNVAPSSFSNNKEGFDSLINSLKPYSKKSILIGMEDTGHYHVALLKFLLSNGYTVALINPKTTDLTRKMEGGITKNDKLDTITICDVLDTPERKKQYRITKVDRFDLYEQRQLTRHHHNLKEELNVYCNRLQKSIDLVFPEFNTLFSSKYSIVYMNLLKTFGSAEAIASTDIRTIRKCFEVKGRGGRISLTPEKLKECAKNSIGISSEVETIQIKHLVNQITLIKEQIAEIDKKIEEFSIKNNSPILSIPGISHFSGTSILAELGDIGNYSKPSQIIKFAGVAPYHYESSQYNAQHTGITKKGSKYLRKTLYQIILTVINNNPVFKKYYLLKISQGKGHRCAQGHCIRKLLRIIYHLLETGQSFDPALLR

SEQ ID NO: 75832 - protein, 348 aa, unidentified
MTWTIVETRAVTGGVDTHAGVHVAAALDPIGGLLGVGEFPATPAGYACLLEWLGGFGTVCLAGIEGTGSYGAGLARHITATGVRVVEVDRSDRQDRRRQGKSGPLDAVSAARAAQCGKARGAPKGRDGAVEAVRALMVAKRSARSERIQTINQARALVLTGPDDIRVRFAKHTAAGLVAELAALRPRPGAVVGYATRIALRELGRRVQFLDGQLERLDGLIVPLVTGRAPGLLTLYGVGPDIAAMLLVAAGDHPGRLRSGAAWAHLCATAPIPASSGKVTRHRLNPGGDRQANHALWRIVITRMSSHPPTRAYAGRRTRQGLSKKEIIRCLKRYVARQVYPHLRPAAG

SEQ ID NO: 75833 - protein, 335 aa, unidentified
MNHCSYLGIDVSKRKLDLALLNDINSRKRKTKVFDNNAKGFELLLDWLNKNVDKDLSELRIIIESTGVYHRSLAYFLADHGLFVSLINPADSHKFIASGNLHKTDQCDAIALAEFGVALNLRDKLVQWQPKPIEIRQLNALITRLDALKTDLQREQNRYEKAEVGDYPKDILQSIINTQTFLKQEIVRLEKKIDDHIDRHPKLKKDCELLKTIPGVGEAVSLRMMSLYHSHKFHSASQMAAFLGLVPRLKESGNYKGKAMLSKRGNSKIRALLYLPAVVAKAHNPDIKHCYERLLAKGKAKMQAIGAAMRRLVHICFGVLKHQSKYQARNAVICA

SEQ ID NO: 75834 - protein, 411 aa, unidentified
MDKIYDNCCGIDVHKKLIVACFRKGSRQEVREFGATTRELLELADWLRDGGCEMTAMESTASYWKPLYNILESSDLKAMVVNARHMKAVPGRKTDVKDAEWIADLLQHGLLQPSYIPDKDQRELRELVRYRKSLVGERTRELNRLQKMLEGANIKLSGTVSDINGKSARSILEYLLTGASIDGAKYDEMYERKIIAHNLKATKEQIIDDLNGVMSPLQRRMMKELLAHLDELNIHIKNLDDEIDNFMKPEEKQASQAIQDVTGIGNTSAQAVISVIGTDMGRFPTDRHISSWAGLCPGDNESAKKRKSGKTRKGNSLLRTTLITCAHAAVKNKKSYFHAQFMRISAHRGSKRAYVAVAHSMLIAIYHILKDGVAFKDLGADYYNQFNKERKINAYLKKLKALGWEVPAAAT

SEQ ID NO: 75835 - protein, 428 aa, unidentified
MKYNTQNAKIASITEKTLIVGIDVGSETYFARAFDWRNYEFTKKPFEFSNNEAGFLSFKAWVEDLLEKNGKSVVIPGMEPTGHYWFALGKFLQDNGMRPVHVNPHHVKKSKELDDNNPNKNDRKDPKTIASLVNEGRFSYPYIPTGVYAEIRSLSNMRFQAQEELTRAKNRIARWFSIYFPEYKDVYRDLKAVSGRMVLETAPLPEDICKLGVEGVNRIWRDAKLRGAGMKRAKTLVSAAEHSVGSKEAPEAARIELKNLLKDMDVYASRVEELLGVIEEKLKEIPYIDKLMAIKGVGLVTVSGFIAEVGDIRRFDDPKQLQKLAGYAIVSNESGKHKGESRISYRGRKRLRYVLYEAALSLIGRNPEFKAIHEYYRTRKENPLKKMQSVVAIACKVIRIFYVILTKGVDYNPEKMMGDIRRPQIQAA

SEQ ID NO: 75836 - protein, 314 aa, unidentified
MKITTVGIDLAKNVFQVHGVDGHGHAVLKRQVKRDQLATFFVNLPPCLIGMEACGSAHHWARKLQTKGHTVRLMAPQFVKPYVKTNKNDAADAEAICEAVARPNMRVVPIKNAEQQSVLALHRVRQSFVKARTAQANHICGLLAEFGLVIPQGIANLAKRVPELIEDASNELTGSFRLLVERLMDHLKELDRQAGELEVQIRAWHRANEASCKLEKIPGIGPITASALVATIGDAKNFDNGRQLAAWLGLVPRQHSSGGKNVLLGMSKRGDSYLRTMLIHGARSLLFRAQQRADESSWLHKLMRRRNRVGFRES

SEQ ID NO: 75837 - protein, 451 aa, unidentified
MRGEHAGLHGERDKAMKDPLELPIVNPHAAGIDVGSEKFFASVGGQEPKVFLTVTRQMNELCEHFKAAGVRTVAMEATGVYWINLHGVLEDSGFKVVVVNGAHCRNFPGRKTDMKDCQWLAVLHAHGLLESGFVPPSDIRRLRDYMRLRADLVSMAAQHVQHMLKAMDRLNVKIHVVISDITGSSGMRIIKAILEGQREAEKLVELCDEQILKSKRAPMIEALRGLWRKEHLFALRLAVESYEAYQKQIAECDIQIAEVIETISAGKPVPELGKSKELRHNAIILPELHKQVAQIFGKDLTKLPCLNQSTLALLLAEIGSDMSRWKDWRHFGSWMALAPSSSQSGNRRWRLKRRLTRSGQILCRAVQCMAVGKHTWLAAFYRRIRAKRGAKVAIKATAYKLAKLIYLVLTQGWEYVEQGIAKYQEKIHQMQVRALQKLAKTLKFDLVPQNM

SEQ ID NO: 75838 - protein, 321 aa, unidentified
MDTANISVGIDVAKDWLDVGERPDDAAWRVRNDEAGIAALVERLGQREPAVVVLEATGGLEWALAAALAAAHLPVVVVNPRQVRDFARATGRLAKTDAIDAQVLAQFGEAVEPPPRPLPDQATQELAALVTRRRQLVEMLTGEKNRLRTARASVRRDIQEHIRWLERRLNDLDGDLRKAIQSSPLWRVRDHVLQSAPGVGFVSSSTLLANLPELGRLNRKEIAALVGVAPLNRDSGTLRGRRTVWGGRAHVRAVLYMATLVATRRNPVVKAFYERLVAAGKPKKVALTACMRKLLTILNAMVRSHASWQITNPTLAQQDSC

SEQ ID NO: 75839 - protein, 345 aa, unidentified
MFVAGIDAHATYSVIAIVSNTGQLVQEPVRINNTDEERLHELFEPYRPLEVVVETSPAWPWLFDRLQERGIHFVLAHAKRIRVIAESNYKSDEIDAEMLARMRLAGLIPEVYPKCIEQREQAVLLRNRARLVRERTRMVNRIHAQIHNVGLHLERGRLLTQDGRQWVRDVAWPLLGEERRLFIDMQWELIDQIVPMIRTLDHRVEHVGREIPAVALLETVPGIGPYRALLIATETLPIKRFRTPGHLVSYAGLAPRSSQSGLRPIRHGSIPAGANRWLRGTFVRAVVSHVTYAPDSWLSQSYELIRQRLGWQVARIATARRLARAVHAMLRTGEVWHDEPVARAN

SEQ ID NO: 75840 - protein, 371 aa, unidentified
MNSIVYVGMDVHKEQYTICCYSYETDKVEYKQTIPSDYKLVLKYMEQVRSRYDGEVTFVCGYEAGCLGYSLYHQLKDHAVDCKILAPSTMAVTNTHHVKTDKRDAANIARCLAFHTYSEVYVPDNDDNDVKEYIRMRDDQKLYLKKVKQQILAFVLRQGKRFEGGKTYWTIAYLKWLKTLELSDLQRETLNEYLMTYEYLTEKISRFDERIEELASVERYEEKVKHMSCLLGIKTHTALSMIVEVGDFERFEKAPKFASFLGLVPSEDSSDTRVNRYSITKAGNSHLRRLLVEAAQSYTRGNVGHKSVALKQRQKGNTPEVIAYADKANERLRRRFYKMTLNKGVNRNVAATAIARELACFIWGMMTEHVS

SEQ ID NO: 75841 - protein, 346 aa, unidentified
MSYSTTVGVDLAKNVIQISVVNGRGKELSNRSLSRKKFAEFLGKQKPSLIAFESCATAHYWARAAERHGHEARIIPAKAVAPFRQGHKTDSNDALAVAEAARRPNIKEAPMKTTEQQGLQAIHRSRELLIQESTALSNHLRGILLEFGVAIPQGFASLLRTLPEVLEDGDNELPDLYRPTLHRMYTRLLELREDIDAMTEEVARLVKEHPVCNKLTALEGIGPIGALLLYATMGSGKAFSGSREFAAYLGLAPRQYSSGGKTNIVGLSKKVGNSRLRSVLILGARAYTYRMKEPKGSKDKWLHAIVERNGVSRAAIALANKNVRTAWAMVTQGTEYQRRPQLEMAA

SEQ ID NO: 75842 - protein, 344 aa, unidentified
MITIGIDPHKSTVTAVAVQDNGSQLGTIRLPVTTKLQEQLLLFASEWTDRQWAVEGATGLGLGVAQNLAAAGETVLDVPAKLAARARLLATGHGRKTDALDASSVAAVAQRNTRLRTVEAEDDTVPLRLLSDHRDDLVSDRTRVLNRLHRLLRELVPGGANRQLSSTQAGEILRTVRPVTTADTYRKQLAKDLLDSLRKLDTRVKSLTDQIAELVAANGTKLTAIRGVGPVVAAKIIGHSGDIRRFPNRNHYASYTGTAPLDASSGEQNRHRLSRLGNRQLNAAIHIIAICQASRPGPGQDLYQRKLAENKTPNEARRTLKRRLSDVVYRHLVQDAKSREPATT

SEQ ID NO: 75843 - protein, 323 aa, unidentified
MTSPTHELDPAAGHAGIDVSKERLDVHLLPKGEAFAVNNDPEGIDELVERLLQERPELVVLEATGRYERPAATAIASAGIAVAVVNPRQARDFAKATGRLAKTDKIDAQILARFAAAIEPSPSVLPDHEAQALQAILTRRRQLLLMLVSEKNRLLMAPEAVAKRIRAHIRWLEKELTRTDRELDEAVQESEVWRRNEELLRSVPGVGPVLARTLLAELPELGTITHKLLSALVGVAPFNRDSGKMRGKREVWGGRAPVRATLYMGALVATRHNPTLKEFYERLLAAGKPKKVALVACMRKLLSILNAVMRDRAIWRCPHILTP

SEQ ID NO: 75844 - protein, 315 aa, unidentified
MRNCIGIDISKGTFDVFILEKDKAFLMNNDFEGVNQCVKLCHQIQPELIVMEATGGYEMPLASHLQAEGFGVAIVNPRRIRDFARALGQMAKTDKIDAQVIAKFAATLEPMPHEFISDNSRKLKALISRRKQLLGMHTAEVNRKEHAFDKEVKQSIEAIVKAIEKQLAKVDKETDDFIRQMPELKQKAEYLQSIPGIGKTTAHMLVAELPELGILNRRQIAALVGVAPINRDSGAFRGKRMTGGGRKHVRTKLYMPTLVATQFNPVIKKYYRNLVDERGKCKMVALTAAMRKLLCIMNTMLKNSQYWQPDFAKNA

SEQ ID NO: 75845 - protein, 345 aa, unidentified
MTQYKRIAIDLSKAVFTLHGIDQQDRPVLRTNLRRAQMIPFFAKLATTEIAMEACGGAHYWARELIMLGHKVRMIPPQYVKPYVKRGKNDRNDAEAICEAAGRPGMQFVPVKSVTQQAQGMVLKVRETLVAQRTLLVNTLRGHAAEFGVIAGNGISKIGPLLLAIEQESAIPLEAKEMAVLLGQQIADLDSKITAIEVKLSAAHKANEVSRRLATIPGVGPVTALTLAIEIDPAAFESGRHLAAWAGLTPKEHSTGGKQRMGEISRAGNERLRALLVTGATSVIKAATKPGSKQMTDWLRAILSRKPRKVVAVALANKMARVAWALMTRGEVYRRSVITVRAVVA

SEQ ID NO: 75846 - protein, 397 aa, unidentified
MYIVGIDIAKRKHEAAVIDGEGAVIIKPFSFTNNCSGYNRLLAMLAKAKLPLDEVSFAMEATGHYWLALFTRLQKEGFRVQVINPVQTNSIRSFYIRQAKTDPRDALLIAEVIRFGHFSESTLHPENIYELRELCRGRHAIVSMQADVKRKVVALLDQVFPEYETAFTNLFGDTSMAILQTCPTPKELSEMPLEELCHLIEVSSRKRFRMAKARELQELARNSFGFAMAGDVFSTMIRLYAKHLDFLKQQVREMDRKIAEIMDTLDTPITTITGIGPTLGAYILSEIGDISRFSSAAKLAAYAGIDPTMRQSGEYNGVRNRMSKRGSPYLRHAIWLAASSAVLHDPALKLYFQKKRDEGKPYMASVGHACRKMVSIIYAVMRDNKAYTPCIPNEISA

SEQ ID NO: 75847 - protein, 314 aa, unidentified
MEQVFVGIDVAKDHLDVHTRPAGESFVVSRDGEGLTGLVERLKQIKPALIVSEATGGFEVAVAAAVGSAGLPIAVVNPRQIRDFARATGKLAKTDALDAAAIAHFAEAVRPEPRPLPEGKALELGELIARRRQVIEMMVAERNRGRLLQSARLKKRIERHIASLQKELTEIESDLDHNIRGTPIWRENEDLLKSVPGIGNVTARTLLADLPELGTLGRKEIAALVGVAPFNRDSGTLRGRRTIWGGRSSVRQALYMAALVASRNNPVIAEFYRRLRGLGKPPKVALTACMRKLLVMLNAILRDRKPWQEVRVAA

SEQ ID NO: 75848 - protein, 357 aa, unidentified
MSCKLEAAIATVIGIDIGKNSFHVVGQDRRGAIVLRQKWSRGQMEARLANLPPCLIGMEACVGAHYLSRTLKMLGHDARLMPAKYVRPYSKGQKNDFRDAEAIAEAVQRPTMKFVATKTADQLDLQALHRVRERLVSQRTGIINQIRAFLLERGVAVRQGLRFLRVELPGILATRTDVLSPRMLRMIEDLAGDWRRLDARVEGLSSEIEALACQDKHCERLMTVPGIGPIISSAMVAAIGTGDAFSKGRDFGAWLGLVPKQISTGDRTILGSISKRGNRYLRTLFVQAAWVVLVKIGPKQWERYGLKSWIEAAKKRLHYNVLAIALANKLARIAWAVLNKGRAFQCVKIDEMAPRSA

SEQ ID NO: 75849 - protein, 328 aa, unidentified
MNNLSKSKLDDRISMFVGMDLHKNYLQIAVMNEKGKVLENSRINNNLKQVGRFFDENIKKSNEKVRVVMESSSVWYNIYSYLSEEKHLNVVLSNPVKTRAIASAKIKTDKLDAAKLANLLRGGYIAECYVPDRRIMDLRELVRHRTALVRMRTKLKNKIHSIVLMRGIQISSKHCSFTHLYNEELKKLNDYRINGYLHLIESLDSEIKDVSKKIMMLAKEDEMASLLMTIPGIGYYSALLIVSEIGDINRFPDSYHLCSYAGLVPSTHSSGGITYHGSITKRGSKYLRWIMLECAHVHIRTNKNSNITQFYTRLAKIKGSSKAAVAAA

SEQ ID NO: 75850 - protein, 318 aa, unidentified
MDKDFVGIDVSKDNLDVATYTTKKIWHFPNNEGGISQLTRTLSELTPALVVLEATGGYETALAISLNKAGITCAVVNPREVRDFAKATKKLAKTDIIDARVLAHFAAVIRPESHPLSDEQTQELEAIMTRRRQLIDMLTAEKNHLHVARKPVREAIKSHIDYLTNELAQIDSELQVRIEKSPVQRDKYSLLRSVPGVGPNLSATLLVDLPELGNLNRRQIAALAGVAPINHDSGVKRGKRSIWGGRPQVRAMLYMSALVAARHNPVIRQYYVRLCAAGKAKKVALVACMRKLLTILNSMLKYNVPWRSYQPAPISSNP

SEQ ID NO: 75851 - protein, 399 aa, unidentified
MNCVGIDVSKGKSMIAVMRPFGEVVVSPFEVLHTDSELSKLAGLLKSLDGETRVVIESTGNYHAPVAWLLHDAGLYVSVVNAMLVHDYGNNSLRRAKTDKKDAVKLANYGLDHWLILPRYVPEEDTRLMLKTCYRQYQQYSKVQTMLKNNLISLLDTAFPDANRLFTSPPRADGSEKWVDFVAAFWHCECVCGLSEKAFTAKYQKWCKKHGYNFSKDKALDIYASSCGHFGVMPKTDTAKLLVEQAVSQLRATSAALAALKQEMQSLAASLPEYPVVMEMFGVGPTLGPQLMAEIGDVRRFKNKHSLIAYAGIDAPPYQSGAFHASERHISKRGNSYLRKTGYEIMQSLIKHKPADNAVYDFIQKKRSEGKCGKEAMIAGLNKFLRVYYGKVMEFYSEH

SEQ ID NO: 75852 - protein, 347 aa, unidentified
MYYVGLDIHKRTIAYCVKKSDGQILDENTIPSTRDAIGRLVAQLPDEWEGAMEATMFTGWIFDAFEDLGHTLKVANPSMLKAICAAKKKCDEADARMIADLLRCGLLPEVMMDAREIRELRMVLRFRNLLVRNAVKMKNKTAGLLMESGVEYSRSRLHRKRYFRTLMDSLDWLPSAVTDLLGMSREAIEFFETLQRRLVRSLVEHPSLAERVERLRSIAGVGEITALTWALEIGDPGKFSSVRKAISYCGLCSALRESGGKQSRGPLSRKRNSHLQSMLVEAAKLAPRFNPQLRAVHQRELKRGNRNRATLAVARKLVAYMLAVDRSGRPFVPTVVADRDGSGEIAA

SEQ ID NO: 75853 - protein, 328 aa, unidentified
MTHFSDSCASELYVGIDVAKQNLDLARSDAKAVERFDNDKTGIAKIIDRMIQAKPVMIVIESTGGLERPLLEALLDAQLPAALVHPGRVRSLARGLGILAKTDRIDARVLVLFGQKAGPRLSQRASKNRTQLSDLIACRRQLSVTLVQQTNRRLSTFSSAACKSIDAIVAALEKQIEKLDRQIRDLIDADHDFRDLDRLLRTVPGVGPTLAATLLADVPELGKTQRQQVSAVVGVAPFPDDSGSIHGQRRISGGRSDVRGVLYMATLAAMRFNPVIKAFAQRLKALGKRNKVVIVAAMRKLLCLLNAMVRHRLAWHQLNIVQKFASAS

SEQ ID NO: 75854 - protein, 467 aa, unidentified
MGRFVGGELQGEFMQRLRGIDPGRCLVVPVDVGKSMAMSLVADHFGEIVTTPFEFDLTETGVAELIEVVSQAERSRAAVVVRVGVEAAGHYHRTAVARLRKAGLDVVELNPGAVKQARAQQLLRALKSDARDLGAMAELLTRGAGRPPEQRDQALSTQVAWTAHRRRKVKARTALTNQVLAQLDLIFPGLQGCFTTGVLTTKAGRVIVRDLVDPARIKRLGDEGLRRFVARRRVQLTRPKAASIIAAARNALSLPEAELVARNAVFSADIVLLDYLDTMIGEADQQLSEVLGATPAAVLTSLPGVSVVRASNYGAEIGDPWRFRSAEAAYRFSGLVPASYESARKARPGQHISREGSVELREAIIELGKGLSQFDPDFAHYKRRLVSDGKKRSIAAVAVGHRAHRLAFSMLRSQRPYDEAHWARSVATGRSVMANAPIGTHQNDVTCPSPTITFTEDLVLHKHALLR

SEQ ID NO: 75855 - protein, 480 aa, unidentified
MGNINIQKHENQTIRKIFDDAGELQRVLVVGLDYAEEEHQVVICNGLGDCRCNPFTVKNNKEGLAFLVTRISHLCTKYALQKSHVFAGGETPGSWAVNFAYRLHLQGYPIIDLHPFRVAKFTENETTTTDKLSAMTICKCLINKMGNTHSYDGIYTELKLAVRSRSQLTKNRTRISNQIHTCCDTYFPGFLSQKKSGIVPFSKPCFFILENHSIQSIRSVKPSKLIRTLKKHGLSNADKNAEKLKNLANVTLESSPTYEQQVRRKIKYFMDQYNLINGQIANAEEEVAFLLRQTPGALLTSVDGISVTLASQLTAEFGDPQLTKNIDNKVTYFGLSKRTHQTGGEDKPKKKKGKSPRINKHGKRAILMGVTLVLEHGHHEFRDYCQQRELSGRNGTHALGRKLLRFVFSVLKAPHDYVPKELQGLNRKDPLWQEHYKNLEKKMKRKWGKFTREPSPNQDALHKWENMINSVFGVKINLGI

SEQ ID NO: 75856 - protein, 400 aa, unidentified
MVVLASLCNDVGYNGKTIKEPHTKEASTMDYTTFVWMDVHKDTITVAVAEEGNTEPVLLGTIPNRPDSLLKLLKQLAVTGNRLLFCYEAGPCGYGIYRFLKERNFSCIVVAPSLVPVRVGDRVKTDRRDAKKLARLLRSGELTPVWVPDEEHEALRDLVRAREDAYKDLQRKRHQLSKFLLRTGKRPPVGINPWTVKHRCWLDTVKYELHAQQLVLQEYRHAVDQAQERLKRLEQELIELGCKSVHAPVIAALRALRGIDYVSAITLVAEIGDFRRFDNAAKLMSYAGLVPCESSSGPRSRRGSITKTGNSHVRRIIVESAWHYLRAPNVGCTLRKRQEGVPESIKEISWRAQNRLNSKFRKLLARGKSRQTAVVAVARELLGFIWSVALQAKIEYEKAA

SEQ ID NO: 75857 - protein, 347 aa, unidentified
MNSVGIDLHRNRSHITVIDEQGELSLSRRIVNDRATFLELLAGLEGESRIAVEATYGWEWLAELLEDAGYEIHLAHPLRTRAIAAARVKTDAVDAKTLAHLLRADLLPEAYVAPRELRDLRELLRHRIALTGMRSALKNRVHAILAKHGITRQHSDLFGKGGRAFLEALQLREAPRRRLDSPLALIDDFDREIEATSKEIEQRAKADDRVDVLTQIRGVGRYTAMLIIAEVGEIERFPDARHLCAWAGLTPTVRSSDGRARLGHISRQGSPALRWALVEAAQKCTTGGGPLRESFERIAKRRGRKIAKVAVARQILTLSYYGLRDGEIRCLARRSRASAKEKLAVTP

SEQ ID NO: 75858 - protein, 399 aa, unidentified
MSLTIPLEVRVSVDVGCYQHRVAIGLSSGEVLEEFDIPHQPEGFDDFFARIEHHRVQHACPVAVAMEGFNGYARPLDQLIRARAYRLYNINNLKLARFKEIFPGAAKTDAIDARKGLELFQLQDHLPLAKRVLQEVAATPEANQVLKRLTRRRRRLVNEKGRVLSNLQTDLQAVCPGLLEMTNDADNLWFLRFLTSTKELPKLARLRRSTLLKIPGVGATYASQIQAWQPHAAFSDEVEWVGEMIQDDAQRILDLHAQISALEAKIESVSQSSSLARILKSIPGYGLVSSAELAGEIGTIERFRSEASLGVYVGMSALDHSSGNSSAAKAPTQVNSRAKAAMMVAVDRHRKGVPQSQRYYEKKRSEGKTHNQAIRALGRHLCRVIYKLLKEERDYKIQD

SEQ ID NO: 75859 - protein, 356 aa, unidentified
MAKNINLKDIEVAAIGLDLADQYSDWAGIEGAGEIRVRQRVRTTEPELRRVFGSLRATVIAMEVGTHSAWVSRVLSSCGHKVIVANARKVALIHRNKRKNNRIDAEILARLARSDEKLLFPIRHRDEKSQADLAVLRSRDLMVGARTKLINHVRGSSKVFGTKLPKCSAPAFVNRCASEVPALIQGAIKPILEHIEKMTEEITSYEDQIEKMITRHPEAKQLKQIVGVGTLTALTFVLTIEDPHRIVRSRSAGPYFGLVPGSDDSGETHTPKRITKEGDRYCRRLLVLAAHYILGRFGPDTDLRRHGLEIAARGGKNAKKRAVVAVARKLAVVMHHLWISGDTYVPLFNSELKTAA

SEQ ID NO: 75860 - protein, 417 aa, unidentified
MRAVALDVHRDFCEVAIVEGGELRSAGRIETKPEALELFAQSLDVHDHVALEVTGNAWEIARIIEPHVARVIVVSPSDTGIRQARAKTDRLDARALAKLLWAGSLDAVWMPDERIRAMRRRLARRTQLVRARTRAKNEIHAVLMRCLKGRPPASDLFGVKGRRWLAEQELPIPERETVDAAMRQVEFLDAEIAAVEALIAAEALSWPEVKRLMTVPGVNVIVAATFMAAVGDIARFPDRRKLTGYLGLDPRVRQSGVGPASHGHISKQGSASARHALVEASWSTVRQPGPIAGFYVRIKARRGHSIAIVAAARKLACLFWCLLTRGEDYAFAQPSLTKKKLRRLELQAGAPRFQGGRGVWSTNDGMRTAERELALQAQRAYERTVKDWQQNKGAGTTAGRASSGSSKDQVARQTTSP

SEQ ID NO: 75861 - protein, 462 aa, unidentified
MKLYLGGDVSKGYTDWVILSDKKQTVLENFQLDDTYEGHCKLYSTIEAYFDKYPGLEMYAAVESTGGYENNWVHTLKSYQKVFSLKVARVNPAGVNYNRRSGMKRNVTDAISALSIAEYMINHPENIIYDQDEKWKTLCRHWNFVEMQKSQRVQTINQLETILYNANPTLLRFKKNKLSNWLLELIIKCPTADKLAKEKPEKLTKISFLTLKKAKDLVAEAKRNIASATDRNSEILVRQIARQIKAFDGNIKSQMKLIEEELICPEIELLKSFKGIDTTSAIGLLLEIGTIERFPTVKGFSCFFGLHPKFKQSGDKIIGVRMSKQGSKNMRKILFNIAKGAITFNPLIMDVYQKKLSEGMSKMAAIGVCMHKILRIIFGMLKHNQVFDPLIDRHYNERSKSKQQEKKIQESANIDKSRRYQEFDATAPISRKQIKKRKEHDLSQCEITSQSTGSTCSSNTKL

SEQ ID NO: 75862 - protein, 449 aa, unidentified
MAKKKRKYRKLERSLPVMRPNAGGIDIGATEIFVAVPADRDTESVRSFPTFTQDLHALADWLQQCRVDTVAMESTGVYWIPLFQILEARGIEVHLVNAQHVHHVPGRKSDVLDCQWLQYLHSVGLLRASFRPEHAVCEIRSLMRHRENLVQMACVHVQHMQKSLDQMNLQIHHVISDITGVTGLAIVDAIVAGNTNPKELAKLRDHRIKASIETVTKSLVGDYRPEHIFTLKQSLTAYRHYQKLIADCDQEVQQRVEAFQSNDDGPTAAADSSSATSPTAPSFDLHSHLERIFGVDLTAIPGFDVLRIQTIFSELGADMSPFPTDDTFCSWLNVCPKDGTSAGRRIRTPKVKTKNRVTQAFRMAALSLHNNKSYLGDYYRSQRARHGALKATKNAAHKLARIFYHLVKTRQPYDETVFAKLEARNQKHRLHKLQTLARQMGYSLVQANA

SEQ ID NO: 75863 - protein, 337 aa, unidentified
MSVYVGIDVHRKRSQVAVVTEDGTVVLNKNVVNGSTPMLRLIGELPSGTPVAFEAAFGWSWLADLLEDYGFQAHLVHPLRCKAIASARLKNDKVDAAMLAQLLRADLLPEAWLAPAKVRQLRALLRHRVSLVRLGTQLRNRIHAVAADHGYDRSASYWTGPGRGWLAELDLPPASREIITDALAVIDALAVLTGRIDGELHQHAKADPRVKVLRTLPGVGEFTALVMVAEIGDITRFPSARKLASWAGLTPTVRGSDLKVRHGHISKQGSVWLRWVMNQAAQTAKRSPEFAASYAAIAKRRGKKIATIAIARKLVTRAWHLLAEMETAEASTPPRRP

SEQ ID NO: 75864 - protein, 354 aa, unidentified
MSQKFESAIAVIGIDIGKNSFHVVGHDERGAIVLRQKWSRGQVEARFANMPPCLVGMEACVGAHHLSRKLNSLGHDARLMPAKYVRPYSKGQKNDFRDAEAIAEAVQRPTMKFVATKTADQLDLQALHRVRERLVSQRTGIINQIRAFLLERGVAVRQGLRFLRAELPNILATPPDVLSPRMVRIIEDLACDWRRLDERVEGLSNEIEAIARQDAGCERLMSVPGIGPIISSAMVAAIGAGDVFTKGRDFAAWLGLVPKQISTGDRTILGKISRRGNRYLRVLFVQAAWVVLIKPKSWERHGLKSWIEAAKKRLHRNVLAIALANKLARIAWSVLAHGRNFEATKFGEAAAQST

SEQ ID NO: 75865 - protein, 420 aa, unidentified
MKAKKKKKLDLIGDDTLVVGVDVGKRNHYCRFINVRGYEIGKVFSFSNNRDGMEKLIDRIEKAKKQNNLTKAVIGLEPSGHYWRPAAHYLSGRGYGLALVNPYHIKRIKEIEDNCQTKTDPKDSLLIAKLVRDGDFFDPNLANGIYAELRRMYRLRLKVKKSLVREKTKLKTLLDEYFPEYGDLFYDILGVTSEYIIDNYFLPEVIAKENILSLAGKIKMISRGKIGAPKVLKLIEYAKDSIGITTGIDAAVLEKTYILEEVSNLKLKLAYLNKKLKYYLDKIECSKYLLSIPGVGIVTAAGFLGEVGDISKYKSAKEIIKLSGLNLVEISSGIKKGKKKISKRGNSILRCLLYQCAIVAISKNSQIKKYFSYQTEKKNKMKMVVAVQCKLARIMFALLKYKKYYNPEEVLKSMVAEAVA

SEQ ID NO: 75866 - protein, 338 aa, unidentified
MALKTIGLDTAKHVFQVHGLDEQERAVLRKRLRRDQISDFFGSLPRCVVGLEATQGSHYWARVIGSYGHEVRLIAPQFVKPYLKGQKNDARDAAAICEAVGRPEMRFVPKKSVEQQDLQALHRIRSRLVGSRTQLGNQIRGLLAEYGIILPLHLSQVRQQLPVLFSEEHPLLTFFSRELFASLYEELCALDERIEAMEERIQRVFAGNERCQKIAAIEGVGPVTATAIVAAVADARVFRNGRQLAAWLGLVPRQHSSGDKQRLLGITKRGDPYLRMLLIHGARSVVYRASTKTDSRSRWIAEKQQKLGTTKACVAVANKNARIIWALLAKDESYRAAA

SEQ ID NO: 75867 - protein, 326 aa, unidentified
MQGKVTLERSAKSRVYAGIDVCKDRLDVYIASTGEQLHVENTRKGLGTLARHLRAACVERVVMEPTGKYHRMAARTLHAMEFGVCVVDPLRARRFAQSTGKLAKTDRLDARMLALMGALFEVEATPPTSVLLEELQEVLRARQSAVDDRTALSNRLGESKSKLVCRQLKRRIPQLDADIAKLDAELKRLIASDPVIARRCEIVDSIVGVGPVATAWLVIGVPELGSCDDKQAAMLVGLAPIACESGDQRGKRKIRGGRADVRRGIYMAATSAASSNPTLSVFYERLVRAGKLKKVAITAVMRKLVVLANTLIKQDRLWQPTPPKTA

SEQ ID NO: 75868 - protein, 347 aa, unidentified
MKKIFIGVDVSKEKCDATAIYAEKGLTEVKKLDYFVFENRPKGFSSLLSWAKKLKADVSLESILFVCETTGAYDRALCDYIYSKGLDIWRESALQILWSSGVRRGKDDKADSLMIAEYALHHMDKIHLYESPDSRILEIRALFLYRRKLEQEKTSKLVRIKELEATAGKSKTISFILRDAKKSVRQLEKSIKESEEKILELVDEDEMLRKSYQHLDSVKGLGIVNITALIVYTNNFRAFKTSRKMASYWGVAAFRSKSGSSVDKRADVRNLSSSMLKSYLTQAAMHTIARGGIYHDYYQRKISEGKTHSIALNNAKNKLLHLAMSLVIHDMDYEMNHELLKVQRATN

SEQ ID NO: 75869 - protein, 497 aa, unidentified
MTLPRWRLCDDLLVVMEPVPSYEDLIWLFETEPTYRFADSEREAGYEFDWRDLWPYTAVTFRTTRGGYEVEMYIEPGYEVVRLRLRTDGAELLDLDLRGVRTVGVERIHGRELLRLDFPDGSPALMRCRSGASAPRDSHPGRLFDRGCHDSPRRRRPLVDEYGGRQYVGIDLHRRRSVIVQMTSDGQRLATTRIDNDPFELAAQVTSWGETPEVVLEATYGWYWAADVLAEAGAVVHLAHPLGVKGFAYRRVKNDERDAADLADLLRMGRLPQAWIAPPEVRGLREAIRHRSKLVALRSGLKAQVHAVLAKQGVPVAVSDLFGVGGQKLLDNLQLDAPFHARVVSLRRLIDAFTFEIDILTKRTSAQLKNHPGFQAVQAIRGVGPVLAAIFVAEIGDVTRFARPQQLCSWAGMTPKHRESDTKVHRGRITKQGNPLVRWAAVEAVQTLRQGPLGHTRVRIGERRGANIGKVAAARKLLTLVFYGLRDGHIRCLTRTA

SEQ ID NO: 75870 - protein, 343 aa, unidentified
MGEVSTIGLDIAKSVFQIHGVDAAGNVIVRRQLKRRYVLPFFQKLPPCLVGIEACASSHHWSRELQALGHTVRLMPPAYVKPYVKRQKNDAADAEAICEAVTRANMRFVATKTPEQQSCLMLHRTRHLFIRQQTSVINAIRAHLAEFGIVAPVGRNGVEELLGVVADPSDKRVPEIARACLAALGAQLRVLKAQILEFDRMINAWHRSNETSKRLDEIPGVGPALATALVASVADPKAFRSGRNFSAWIGLVPKQHSSGGKDKLGSISKQGDRYLRSLFTAGALAVIRYAKIHGTKHRPWLTALLARRPTKVAAIALANKIARMAWAMMAKGERYKEPVALAA

SEQ ID NO: 75871 - protein, 353 aa, unidentified
MKNTVFAIDLAKSVFQLAVSHHPGRISQERRLTRSQLLRFMGKQSPSIVLMEACGSAHHWGREFRRLGHDVRLLPAHDVACYRRASKTDATDTQSLLEAARNEAIRPVPIKSIEQQALTALHRLRSRWLATRTARINTLRGILREFGLVIPLGARRVTPQIRIWIDDPEISLPTPLCNLLREACEEVGELDRRIRLVESQLEALGKEIDVVARLRTIPGVGLLSATALVALVGNIARFPSGRHFASFLGLTPREHSSGAIRHLGRISKRGDVYIRMLLIHGARAVLLHAKRRENPDPLRQWVLHLAKTRGHNIATVALANRLARIIWAVWLRDQDYREGHSTSCHRCQEVPVR

SEQ ID NO: 75872 - protein, 392 aa, unidentified
MIFVGIDVAKNKHDCFITNTDGEILFNSFTITNNLDGFNDLYQKITSTMENITKVKVGLEATGHYSYNLLGYLLDKGFPTYVINPLHTNLYRKSLSLRQTKTDKVDARTIASMLMSDVNLKSYSDTSYHNEELKSLTRYRFDKVKERSALKVSISRLVCILFPELENLVPTLHMTSVYSLLYEFPGASFVASAHLTRLTNLLSKASKGHYNKDTAVLFRLTARDSIGSVMPAKSLELKHTIKLIQELTSEIDEIEAAIKQIMDEEIKSPILTIPGISYRMGAMIIAEIGDFNRFDSADKILAYAGMSPSTHQSGQLDNCHSRMEKRGSRYLRYALYNATKYVCHWDKSFGAYLEKKRSEGKHYNVALSHAAKKLVRTIFAMERSGQSYIASV

SEQ ID NO: 75873 - protein, 356 aa, unidentified
MENIAFDSHKGYTLCSVEDRNGRLIDEFRICHQRGQIRERLSEFSPGSPVAVETIGNWYWIVDEIEEAGMRPRLVHAHKAKVMFGCVNKTDKLDVRGLNRLQRAGTLPTVWIPPKEIRDKRDLARTRMFIVSGRTRLKCRIQATLSKYGLKMTDVKDPFCKRGRVMLGKLIEQLPEQTRFSTERQLENLDVCNKQISALEERMRDVFKETDETKLLRTIPGIGFILGVVVSSEVGDVSRFAGPLKLASYSGTTPRVHSSGGRTHYGRLRMDVNHYLKWAFVEAGHTICSHRESWPDMHVTVLYNRIHAKRGHFTAIGAVARHLAEATYWVLKKREPYRDPRLSRVFADGGISAYLS

SEQ ID NO: 75874 - protein, 370 aa, unidentified
MTIVMGLDQHRGQVTAEWIETATGEVSRARVVPAHREPVRRFLSRFRGRELEVALEATTGWRFVVEELRAIGAGVHLAEPAETAARRGNKKRAKSDRADARHLRELLMIARLPESWIAPDHILDLRARVRLRHTLSQQRGEWQQRIQAVLYHHGLPQRRDLLTRENRAWVERAALPDSAREQVTVALAMIDALDVQLAPFDRELRAYARRQVGCRALMRHYGIGALTAITILVELGDCGRFSSSRLAVRYSGLDITVHQSDQRRAPGHLSRQGPPALRWALFEAAQVARRPGSPDRDYYEQAAARLGGNRACLAVARRLLKRSYQCVTNAEGGVGVGDIVHRRCCARDGGLLALRRRPCGGRRQTALELR

SEQ ID NO: 75875 - protein, 396 aa, unidentified
MLDDGSQPAKLFNADNNQLGAETLVERIYNIAKEHCVSDILIGTEAASMYDWHLLEYLSESKLALEFNLKLYRFNAKWIKNFKKSLAPRGKTDPIDSFAIAERLRMGRLPKEYIPDIKYQPLRKLTRFRFHLMQQIAREKNFFLASLFLKAGAYSRISPFGSTFSATSLAVINDFFSVDELAAMPIEELTEFILEKGKSHFSKPAEIVDNLKRAARESYRLKPELAPAVNLILASTYNNIRCYKDQVKLVDSAIAENLKAFKHTLESITGIGPVYAAGIIAEIGDVHRFPNDSSLAQFTGLTWPKHQSGKFQAEETRMSHTGNQYLRYYLVEAANSVKRCDATYKAFYEKKYAEATKHHHKRALVLTARKLVRLVWTLLTKQVLYQPGYSSTSLTV

SEQ ID NO: 75876 - protein, 345 aa, unidentified
MDIMYYIGLDVHKKTISYCVKDASGQIHREGKIGATRCELDCWMKTLPQPWTVAMEATIFTGWIYDHLLPHAAQVKVAHPLMLRAIAAAKKKNDRIDAAKIADCLRCDFLPECHIASTAIRDRRRTLRYRHLLVRQMVQMKNRVSGLLMETGVSYNKQRLHKVGYFRELLSTNQEVHESIRPLLKLSRDTIVRLQKTEYALVSSLQRDPLLTDRVHRLKTVPGVGPITALSWALEIGDVSRFRSIRQAISYCGLCGEEKSSADKVMRTPLSKQRNKHIQRVLVEAAKLAPRQDHELALVYQREKEKGNANRATLAVARKMVAYLLAVDRGQRDFVPSEDHKRAAA

SEQ ID NO: 75877 - protein, 341 aa, unidentified
MNAIYYIGLDIHKKTIAYCVKKVDGTLVRQGTVCAERKALLQWQSELPGPWYGAMEATLFTGWVYDFLKPYAVDLKVAHPAMLKAITAAKKKNDRADAEKIADLLRVNLLPESHMMSEELRELRRILRYRNMIVRTAVKMKNKMSGLLMEVGAQYSKKRLYGKKYFNTLLERVEDVPNSVKELLKLSRSGFELYDGIQKKLVSALRENKRIQARVLRLMTIPGVGEVTALTWVLEIGELGRFSSSRHVISYCGLCSAQHESAGKEQRGPISKQRNKHLQTTLIEAAKLAPRWNEQLALLHEKESARGNRNRATLAVARKLVEFMMAVDRRESEFETTKLAA

SEQ ID NO: 75878 - protein, 408 aa, unidentified
MNQLFVGVDVGSRDNAVYIMLPDGDKHSSFEVQNNLGGAKTISKRAVSALEGNNLSAVTVGIEATSVYGDNLMCFLREDGALGRFERKLFILNPKQVNKFKESYSDLPKNDPVDAFVIADSLRFGRLGSPIYNPGDYRYYALQKLTRARFYAVQELTREKQRFMNHLFMKCSGLAQEKVFSDNYGAAALAVFDKFESPDEIAEMDVEQLASFIAEKGKNRSPRPDEIAKAVQAAARGSYRLPKTVNDSVNQVLSISISSMRAMQLQIKALDKEIVHQFENIPNTLTSVPGIGPVFSAGIIAEVGDVNRFDGQARLAKYAGLVWTENKSGTFEGQQTHLINSGNRFLKYYLCEAAFSLVRCDTEYRRYYDLKFKEVNKYQHKRALALTARKLVRLVFRLLKDNRLYIPA

SEQ ID NO: 75879 - protein, 344 aa, unidentified
MKITTIGLDLAKSIFQVHGVDATGQVVVRKSLRRSQMLPFFAKLPSCLVGIEACGTSHHWARELIKLGHQVRLMPPAYVKPYVKRGKTDAADAEAVCEAVTRPTMRFVPVKSPEQQAALSMHRTRDLLVKQRTQLINMIRGLLAEFGVDIPKGLERALLMARQIVDGKAPDVPIEAAKIVGTLSQQALDTHVRLREIDRDLLVWLRGNDVARRLTTIPGIGPVGATALAASVTDPHQFRSGRQFAAWLGLTPLQKSSGGKERLGRITKMGDKYLRKLLIVGMTSLVRRAKYNPATVDPRLANLLARKPTRVATVAMANKTARIIWAIMARGETYRTDHRPALTA

SEQ ID NO: 75880 - protein, 347 aa, unidentified
MRFYRGTHRYYCGVDLHARTMYLCLTDQQGTVLLHERVDCTPAAFLEAVEPYTDDLVVCAECIFCWYWLADLCTEHGITFILAHALYLKAIHGAKTKNDRIDSEKLVVLLRGGVIPQAYVYPPEMRATRDLLRRRLFFTRKRSELLSHVRNTFHQYNLPAPRGTLLTKKSREPIPARFDDPIVRTSVEADLELCAAYDGIIRTLEKTVDQQAASHDAHSLHILRTTPGIGKILGLTVLYEIHTIDRFPRVQNFSSYARLVKAPKESAGKRLGTGGAKIGNAHLKWAYSEVAVCFLHNNPRGKQHIKRLRRRYGKGKALSILAAKLGRATYFMLKQKRAFDMDRFFPN

SEQ ID NO: 75881 - protein, 411 aa, unidentified
MELLVARCAGLDVAKDEVVACVRLPDGRGGRAQEVRTFQTFTSGLEALADWLTAEGVVQVVMEATGQYWKPVWYVLEEAGFELLLVNARHVKILPGRKTDVCDAAWLAELLEHGLLRGSFVPPAPIRELRDLTRYRKRLIQAHASEGQRIQKTLEDAGIKLDSVAADVLGVSGRAMLVALINGERDPQVLAELARGRLRAKLPRLRQALRGRFSDHHALLVRLALEHLEHLEGAIATLDTEVDRVLAPFARARDQLATITGVGKRAAETIIAEIGVDMAVFPTAGHLASWAGRCPGNNLTGGKRRSGRPTKGNRWLGEVLIECAWAAARSRDTYLSAQYWRLARRIGKKKAAVAVGHSILVIAWHLLADDCDYQDLGGDYFVRRDTDRQRQRAVAQLQALGYRVTLEPLAA

SEQ ID NO: 75882 - protein, 326 aa, unidentified
MRKKGYSVMGNSPTSFVGIDVSKATLDVVIRPTGEYFQVPNSDQGHSQLIERLMLLAPQAIVLEATGGYERRCTAALVDAQLPVAVIHPKRARELASGLGKLAKNDRVDAGVLAYCAQHCQVRPVIKTPEQQARLEALVLRRRQLVTMRAAEQMRLEQAVVKEAKKDVSQSVSFLNKHIDKIEKQIARLIDSDDHWQKRSEIIDSVPGIGPTTAAVIVAELPELGSLNRRQTSALVGVAPYAHDSGKRKGKRTIYGGRQDLRSSLYMATLTATTKNEVIKIFYQRLIAAGKPFKVAMVACIRKLLGILNQMVKNGQLWNEHLPKTA

SEQ ID NO: 75883 - protein, 354 aa, unidentified
MTDQPQIIGGIDTHTDVHQAAVIDTFGRRLATAAFPTTPAGYHQLLDWLRSYGTVTAVGVEGTGAYGAELARLLRANRVSVIEVDRPDRRTRRAHGKSDPLDAYAAADAVLAHRAQGTPKTRDGIVEAIRALRLVRASAVKARTQTTNQIHALITTAPSPVREPLRALPTAELIRHLARSRPGSDPSDPACATRTALRRLARRHQHLTEEITDADTELRPLVTQAAPQLVTLLGVGTQTAAQLLITAGDNPDRLKSEASFAHLCAAAPLPASSGRTHRHRLNRGGDRHANSALHMIALVRMRHDPRTRHYVARRTTEGLTKKDIIRCLKRAIAREIYKHLTSTTTTNTPPPQDN

SEQ ID NO: 75884 - protein, 339 aa, unidentified
MERRYVGIDLHRRRSVIVTMDETGEVLSSVRIPNDPVAMSIAVAEAGEGAEVAFEATYGWYWLSDLLQADGHHLHMAHPLAMRGMTSHRRVKTDWKDATLLADVLRMGSLPEGWIAPPELRELRELVRYRAKLVALRSGLKAQVHAVMAKNGILPARVEMFGPGGQAQLDAIGVDLPMNFTIRIESLRDLVEIYDREVAMLEREIHRQLKDHAGYQAIQELVGVGKVIGAIFVAEIGDIARFSSPEKLTSWAGLTPKHRESDLTKHQLDITKQGNKLVRWAAIEAVTGMRGGPKLKADYERIAERRGKYRARVAVARKLLVLVYYGLRDGKIRCLERAA

SEQ ID NO: 75885 - protein, 400 aa, unidentified
MTGSRLWAGVDVGKEHHWICVLDASGAVVLSRRCDNDEATIRAVITEIDALGETVSWTVDLTTAYVTLLLTVLADAGKPVRYLSGRSVWQASSVYRGGEAKTDARDARVIADQSRMRSDLPVLRPDDELIRELQMLTGHRTDLVADRTRTINRLRQQLVAICPGLERVAQISSDRGWVVLLARYQRPKAIRRVGAARLATMLTGAGVRHAESIARAAVTAAKAQTVRLPGEDVAAELVAELAQAVIDLDTRINVVDAEIEARFRRHPLAEVILSLPGMGFRLGAEFLAAVGDPDLIGSADQLAAWTGLAPRPRDSGKRTGRLHTPQRYSRRLRRVMYMSALTAVRCDPASRVYYQRKRAEGKRPVQATICLARRRVDVLYALLRDHRTWQPTVPVTAVAA

SEQ ID NO: 75886 - protein, 354 aa, unidentified
MPRHRSDLDAVATIGVDIGKNTFHLVGLGRNGAIVLRQKLSRPQVEARLANMPPCLIGMEACVGAHHLSRQLKALGHDARLMPARYVRPYSKGQKNDFRDAEAIAEAVLRPTMKFVAIKTIEQLDLQALHRVRERLVCQRTSVINQIRAFLLERGIAVRQGLRALRTEMPIILAMTDKLSPRMIHVIEALCADWRHLDARIETVSEEIKTLSEQDDGAKRLMTVPGIGPIISTATVAAIGKGDMFSKGRDFGAWLGLVPRQMSTGGRTILGPISKRGNRYLRMLFVQAARAVLLRPQSWGKHGLKSWIEAAARRLNRFKLAIALANKIARIVWGVLHGGRNFEVRTLRPALQAA

SEQ ID NO: 75887 - protein, 326 aa, unidentified
MNIVFLGIDLAKNVFQLCGLNQAGKPVYTKRPGRKELLQTLANIPACLIGIEASTGAFYWQREFEKLGHKVKVISPQYVKLFVRGQKNDGNDAQAIAVALMQPTMQFVPLKSPEQQDIQALHRARQRIVNHRTATVCQIRGLLLDRGIPIGSAVSRVRRAIPLILEDAKNGLSSRMRRTIAELYDLFNDLGRRIHFFDKEIETVFRQSEACQRIAKVKGIGPETATAVVAVIGKGTEFKNGRHFAAWLGLVPRQHSSGDKHLRTLFIHGARAVVRVATNNNDGHMNQWVNQLKERRGFNKTTVAVANKNARIIWSMLRNDTEYQVV

SEQ ID NO: 75888 - protein, 336 aa, unidentified
MKITTSPLVGIDVSSKKLDLYFFSEKKNKELSKKMDNNTKGFGEIEKSITKSTTIVLEATGVYHYNLCSYFFLKGYTIKVVNPTAIKYYGMSKLKRDKTDKIDARLIYDYGKNMILSQDVKVHNWRKPSVSSLKRQQLLSMIQLETKHLNAYSSQYHSFKNCNDTSQEIFDWLQDKIQAVEEVIADYEKELNKLNTEEDKSFLKLVKTISGIGDKSAMVFLHTFQQFTNFESAKQVICYLGTNPREYESGSSVKKYKGISKMGVKDARKILYMAALSAKKYNTACRSLYKRLRERGKKHKQAMVAVINKLVKQAFAIVKSGEPYNPEYYSLSNRAA

SEQ ID NO: 75889 - protein, 323 aa, unidentified
MIMPPTPTCFNHIVAFEVSKAELVVHTLPADCQQRISNTAAAVRRLLKAEQRSNATHGLGPVLVVCEATGGYERHVLETAQGLGLATHRAHGSRTRLFARFNGYRAKTDAIDARLIARYGLTPGLPLYTPPSPEQAALRQLRQRRDEIGQMLGMELNRTEHASLRRLKTSLARHKAWLEAELKAIEAEMADLIGNCPELDRLATLMQSVKGVGPATAAAILAYLPEIGTISKQTVAAIAGLAPVANDSGQHNGKRHIAGGRATLRTSLYMPALVARHRNPAIRAFAENLKTRGKPNKLILTAVMRKLIVIINAVVASGQPART

SEQ ID NO: 75890 - protein, 301 aa, unidentified
MKTDPVFVGIDISKASIDVELYPASDTKRFANDEVGRKQARTWLKQRAPTLIVMEATGGFEMPLAALLATAGLPVVVVNPRQVRDFAKAIGVLAKTDAVDALVLARFAQAVRPPLRALKSEESQALEAVLTRRRQIVAMLTAERNRLSKAATPIATQIEDHIVWLHLRLDEANDNLDRLVRNSPLWRPKADLLGSVPGIGRVVVSTLLAELPELGQLNRRQISALVGVCPFSRDSGARRGKRMIWGGRASVRAALYMAAICAARFNPVIKQFYQRLWLRANRRKLPSSRACVSSSPYLTSC

SEQ ID NO: 75891 - protein, 346 aa, unidentified
MEVTIGVDPHKGTNAVAVLNDREELLEYAVFATNRAGLRSLTRWAKRFGERRWAVEGASGLGRPVAQHLVAAGETVVDVPAKLSSRIRLLSVGNERKNDRVDAICVAVAALRGERLTEVGEEEGQATVLRMLSERRKDLIKERTRTLNRLHGLLRDLVPGGAPKNLSARKAALLLRGVRPRVDPALTRRRLAADLIGDVRRLDRGLSDLERRIREAIERASTNLIGLFGVGPVLAARIIGEVGTIARFPTKAHFASYTGTAPIEASSAEVVRHRLSRAGNRQLNHALHLVAICQVRHDTEGRTYYRRKLAEGKSEKEALRCLKRRISDAVFKHLYADLEGEISTAA

SEQ ID NO: 75892 - protein, 350 aa, unidentified
MTMLTEIVDIVIGVDTHKHTHTAGVVNASTGTELGDLTVNTDPRGYDMLVEFADQHDGTRVWAIEGTGSYGAGLARHLHAAGEWVIELDRPNRPARRHGAKSDLIDAYRAAREALSRATLASPRAPGTRAALSVRLAARRSAIEAATAAQRQLNALAIAAPEPLRARLREHTIRTMIPIAARLRGHTSWDHETVETAHVLRALAKRIIALETEAADHEHALTVTVKSWRPDLLDLCGVGPINAAIILCAWSHHDRIHSDAAFAMLAGTAPIPTSSGQTVRYRLNRSGDRQLNQALHNIAICRLRYDPTTRAYAERRHAEGKTNREIRRCLKRYITRQLFRQLQNPPLDTP

SEQ ID NO: 75893 - protein, 394 aa, unidentified
MKLIGIDIGKNKHFFCVMDQQTGEIISQPVSFSNDKEGFDFLVQKIKSYPKDSILIGMEDTGHYHFALLKYLLDLQYTVALINPKTTDFNRKMQGGITKNDKLDTINICDVLDTPERKKQYRITKVNSFDLYEQKQLTRHHHNLKEEENVYKNRLQKCIDIVFPEFNKLFNSKYGIVYMNILKMFGSAENIANTDIRTIRKCFEIEGRGNRISLTPERLKECARSSIGISSSAEVIQIKHLTAQIEPIEEQLTEIDKKIEEFSIQNNSPILSIPGISHFSGTSILAELGDISNYSKPSQIIKFAGVAPLHYESSQFNAQHTAITKKGSKYLRKTLYQIILPVIRHNPVFNKYYQLKISQGKGHRCAQGHCVRKLLRIIYHLLKTNQQFDPQLLR

SEQ ID NO: 75894 - protein, 309 aa, unidentified
MDIVVGIDVSKDRLDVAVAPSGLVFQVANTQAGIDDLVSRLEPIGAEVVALEATGGFETAAVAGLSEAGLAVVVVNPAQVRAYAHALGRRAKTDPIDAAVIAAFVAATKPELRPLKDAETQALSALVARRRQIVQMIVAEENRAKMVLAKEAQKSIKRLLTALRRELESLDRDLDDHIRKSPVWRVRETLLTSVPGVGPATARTLLAEMPELGSLDRRQIASLAGLAPFTRQSGTWKGKSFIGGGRGKVRAALFMAALVASRHNPVLKAFRDRLVAAGKPKIVAVVATMRKLLTILNAIIRDEKPWQKA

SEQ ID NO: 75895 - protein, 423 aa, unidentified
MSFNKCGWSPAMKNIKEVRLLISVGVDVSKGKSTVCILKPYGEVIMSPNDYEHTLSDLKKLADQMDSFEDEIHVTMEATGNYHFPIATYLKKRDYDVRIINPLEMKRYRCQGIRNPKTDSIDAFMIAQYGIDFWFRPFQDYVVGDERIELKTLGMQYFKTMKTRQDRYLVLESVIDRALPGIGGVLNGYDKSTGKDKKSDFVYDFYHAKKITVYSENRFCDRYESWSTKKGYRYSEKEARQLYSIAKDSIPTLPSSENTKLMVQDAVKILREVDAALHDILTRMNEIAKCLPEYTTVMDMKGVGVSIGPRLIAEIGDPRRFHSAKALIAFAGIDAPPYQSGKFTGTERHMSKRGSRVMRKIGFELMDTINKHQKLYAGDPVCEYFLAKRAEGKKYRVAMFAAYNKFLRIYHSRVSAVLNENVK

SEQ ID NO: 75896 - protein, 362 aa, unidentified
MLNDKTVVGLDVHAHATQAAVLEMRTGELSFRRVSGPPSEIVGYLQGLPGNVLATYEAGPMGYGLARAAAERDLDVRVCAPGSILRRPHERIKTDRRDAERLARLLIAGELSFVRVPSIEEESFRDLARCREAARGDLMRARHRLGKFLLRRDVRFPGPGSNWTLAHWKWLNGVEFDDPPSRAVLADYLTAVRALEQRRSALNDIIEGTWLESPWADTIARLRCMRGINSTTAFGLCAEIGDFHRFKHPTTLCSYLGIVPSEHSSGEQTRRGPITKAGSPHARRLLVEAAHHYRHTPAVGMALARRQDGQDPRACEISWRAQHRLHHQYRRLRLERGKPANIVTIALARELATFTWEIGQLT

SEQ ID NO: 75897 - protein, 376 aa, unidentified
MEHDSTLYVGLDVHKESITATYALGMGEVELLGKVGTTKTDIDRLCKRLQSKASRIRIVYEAGPCGYGLYRQLQQKGVDCMVCAPSLIPRKPGERVKTDRRDAIKLVRSLRAGDLSEVYVPTVEDEAFRDLARAWVSAKDDLKRARQRLKSFLLSHGVSYSGRADWRAAHQRWLSTFAFDSTWQQLAFEEHRRTIEDRLAQCYRLEAALREAVAAWRFYPAVLGLQTMRGMQFTTAVGMLAELGDLSRFTHPRQLMAWLGVTPSEHSSGEKRRQGSITKNGNSYARKLLVESAWSYQHPARVSPEIQRRHEGIPKPIVDRSWDAQARLCRRYRTLVARGKQKNIAVVAVARELSGFILDIGQLAMSLALQPQQHAA

SEQ ID NO: 75898 - protein, 348 aa, unidentified
MQSTSALPVIGMDIAKNVFQIHVVDVEAGEIGRHKLKRERVTAFFANRQKSLVAMEACGGAHHWARILQALGHEVKLLPAKHMRPFVLRDKTDARDAQGIWVAAQQLQIKAVPVKSEQQQACLALHRMRAQLMKMRIMQTNALRGLLYEFGIVLPEGHRILLDRIQGELGKAQERGRLPAVVVLSVQEQLKRIEGLQADIDQLDKRLASLAKHNQQMQALLAIPGIGPLTATAVVSAATDITSFESGRQFAAWLGLTPRQTGTGGKTRQLGISKRGDAYVRTMLMHGARAVIARSRHGGWIERLLQRRPYNVVVAALANKLARTAWAVLAKGKAFDPLQWNPTEITPA

SEQ ID NO: 75899 - protein, 361 aa, unidentified
MLTMEQSTKFSFKGEKIFVGIDTHKKDWKVGVYHTDIALKTFTQEAKPDILVNYLNRNYPGAEFHCAYEAGFCGFWIQKHLAQRGINCLVVNPADVPTSHKDKEFKTDPRDCLKIARALRSNLLEPIYIPTDEGIESRHLVRLLHDISKSYTRHKNKVKAKLNFYGIEYSQEFSSDNNHWSKDFYNWLRTIKLKSEQGNWTLQFYIEECLKVKELKKQATRKVRELAKKEPYKMFVDLLRTIPGIGLVTAMKILTEIESIKRFSTLDKFCGYIGLIPTSNSSGEKERVGNITTRGNKFLKGAIVESAWMAIRHDPALLHDYLQLKKRMDENKAIIRIARKLVARIMYVLINEKPYQVRQYA

SEQ ID NO: 75900 - protein, 427 aa, unidentified
MAYRIAAIDVHKKMLAVVVADVEGEGEYQFERRKFGASPEQLQVLAQWLLEQEVEEVVMESTAQYWKPVWGTLELYWKPARQQREGATKMSGKLHLCQAKSNRGPRGRKNDFADGERMIKRLVAQELVLSFVPDPEQRLWRTVTRRKQQLTRARVRFKNQLESLLEQAHIKLSSFVSDLLGLSARRMLHAIAEGETSPAALAGLGDCRLRATPAQLRDALGACTQLNGVYRRLLKMALEELKLLEEQMEQLDREASHLMQDHQDAVQRVAEVPGFGVESATQMIAEVGAEASAFESQKDLASWVGVCPGDEETAGKSKSTRSPKGNSTMRRLLNQSAQSAVKVKGSIFEITFHKLLPRLGYKQAIWAIAHRLCRLLWMILHKGIRYQERGPAVSAKSLRTRTARMIKALQKLGYRVEGGPLPAGSPA

SEQ ID NO: 75901 - protein, 441 aa, unidentified
MAKPKNKISVVNNSTAGIDIGSRKIFIGIADKPVVSFGTFTDDFVTAVNYLKENNITSVAMEATGVYWISLYDFLDQSGFDVVLVKADQAKNIPGRKTDVADCQWIQQLHSYGLLRSSFIPPQHIRTLRTFVRQRRTNLQLASDHIRRAHKALELMNIKLQNVITQINGKSGLAVLQAIINGNHNPEKLALLCEDSILKKKKEAVIKSLKGNFSQENIFLLKQAVDAYLFYMKQVDDCDRNIDNHLSLITLHLEVPKKINKPKPIRHHKPNIDDLHLKLVKLTGGKDPSQITGLTDSTLLQVISEVGTDLSRFPTEKHFTSWLGLAPNSHQSGLTNKKKKFKRHTSAGQIFRLAAQAIAQSKHLALTSFYHRIKSRKGSLGAIKATARKIAVIFYNVITKGIEFVEQGIKQYEQKIKERQLKYLHKQAHRFGLTLTPQLQE

SEQ ID NO: 75902 - protein, 312 aa, unidentified
MAMLSFCGIDVSKDRLDVVVLPEGWFFSVSNDTAGWAELVVRLRPLTVSAIGLEPSGGYERGIIRALLAAGLSVRRINPNKLRQFARARGVLAKNDRLDARLIAEYVAIMPTRVVQRDAAVERLAEIVTMRRQLCDEHVAAENQSAHLEDAMLRRLSKRRQMRLEADIRLLDKRLAEMVAANVALAQRYELLTSMPGVGPVLAFTLIALLPELGKMSRKQIAALVGLAPYDFDSGKLKGHRSIYGGRMPVRNVLYMAALSASRYSPALKTFHKRLAAADKKSKVIIVAVMRKMITTLNAMLRDSAAWQPRSA

SEQ ID NO: 75903 - protein, 376 aa, unidentified
MSGKREIACGVDVHNKFIVATILSSDGLKLQDRFYTTLDDLLRFKHWLKENGCHKVALESTGNYWLPIYHVLEGSVNFILANAYQIKHIPGRKTDTLDSEWIAEICLKNLISPSRIFCRDHRELRSLTRTRESLIKVRTKIKNKVTHELEAACIKLSLVLSDVFGKSGRHIVDGLLKGMDLEEILERIPSRKVKANKEEIRGTIQANLSPLQIFLIQSHLDMVDAITKQIAEIDSKILNQLSTRNEDMRIALSMPGMGFVSASTILAEIGDFRDFSSPDKLAAYCGLVPSVYQSAGKLINGHITKHGSPHIRSMIIEVAHAIIRTSTCYYPDEARLKTQKVLPESQGKKRHKNWRRCSSEKGTVHTLSPADQSRTL

SEQ ID NO: 75904 - protein, 320 aa, unidentified
MERGGFVGIDVSGDRLDVAFRPGGERLQVSNDARGITRLTRMLERSQPELIVLEASGGYEVALLERLFAKKLPVALLNPRHVREFARASGRLAKTDAIDAEVLAHFAQVMKPEPRQMADPETRKLRALVTRRRQLIQMVTAELNRRRHSLEVVREGFVATIRCCKRQIAAIDKPLATLIQQTPKFRQKAKLLRSAPGIGGIASATLLARLPELGTLDRKKIAALVGVAPYNRDSGKIKGKRAIWGGRGDVRAVLYMSTLVAVRLNPSLREFHQRLRRAGKSPKMALTACMRKLIVILNALLKNELPFDGNLTSIVGAVSS

SEQ ID NO: 75905 - protein, 410 aa, unidentified
MHPLIDRCAGLDVHQATVMATVRIPDEHGGRQVITETFGTTTEALVTLRDWLQAYGVTHVAMESTGVYWKPVYYLLEDACTLLLVNVQQLKQVPGRKSDVRDSAWIAQLLEWGLLRGSLVPPAPIRDLRELTRYRKHQTRDRAREVNRLHRVLEDAGIKLSSVATDVMGASGRAMLTALLHGTTDPAVLADLAKGKLRKKLPALRHALAGRFRGHHGFLIGQILAKVDFLDETIATLTEEIDHLVAPFEPMVAKLDTIPGLDRKGAITVVVETGGDMSRFPTAGHLCSWGAMCPGQNESAGKRHSGKTRKGNRYLRTALIEGGLATTRATGTALQARYYRVKRNRGHKKAVVAVGHQILEIAYYIMRDGVSYQELGPDYFDRRHRNRAVRRHVRQLEALGYRVTLDIEAA

SEQ ID NO: 75906 - protein, 354 aa, unidentified
MSHKLNSGVAVIGIDIGKNSFHIVGQNQRGAIVLRQKWSRDQVEARLANLPPCLIGMEACVGAHHLSRKLQMFGHDARLMPAKYVRPYSKGQKNDFRDAEAIAEAVQRPTMKFVATKTADQLDLQALHRVRERLVGQRTGVINQIRAFLLERGIAVRQGLRSLRSELPGILATRTDVLSPRMLRIIEDLAGDWRRLDERIEGLSNELETLARQDKACERLMTVPGIGPIISSAMVAAIGTGDVFSKGRDFGAWLGLVPKQISTGDRTILGKISRRGNRYLRVLFVQAAWVVLVKVKCWERYGLKSWIEAAKKRLHHNVLAIALANKLARIAWAVLNKGRAFECVKTEETASRPA

SEQ ID NO: 75907 - protein, 333 aa, unidentified
MKNYDLFIGIDVSKLKLDITGIDACNAIKIKHSIIKNTLPEIKKYFKNLLKKHHETIIIGFENTGIYSVLIATVLHELYIDYCQFPSLEISRSKGISRGKSDKIDALQIAQYLITHRFKIKLSTLAENHMVEMKLLYTHREKIIKSIAQYEKEFENKDFLPKQIQKQLIKSTKSILKTLKNNLKNIDNRLAEIINENTSLIKNFNLVTSIPGIGKQTAIYLLIVTKNFTTFKDARQLACYAGIAPFPYQSGSSIRGRTKVNNLADKRLKSLLNMCALSANKYDSELKLYFEKKVSEGKNKMLVLNNIRNKLLARVFAVVNRQEPYVNLKKYAA

SEQ ID NO: 75908 - protein, 410 aa, unidentified
MAVVKQAMVVTLFPEIPLNKEDVTMTTMTCSVECIAASVTTTRALLLAFELGDRHWKLGFTTGLGQRVRIRQVAAGAVEQVLEEVARAKRWLKLPAEAAVISCYEAGREGFWLHRWLEAQGVTNRVVDSSSIEVNRRARRAKTDTLDLAGLLNLLARYQLGDRRVWRVVRVPSVEEEDARQLHRSWETLQQDRTRLMNRLQGLLMTQGVRLPVTTDFLERLAAARLWDGTPVPAGLQRRLTGVWTQLELLNQQLKALATTRASLPADPETTTGRYVQRLPTLRGIGPIGAWVLATEIFGWRQIRTARELGGLVGLAPAPYQSGETARDQGITRAGNKHVRRLMVQLAWSWLRYQPTSALSLWYQQRFGQGSRRLRRIGIVAVARKLLIAVWRYVEHGVIPSGATLKPEAA

SEQ ID NO: 75909 - protein, 331 aa, unidentified
MKISNVIGIDVSKLTIDVVIHGNQKHGQFENSGKGFREMCKWALKNSLSPKGETMYVFEHTGLYSYQLAIYLDGQGLPFNIVPGLEIKRSLGISRGKDDKVDASKIARYGYRLRDEMEPYELPSEDLEKLKRLLSLRNRLVKQNAGYKASLNEWKRVLAQNGDKVLFGVQEKMIKYLGKQINAVEKEMGTIVKRNDKLKKQYDLITSIKSVGPQTALFMIVYTAGFTKFKAWRKFASYCGTAPFPHSSGTSIIGKDKVSHLANKKIKSLLDQCAKVALLYNTEMKLYYNRRIEEGKNKKSTRNIIRNKLLARIFAVVQSGKPYVETMKFAA

SEQ ID NO: 75910 - protein, 374 aa, unidentified
MVVVGVDVHKASHTLVAVDAGGRKLGELTVKSTSDGHMKALGWARRVFGCDLVWGIEDCRNLSLRLERDLLDAGQRVVRVPPQLMARTRASARTWGKSDPIDALAVARAVLRERDLPVASHDSVSREFKLLVDRRDDLVARRTAVINRLLWRVHELDPSHAPKPGSLGTDKHQEALRSWLATQPGLVAELARDELTDIMAVTKLIKALQKRIAARVRATAPSLLNVVGCGELTAAKLIGETAGVSRFRSEAAFARHAGVAPIPHSSGPNTVRRKGVRSGNRQLNAALYRIAMTQIRHNGPGEAYYRRRRDAGDSHAEALRRLERRVARTVFGHLRSEHINTAAPHDPIPSLPEPQQPTAASPMVRTRTGLALEE

SEQ ID NO: 75911 - protein, 411 aa, unidentified
MEVTYKRCCGLDVHKETVVACLLIREGGKVLKEIQTFLTMTVDLVVLHDWLKAHQVTHVAMESTGIYWRPVFNLLEEDFTVLLVNAAHIKTVPGRKTDVKDCEWIADLLSHGLLRGSFIPPEPIRDLRDLTRYRKSLSDERVREVNRLQKFLEAANIKLSSVATDVMGASGRAMLEALASGGTDPQALSELAKGRLRKKLPELKKALEGRFRPHHRFMVSEILTHLDFLDESIERVSQEVSIRIVPFSPKVDLLDLIPGIDQRVAEGVLSEIGVDMSCFPTDGHAASWAGLCPGNNESAGKRKSGKTRKGDRWLRRYLIEAAWAATRKKGSYLSALYHRLVVRRGKKKAIVAVAHRLLVIIYHMLKDHGTYRELGSDHFNKLNAAYVRRHHVKRLESLGFKVILEPISEAA

SEQ ID NO: 75912 - protein, 408 aa, unidentified
MNVVHERCCGIDVHQAKLAVCVSIREEGKHETHRLLCGTTTGELLRLVDWLHGHGVTHVAMEATGVYWKPVWHLLEGQFELLLANPMQVKALRGRKTDLRDGERIADFLQHGLLQGSFVPSQPMQQLRDLTRNRTLLKQEQVRISNRILKVLEDANIKLNTVVSNMMGASGQAMIRAIVSGKWDAGELAEMARGRLRGKIPALREAAEGRLTEHHRFLLEQWLAMWDELSKRVGLFEERIEEQMRPFEWAVKTWMSLPGIDRVTAWTMVAELGVDMRQFPTAGHASSWVGLCPGDDETAGKRKSGRTRNGNRWIKQALSQAAWGARATKGSYFKALYHRFAARKGAKRTIVIVAHALLETGYALLRTGRTYADLGADYFDRLDREHLTKRLVKRLEHLGHKVTLQPAA

SEQ ID NO: 75913 - protein, 334 aa, unidentified
MKNYSLIIGIDISKLKLDIIGIDANSETILQHQIIENTVSKINSFLKKVIKKYGINDVLFSFENTGVYGYFLASSLDKMNVDYCNLSALEIHRSIGIKRGKSDKIDALVIAKYTLTNRFKLKLSVATEQHLMELKLLYTQREKVTKAIRQFQNNKETELFLPKEMLSKFSKSNTSIIKNLKRNLKLIDTQIVSIININSSLKKDYELVQSIPGIGPQTASYLLIVTKGFTCFENARQLACYAGVAPFPYQSGSSIRGRNKVSHLADKKLKSLLNMCALNAKKYDYQIKIYFNTKVDEGKNKMLVLNNIRNKLLHRVFAVIKRQQPYVNLHNFAA

SEQ ID NO: 75914 - protein, 343 aa, unidentified
MKLTRVGVDLAKAVFQVHGVDRSEKAVWRQRLSREKWLKSVLDKIEPGCEIGMEACAGAHHWARALQEKGFAVKLIAPQFVKPYVKSNKNDAHDAEAICEAMARPGMRFVSVKSVEQQDIQAVHRVRTGLISQRTAKANQIRGLVAEYGLIAPKHLGRLRAAVPDWLEDAENGLSSRFRRLLNGLWGDLQQLDERVTELDHEIALIAKSDPVASRLQQLRGVGPIGATALVAAVGDARQFANGRQMAAALGLTPKQHSSGGKERLLGISKRGDSYLRCLLIHGARSVIHAAKGKSDRLSQWVSELARRRHPNIAAVALANKTARIAWAMLRNGTDYEPQRITG

SEQ ID NO: 75915 - protein, 387 aa, unidentified
MTVLTVNNLPAATHGETVRCLFAIEMSGLNWVIAFNTPLSEKISRRTLTGCKWKRLLELIEEVRARVGRETGRAVEVISCYEAGYDGFWLHRQLSAHGISNYVIDPASLQVDRRARRVKTDRIDAERLLRSLMAYLRGEPKVWSVVRVPSVAEEDARRLHRERDRLVSERVQHVNRIKGLCALQGIYDYNPLRPQAMARLEQLRTTQGGALPPRLKSEIKRELQRLELVVEMIATLETERDAIVKDEASTHVNAKKIQNLHKLKAIGPEFAAVLVGEVFHRDFTNRRQVASYVGFAPSPFQSGSVAHDQGISKAGNRKGRTTGIELAWLWLRYQPDSDLSVWFRARVGTTKGRIRRIAIVALARKLLVALWRYLETGVVPRGAVLKG

SEQ ID NO: 75916 - protein, 481 aa, unidentified
MILFRRVPRIDRLRPISNRFKLQQREDMPKKSSKKAKSQRSRERNLLAKVHLNAAGIDVGANEHWVAVPEDRDPYPVRRFGVFTSELIVLCNWLKQCQIETVAMESTGVYWIALFQVLERNGFEVRLVNASHVKNVPGRKTDVVDCQWLQQLHTFGLLRGSFRPEAAMCVARSYLRLRDTLTKDSNSLVQRMQKALTEMNVQIHRVISDITGLTGMSILRAIIAGERDCVKLAQLKHPQIKSSTEVLAKALEGDYCQEHLFALQTALELYDSLQLKILGCDKRIEEAFKAFEAKVSLPAPDLSRLRSAEKRREARQRHHLEQMTGADLTTLPGLELLAVQRILSEIGRDMTRWPTEKHFCRWLGVAPDKRVSGGKPLPSKPRKNANRAAAALRLAAQSAMQSKTAIGAFIRRIKSRLGAPTAINAGAHKLARLLYRMLKFGKAYVEVGQQAYEKLFKERMLRNLQRKARDLGFQITPIPSQ

SEQ ID NO: 75917 - protein, 353 aa, unidentified
MAHRKRARVIVGVDTHRDLHVARAKDTLGRALGEITIPASAKGYRALVSWSRRLGEIQAFGVEGTGCYGAGLARHLRAEGEVVIEVIRPNRQARRRRGKSDPADAEAAASAVLSGEAAGIPKAGDATVEMIRALRVARQTAIRARTQAINALHALVVTAPEELRQDLRALPGRRLVRTCASFRTGELTDPLSATKAALRSLARRHEALSAEVRELDRELGRLTNQACPKLLGIFGTGPDTAGALLLAAGDNPERVHSEAAFAKLCGVSPVEASSGKTMRHRLNRAGDRHANAALYRIVMVRLRQRHQATIDYMARRTADGKSKREVIRCLKRYVAREVYRTLTETDSATSIAR

SEQ ID NO: 75918 - protein, 370 aa, unidentified
MLDTTTFVGLDVHARSIKAVSLDVMTGEVRCATFGYDAGAVAEWVRSVDPKAKCVYESGVTGFDLQKRLSGLGVDCVVGAVSKMIKPSADRRRENDRNDAEFLARMLSVGNVVEVWVPDDECEAARDLTRALEDARDDLSRSKQRLSKFLLRHGLVFDERTPTGRRKGNWTRAHWSWIESIRFAEGADNEALAYYVDAVRRAAEDKARLEGLVEAETRKPRWRKRVDSLRCLKGVDTATAADLVFEAGEFSRFRNARSFAAWVGLTPSEHSSGESDRRGAITKAGNKHLRKALVEAAWHYLTCSARPKEPARGQAPDPGARRHAAKGVRRLVERRGALLARGVHNNKANVATARELACWVWAVGLMAEEA

SEQ ID NO: 75919 - protein, 341 aa, unidentified
MTGVSTIGLDLAKNVFQAHGADAAGAPVFRKKLRRDQVLAFLVTQPPCVVAMEACPGAHHWGREIGRLGHTVKLIAPAYVKPFVKRQKNDAADAEAICEAAQRPTMRFVAVKSEAKQAAAVIFRARDVLVGQRTQLINALRGHLAEYGLIAPQGPAHVERLIAQIEDPSSDIPQAARACLAVLVGTLRHLQEQTAALDAEIAARAKADETAQRLMSVPGIGPLIATAIEALAPPTGTFRSGRDFAAWVGLTPVQRSTGGKERLGRTSRMGERTLRRLLIIAASAVVRWAKRKGVPSGSWLGRMLARKPPMLVIVAVANKNARIAWALLTKGGFYRAPAVTA

SEQ ID NO: 75920 - protein, 338 aa, unidentified
MKLYGAIDLHSNNNVTVLSDEQDRVVYEKRLPNDLSLIAEQLATYRDSIQGIVVESTYNWYWLVDGLMDEGHKIHLANTAAIQRYEGLKYTDDQYDARWLAHLLRLGVLPQGHIYPKQHRPVRDLLRNRGQMVRQRTMNLLSIQNLFSRNTGGSMSANRVKRLESKEIEELIPNADLALAIKANLTMLQCADGQIDILEKAVIGRVKLKPEFELLKTVPGIGLVLALTIMLETGDIARFATVGDYASYCRCVGSKKISNGKKKGQGNTKNGNKYLAWAYVEAANFAIRFNAKIKSFYQRKKLKTNGIVAIKAVAHKLCRACYYIIKDQVAFDVTKAFA

SEQ ID NO: 75921 - protein, 369 aa, unidentified
MGLDVHAETIAVAVAEPDGEVRSLGTIANREDSIRKFIKKLGPAEHLRACYEAGPTGFVLYWQLAQLGVKCDVVAPSLVPKKPGDRVKTDRRDALKLARSHRSGDLTAVWVPDEASESLRDLVRQRKAAKRDQLRARHRLTKFLLRTGHRPPVGVKAWTERYMEWLQQIHYTQPAQEATLLDCMNEVEHMGERVRRLEQVIVEVVQLAPAPMQEVIRGLQALRGVAHISAVTIAAELGNISSRFENARALMGYSGVFPSEDTSGKRVRRGGITKSGNAHLRRIVVESAWSYRHRPWIGAKLRRRQEGVPAEITEIAWKAQNRLHKRYMTLMARGKEQRKTMTAVARELLGFIWTIGIKAEAACKQQMAA

SEQ ID NO: 75922 - protein, 328 aa, unidentified
MNGTKYVAMDVHTATISVAVLDDHGKLIMESVIEAKGATIIQFIQGLRGELILTFEEGTWSAWLYDLLQPYVANIVVCDPRRNALLQEGSANDRIDARKLAELLRAKLLRSVYHGQNGLRTLKELARAYLTITKDLVRIMSRIKIAQPSVRRRAEFFYGQLDALVPLRKQARQELLADSIKHPAWKLLRSIPSLGPIRAAVVMAIVQTPHRFRTKRMLWKYSGFGVVTQTSADHRYVDGQLRRSKKPAFVRGLDPAHNHQLKDVFKSAAIQASTTKGPFREFYESLVAKGMRPEMARLTLARKIATISWMVWKKGVAFDAKNLKPQTA

SEQ ID NO: 75923 - protein, 381 aa, unidentified
MKKDTRFVGLDVHAETISVAVVELDGEIRSWGSIPNRPEAVRRLVKRLGRAEQLRACYEAGPTGYVLYWQLTALGVPCEVIAPTLVPQKPGDRVKTDRRDAEKLAVLLSGGHLTPVWVPDAGHEALRDLVRAREAAKRDQLRARHRLHKFLLRQGRRAPMGIKAWTEKHLQWVRRTVRFEWAAQEAVLLDYLTEVDHAHDRIARLERDLDAAVGAAPERMRAVIRALQALRGVALVSAATIVAEVGALSRFARARQLMGYSGMVSWEDSSGGRVRRGSITKTGNAHLRRIVGEAAWCYRHRPAVGAALRKRQEGLGEEVKAIAWKAQHRLCSRYRRLLAKGKTKQQVATAVARELLGFIWAIGVQVEQAHTPVRVQRRRAA

SEQ ID NO: 75924 - protein, 358 aa, unidentified
METTNLKQKVDFTDKNIFAGMDVHEKSWNVSIFLEDMFLRSFTQQPSVEALEGLLKRDYPGANYLCGYESGYCGFSIQRKFTKLGIACQVLHAGDIPQTNKEKLLKRDPVDSRKIGEALSTKKAKPIYIPDEESEQDRGLVRYRDRVQKDLTRCKNRIRSILYEFGIYLPERFAKGWSNRFIQWLQETEQVIGSTRTTLNHMIEQMVAHRSLLLKVNRDIRALRNSPKYKQKAQYLTSIPGIGPLSAMIILTELIDIRRFGSFRELNSYVGFYPMEHSTSDKEHKGGIMIRHNKHLRKLLVEDAWVAMRHDPALTLAFNQWSVRMTGKRAIVKVARRLLSRIRYVLINETDYTKGIVK

SEQ ID NO: 75925 - protein, 464 aa, unidentified
MHLGGFSPRLFNVDELPKRTAVCCITQVKSTSSKVRIPTRAIPSLHNSGRDLMQDILTCAMGLDVHRDVIVACLARGELGTEPEIEIRSFSTLIPEMRKLRDWVLEVECRHVAMESTGIYWQPIYEMLEPCFDGQINILVVNARHMKNVPGRKTDMRDAQWIATLLRAGLLKGSFIPDKTFRELRHLTRYRKSIVRDITAQKNRIDKFLQSSGFRFTAFLSDAFGASGRNIIRHLMEYGNISREALDRCLKTQTRKRIDEILIALNGSLSEHQRGFLRMIFGHLEALEQHRHTVEDAITKEITKHEEALSLLCSIPGIDVTAAAAIIAEIGTDMSAFPDSQHICSWAGLSPGNNESAGKRKSAHINKGNPYLKSMLCEVGWVISGKRSLYLSGWYWRIKQRKGAKRATIALARKLLALIYTMLKTGSPYNEDCFEIRRKQSERKRASRMVNELQKLGYFVVAPG

SEQ ID NO: 75926 - protein, 409 aa, unidentified
MQAMYERCAGLDVHKKTVVACVVTPTGQETRTFSTMTVDLLALSDWLVAYGCTHVAMESTGDYWKPVFNMLEGTFEVLLVNAQHVKAVPGRKTDVKDAAWLAELLQHGLLRASFIPPVAQRELRDLTRYRSTFIRERVTLINRVQKLLEDANIKLAAVASDIMGVSGRAMLAALLAGHTDPQALADLAKGRLRAKRELLAQALDGRVKPHHRFVLTELLCQIDSLDETITRFDTQIQEISPPFEAAIGLLDTIPGVARPTAEMIVAEIGTDMSRFPSADHLASWAGVAPGNHESAGKRTSGKTRQGNRFLRTVLVQAAHAAARTKGTYLSAQYRRLATRRGKKRAIMAVAHSMLVMAYHMIQRQEPYHEAGADFFDRLQPEDTARRLVKRLEHLGYHVILQSSSTEVMA

SEQ ID NO: 75927 - protein, 374 aa, unidentified
MKNFSTFIGMDVHKETIAVATAGKHGTPLYYGEIANTSEAITKLVKKVVPARSKAVFCYEAGPCGYGVYRQITDMGYRCDVVAPSLIPKKAGDRVKTDRRDAISLVRLLRADELTAVWVPDEQQEAMRDLTRMREDMKNMERQARQRLSGFLLRNKKVYAGDSKWTQAHFRWMEEVRFESPVQQIVFQEYVDVVRHLQGRVTAVEQEIRKALEGWSLRLVVEALMALRGVSIVTAMTIVAEIGDISRFESPRQLMAYLGLVPSEDSSGNRQKRGGITKTGNGHVRRLLVEASWSYRLPARKTAHLQRKAEKTSEAVQAIAWKAQKRLCSRYWHLIQKGKLKVQACTAVARELAGFIWAIGREIMGKNNTPVMVA

SEQ ID NO: 75928 - protein, 409 aa, unidentified
MDVILDRVCGLDVHKDSIKACVRVPGEGRKRDQHIATFGSKTEDILALRDWLEQWKITDVAMESTGEYWKPIYYLLEDRFHVLLANAAHIKNVPGRKTDAKDGAWIAQLLECGLVAKSFVPPGPIREIRDLTRYRKTLIRQRTEEVLRLHGVLQRAGIKLSSVASNIMGVSGRAILKALVKGEKDPEAMAELARGQLRVKIPLLKRALEGQFTKHHGQLVSHMLSHIDYLEEMIADISKELAELLVPYEPQLALLETIPGVQRRTAEMIIGEIGVDMSQFPEDRNLSSWAGVCPGNRRSAGKRKPEKIRKGGQWLKPALTEATWAAVKENKSYLSAQYHRLVPSKGKKKAAVAVSHSMLVCVYHVLKKATAYRDLGSDYFLRRNQEATKRRCLRQLEQMGFGVTLQKLA

SEQ ID NO: 75929 - protein, 387 aa, unidentified
MISVGIDIGKRSHEVCLMDAEGHQIGKFIRFQHSREGMTTLVELLRRQSEPCIIALEATGHYWLALYHHLLQDGFKLVTVNPLQSHAYRRSTIRKVKNDRRDAWIIADLLRIGRVRPGYVPGPDIQPLRDLARFRMELVDQVGDAKRRILGVLDKVFPEYESFFSSIFIATSKELLKRAATAEEFAALDLKEITQVVTKASRGRLGLERAEKLQQAARTSLGLPYLRDAATVELRCLLAQVEFLESQVKATEEAINKLFSQVSQHLTSIKGIGIMSAAAIYAEIGDIHRFSTPESLVAYAGIDPTIFSSGEFEGTKRHMSKRGSPYLRKALWMAATGARRWNPDLDVFFTKKLQEGKSYGVAMGALCHKLLGRIYVILKENRPYEVR

SEQ ID NO: 75930 - protein, 411 aa, unidentified
MDVLYPVCCGLDVHKKTITACLRFASARARAEEVRTFGTTTRELLRLADWLTAAGCTHVAMESTGVYWRPVYHILEASFEVLLVNAQHVKAVPGRKTDVKDCQWLAQLLEHGLLRGSFVPPAPLRELRELTRYRRQLVQEHAREANRVQKVLETANIKLGDVATDVLGVSGRAMLQALIAGERDPERLADLARGALRQKAEALREALVGRFTLHHAFMLQGLLDHIEFLDQQIARFDERIEEQTRPFGPAIERLDTIPGVGRRSAEQILAELGDDMRRFPTAAQAASWSGICPGNHESAGKRRNGRTRKGNAWLRSTLVESARAAVRNRGCYLSAQYHALARRRGDKKAIVAVGHSILVAAWHILRDGVEYRDLGPDHFDRLNRERLVQYHTRRLAELGLTVQLPGAQATA

SEQ ID NO: 75931 - protein, 352 aa, unidentified
MSIKDSISAGVLNPGCETADVERIFNDEESVRRLIGRLGEPGLLRVCYEAGPTGYDLARLLGRMGVSCQVIAPSMIPKAPGDKVKTDTRDARRLARLHRAGELVAIRVPTPLEEAVRDLCRTRGDMVEDLTRARNRLTKFLLRHSNIWRGGSNWTVKHEAWLAAQRFDEPALQTTFEHYRAVVISRDAQLAAVEADLRAWLGREPFAAPVRRLAAYRGVTAMGALSLQAEVCDWRRFGRAAQMMGFVGLVPTEYSSGGSTHRGHITKAGNTHLRAQLVESAWAYQHRPYVGSEIAKRHDGLPPEVVARAWKAPLRLCGRFRHLAARKNTKSVVAAAIARELAGFLWAEMTAA

SEQ ID NO: 75932 - protein, 341 aa, unidentified
MEQVNTIGLDIAKHVFQVHGADAAGHALFRKRVTRAKLLGFLAAQPACVVAMEACAGAHYWGREIGKLGHRVRLIAPAYVKPFVKRQKNDAADAEAICEAAQRPSMRFVPVKTEEQQANGIVFRARDLLVRQRTQCVNALRGHLFEYGYVFPQGITHVATLVALVEDPQSSLPESARVVLKLLVNTFTALDGQIAALDAEINQRSKTDPTARRLMTIPGVGPIVSTAITALVPIAEDFRAGRDFAARLGLTPLQNSTGGKQKLGAVSKRGERTIRRLLIIGASAVVQQASRRGAPKGSWLAQMLARKPKMLVTVALANKMARIVWALLVKGGVYRAPVAAA

SEQ ID NO: 75933 - protein, 452 aa, unidentified
MAKKSKRRCDTLPVLHPDAAGIDVGASELYVAVSADRDPHPVRSFPTFTRDLHALADWLEQCGIHSVAMESTSVYWIPIYQILEARGLEVYLVNAQHVKNVPGRKTDVSDCQWLQYLHSVGLLRASFRPPGFICAIRSLWRHRSSLIQMAAEHVLHMQKALDQMNLQIHRVLNDITGVSGLKILDAILAGERDPLTLARLCHGGVKNSEDTIAKSLEGDYRPEHLFALRQSLAAYHYYQKLVLEVDHEIKLQLGELQTAATAETTIPARTKASAYQRRRYEPKTFDLRGELYRIFGVDLTNVPGISAITAQTILCEIGTDVSRFRNASAFASWLGLCPEKKVSGGKVLFTKSRRVRSRVATALRMGAQSLHHAKDYLGEFFRRITRKLGRPQAITATAHKLARIVYHLLGTKEAYNESVFHKFEADTIRRAEHRLRRQAAQLGFQIIPSENG

SEQ ID NO: 75934 - protein, 402 aa, unidentified
MDVHKSFVYACIASTNDQGVTTYKSKRFSTFTKDLRFCAEWLAANNCKDVCMESTGKYWIPVYNILEQTCNVVLAHPKYVKAIKGKKTDKKDAKWIADIFKHDLVSGSFIPPADIRQLRDLVRYRWKLTNFVVGEKNRAQNCLTVSNIKLDDVFSDVFGKASSNIISRMLDNPSEKITDVADFRTKGMKATDEEVLAAVDGEFCPEQAEKLRIIRSHMDSLELCKLNVESLILTVAEKYIPQIDLVSTVPGIQTFAAIGIISEIGVDMSVFPTSKHLCSWAGLTPQNNESAGKKKTTRIGRAGDYIKPLLVQCALCAIRKKSNPEIRNRYLSIKKRRGHKKAIIAIARMLMTAIYNILKKNEPYNSDLYIRSNDPPAHRTVSVDEAIFILQRQGYLVTPATS

SEQ ID NO: 75935 - protein, 269 aa, unidentified
MMSEVILGIDVSKKTLDAALIFENWVFCKQFQNSCDGFKELAAWLTSLQIERLHACLEATGIYGEAVALFLHECGHLVSVVNPLRIKGYAQSNMRRNKTDRLDARLIADFCLTQKPDVWQPPLKEVKHLQSLVRRVEVLEEMLLAEENRLANASAEIKPSIERMRRLLKAEIKELQQQTKRHIDRHPHLKEQSALLQTIPGIGARTAHLLLSEIEFERYSSARSIAAQAGVVPRKRQSGTSLKQTSLSRARQRTNQTSIVFSGDYGKAA

SEQ ID NO: 75936 - protein, 417 aa, unidentified
MDEGEKASPCRNIALDIHKYYSVIGGVDRDGKEVMEMCRVEHADLEDWLQKHLLKTDRVVIESTTNAWHVYDLLEPWVAEVLVANPIKVKQIACARVKTDKKDTLILARLLAANLVPTVWVPPKHVRELRQFISHRRKLANMHTQVVNRMHSVAHRHHLNHPKGKDFQPKNTLWQQDKVLSRLEKTQLELDMATREHLEKQSEQMTRELARMSHEEPWASDMLYLMQAPGCGVVTGMTILAAIGDITRFETPKSLASYSGLTPGLEQSGVKLREKGITKEGRRDLRWAMVEMAWRAVRSDPHWKKYFDGLKKRMHANQAIVAIARHLLTVVWSVLTNHEPYRHFSPERIAYKYLIWAWALHEEERQGMTRPQFARYYLMRLGIGDELKRVALNPEFPYKLASVEEVLELHPELRSPS

SEQ ID NO: 75937 - protein, 328 aa, unidentified
MLYVCILDSQGETVVHKNIKANPEALLRLITPYQDNIVIGVECMFSWYWVADLCREKGIAFILGHALYMRAIHGGKAKNDKIDSHKIATLMRGGMFPEAYVYPSEMRGTRDLMRRRMHLMRKRSELLAHVHNTNSQYNLPEIKKNLRYAFNREGVADRFNDPSVSKSIDLDLNLIDFYDKQLSKVEWHIQQHAVDCDQHSLILLRTVPGIGKILSLVILYEIHTIERFPSVQNFASYSRLIKCKRESAGKSYGTAGAKIGNAYLKWAFSEAAVLFLRKNPDAQDWLKKKTNQHNKARALTILAHKIGRAVYFMLKRHTIFDQEKFLNI

SEQ ID NO: 75938 - protein, 345 aa, unidentified
MNKQVCVPQATVFCGVDVSAASLAVAVIEPEGSLTQREFPNTASGHEALLGWLKKRNSPVRVSLEATGIYSLDLSLALDSAAYIELMVLNPKLVNRFAQTLRRSKTDQADAVVLAEYSLRMRFCRWQRPAASHLVLRTMSRYIGSLVVEQAGLKTRLRSAESTATTPRAVLVDLKRALAAVERRVKRLRATALKLVEAEVELHRRYQLLTTVPGIGAVNALTILSELILLAPEMTVRQWVASSGLDPMHQQSGTSVNKPSRISRAGNRRLRAALYMSALSASRYDRHLAAFYRALRARHKTAMQALMAVARKMLHAIHGIFKSGAPYAGRRLFPHIQIEVESIAG

SEQ ID NO: 75939 - protein, 342 aa, unidentified
MYYIGLDVHKKSISYCVKDASGQIHQQGKAGATRWELDIWMKTLPQPWTAAMEATIFTGWIYDYLKPHAAGVKVAHPLMLRAIAASKKKNDRIDASKIADCLRCDFLPECYMDSTEIRERRRTLRYRSLLVRQVVQLKTRAASLLMETGVSYDRQHLHRLGFIPELLARKDAIDQSIRPLLRVSHDSILRLRHIETALIRSLQRDPLLAERVRRLQTIPAVGKITALTWALEMGDIARFPSIRQAISYCGLCGDEQKSADKTVRTPLSKKRNKHIQHVLVEAAKLAPRYDPDLALLYAREKQKGNANRATLAVARKLLAYLLAVDREKRDFVPIREFSSTAA

SEQ ID NO: 75940 - protein, 352 aa, unidentified
MSSIFVGCDAHKHYSQLEVQDSSAQVLRRLRIDHSRGTLSSFFTKLPPGTPVALESVGNWYWIADEIEAAGCRPLLTNPAKAKLLMGHVNKTDKLDASGLTTLLRLGSLPSVWLPPAALRDQRELPRTRMTLCTWRTRIKNRVHSLLAKYNLSPQDGSTLFSQRGRAWLDSAVPSLPPETGRCLTQQLRLLDYLSLQISELEDRIRSQIALTPAMQLLKTIPGIGDMLAIVIERELGSITRFPSPQQFSSYSGTTPRVISSGGKTHYGKMRTESNQYLKWAFIEAANAVSAHHAQRGWIDRHCSKLYLRVRARKGSSVAIGAVARHLAESTYWVLTKNEPYHEPTKVSPRQG

SEQ ID NO: 75941 - protein, 384 aa, unidentified
MTQFPVPNPVPADRTLVLAIELSNTSWVLAAQVPGLPRVKAKRTIEPTAEALLAAIQGYRERAQAAGRQVERVVATYEAGWSGFWLARWLATHGIETHVVQPSSVPVDRRARRAKSDGIDAELLLRTLLAWLRGEPRVCSMVPVPDEADEDARRCIREREELVAERVALVNRIGAVLATLGVGEYNPLLRNRRERLDALRSALGTVLPPHAHAKISRMLDRLDLVRAQIAALEQERDAVLENEAPDRAGEMIQQLATLRGIGVQSATVLVREAFVREFANGKALGSYAGLCATPYSSGGTEREQGISKAGNRRLRTVMVELAWLWQRYQPGSAQVSWFRERVGGTGARMRKVMVIALARKLLIALWRFATQGVVPEGAVMKPVS

SEQ ID NO: 75942 - protein, 411 aa, unidentified
MLYIGIDWADDHHDVCCTDDTATTLAQFQIAHSTEGFAALHAQIAQHQADPAAVLVALETTRGLLVYDLLCQGYQVYAVNPKAVNRYKDRHVLSAAKDDRLDALAMAHLLRTDRHRFKPLAPAPEHYRLLDRLCLDLRKLIDDKTRLSNQITSCLKEYYPQAVGLFRDVASPITLAFLQTFPDPETVQQTDRNAFAAFFRAQHYTHPQRVDALYERTHAPAPVADPVVVRAVKIRLAALVDQLAIVRTHQGTYEHTIQTILEEVPEAQPLATLPGIDTRLIPELVAALGPHRPEEPKRFAAASDLAKLSGCAPITRASGKRRTVLRRRACDKRLRRTFYDWAMASLSWSRWARAYYDHHKAQHQAHATILRGLGQKWAKIVYAVWSSGAPYDEARHIEQLKRHKVVWALSL

SEQ ID NO: 75943 - protein, 358 aa, unidentified
MGEITRVGVDLAKRVIQVHAVDATGRVIVAKQLQRDGFTAWCAQLPPGCVIAMEACSGSHHWGRRLRAMGMEVKLLAPHFVSPYRLSGKTGKNDAADAAAICEAASRPTMRFVSVKSVEQPSMMALHRWREGYKEERTACINRIRGLLAEFGLVFAQRPEVLRAVLSEVVEDAANELGAIARMALQRAHLHWIELECHIAWCDERIARHVRSDEQAKAAAKLCGIGPVTASALVATVDDFKQFKNGRQFSAWMGLVPRQSSSGGKAVLGEITKRGDEYLRTLLIQGAKSAVFTAHRRSDRLSRWIVQLRDRVGWQKAAVALANKHARILWSILVEGQSFDPEHVPTKHRMPSLAAVAS

SEQ ID NO: 75944 - protein, 352 aa, unidentified
METAHKVPDRPLYAGIDIHKQGFHAVVLDPVTGELCECRFQPSRERLAEWAGEWEGKLAGVAIEATTGWRWVTRELQARGFKVHLLDAGRASALRGRRRKAKTDKLDAKWLAMILARDLLSECEAWIPPAEIQQLRDQTRLRKSLVESRTDWAQRLHAMLTHEGWPCSRGRLLTREGRRWVTALDLDPAARVHVDVMINVIEGLDEQIGIVERDLRRFSRSDSRCLALQTIFGVGAILSCHLLAEIGEATRFKRSRQLVRASGLDPTVLESADTKRRGHLSKQGSPHLRWALVQAGNQGVRTASPDRTLYATVATRCGARRAKLTVARKIARRAYHVLAAVETANVDPVTVA

SEQ ID NO: 75945 - protein, 342 aa, unidentified
MSYTTVGVDIAKNVMQMHWVEPGTGEVINRSIKRAAFLEHFANRAPCLIGMEACGGSQHWARRLIEMGHQVKLVPAKFAKAFNIGNKNDAADARAIWMATQMPSKSVAVKTEAQQAVLALHRMRQQKIKFRTMQINSLRGLLTEYGEVMGKSRAALDKAIPHVLARLADRLPAMLIESLREQWHDLENLDRQIADIERRLLNWMKENNACKAIAEIPGVGLLTATAAVATMGDAKSFRSGREFAAWLGLVPAQTGTGGKVQLLGISKRGDTYLRTLLVHGARSVLHHAKEPSEWLKQISLRRPSNVVAVALANKMARTIWAILVHGRAYERAYVSVKPRLTA

SEQ ID NO: 75946 - protein, 358 aa, unidentified
MYYLGIDISKKSFTVSVLDEEGEAITKSLTYSCTRKGMEKLVDKISSLKLKKSEVVIGIEATGNLWENLYSFLKGYRVVILNPYQTRKYHQVLSKKAKTDKVDALVIAGLLRSKEALASYVPEEEVQVLRELVRLRHYLQKDKKNYLRKAYSLLSLVFPEYTDLVKSPFKKVSSMILKKYPTAVHMARARRTDLVKMARKIKGNNYSSELAEKLIEVAKESIYSGKASEVRGMALRIIIDEIQSLKNKIKEIEDKIEEILSFNNEPSSPQKRLLGIPGVGPKTVAAFLGEVGGDVSRFSSANKLIGFIGWHPKISESGEKKNLHPKMSKRGPSALRASLYMAAVASLKHNPYLRSLYH

SEQ ID NO: 75947 - protein, 318 aa, unidentified
MDKEFFGVDVSKGTLDGAAYNANKRWHFPNNDAGISQLVKAISELSPCLVVMESTGGYETPMAYALNKAGIPCAVVNPREVRDFARATKKLAKTDTIDAQVLAHFASALKPEPHPISNEDAMELEAILARRRQVVDMLTAEKNRMHIARKPVKEDIREHIAYLENRLAEIESNLSGRVQESPVQKMKDQLLRSVPGVGPTLSITLLVDLPELGSLNRKQIAALVGVAPLARDSGTFRGKRRVWGGRSQVRATLYMAALVAARHNPVIKHFYLRLCEAGKAKKVALVACMRKLLTILNSMLKHRVSWHVNQPTLLSNHV

SEQ ID NO: 75948 - protein, 387 aa, unidentified
MISVGIDVGKHSHEVCLLDTDGHQIGRFFRFQHSRQGMTALVGLLRQQSEPCIIALEATGHYWLALYHHLLQEGFTLVTVNPLQSHAYRRSTIRKVKNDRRDAWVIADLLRIGRIRPGYVPSPDVQPLRDLARFRMELVDQVGDAKRRILGVLDKVFPEYESLFSSVFIATSKELLKRAATAEEFAALDLKEITQVVRKASRGHLGLERAERLQQAARTSLGLPYLRDAATVELRCLLAQVEFLEVQVKAVEAALERLFSQVPQHLTSIKGIGAISAASIYAEIGDIHRFLTLESLVAYAGIDPTIFSSGEFEGTRRHISKRGSPYLRKALWMAATGARRWNPDLDAFFTKKLQEGKPYGVAMGALCRKLLGRIYIVLQENRAYEVR

SEQ ID NO: 75949 - protein, 482 aa, unidentified
MKKKNSIALVVGIDVHKKRHYARVKNLETREIISPILKIYNSKKGLDFLLEKVKYLMKEHEAKEVIFALEPTGVYWKPLGYSLHDRGYRVHLVNPVQVHYKRKEEDPAANKNDKIDPGLICDLVCDGKSNPARFMLGIFRLLQKTVRNRRDLVLDLSSKKIKLKTIVYELCPELVDAFTDITGRLSMAILRFFPSLDIFESTSLKELSSVFRIYGTNNTKITPKKLHSLIQFSLGIKGNNRAHIRQIQMILEQILLLKRQISILNKDINNILKELNQTLTTIKGIGPVLASEVIAEVGDVNTFSSARQLVKLAGLDTVENSSGQTHKKRYISKKGISSLRVTSILAAFSLMRSCPPFTNYFLYETKVLGKKPMQAVVALADKFLRICFYMLKNKTSFDPKKVGTGNLKTRAKALNQPLNVSLDSKEIANLDINLLEVFRKSSKVVLFDEEDATYVKIRINSKVETFDLEEPRGRILALLNAL

SEQ ID NO: 75950 - protein, 323 aa, unidentified
MVVSDEGDRIVFNRRLPNDLGQIRAALEPHQEELAGVVIESTYNWYWLVDGLMDTSYRVHLAHPAAIKKYEGLKHSGDFADAAYLAQLLRLGLLAEGYIYPREERGARDLARKRRQLVRYRTAQILSIEGILMRQTGARMKGEAVKRLTAEQVDAFAFAPDVALAVEANRAVSQALGQQIEALERRLKQRVSLRPEYRLLKTVPGIGDTLATTIMLETGSIGRFAQVGNFSSYCRCVDSLRESNGKKKGEGNTRNGNQYLAWAFVEAANFALRYCPQAKSFYDRKKSKTNRVLALKALAHKLARACYHLLREQKPFNVHLCFG

SEQ ID NO: 75951 - protein, 411 aa, unidentified
MEKVYDKCCGIDVHKKLIVACFKKGSKQEIRDFGATTRELLEMADWLKEGGCEMVAMESTASYWKPLYNILETCELKAMVVNARHMKAVPGRKTDVKDAEWIADLLQHGLLTASYIPDKDQRELRELVRYRKSLVGERNRELNRLQKMLEGANIKISGTITDINGKSARNILEHILTGRQIDSAEYDILYEKKIIAHNLKATKEQIIDDLNGVMSELQRKMMRILLDHLDELNAHIKELDDDIDSFMKPEEKKAASVIQDIPGIGNTSAQAIISVIGTDMERFPTDAHISSWAGLCPGNNESAHKRKSGKTTKGNALLRDTLVVCAHSAVKNKNSYFSAQFARISAHRGKKRAYVAVAHSMLVAIYHILKDGVIFKDLGADYYNQFNKERKINAYLKKLKALGWEAPVVAA

SEQ ID NO: 75952 - protein, 381 aa, unidentified
MPKDIRYVGLDVHATTITVAVADAGREGVQPLGTIPHQADAVARLVRKLGPARTLRVCYEAGPCGYGLYWQLAALGIACTVVAPTLVPVRAGDRVKTDRRDAEKLAQCLRAGTVAGVWVPSPAQEALRDLVRARAVAKQDQLRARHRLGKFLLRHGRRRPGTGRAWTMAHLAWVRSQTFPFPAQDLTFQDYLHEVDHAGDRVRRLDGALDHAIATADPAQRALVAALQALRGVSQVTALTVVAELGCFSRFSRAKQLMGYTGLVSRETSSGPRVRRGAITKTGNAHLRHVLGEAAWTARYQPARSPALQRRQAALAPEVVALAWRAQVRLHHRYRRLLGRGKIRQQVITAVARELVGFMWAIGVWVEQHDVTRKAEAARAA

SEQ ID NO: 75953 - protein, 311 aa, unidentified
MAGPRYLGLDVAKDTVDVASEPAGLTGQFATDALGLAALVGHCQREPVALIVLEATGGYEAPVAAALAAAGLPIAVVNPRQVRDFAKALGRLAKTDRVDAQVLALFGARLQPVPRALPDAATQELEGLLLRRRQLLEMLQAERQRVRTAWGRPVRQNLRAHIRWLERSLTDTDATLETVIQASPLWRVQDQLLQSVPGVGPTLARTLLGLVPELGHLTRRQIAALIGVAPHACDSGTRRGQRHCWGGRRQVRAVLHMAALVAARWNPVLHRFYHRLRTSGKPAKVALTAVARKLLVILNAVLRDERPWQYA

SEQ ID NO: 75954 - protein, 404 aa, unidentified
MIFVGDDWAEDHHDVYVMDADGARRASRRLPEGLAGIAALHEVIADHAIEPGDVVIGIETDRGLWVQALGAAGYRVFAINPLAVARYRERHQVSGAKSDAGDAKVLADLVRTDRHNHRALAGDSPEAEAIKVLARAHQNLIWARTRHTNALRSALREYYPAALEAFDDLASRDALAVLGRAPTPADATRLSLAKIRSALKHAGRQRNIDARAQEIAAALRTEQLTAPARLTAAFAATTRAAVGIIVELNRQISDLEAELATHFEAHPDADIYLSLPGLGVILGARVLGEFGDDPNRYTTAKSRKNYAGTSPLTVASGKKRAVLARRVRNRRLYNALDQWALGAINTSPGARAFYDQHRASGDLHHQALRALGNRLVGILHGCLRHHTHYSEHTAWAHRHTTQAA

SEQ ID NO: 75955 - protein, 354 aa, unidentified
MKRTTKYVALDVHQATTVASVREDSGRVIARSVLPTDGSAIMEFVRGMRGAVHVTFEEGTQAQWLHDLLAPLVDRIVVCDRRGAPRHGNKGDHVDADQLAELLRRGGLRAVYHGSAHHAGLKELTRTYQNLVEDSTRVMLRLKALFRARGIPTAGTAVYHRQQRARWLARLPDGGARFRADALYAELDVLRQLRPKAKAAMVTEARQDPAWPVLRTIPFLGPVRVALLLATMQTPWRFRTKRNLWAYAGLAVVTRSSADYALVAGQPVRRRRAPMTRGLNRNHNRVLKDVFKGAATAATARPGPLQDVYHNVIARGTREELARLTLTRKLAALTLRLWKKGERYDPTKLTTPAR

SEQ ID NO: 75956 - protein, 386 aa, unidentified
MIYVGIDIAKLNHFASAVSSDGEVMLQPFKFTNDYDGFHKLKSSLDSLDPDQLIIGLESTAHYGNNLVEFLVLSGYKVCVINPIQTSTLRKNNIRKTKTDKVDTLVIAKALMMNPTRLFTKYDISLLHLKELGRFRMKLIKKRTQAKIQLTSYIDQAFPEIQYFFNGVHHKSCYALLKEAPTAGMVASMHMTHLAHLLEVASHGHFKKDTAQEIRVLAQKSVGINDSSVALQITQTIELIELLDKQVTTVESDMESLVESLDSVIMTIPGIGAINGGMILGEIGDISRFSNPSKVLAFAGLDPAVYQSGNFEARHTKMSKRGSRPLRFALVNAAHNVVKNNKTFNDYYAQKRSEGKSHYNALGHCAGKLVRVIYKMLTDNVAFDLK

SEQ ID NO: 75957 - protein, 360 aa, unidentified
MSKISKPAGRKKTTTDKPEMTMGIDVGDRYSHLCLLDEEGEVVERDRVRSTEAAFRRHFEGTPRLRIALECGTHSPWMSRLFKQLGHQVVVANARKIPTITESESKNDGRDAEQLALMAAFNPKLLSPLEHRSLARQQDLNLVQARAILVKARTMIVNALRGLVKSAGGRLPACSSESFPDRAAGAVPPALADVAAPLVEQIARLNMQIGVMDQQIEKLANKYPEIGLLRSVPGIGPVVASAYVLTLDRPDAVPKSRSAGAFLGLRPGQSQSGDSDPQRRITRTGNTYLRCLLVQSAQYILGRFGPDSALRRWGLKLAAIGGKRAKKRAIVAVARKLAVILHSMWRSGQRFQPFPQPVQA

SEQ ID NO: 75958 - protein, 419 aa, unidentified
MAFKILRKNCCGLDIHKTWIFACIGITDSNGRTEYKQARFSSFSNGLRDLADWLAKYSCSDVCMESTGKYWIPVFNILEKTCWVTLAHPKYTKPQKGNKTDRKDAKWICDLYMCGMVKPSFIPPPDIRQLRDLMRYRVKLTNMLTGEKNRAQNCLTVSNLKLDDVFSDVFGKSSRSIIQYILEHPGEQFDVTPFIHRRCKHPVEEIQAAVDGVVSREQAAKLKECLLHIDQLNAHRERIEAEILRLAEPYPYQLELIRTVPGFAAAPLTAVALISEIGVDMSVFPSAQHLASWAGCCPRNDQSNKKVKSTRISRAGCYLKPLLVQIANAVIKSDRHPECRERYRRIKARRGHKKAIIAVCRMLLTAIWNVLSKLEPYSAKGYLADKLTEHSVVISKAEGLALLRKRGYIFKDELAVESG

SEQ ID NO: 75959 - protein, 339 aa, unidentified
MRELKLIAMDTSKYLFTLHGVDEQGQVVLRRELRRGQVETFFRKLPPTDVVLEACGGSHHWGRVLGGLGHRVRLIPPQYAKPFVKRGKNDHIDAEAICEGALRPGMTFVPVKSAETQANAMVLSVRELLVKQQTQAINALRGHANEFGAVAAKGTSNVEALLARITADPAIPQAAQDMFAELSSHVAELSARLLELDRKLIELHRANPLSQLLAEVPGIGPISALTLAMTVDARQFKSGRHFAAWLGLTPKQKSTGGKPRLGGISRQGNERLRQLLVLGATAVIRLVRPGSRQATAWLLGLVQRRPRKVAAVALANKMARAVWAMMTSGEAYRPQQAAT

SEQ ID NO: 75960 - protein, 429 aa, unidentified
MDYTQNDKIEQVTDTTLVVGVDIGSQTHYARAFDNRGRELCRKVFTFHNDLEGFNSFYDWAEKLKAENEKKDVIIGCEPTGHYWFAFQNYVAIHQMLLVIVNPFSVKKIKELDDNSPKKTDAKDPKTIAKLVVDGRYSIPYMPEGIYAEIRDLVYSRDRIMKQYNISANRIQRWLAIHFPEYLGLYSRFDAASGLAVLEKAPLPKDVIALGVEGIRRIWHDKKMRGRGVTEDRAKTLVEAAHNSVGLDGGIGTRSELYMLLEENRLWASQLEAVNAVLEETVLKVQYVEKLLAIKGVGSVTIAGFIAEVGDIRRFKSPKQIQKYAGLELVENSSGKHKGRSRISKRGRRKLRKVLYQVMIPLLARNQEFRQIYDYYVTRVKNPLKRRQAMVAVSCKLIRVFYAVLTKGIDYDRFKMMTDIHRNDELIAA

SEQ ID NO: 75961 - protein, 330 aa, unidentified
MSHDVKYIGMDVHKEAIVIAVLNESGKLVMESVIETKASSILQFLHGLRGELHVTWEEGTWAAWLYDLLQPQVQHIVVCNPRRNALLKEASKSDKVDARKLADLLRTGMLRPVYHGENGLRTLRELGRSYQTISKDLTRVMNRLKALYRGWGIPCAGTQVYAARAREEWLSKLPQAGVRRRAELLYQQLDGLQALRREVRPEFLAESRKHKAAKLLRQIPCIGPIRAARLIALMQTPHRFRSKRQLWTYSGLGIETHDSAQYRFVRGQLQLSKKPQQLRGLNRNHNHRRGVGQHADGDVGQELQHAEAHGHSYPKAWLFARKQIPDQCEK

SEQ ID NO: 75962 - protein, 314 aa, unidentified
MKYAFTTTIGVDVSKHTLDIFCHADSNNSQFSNSPEGIAELIQWIRKRAEQCLVIIEPTGGYERMLQQMVLTTNGMQLAKINARQIREFARAKGRFAKTDRIDARLLAEYGIAMNPRVAILPPAYRQELSALIMRRQQLTNSISRERTRLPQAGYEFAKQSIQDVIAFLHSQVLSIDAAMRELIKINIQLKEAYKVINGVAGVGPLIAAVLLAELPELGRIDNKAISSLVGVAPHNVDSGNMRGERHIHGGRPYVRKMLYMAVLSTIRYHDTIRTFYQNLILRGKKPKVALVAAMRKLIIILNAKMRDYYAQSA

SEQ ID NO: 75963 - protein, 348 aa, unidentified
MTLTIVETRAVTGGVDTHADVHVAAALDPIGGLLGVAEFPATAAGYAQLLGWLDGFGTVCLIGIEGTGSYGAGLARHITAAGVRVVEVDRSDRQDRRRAGKSDPLDAVSAARAAQSGRARGAPKGRDGAVEAIRALMVAKRSARAGRTQTINQARALIVTGPDDLRARFARHTPADLAAELASLRPRPGATVGYATRIALRELGRRARFLDGQLEYLDEFIVPLVTARAPGLLALYGIGPDTAAMLLVAAGDHPQRLRSEAAWAHLCATAPLSASSGKVTRYRLNPGGDRQANHALYRIVITRLSSHPPTRAYAGRRTKEGLSKKEIIRCLKRYVAREVYPHLRPPVG

SEQ ID NO: 75964 - protein, 370 aa, unidentified
MKYLGFDVHQSTISVVESVKYLGFDVHQSTISVAVVNADGKLVMQSVIATHAATILDFIHGLRGTLYLTFEEGTHSAWLYDLLARRVARVVVCNPRQNALLKAGNKSDTSDARKLAELLRAGLLAPVYHGEGSTRTLQELVRSYAALTEDTTRVMGRVKALYRSQAIACAGKKPYGRRHRREWLSKLSEAGLHRRAERLYEELDALQGLRRAAKRELVLESRKHAAAKLLRTVPLLGAIRAALLIGRVQTPHRFRSKRQFWAYCGLALETRSSADYRFEDGQLVRAKKPVFIRGLNRNHNHDLKNLFKSAATTASALHGPFREFYEGLLAKGMQPAMARLTLARKIAAITLSVWKKGESFDAEQLKPQAA

SEQ ID NO: 75965 - protein, 336 aa, unidentified
MSHYCGIDLHSNNHVVVVIDDEDKRVFEKRLNNDLSLTLKALSPYDETLHGIAVESTFNWYWLVDGLQEHGYDLRLVNTAAVKQYDGLKYSDDHHDAFHLAHLMRLGILPTGYIYPKEQRAIRDLLRRRLSLVRTASSQLISVQSQIWRSTGLRIKSSELRKLEFAPPLVDDYTLQAVQAGLAVYQVIQREIDALEQTAYQAVKLTEAFKILQTITGIGKILGLTIMLETGTIDRFAGAGNFASYCRCVDSKRTSNGKKKGEGNAKAGNKYLSWAFSEAAHFAVRFEPLAQRFYERKKAKTNGIIAIRAVARKLARASWMMLKHQVPYDAKRMFPG

SEQ ID NO: 75966 - protein, 425 aa, unidentified
MSEKIVVGIDVSKAFSDICILSPNNDIIKRLKISNDINGMKSLIYVLEKVEDEYEDRAVIIMEATAHYHQILANFFRKHNYEVIVINPIQSGALKNINIRKIKSDKTDAYNIALLYRIKNYNETITHSDTVNSIKKLCRQHKELTDEIVEHINRLIAFLDISFPDFKKVFTDLQGKTPLSLLEKYSTIQEVLSPENKQDIIQLIKENSHKSSSYAGVKYEKLFKAAEKSIEVCIVSLSSAVLIQTTVRVIFSLQEALKAIDDEIKRLSLLDEKFHKEIVLLQSIPGVGEYTACVVLSELGDISNFSKPKELVAFFGLDPGVSQSGTYNRKNNKISKRGSPHVRSILHMLAKSNVYPNRNREYLNPVMRAYFEKKIAEKPYKVVMCAIMRKMVQIIFAVLRNQKSFELRTPEEHQKLIREKSKLVA

SEQ ID NO: 75967 - protein, 400 aa, unidentified
MNAVGIDVSKGKSMVAIMRPFGEVVAAPFEVSHTDEGLRKLACFLEKLPGETRVVMEYTGSYWQPVAKVLHDAGLFVSVVNALLIYKYGNNSIRKGKTDKLDAVKIANYCLDRWTALECYAPVDQIRQTLKVCRRQYDQYIRLKVNLKNNLISLLDGTFPGINTLFKSASRSTDGHEKWIDFAEKFWHRECVCRNSEKVFTNQYQKWCTKAGYRFSAEKAVTIYAYASSQVNTLPMTDAIKCLITHAVVQLNTVIKTISMIQHEMLTLASQLPEYSIVMQMFGVGPVLGPQLMAEIGDVRRFGRKQSLVAFAGVDAPPCQSGTFESKNRHISKRGSPRLRKTLFQVMSTLIQHAPAHDPVYQFLDRKRQEGKHYYVYMTAAANKFLRIYYGTVMAYLKKL

SEQ ID NO: 75968 - protein, 420 aa, unidentified
MLAESHDEEQIIARVAALDIGKAELVCCLRVPGPGTRRLQEVSTHSTMTRSLTELANHLVELRVERVVMEATSDYWKPVFYLLEAHGLAPWLVNARDVKHLPGRPKTDVLDAVWLCKVAERQMLRPSFVPPWPIRRLRDLTRYRIDLVGVRAAEKNRVEKLLEDACIKLSVVASDIFGVSGRAMMAAMIAGERDPKVLAQLARSRMRTKIGRLEEAFNGHFDEHHRFLLARMLHRIDGIDADIAAVDEQIEAYLAPFAAAAARLDEIPGIGPVAAAVVIAEIGVDMSRFPTAGHLCSWAKFSPGINSSAGKTKGNGSTGHGNRYLARILGEAAAGAARTDSFLGERYRRIARRRGRKRALVAVGRSILVIVWHLLADEDTRFTDLGADHLTKRINPDMKKRNHIRQLEALGYTVTLTPAA

SEQ ID NO: 75969 - protein, 475 aa, unidentified
MNVKGTKKKNQVVTANIFEQQELLKKAEVIKKNLTASTWRELETNGKFDKNEKLSFISDDMLILGCDVGSETHYLRAIDTRGRELSKSAFPISNDSEGFQSAKEWAVRIAADHDKKQIVLGLEPTGHYGFCLATWMISNGISVVQVNPYAVKQTKEVEDNSQLKDDTKDPKLIANLVKDGNFGMSYLPEKLYAELRRLSMFRDQLNEDRIRAINRMHREMKIYFPEYKDAFGKGDGAFSLELLKAAPFPDDLKALDENGIRQIWREAKLRGGGYSRSGEILGYARLSVGIRDGADAAKIAVQWFVKKIMELDEELAVIENLINQKCQEIPHAGNILEISGIGENTLSGILADMGDISRFDDVKEIQKLSGLGLVACSSGKHKGETKISHRGRKRLRYWLFQAAKSAVAHAEEFKELHVYYTTRPDNPLKKMQSLIVIACKLLRIVYTILKKGTVYDPKKMLMDIRRPEKKEAIAA

SEQ ID NO: 75970 - protein, 347 aa, unidentified
MRFYTHQHPFYCGIDLHARSMYVCIVNHAGEILLHRNMKAAPEPFLKAIAPYREGLVVAVECMFTWYWLADLCAQEGMAFVLGHALYMKAIHGGKAKNDRIDSQKIAGLLRGGLLPQAYVYPAPMRATRDLLRRRTHLMRKRAELLAHVQNTNSQYNLPEIGKKIAYKANRDGVADRFADPAVQKTIEVDLALITYYDELLKALELSILHTAKQHDAQTLYLLQTVPGIGKILSLVLLYEIHDIDRFASVQDFVSYCRLVKCAKESAGKRLGTSGKKIGNGHLKWAFSEAATLFLRNNPAGQLSLARLEKKHGKGKALTILAHKLARAVYYMLKRQTAFDMDTFLHG

SEQ ID NO: 75971 - protein, 387 aa, unidentified
MNKKYYIGLDVHKETIAVAYICSDSREDAIFHGTCGGSNPAAERALRKLAKELGLKLQDLSVCYEAGPTGFVLGRRLIQLGVECVLCSPSKTERKPGDKIKTDKRDAQKLAKMYKNGDITPVRIPPELDEAVRDVCRARTDAVDDLSRAKQRLNSFLLRHGFRYSGKSRWTPGHMRYLRALTMPTDAQKIVMEAYIQSIDMSQSRVEDLKAKLIELLQDWEWKPVVDALMGCKGFQEVAAMTITSELGDLRRFENPRKLMAFLGLVPSEHSSGGTRRQGSITRCGNSHARWMLVECAQHFRRGPQVSAALTTRQQNLTHAVKSLSWRMQNRLNKRYIKLKVRGKNENKCIIAVARELTAFIWELQNKCGLEIPGSTHATMEPTMQSH

SEQ ID NO: 75972 - protein, 368 aa, unidentified
MRAFDSFNDLMFPERTDSGSLPTDSSPGGIMLHSGIDLHKRTIAISTVTADGQAVRDTQLPTTRAAVLSCFEAIPSPHRAVVESTSNWYWLKDLLTEAGVDLRLGHSKYIKAISYAKVKTDAVDAATLAQLLRSDLIPEAHMVSAEWREARDLLRARLQLVAQQVRCKNTLSGLLAQYNLTTPSALPPLVQLRTAMLAEQVTLLGAQAKRLASELNPRLIPTPDVQRLLWVPGIGRIVAFTILLEIDGIARFPSARDFVSYCRLVPGAGNSGGKTRHKRTKDGNRYLKIAFSHAAIRAIQYYPEIQRFYRALARRKPPIVARAVVAKELARIVYFILTKQEAFNGTFKGRTLSRTKQPKWPRLVSPPV

SEQ ID NO: 75973 - protein, 400 aa, unidentified
MGVVMESPVYLGVDIGKSGHYAVAVDGTGKPFYQTGITNDEAALRKLVDWATEHQASVVVDQPGGAAGLLLKLCWQADVRLGYLHGLAMARAREFYAGQSKTDPKDAFVLADVARAHPSRVVWLESSSDALAHLELLCGYDADLRADANRVSNRLRELLVGHWPALERAFGKRLDSRGVLAVVQQYPSGPALQQAGVARLTAALKAQRVQRAEAFATHLHQAAMSQTVTITGSATAARLISELAVQLAAVLARRADLAKEIEDSFFALPEAAILHSLPGIGPRLGARIAVEIGSISRFRTPGHLAAYAGLGPTPWKSGTSINANLPSRFGNHRLKNALFLAAFASLRHAPSRTYYDRKRAQGKRHNQALLCLARRRVDVLHAMLSQGVAYRPPAPMATAA

SEQ ID NO: 75974 - protein, 400 aa, unidentified
MKVVFPTCCGVDVHKTFVVATIITTPADSLQPHYQKKRFSTFNSDLNRFADWLLEHNCLDVCMESTGKYWVPVFNILEKRGIRVVIANPKWVKAVKGNKDDTKDSKWIGDLFRIGLVKSSFIPELNIRILREFLRYRYKLVSMKSSEKNRFQNAFTVCNVALDSVVSDMFGKSATAITDYLTSDESFDPDHCVSLLQRSLKKKAEQVLESIEGFSIADEQKARIKIIREHHDFIEEMIATVDTRVNEMVAKYEGNINLLCTIPGIDRRSAITIISEIGTDMGQFGSSKRLCCWAGLTPGNNESAGKKKSVRISRAGVYLKPALVQVAHAAVKDNDHPYYKLKYERIAKRRGKKRAIIAIARMILTAVYSMFCTGEVWNPVDLYKVDMPGCFEGAAACQSN

SEQ ID NO: 75975 - protein, 341 aa, unidentified
MAQYIGLDVSLKDTFISVREDGRRIWRGKCPSDPKILAEMIYKRAPNVSRVVFETGPLSTWYYHELTAAGLPAICIDARQAKKGLDMARNKTDANDADGLAHLAEAAFYKQVRVKSYDNMLVRTLVTARTQLLKMQLQLSNQIRGLMKTFGLIVPKGLGRVFDGHVCDLAGSHPGLAPIILPLLAVWRELRVKVAGLSKQLVGTARQSKQCQLLTSIPGVGALTACSFIAAIEDPANFARSRSVGAWLGLTTRRYQSGEVDYDGHISRRGDVYVRGLLYEAATVILTRAHADSDLRQWGIKLREKVGFKRAAIAVARKLSVVMHAMLKSGECFERRPVTTA

SEQ ID NO: 75976 - protein, 364 aa, unidentified
MLADQVDIVLGGDTHEATHTIAAVRAFDGAVLARLTFATTIVGYESALAFADKHAPGRRAWALEGTGSYGAGLVRVLLARGERVIEIDRPAALAGSSHAKSDELDAIRAAHTALGRARHASPRTSDSHDGLRVLLRTREGAVTARTAAVNALQAAIVIAPDGLRSRLRDCSVVTLLRIVPRLRVRASDSVADRCTLVAIRHLVDRIRQLTEEARQLQTALATLVRSLCPALLALPGVGPICAAQFLVTWGHEGRFPSEAAFAHAVGAAPIVASSGKTNRHRLNRGGDRKANRALHTVILTRRRHDAPTIEYYEKHLASGKTAREITRLLKRYLARAIFRLLENPPLPTDTTPPKEPTDTVTSQP

SEQ ID NO: 75977 - protein, 313 aa, unidentified
MNTSVFVGIDVAKRHLDVHILPKNAASRYTNSRAGIGALTKMLQKHRPELVVLEATGRLEIPAAVALCAAGIPVAIVNPRHVRDFARASGQLAKTDALDARVIATYGSALHPDARPMPDSLTLKLQGLLARRRQLVDMVVAEKNRLDRAHPAARKDVREHIEWLGKRLKRADRELNELIKHSPQWRERDARYQSVPGVGPVVSHTLLIDLPELGSISHKSIAKLVGVAPLNRDSGAARGTRSVWGGRTHVRSALYMASLAALRANPVIREHYQKLRALGKPPKVAQVACMRKLLVILNAIAEKNTAWSPQELT

SEQ ID NO: 75978 - protein, 351 aa, unidentified
MNYVGVDYHKKYSYMVVKNEDGRVEGRGTVNNTKEEVQQFLEPYRPGMAVVEATRNWGLIYDWLDEVLDDVTLAHPLKVKAIAEARIKTDKISADILADLLRADLLPKAYAPSKPTRDIKNILRQRMFFVRIQTMVKNRIYDILDRHPEVLTQVPETSDLFGAAGMQWLGQTTLSGEDNMLLSSELRLLKYLKEEITQSNGIVKKLAKKDARARLLQSIPGIGPFFSVLILYEIDDISRFRDKKKLCAYAGIVPSTHASGGKVFHGRITKTGNKWLRWAAIEAAQTAVRSDSEFRAYYQRIKVRKGTNAAKVATARRLLTIVYRLLRQGRFYERRTTNQEKIIIPAALVIS

SEQ ID NO: 75979 - protein, 351 aa, unidentified
MSRTTSAVAVSTIGIDTGKNTLHLIGLDERGTIVLREKLPRGRIGGRLANVPPCLIGIEAGMGTHYVARELMSLGHDVRQVPPAYAKPFHQTHKNDFRDAYAIAEAVRRPSTRCVPVKTDDQLDLQALHRVRSRLVGQRTAVINQIRGFLLERGIAVRQGLRFLRQQLPEILAKRIDVLSPRIIRMVEDLSGDWRHFDERIEQVTDEIEVLARESESCRQLMTVPGIGPLIASAMVAAIANGAAFTKGRDFAAWLGLVPRQMSTGDRTILGRISKRGNRYLRTLFMQGARVILLRPANWTKHSFGPWLTTAATRLHHNVLATALANKLARIAWTVLAQRRNYETRVIAEAA

SEQ ID NO: 75980 - protein, 339 aa, unidentified
MDQVNTIGFDTAKHVFQVHGTDAQGRVFRRKLRRKEVIAYFASLPPSLIGMEACGSAHYWARQLQALGHEVRLMPPAYVKPYVKRGKNDAIDAEACWEAVGRPTMRFVAIKSEEQQSVLMLHRARDLLIGQRTQTSNALRGHLAELGIIAKQGRGGTDELLALVEGNEEGQMPELARTALLVLAGQLRELRLQISKIEREIHAWHRSNAVSRRLETAPGIGPITASAIVATVPDPSRFKSGRQFSAWIGLTPNEDSTGGKQRLGRITRAGDPYLRRLLVVGAHAVLRYSGNAKSAPTKWAAGLLGKKPYTVAAVALANKMARVIWAMMMKGEAFRAVSA

SEQ ID NO: 75981 - protein, 346 aa, unidentified
MSIASIAILGVDLGKTSCSMVGVDERGTVVLRRSLRRQTLIEYVAKLPACVIGMEACCGAHHLGRLFAASGHEVRLMSPEYVRPYVKAQKNDDRDAEGIAEAASRPTMRFVELKTQDQLDIQTLHRARSRLVAERTNLINQLRAVLFERGVSFPVGRRKLEQGIDDLLTDGDNTLSSRMSRLIAEMRAEWKQLDTKIEMLNGEFVEMAGSDAAMRRLTTIPGIGVLNATALVAAVGDGSSFSKARDLGAWLGLVPRQHTTGGKPRLLGISKRGNTYLRTLLIHGARAALPSLSKGDTPLGRWLQGMIERGVHRNAIVVALANKLARIAWAALRRDMPFERNYPVAI

SEQ ID NO: 75982 - protein, 391 aa, unidentified
MTYVGIDVAKDKHDCYIANSNGEILADVFTIPNDQIGFNLLFQTLQSVAPDLSKVKVGLEATGHYSYNILGFLLGKGLTTFVINPLHTNLFRKSTSLRRTKTDKVDARTIAAMLASNVVLTSYTAISYHNEELKSLTRYRFDKVQERAKLKSSVARLVNILFPELEKLVPTLHINSVYALLSEFPGAKQIASCHLTRLVHLLSESSKGRYKRDKAVQIREAARTSIGSVMPAKSLELKHTLQLIKILTEEIDEIETSIREIMDRNPSPILTIPGINYRMGAMILAEIGDFSRFDSPDKILAYAGLSPSTYQSGKLDNAYPHMEKRGSKYLRYALYNATKYVCMWDPSFAAYLSKKRAEGKHYNVAISHAAKKLVRVICAIQKSGKPYCLTT

SEQ ID NO: 75983 - protein, 316 aa, unidentified
MSTRYVTAAAIDVAKKGLEIAASMPIKFKAVKNGEQGIDRLIAELSRVRPDITIIEATGGYQNAVVAALHKSGLKVHVSNPSRIRHFALAAGIVAKTDKVDANVMVKFGLAMQPEPTPESDPETQELNELRARHQQLTEMLVAEKNRRHQAPTSTKAGIEEHIAWLNKRIRDIEKEIANKIQSCEKFNSISRIAQTVPGVGPGTTAALLGALPEIGSISHKQIASLVGVAPYACDSGPSKGKRTIRGGRASVRCALYMAVVSALRWNDHIKEYYKHLLARGKCKKIALVACIRKLLIILNAMIRDNKNWCPDPIGA

SEQ ID NO: 75984 - protein, 342 aa, unidentified
MPEVAIIGVDLAKRVFQLHGAAVDGSVLFRKKLRRDGFLSFLASQPPCVVAMEACATAHGWGREIERIGHSVRLIPPIYVKPFVKRQKNDAADAEAIVEAASRPTMRFVAVKSEAQQARAMLFRTRDLFVRQRTQLINALRGHLAEHGVVAAQGPAHVKRLANAIADAESGLPTLVRELGQLLLEQISALDEKTADLDKRLRDAASREGTTKRLQTMPGVGPITAVAVETFAPSMDVFRRGRDFAAWLGLVPIQRSTGGKPRLGRTSKMGQRDIRRLLITGAMSVVQAAGRLAPPENSWLARMLGRKPRMLVALALANKMARGIWAMLTKGENYRDPVTTGA

SEQ ID NO: 75985 - protein, 356 aa, unidentified
MAPSTDLADGVTVGIDLGDKYSHFCELDAKGDVVEEGRLATSPTAFRRRFNSRTPARIAIEAGAQSAWVARLLKDCGHQVLVANPRKVRLIYQNDRKTDRIDAHQLARVARADPQLLYPIEHRPLSTQRDLATLRTRQALVRARTQLVNHVRATTKAFGARLPKCSTSSFAKRCRAALPQELLVALAGLLDVVETLNGTIQDFDARVEHLISAAYPETARLSQVPGVGPITALTYRLTIDDPLRFGRSRAIGSYLGLRPRQRASGAQDRQLRITKAGDTDLRRLLVGCAHYTLGPFGPDTDLRRWGLSLATRGGKNAKKRAIVAVARKMAILLHRLWLTGDVYQPLRKHLTPESIA

SEQ ID NO: 75986 - protein, 316 aa, unidentified
MTTPIETFIGIDISKATLDVAIWQSDQYRKFSNDAKGIQELMAWLSELAPILIVLEATGGYERLIVAELVLAGLPVAVVNPKRVRDFARSTGLLAKTDKLDAHVLAHFAAAVRPAVRPLHSEEEERLAALVSRRRQLIEMLTMEKNRLSNAHATMRTHLQTHINWLMDEQKILEAEIDQFIQGTPLWKEKDELLRSVPGVGNVTSITILAELPELGTINRQEIAALVGVAPVNKDSGIKSGKRRVFGGRASVRSVLYMAALSATRFNRTIKAFYDRLIKAGKPFKVAITACMRKLLTILNAIIRHNQPWKEPLITV

SEQ ID NO: 75987 - protein, 412 aa, unidentified
MQVLYARCAGLDIHQKTVSVCASICEPDGKKHRQIRVFGTFTSELMALAEWLRNQGVTHLAMEATGVYWRPVWAVLEGQFEQLLINPQHFKAVPGRKTDVKDCEWIADLLQHGLLKGSFVPPSPIQDLRDLTRYRVELRQSQNRVANRIQKMMEQANLKLSSVASNALGVSGRHMLEAVIKGQDSPEQLAQLARGKLKNKIPQLVQALEGRVRPHHRFLLAEFLEQWDWFENRIVRLEEEIDRQILPFEQALRLWQTMPGVDHITACCLVAEIGVNMNQFPTAQQLASWAAICPGNHESAGKRKSGKTRDGNKWLRRTLCQAAWAVSRKKSCYLSSQFKRIASRRGPKRALVAVAHSMLAIGYHMLKTGQGYYELGGNYLDQINKDQLQRHFIKRLQKLGFKVTLEPLPEAA

SEQ ID NO: 75988 - protein, 407 aa, unidentified
MDLLKTVFGIDVSSRKSNVCIMVNGQKVNDYAISNDMVGFNRLLGDLKQVTKPQIIFEATGVYSRRLQAFLDMHELRYVMMNPLEAKRKTKDDLHQNKTDKLDALYLAKLQSEHPQRLAYVQNKEYQELMANHRIYEQASHDLITNRNRLHKAIQLTFPEIEHLMVNPRGKNYWSIVLRFPHPDIVLETKEADIIDFLKGLTGIGKKRANDIAQSLIRLAKVACPAVKKNSAHIRGLKMAINNILSAEEECQTALQEMAKLAPKRDLEILTSIPGIGENTALRIISELGDIRRFNNPSQLNAFVGVDPQVYESGNLTAHLSISKRGTAIGRKVLYLAINQIQSAKKAGNPCHIADYYEKRKRSSETASHKKAAIASIHKLLRTIFALIKNDQLYSYDVAKHNQRLLS

SEQ ID NO: 75989 - protein, 341 aa, unidentified
MQAITVGLDIAKSVFQVHGVDADGQVVIRRQLKRRYVLAFFEKLAPCVIGIEACASSHHWSRQLRALGHTVRLMPPAYVKPYVKRQKNDATDAEAICEAVGRANMRFVPTKTPEQHSGLVLHRTRHLFIRQQTSVINAIRAHCAEFGIVAPVGRRGVEELLNVIANEKRVPELARACLLALGAQLRRIKEQILEFDRMITAWHRGCETSRRLDEIPGVGPALATAVVASIADPRAFRSGRDFSAWIGLVPKQSSSGGKPKLGSISKQGDRYLRGLFTAGALAVIRYAKIRGTGHRPWLTALLARRPIKVAAIALANKIARMVWAMMARGERYREPVALVAY

SEQ ID NO: 75990 - protein, 337 aa, unidentified
MELLHRRCCGLDVHKETVVACLRLVSDGKVTTEVRTFQTTTADLLHLSEWLAANGCTHVAMEATGVYWKPVWHILDDGEFELVLANAAHVKNVPGRKTDVNDAMWLAELLAHGLIRASFVPDTQTQEMRNLLRTRKQLVREQSSHVLRVQKTLEDANIKLDSVLTDLMGKSGRAMIEALIAGETNPVKLAALADRRAKASHEEFREALRGRVTKHHRFLLRLHLNQIDALDAAMATLDAQVEANLGPFRTAVELIMSTPGIKNLGAQVIVSEIGIDMSRFPSHAHLISWAGICPRNDESAGKRRSNRLRKDAPWLKTTLVQCAWAAVKKKESYTLTH

SEQ ID NO: 75991 - protein, 417 aa, unidentified
MELIVERVAALDVGKDEVVACIRVPDPAGAGRSQRRRRQEVRTYPTFTSNLEALADWLQAEGVTQVVMEATGQYWKPIWYVLEERGFQLLLVNARHVKLLPGRKTDVGDAAWLCELLEHGLLRGSFVPPAAIRQLRDLVRYRKRLIQAHSAECQRIQKTLEDAGIKLDSVATDVLGVSGRAMLGALVAGERDPQVLAELAKGKLRKKLPQLRQALRGRFGDHHALLVGLALAHLEHLEGAIAALDGRIDEVIAPFAVARDRLDTITGVGKRAAECIIAEIGVDMTVFPTAGHLASWAGRCPGNNITGGKRRSGKPTKGNRWLADVLTECAWAAARSRDTYLAAQFWRLARRIGKKKAAVAVGHSILVIAWYLLTGDCDYRELGGDFFIRRDSDRARQRAVAQLQALGYQVTLQPTAA

SEQ ID NO: 75992 - protein, 362 aa, unidentified
MKQYIGCDVHKRYSVFVTVDESGQASRAVRVAHGNGELEGYLSSVPGGTPVAVETTGHWYWIFDAMEKAGLEPHLAHALAAKRMMVSPNKTDKLDAKGLATLLRNGTLPEVWVPGGSLRDLRGLMRSRLALRRMGTGLKNRISSALARYGLPEQFRGDLFGKGEAATKCRQESVAALPEYSRFATEQELDLLESVETCVTAVAEEISNSVGKLGWVRRLRTMPGVGEILGPTIYLEIGLVSRFPSPAHLAAYAGLVPRVSSSGGHTRLGRTRRECNRFLKWAFVEAAEVVVAHQESMSAKHVVRLYRRVKNNKPDRHGQAVVAVARHLAESAWHILEHNQDYREPQPTPGMIQRFHTTGRPL

SEQ ID NO: 75993 - protein, 423 aa, unidentified
MEIMHERVAGLDVHKATIVACVRLGTGRKVTRECRTFDTTTDGLRALLAWLVECRCSHVAMEATGIYWMPVWKILGEGDFALIVANAAHIKNVPGRKTDLNDAMWIADLLACGLIKPSFVPEEDVQELRSLLRTRKQVGREQTRHVQRIQKTLAEANVKLDSVLSDIMGASGRRIIEAMIAGVRDPRRLAALANTRIKATPKQLYDALHGRLTDHHRFLLTLHLRQWDNLDATIREIDQEVEARIARMDEEVKADEAPFRDLIGLLCTIPGVSTLSATTILSEIGRDMSRFPTAGHLVAWAGLCPGQNESAGKRKPVRLRKGAPWLKTMLVQCAWAAKRKKDSYYKAQFFRLQSRRGPQKAICAVAASILTAIYHILKNGTEHHDLGADHFNRRSTEGQTKRLVAQLTRLGFEVQLQRTAEAA

SEQ ID NO: 75994 - protein, 409 aa, unidentified
MQVVHEVCCGLDVHKKSVTACVLWASGRRRQTRAFGTFTRELLELGDWLRACGVTHVAMESTGVYWKPVWNLLEGQFEVLLVNAQHIKAVPGRKTDQKDSEWIADLLQHGLLRASFVPPNPIRELRDLTRYRASLAQEINRIANRIQKVLEDSNIKLASVATNTLGASGRRMLEAIVSGEQDSQQLAEMAQGKLRNKIPELQEALQGRVSRHHRFLLRELLDHLYFVESKMQRIEQEVAERLGPFQSEVARLCTIPGVDLVTAWGLLAEIGLSMKQFPDAQHLASWAGLCPGSHESAGKRKSGKIRKGSLWLRRCLCQGAWAVSTKKNNYLSALYRRLAARRGSKRATIAVAHKLLVIAYYILRDGTCYSDLGADSFDRLNPEGLRRRLTKRLEGLGFKVTLEPSAQVA

SEQ ID NO: 75995 - protein, 403 aa, unidentified
MNNSSYQVFCGIDVGKTSHYAVALNRDGERLTGSEVHQDEAAMRRLFTDLTRHGKILVIVDQPRNIGALPVAVARDCGIDVAYLPGLRMRRIADLYPGNGKTDAKDAFIIADAARTLPDTLLPIGENSDLVEGLRVLAGFDADLAVDENRLINRLRSVLLSVHPALERAIGAQLHRPIGPGLLAKFGGPVGFSAAPRRDIDSHAQVLAPRLWNKIVDSIIGALTEQTVSVPGAAQADVVIKHLAGQLLDVRVARRDLAAHFEQALTEHPAGAILSSLPGVGVRTGVTMLVEITDIGRFRDAGALAVYAGVAPRTHRSGTSIKGEHRQHSGNSRLKRAMYLSAFAALKDPVSRTYYDRKRAEGKNHRSALICLARRRSNVLHAMLTSGTEYRPSQQRGAEAIAA

SEQ ID NO: 75996 - protein, 431 aa, unidentified
MKGGDIMKNNFMSTLFVGIDVSSKTNVLCALDFAGNKLLNLQALNNQPGAQCILDSIINCLNSNSLKHVVIALESTSFYSTHIANFLSSKEELMPFKPLVYCLNPKTVANYRKSFVDMDKTDPLDAYIIADFARVGRITCQPWRGAQFLALQRLSRHRLHLVECITREKTYMVSNIYLKFSQLAVLDKEDRPFSNTYGTTCAAVLTEFLSLDDIVYSSIEDLVVFVSSKGKNRFKDPLETAKLLQKAARDSYRLDKVLYEPLNTSIASSFNLIKAFSDEIKSIDKAIEKTIKGLNTTEFKSLTSIPGIGPVLASGIIAEIGTITSFNSHNALAKYAGLTWRVNQSGNYSADDTRMTKTGNKYLRYYLIEAANSVKNHIPEYKEFYNKKYGEVTTHQHKRALALTSRKLVRLIFGLLTKNQLYSSSKVGDNQ

SEQ ID NO: 75997 - protein, 407 aa, unidentified
MLKIVYRICCGMDVHKSFVVACIASTNEQGVTTYKSKRFSTFAGDLRKCAAWLAENNCKDVCMESTGKYWIPIYNILEATCNIVLAHPKYVKAIRGKKTDKRDAKWIADIFKHDLVAGSFIPPADIRQLRDLFRYRWKLTHYTTGEKNRAQNCLTVSNFKLDDVFSDVFGKAASAITSRILENPTERITDVSSFRTKGMRATNEQVLAAVDGEMCAEQAEKLRIIRSHMSSLELCKLHLESLILSTAEKYLPQLNLVMTAPGIQSFAAIGIISEIGVDMSVFPTSKHLCSWAGLTPQNNESAGKKKTPESAGPEPTSSHCLFSALSMLSAPSNSRKSEIATLLSKSAEDTRKRLLLSPGCCSPQFTICSRRMSPTILNSTARATGHLHTGRFQWKKPSSSSNARAIW

SEQ ID NO: 75998 - protein, 505 aa, unidentified
MYYIGIDISKKKLDICVLSSQGVLKEITVANHQQAIICQMKEIIEEFGMAEGGFVVCAEHTGQYGYPLRRACDVLGCTLWMENPAQIKYSIGMTRGKNDRIDARRIAGYARRFSDRLRPFKSLPHELERLKHLEAERSLYLNDLSKYNAQMSDQKEFLPEDVCRRKAGRMAPLIRALKLSIKSIEDEMSGIISRSEKLSRQMELLKSVDGVGPVVALNMIVATEAFTRFDNARQFCCYAGVAPFAYTSGSSLHSRSRVSKRAAKRIKSLLHMAAVSVAHRKDGQLKEYFLRKVAEGKNKMTVINAVRAKLVARMFAVIKNNQFYQGTYSGNTEVTEGKICSYPSNHRYYGSNIVDLSQSTTSHVNVNIELLRAYCTLTFESKDIPQGDIIEITLSGTSPFTILGTGGDGTIKTEERLLALSKTADRWNGGINASDQSSILVRYYSTKDKEWHSIYQDAPLITLKRNKRNIIKFINIDQATGESHFTMGEGEIAGTPTDSEHQEII

SEQ ID NO: 75999 - protein, 399 aa, unidentified
MAQPTLWAGIDAGKAAHHCVAINADGQRVLSRRVVNDEGALRDLIRAVKALADGGAVRWAIDLNSGGAALLITLLLDDHQELLYIPGRVVHHASGAYRGDGKTDAKDAAIIADQARMRRDLHPLRHRDKTAADLRILCARRTDLAADRNRAINRLRAQLLEYFPALERAFDYAHRKAALVLLTGYQTPDGLRRMGVARLEKWLRDRHAYHAGDLAARAIAAANAQRITVTGQQVAASVVARLAQTVLDLNAELVDVDAMIEAKFEQHRLAGIITSMPGFGSLLGAELLAATNGDLASFNTADRLAGIAGLAPVPRDSGRISGNLKRPRRYDRRLLRVFYLAANNSIKTCPESRNYYDRKRSEGKRHSQTILCLARRRLNVLWAMQRDNTSYQPGLPRAA

SEQ ID NO: 76000 - protein, 345 aa, unidentified
MRYIGVDLHTTQLTVCYRDESRAERLEIFAIDMVDKFISSLNAEDKVAYEATGNSLFLYKKLLPAIGEGNITVVNTSMFKLISKSVKKTDKNDSKLLAEYLSKDMLPKARIKDELNARVYALIETRENLVRTTTSFKNQIHNIFVQHGIKIKARQVATEKNLNKLLESCDFDETTMFHLNLAKKAILHNMDLSAEIESKLGELKSQMGQIDNLTSICGIGLKSAMGIKAVIGDVDNFEDEHKLVAYSGLCPRVQNSNETVSHGGITKRGNKLIRKLLVQCAWVSVRYNPIMKKQYENLRRRKAAGIAIIAIARKLLIQIYYTLKHNWYFTDTANTQREIKVFVGN

SEQ ID NO: 76001 - protein, 405 aa, unidentified
MDVVYDRCCGLDVHKKMVVACVLTPETKEIRTFSTMTDDLLEMVDWLGKHGCTHVAMESTASFWKPIYNLLESAEFNVLVVNAKHMKNVPGRKTDVKDAEWIAGLLRHGLLQASYIPNREQRELRELIRYRRSLIEERAREVNRIQKVLEGANIKLSSVASDTLGKSGRAILEAMIDGEKNPEVLSELAKGRMKTKKPELQKALNGLMGEHQRMMLAAQLRHIDYLDEEIARLDEEVKRRMLPFEEDLELIDTIPGVGRRTAEQILAEIGTDMAQFPSAAHLCSWAGLAPGNNESAGKRKSGKTRKGNQKLRAALVEAARAAARTKNTYLSTQYHRIAARRGKNRAAVAVAHSILTIVYHMLQRRHPYIELGPTYYEERRKDAVIKQAIRKLQSLGMEVSVKPVA

SEQ ID NO: 76002 - protein, 410 aa, unidentified
MEVLHAHCAGLDVHKDSVVACVRHMADGKVATIVKTFKTTTQELMALSNWLSAEGATHIGMEATGVFWKPVWHILSDGEFELLLANAAHVKNVPGRKTDVNDATWLADLMAHGLIRASFVPDEPTQQMRDLLRTRKQLVRERSSHIQRIQKTLEDANIKLDSVVTDIVGLSGRRILQALIAGETIPQALACLAHRRIHASTSELEAALRGRVTGHHRFLLQLHLNQIDAHDASIARIDEEVNANVEPFRAAIEMLSTIPGIGALSAEAIVAEIGIDMSRFATAGHLISWAGLCPRNDESAGKRRSNRMKKGAPWLKTTLIQCAWAASRKNDSYLQAQYLRIRSRRGAKKAIGAVAASILTAAYHMLKDGTLYQDLGPNHFGNRAKEKHVLRLVHRLQNLGFDVQITPLAA

SEQ ID NO: 76003 - protein, 400 aa, unidentified
MAVMIGIDPHKGSHTAVAVGAAEEPLGKLRVRACPDQAGKLVTWARAWPERTWAVEGARGLGRLLAQQLVAAGERVLDVQPKLAARVRLLEAGDTNKTDPNDARSVAVAALRSKGGQEVTADGHAVVLKVWAKRHRDLSRTRNQVACRLHAVLCELIPGGVPDEITAGQAARILEQVAPDGAVAQARCELAAELLADIRHLDAQRREVKKKLAAAVTASGTSLTEVFGVGPVIAATVIGDVITVARFPSRDHFAACNGTAPVEVSSGQRKIYRLSLRGNRRLKHAVHMAAITQIRHKHSDGSAYYQRKLAEGKTRKESLRCLKRRISNAIYARLRPDARAAGPGGQPGNDTGSNVTGSHPGHRLFGQATPGPEPSLRAPATFTQATPAPEPSAKKIQRAT

SEQ ID NO: 76004 - protein, 417 aa, unidentified
MWNKATRVKSSVESASNKHIGGILMVCVGIDVAKDKHDCFIISSEGEILADVFTIPNNAEGFDTLLQAIRRSTRPEDKIKVGLEATGHYSYNILGFLLDKGLPTYVINPLHTNLYRKSLSLRKTKTDRVDARTIAAMLMSDVDLKSYTDTVYHNEELKSLTRYRFDKVRERAKLKQSVSRLVTILFPELEKLVSSLHSASVYALLSEFPGAKQISSTHMTHLKAVLKNASQGRYGQEMAETIRNAARSSVGSVMPAKSLELQHTIRLIRELDAEIEDIETAIQAIVDEMQSPITTIPGMGVRMGAVILAEIGDFSRFDSPDKILAYAGMSPSTYQSGQLSPSGAYSHMEKRGSRYLRYALYNATKHVCHWDPTFAAYLAKKRAEGKHYNVALSHAAKKLVRLIFAMEKSQRPYCAAP

SEQ ID NO: 76005 - protein, 400 aa, unidentified
MLSIGIDVSKGKSTVCGMKPRGEIVYTPFEVQHTREGMSELVSLLRGSGEDVRVVLESTGSYHCPVVAALLENGIFVSVVNSLRMKRFCSQSIRRVKTDQIDAMQIALYGLAYWQELQPTRLPEDTYRELQLLARQYYQMTSILIKAKVDFNALCDQVLPGMQELMNDHAGRHKISGFVLRYHHTTHILEMGETRFRKDYCKWAEKKGYRNCERMAALIFATAQNGIPVLPNAPSTQIVITEAIRVLHTVEASRDTILAQMQALAKTLPEYSLVREMPCIGDTLAPRLIAEIGDVRRFHSKRALIAYAGIDAPPYQSGKFCANNRHISKRGNRYLRKTGYEVMQSYVMHKPANDPIFTFIEKKRSEGKCGKLAMVAGLNKFLRVYYGKVTELYRSLSAIE

SEQ ID NO: 76006 - protein, 405 aa, unidentified
MNAVGIDVSKGKSTVTIRKPGDVVLMSPCDIPHTQSAINDLIKQIKSLEGETKVCMEHTGRYYEPVATWLSDAGIFVSAVNPILIRDFGDDSLRTPKTDKADSKKIARYTLDRWAKLKQYGIMDKTRNQLKTMNRQFGFYMAQKTAMKNNLIALIDQTYPGANDFFDSPARNDGSQKWVDFIHTYWHVDCVRSKSLNAFTEHYQNWCKRKNYNFSAEKAAKIYQISSDLIAVFPKNDITKMLIWQAVALLNTASKTVESLRSKMNELASTLPEYPVVMDMNGVGATLGPQLIAEIGDVSRFTHREALTAFAGVDPGKNDSGKHIQNSVRTSKKGSPYLRKTLFQIMDSLIKRSPVDDPVYAFMDKKRSEGKSYYVYMTAGANKFLRIYYGRVREYLSNLSNNETI

SEQ ID NO: 76007 - protein, 416 aa, unidentified
MKIVRPICCGMDVHKNIIVATIGITNKKTRITEYIQETFSTLNSDLLNLKQWLINHKCFDACMESTGKYWIPIFNILEDEINIYLTHPKYVKAIKGKKTDKKDSKWICDLFKHDLIKFSFIPPKEIRALREISRYRYKLVGMRSSERNRYQNCMTVSNIGIGSVFSDPFGKSAQAIMKEVLESDIIEDEKILKCIHRSCKNKDKILDSIKHCNIETDQRFKMNESMTHMEELQVHIDNCEIEMMKRAAPMFDQFMHITQLPGISTLSAILIISEIGVDMKQFESDKQLTCWAGLAPANNESANKKKSVRISKAGQYLKPLLVQCTLGAIKDKEGYFGIKYSRIKKRRGHKKAIIAIARMMLVSIYHMILTGETFNPSDYESFRNPKPPIKQQVLTEESAIEFLKKSGFDVSKLAKP

SEQ ID NO: 76008 - protein, 360 aa, unidentified
MNTVTWVGMDVHARSTHAAAINLLTGEVQRMRFGAGTEGPVAWLGELPGPVRACYEAGPTGFGLYRAAVAAGLRMDVIAPGKTPRGPSDRVKTDRKDAELLARLLIAGQLTPVTVPPAGVEAARELTRLHDACRRDLMTARHRVSKMLLRHGRVYPKPTTWKRDHRNWLAGQRFDEPTSELVYLDLLARVDTLTARKLQLREQVVELASDARWWPTVSRLRTFRAIDTLTALSIHLELGGDWARFEKPHRVGAWLGLTPALTQSGESSASGSITKTGSTLARRLLIEAAWHYGPQPYVGPVLQARQAGQPEQILAISNKAQCRLHRVYQNMKARGKPHGVVTVAVARELSCFLWAAATTD

SEQ ID NO: 76009 - protein, 337 aa, unidentified
MAGQYVGIDLHRRRSVVVHMDETGETVSTVSLPNDPLALAAEVAQAEPGVDVVLEATYGWYWAADLLEECGATVHLAHPLGIKMFDHQRVKNDRRDAANLADLLRMGRLPEAWIAPRELRELRELVRYRAKLVALRSGLKAQVHSVLAKEGVAVPYSDLFGVAGNQLLDRLELASAYHQRLVSLRELIEVVDGQIARFETESQTRLADNPGYHVIQAICGVGPVLAGVFIAEIGDVTRFARPQQLCCWAGLTPRHRESDQVIRRGHITKQVSKLVRWAAVEAATRQRGATKIQTDYRRLAERRGKPIARVAAARKLLTLVYYGLRDGHIRALPRKAA

SEQ ID NO: 76010 - protein, 385 aa, unidentified
MFVGYRVGAACSAYPTVVMEAPVFSERTSVGLDVHARSVAAAAIDGVTGELRQARLTPSHEHIRSWIGELPGPVAVAYEAGPTGFGLSRALNQVGVRCVVAAPSKLQRPSGDRVKTDARDAVHLARLLRLDEVSAVVVPSVEQEAARDLVRAREDARGDLMRARHRLSKLLLRQGFVYSGGRAWTGTHDTWLRRIGRGELVSPATRMTFESDYEAALMVKARRDRLDAAIITMAADSEFTAMVRRLGCLRGIGTLTGFALAVEIGDWDRFTGKTIGSFVGLVPCEYSSGASRVQGEITKTGNSHVRRLLVEAAWHHRPRYVAGKTIRDRWELAPSAARVRGDEGNQRLHGRWVRFNARKKRSVIANVGIARELAGWCWSLAVMDD

SEQ ID NO: 76011 - protein, 366 aa, unidentified
MLLKAELSCEADSENDLGGSSETMYYIGLDVHKRTISYCVKDAAGKVHQEGKIGSTRRDLDSWIKTLPQPRMMAMEATIFTGWIYDHLLPHAEKVKVAHPLMLRAIAAAKKKNDRIDAGKIADCLRCDFLPECHMASTEIRDRRRTLRYRGLLVKQMVQMKNRVSGLLMESGVSYNKQRLHKLGYFTDLLSTNEEISQSILPLLKLGREHIVRAQRLDSALIGSLEKDPLLSERLRRLRTIPGVGPITALTWALEIGDYTRFRSVKEAISYCGLCSAEKSSADKVMRMPISKQRNKHIQHVLVEAAKMAPRYSPELALVREREIQRGNKNRATFAVARKMVAYMLAVERRKQDFVPAEEMAGRAVA

SEQ ID NO: 76012 - protein, 341 aa, unidentified
MDKELYFGVDVSKKTLDLAYYDGETIDWKNAHIKVSNDDAGFKKIGSWVAKVGKDFDTFLFCMEYTGLYNQNFRLWLESKEYIYGMVEPRKMHRFEPDLDDDQRSLDRIKTDELDAFRIAIYCEQNHKKILRNPSKLPSPVYFKLKRLLAERKQNTKQSTLYKQQLHDICAYDTDLSVERKKLLLKNMQESQKAIDKEIDSYMNEDTSIRKNYNLLTSIPGIGRIIALETIVLTENFTAISNPRKYACYIGIAPFKKESGTSVRKKTGVSKKGFSEAKADLSIAVLSAIRNNPSIRDYWIRKRKEKCGGIVLNAVKFKLVLRMFAVIKRGTPYVETDAYKN

SEQ ID NO: 76013 - protein, 337 aa, unidentified
MKTKPILLNHPAFFLGIDVGKADLFCHLIGPDEPISSRFDNNKIGIKLLIAWLLKATASHWYVVCLEQTGHYGDAIAEALYKIQPTGIYLVNPQRIKAFGMQKLRRNKSDTADAKLIARFIKSEYLELRSWQPRSLAQQRITTLSRYADSLTQDNARLKTMLESMTDKTINISLKRRISASVKEIAALRREIDKLIKEDPDLQKKSKLIKTIPGLGEIATHIVIAELPDLEQFDDARQLAAWAGLTPRHHTSGTSGKTQTPITKIGSIYLRRGLFMPAMTARVFNPLLKTFGDRLKANGKKPKQVIIAIMRKLLHQIYGILKSGQPYNPEKRGFAGA

SEQ ID NO: 76014 - protein, 341 aa, unidentified
MYYIGLDVHKKTISYCVKDAAGQVHQEGKIGATRLDLDNWIKTLPQPRMMAMEATIFTGWIYDHLLPHAEKVKVAHPLMLRAIAAAKKKNDRIDADKIADCLRCDFLPECHMASTEIRDRRRTLRYRNLVLRQTVQMKNRVSGLLMENGVSYDKQRLHKMGYFTELFSTNEEISDSIRPLLRLGREHILRGQRLDRALTSSLERDSLLSERLRRLRTIPGVGPITALTWALEIGDYTRFQSVKNAISYCGLCSAEKSSAGKVVRMPISKQRNKHIQHVLVEAAKLAPRYSHELALVRDKEMQRGNKNRATLAVPGSWCPTCWQLTEGNRISCRPKRWPTRQ

SEQ ID NO: 76015 - protein, 395 aa, unidentified
MFIVGIDVAKRSHEVCMITSDGQTVQRPFSIRNNCTGYNLMLEKIRKHTNIKSQIVFAMESTAHYWLALFTRLRKDGYHVILLNPIQTSAMRDMFIRKIKTDAKDSFIIAELIRFGRYAESNVAQDRLLALKELCRNRFYLVDMAGDLKRKLVALIDRVFPEYEAQFDTIFCKSSVALLKKYPTPQKLSNAHLDKLTELLWNSSNGHFGEWKARELKELARNSFGVEDCDGAYSTLILLMLDQIQSLSGKADALEKEISRLFQSFDTTVTTIPGVGPIIGAVILSEVGDISRFSSADKLAAYIGIDPSVNQSGEFQAAHAHMSKRGSPYLRRCIWMASQVAVQRDPMFRAYYEKKAAEGLKYMTIIGHVTRKMTTVIFAILRDHKVYEPVLPTAA

SEQ ID NO: 76016 - protein, 452 aa, unidentified
MKRKHIYSAVDVERLDVAVILQTLAVGCIVAIDVAKTKFVAALATATGEVLKLVKFDHPRQTFAFLGLLKALRGAELEPKVVMEPTGTYGDALRYQCHRLGVPVHMMPPKHTHDFAEVFDGVPSMHDAKAAAVLAKLQAVKPAPVWQPETEAQRDLRAWVDQRHPIALTLALHYGHLEAMMARHWPEFGAVMDVHVRRSWFALLKAFPGPQAVNAAREEVARTLHRASHAQLGHERIEAILNAARDTMGMPMTKGEEHKLRAITEQIETHTHRQDSVDAEIEALVRQDTVLSRLATVVGPACAAAIGVLVGSPLDFVSAGAFEKAMGLNLKERSSGERIGKLSITKRGSGQTRQLLYMAVLRLLNSDPIVVAWYRERKAYKAGLPIKAIVAVMRKLARALWHVARGETFDAKKLFDVRRLDLSSVTIRPRFKFKNAPQASVQAHSEGGAAIA

SEQ ID NO: 76017 - protein, 334 aa, unidentified
MQNVTLIGIDLGKHSLHVHCQDRQGNALLRKKFSRTQLMNFLGSCKAATVVMESCGGAHFMARRSADLGHEAKLISPQFVRPFVKSNKNDFVDAEAICEAASRPSMRFVPPRTEDQQAMAALHRVRNSLIRQRVKTTNQMHAFLLEFGVSLPRGIAVIRRLAAVLEENDFPPYLARVLSRLHSHYVYLSGEIEEVDKELKTHLAEDETAQRLLTIPGVGPVTASLLAMRLGDGKNYASSRDFAASTGRVPRQYGTGGKTTLMGISKRGDKNLRRLLVQCARIFMQRLEHNPGRLAEWVNRQLARHHSNVVAYALANKLARIAWAVTAHQTVFIK

SEQ ID NO: 76018 - protein, 338 aa, unidentified
MKIFAALDVSDKSTHVCVVDGDGVIVWRGVCATDPAVLAATLERHARGLERVVLETGPLSAFLYHGLTERGVPAVCICARHAKGALSVRINKSDAHDAEGLAQLARTGWFKAVHIKGSATHLDRAQLKVREQLIRARLAMGNQLRGLLKLFGLRMGKVTTPAKRAERLNALFTQKPELRPILAPLVAGLEALDMQIAVSTRSLKTRAEADPVCQRLMSVPSVGPIIALSYKSSIEDPGRFRRSEDAGAYAGLVPRRSQSGERDYNGRISKAGDPMLRSALYEAANNLLCRVKRSSPLQAWGKALAATKGAKRARVAVARKLAILLHRLWQSDTSFRWA

SEQ ID NO: 76019 - protein, 346 aa, unidentified
MLHAGLDLSRKKIDVCLLSAAGEVVDEWASPPDADGLRGLAARAGMWGSPVRGVIESMNGARFVHDRLEEHGWEVLIADATKVKGLAPLACKTDKIDARVLATLAARDLVPEIWLPDPSIRRERELARFRLHLVRHRTTLKNRIHAGLVAFGKPCPVSDLFGHAGRELLDRLQVPDPWRANIDVSLQLIDDLDLQIAALTVQLKRQGADHRYIPLLVTAPGIGWINGYTIASEIGDIERFSSPAKLCGYTGLCPRVRQSGAVDARGPISKHGPKYLRWALFEAALNACKHPYYAERYQHTKRRLGRQRGPKVAQIDLARRLTESIWHMLTRNQPFAPAGAPFRLAA

SEQ ID NO: 76020 - protein, 355 aa, unidentified
MDSRKYIGMDVHKESISIAVGNAAGKIVMECVIETKASMILQFIGGLRGDLQVTFDEGTWAAWLYDLLKPHVTKLVVCDPRKNRSMREGNQSDKIDARRLAELLRLDHLNPVYHGEHGLRTLKELVRSYLTITKDLGRVMSRVKALYRSWGIPCTGKQVYTSRHRAEWIGKISEPGVRRRAEFYYQQLDALRILRQEVRRDLLAESKKQKAWKRLCQIPSIGPIRSAELLGILQTPHRFRTKRQLWTYCGLGIETHSSADHRMVEGQLQRAKKQVEIRGLNENCNHDLKNLFKGAAVVAATKPGPFEKFYAELLAKGMRPEMARLTLARKIATIVLIVWKRGVSFDAQHLKPQTA

SEQ ID NO: 76021 - protein, 384 aa, unidentified
MNKHNILFIGLDTHKVSTEVAHIEDQRGAKTVHQGKIKTTKAAITKLARQYQSKYPNATLHFVYEAGPCGYWIYRLLTSLGHCCYVVAPSLIPKKPGDKVKTDKRDAMKLAKLLKDEELTPIYVPEPEDEAIRDLSRARETAMKDLKDAKFQLKGLFLRNNITCKVNDNWSNQHLRWLTELVLPHPSQQIVLQEMIQTITERIKRVERLVNELAHQAKLWRYYPVVQALQAMRGIRFLVAVGTIAELGDLRRFDHPRKLMAYLGLVPKENSSGDNRKLGGITKCGNGRARRLLIEGAQTYKHNANVSTELQKRQETLPKVVIDIAWKAQLRLCRRYKRLMQRGKHRNIVVAAIAREMLAYIWAISREVILVPVDPSTRISRVPA

SEQ ID NO: 76022 - protein, 412 aa, unidentified
MDLVYAWCAGLDVHKATVVGCVRVPRAPRGDRQAETRTFATTLRGLEELRAWLTAHGITHVAMESTGVYWRPVYAGLEGAVQVLLVNARHVQMVPGRKTDVRDCEWLAQLLECGLLRGSFVPPPAVRDLRDLTRLRKALIRERGHHVNRIEKTLELANIKLGTVVTDIMGKTGRAILEALSAGRDAPEPLVALAQGSIRTKKQAALREAVVGRLTPHYAFLLRQHLSLIEALDLHIVTLDARIEAAMAPFAEAAALVQTMPGVATRAAQAILAETGVDMGVFPTAGHFASWARLCPGTHESAGKRRPTTTGQGAVWLRATLQEAAWAAARTKRSYYRALYHRLKGRRGAKKAIVAVQHAMLVALWHMLKRRVPHHDLGADYFDRRNTARLRHHHVRRLQQLGYQVVLVEEAA

SEQ ID NO: 76023 - protein, 343 aa, unidentified
MEEVSIIGVDLAKNVFQLHGAAADGSIVFRKKLSRLQFARFMAEHPACEVAMEACPSAHYWARELSAYGHSVRLIAPHYVKPFIKRQKNDAADAEAIAEAATRPTMRFVEPKTEEQQARAVAFRAREQIVKQRTEAINALRAHLYEFGHVAPEGVGYIPRLAKVVDDPGSGLPDLARDICRMVLEQIELLTSRLAAVSAKLAAASRAAAIPRQLQTMPGVGPITALAVETFAPPMDQFRRGRDFAAWLGLVPRQHSSGGKQRLGKTSKMGQRDIRRLLVTGAMAVVRWALRRGAPQNPWLERMLERKPPMVAAFALANKMARRIWAMLTRGEDYRDPVIASAA

SEQ ID NO: 76024 - protein, 340 aa, unidentified
MLYVGLDLHTKHITSCVLNSDGKLHERWQVPQVDQLVERLTRFQQPFKVTYEAGCGYGRFHELLSPIAAEVMVANPGQLRLIYGSKKKNDRRDAENLAKLLFLDAIPMVHVPSADVRAWRELIVFRHRLTEKTTRSKNGLRAVLRTLVIRPPRTPGLWTLEGLAWLKALELPHPLQTFRRNVLVDELESLKRQIALVEQELARFSEDNAAIRRLRTIPGVGPRTAEAVVAFLDDPHRFQNSKQIGDYFGLVPCQDQTGSKNRLGHITRDGSATVRQLLTEAAWQATNRSPTVRAYFERIHKGDRNRRKIALTATAHYLVRVMWSMLVKGTDWREQVPAEG

SEQ ID NO: 76025 - protein, 324 aa, unidentified
MIDGILGIDVSKNTLDVSISSCGKVRTKSFANTSDGWHHLLDWLLAQKIQRVHACLESTGRYSLGIACALYEAGHVVSIINPAQVRDFVRTKLGRNKTDGVDASRIREYCELFKPLPWAPPSEAHRRLGELQTIRSGIVAGLTEWKNRKNSGIIDAEAQALADATILHFTSQIGAVDKAIALAIENDADLRSKRDLLLSISGVGDTLAGVVLAELPGPDVLHSSGEVVAYAGLNPRQHRSGTSVDRATRISKIGNAVLRAALYMPALSAMRYNPAIVALVTRLKSRGRLKPKQIVVAAMRKLLVLCFGVLKTGKPFDPAIAMGR

SEQ ID NO: 76026 - protein, 356 aa, unidentified
MSHEVKYIGMDVHKEAIVIAVLNGSGKLVMETVVETKASSILEFLHGLRGELHVTWEEGTWAAWLYDVLQPQVQEVVVCNPRRNALLKEGSKSDKVDARKLAELLRSGMLRPVYHGENGLRTLRELARSYQTISKDLTRVMNRLKALYRGWGIACAGTQVYAPRYREEWLGKIPQTGVRRRAELLYQQLDGLQALRRNLRPEFLAESRKHKAAKLLRQIPCIGPIRAARLIALMQTPHRFRSKRQLWTYSGLGIETHDSAQFRFVRGQLQRSKKPQQLRGLNRNHNHAMKEIFKSTATRASCGTGPFHDFYAALLDKGMKPEMARLTLARKIAAITLTLWKRGERFDAEQLKTQAA

SEQ ID NO: 76027 - protein, 297 aa, unidentified
MNCPVRIGMDTSKSVFQLHGVDENELVVVRRQFRRTEMVRYFERLPPALVAIESCGSSHHWARLLQSFGHEVRLIPPHYVKPYVKRGKNDAADAEALCEAVTRPSMRFVPVKSKERQAACMLMSVRERLVSVKSQLSNAFRSYAAEFGIVGAAGRQNVNALIKRVLEDETLPEMARELFRFQAKEYAAVEARLEEIEAKLMRWHREDDVSRRIATIPGVGPIGSTMLSMKAPPPETFRSGRDFAAWIGLTPKDHSTGGRQRHGGITKAGDSALRSTLIVGATALLRHIRKGRHKPSA

SEQ ID NO: 76028 - protein, 434 aa, unidentified
MGELKKILENTAGIDIGSEKVFVAVEGKSVRNFRTFTSSYKELCTYLKENGVRHVAMEATGIYWCTLYDILEQDKFNVCLVNPSDTKNFPGRKTDVQDCQWIQTLFSYGLLKKSFVPQDIVRKLRVYTRMREDKLQMGASHINHMQKSLVQMNIRLPEVLSQTHGASGMAMISAILKGERDAHVLLSYCTSDLRKRKGADILLALEGNYKEEYLFELKQAYDGYLFYINQVKLCDVEIEKILREFDSQSNTNFRDNKKPKAVRHNKPDINKLHDLLLGIHGSNATVLPGITDYSLMRLTAELGNNIYQWPNVKSFVSWLGLAPGKNQSGKMNKRSKKRAITRGGQIFKQAAQSMLASSKLGIGVFAKKLKARRGAGIAIKATARKIAELYYNLTKHGLNYVETGIEFYEQKQKEQQLKYLTKKANELNLQLISY

SEQ ID NO: 76029 - protein, 343 aa, unidentified
MKATTVGIDLAKNVFQVHGVNQFGKVVIKKQIKRDQVMALFANMPPALIGMEACASAHHWGRKLQSLGHTVKLMAPQFVKPYVKTNKNDAADAEAICEAVARPNMRFVPIKNIEQQAVLSLHRVRQGFVVARTAQANQIRGLLGEFGLVIPQGIAHIAKRVPELIEDASNELPGSFRLLIERLMEHLKELNRQALEIEAEIQTWHRQSDLSRKIEEVPGIGPLTASALVATIGDAKNFKDGRQLAAWLGLVPRQHSSGGKPTLLGISKRGDSYLRSLLVHGARSVLCAFKHKKDPSGWLHDLLQRRNANVAAVALANKNARIVWALLAHERRFEAGYVRTMTA

SEQ ID NO: 76030 - protein, 473 aa, unidentified
MKTTHRKASPSAPIKPAANLPVIHPHAAGIDIGSVEHYVCVPADAVAAGESAVRRFSGFTGELDKLVAWLQGCGVRTVAMESTGVYWIPLAQKLEAAGIDTVLANARHLRQVPGRKTDVKDCQWLQQLHSYGLIQGSFRPTQDICRVRSLTRHRQNLTQACGEQVQHMQKALQQMNVHLHHVVSDLNGRTGLRILDAILAGERAPEKLLALRDHHCSKSTAQEMAAALRGDWRSEHLFVLKQALASYRHLLQQIDECEREIEAALADVVIPALSLATPPGNPPATPTPRPKKKFHHVKAGTGLQRDLGPELERLCGVDLTQTPGLNVLGVLIILSEIGLDMNRWRHAKAFCSWLGLCPGNKISGGKVLSSRTPHVASRVAVFLRLVGPAVGRSDTWLGSFHRRMRSRLGPAGANTATARKLACMIYQLLKYKEDYINADAQFYQERLRKRRVASLLRQADELGFDLIKKTAAA

SEQ ID NO: 76031 - protein, 349 aa, unidentified
MPNYNQPHQFYAGVDLHARSMFVHVLSAKGKTVFERDLPAEPDAFLDAVKPFRKNLVVGCECMFAWYWLADLCEDKRIPFVLGHALAMKHIHGGKAKSDKIDAGKLAAMLRGGMFPLAYVYPRAKRQTRDLLRRRSFFVRQRAQLIAHIVNTNSQFNLPPLAKKLSYAANRSEEIAERFTDPSTRLMIQADLHLIDAYDAQIAELERHLLKSAKVDEPVTFGFLRTIPGIGPILGLILLYEIDRVERFPEAGNFLSYSRLVRCAHESAGKVKGFGAKKIGNGHLKWAFSEAACLMLRGCPAVKAWLQRQESKRGKRKALSVLEAKIGRTVYHLWRKQQAFDVKRFLKNG

SEQ ID NO: 76032 - protein, 352 aa, unidentified
MKKTSAEVVIGAIGVDLGDRRSQVCVLDERGEVVDEDSIATTWSAFEDRFAGLARCRIVLETGTHSNWVHDVLVKHGHEVIVANARKVRAISANERKSDRLDARMLARLGRMDVQLLQPVHVRRSQIRLDLMSLRARAELVELRTALVNSIHGLAKSAGHRLAKRSSASLHKQPLHPSLEEILRPLMDALEHMSRKISDYDQQLEAIARQRYPQCKLLQQVAGVGPVTALYFVLVIDDPKRFARPRDVGAYFGLVSRRDQSGSRDPELAISKAGDRMGRTLLVQCAHHILGRFGKDSDLRRFGQKLAARGGTRAKKRAVVATARKLAVVLLALLRSGEVYEPLKNCEPAKAA

SEQ ID NO: 76033 - protein, 603 aa, unidentified
MEITTIGLDLAKNVFQVHGVNERGKAVLRKQLKRDQVAPFFANLPPCLIGIEACASAHHWARKLQALGHTVRLMAPQFVKPYVKSNKKNDAADAEAICEAVSRPSMRFVPIKNVEQQSVLSLHRVRQGFVKARTAQANQIRGLLGEYGLVVPQGIAYIAQRVPPLIEDAENELPGTFRLLIQRLLDHLKVLQEQVDEIEVQIKAWHRASEASQRLEKVPGIGPLTASALVASIGDAKNFDNGRQFAAWLGVVPRQHSSGGKPTLLGMSKRGDAYLLAHLLVAKFMDHLPLYLQEAVFARAGHLIARSTLAQWVGECGAQLQPLVQALADELRRHMVLHADETPVAMLNQGNGKTHKAYIWSYCTPSTNPVKAVVFEFSETRSCENVRDFLRLDAPGAWQGTLVTDGFSGYAACVDKDVTSAQCMAHSRRKFHELWANHGSKVGEQALRFYQVLFRIERQAEQITSEERRRLRQRQSRRVLAVFYRWLLGQRQLVPPGSATIKAIDYSLKRWKELTHFVNDGDVPISNNWVENQLRPIAVGRSNWLFAGSLRAGKGAAAIMSLLHSARITGHDPYTYFKDVLDRLPTQPANRIDELLPHRWSPS

SEQ ID NO: 76034 - protein, 328 aa, unidentified
MEREYIGIDLHKQFFQACAIRATGERRWEQRFPRTDGGLTLFGARCTPATAIAVEATGPTWAFVDALQPTGATICVVDPRKTRLKAGYAAKTDRLDARRLADALRRESVVSIYVPPPLVRELREVCRGRHQVVRLRTRVAQMIRALLLRSGVDDVPVRRVFSDRGLAWLETVRLSPDAATSLARLRQVLVAIQAEAASADALVRARAAADPIACALDAMVGIGPVLGLTIRAEIGDGGRFRRGAELASYAGLVPRVDASADRYWSGRITREGSPWLRWALVEAAMHAIRRSDAIGHWARQLAVRKGAFKARVALARRLCDDVVRVWSH

SEQ ID NO: 76035 - protein, 337 aa, unidentified
MRSIGVDLHSNSLTACYLSEDGTEQFCTFSLRDLAAFQESLCAEDQVAVEATGNTRWFVKQIKALVSRVVVVNPNQFAVIRQSVKKTDKHDARALALFLQKGLLPEARLKSEACAGLNSLCQTRQKLVELRTTLINKLHAIHRSHGIESKKSEFGSEKGLEQALARDWSVVERVEIEVITSQIRSLNESLKKVDKQLSESGADLEGHQSLLSIKGIGAKSAAILLSVIGDVKDFENEEKLSSYFGIVPRVSDSNQTQHHGRITKRGSKLGRTTLVQCTLVAIRYSDYLKSYYTKKKSEKGAGKAIIATARKFLGIIYRTLKNKWVFADFPNFVLAEG

SEQ ID NO: 76036 - protein, 310 aa, unidentified
MQINVGVDTSQQQLDFFVRPTGEFFSFPNTPKGAKEAIAALKKFKPDRITIESSGRLEFNFLLEAHKAKLPVAVCNPGSARNFAKSIGRTAKTDKLAAMDIAHFAEATQPRPTQVKPEKIRLISDLLTVRSQCLDMSTMQKNRLQRMPKSVHAPIKRVLKSIQAEIKIIDEKIDAIANELPQWEAQRDLLMSAKGVGKVLAYTLISELPELGSLNNKEIAALVGVAPMNRDSGQYQGKRYIRGGRQKVRTVLFMSMLSAIQCHPKLKPMYERMIAAGKPKKVAIVACMRKQLIILNTMVKNGTEWDPSMA

SEQ ID NO: 76037 - protein, 398 aa, unidentified
MDSLESIRLEQFRQFQKEIRGSEQYLIVGLDIAKDQHHAFFGSATGRTLWKRLLFDNSQEGFQKLLLQTEFLQVQHGLSQVVFGLEPTANYHKPLGEHLIRKGYQVVLVSGVAVKRNRELLDGRWDKHDTKDAANVADLISQGKCLYYEHPDPRIRDLRILLSLKKRGKRQEQGLRVRIRNGLLAQYFPELDRTFPRLIAPGKESDLLSAIREPISPIGCEVHPAVAFVAQLMVKQLQQIREVLRAVQGKIQALCSQFPEYPYLLSIPGFGPEISSQVLAAIGDPFRFGNGSQVLKMAGLDLSADRSGKASERARPVISKKGKANLRYALYQAAFIASTRNAAFTAYYTLRLKARRQEPGIQAKRRVKLAAKLLIIAWTLMKRKEPFDPERLVPSALL

SEQ ID NO: 76038 - protein, 424 aa, unidentified
MKVTYQTCCGVDVHKSFLVATIVKTTGGIEPSYQKKRFSTFNNSILEFKQWLLDNDCHDVCMESTGKYWVPVFNLLEDDINVVIANPKWVKAVKGNKDDTKDSKWIGDLFRLGLVKGSYIPCKKVRILREYTRYRYKLVSCRSSEKNRYQNALTVCNVALDSVVSDIFGKSSTSIIDYLLEQSGSSINHEEIASKLLRSLKSKEDAVIESVEGYQMTDAQKYRMRLVRAHMDYITAEINDVDKMIENMISSNTDFENAVQFLCTIPGVKRDSAITIISEISTDMSQFSSSKRLCCWAGLTPGSNESAGKKKSVRITRAGVYLKPALVQCAHAAVKSDKSPYYKKKYESLVKRRGKKRAIIAIARMILTAIYQMLSTGEQWNPSDLYKIDMPVALVEKQKAKAIKQAKKLLQREGLLPPDEPLAS

SEQ ID NO: 76039 - protein, 421 aa, unidentified
MAAATADKEIASEVPVEIWFQMLWRRAEPILFGSPNQSDGAAVMQPNDINSPTILLAIELSASTWLVAARVPGSEKPHLQRIDGGDTVALLALISSLQARVACRHAATINVVCCFEAGRDGFWLQRFLTAQGVDTHVLEPTSILINRRARRAKTDRLDAVGMLRVLAAFLRGDRQSCSMVRVPTPDEEDAKRTHRERESLVQERVRIENRIEALLFTQGIRKRPSLRSWDRDLAVLRTGDGRGLPIHLRSELDRLRRRLVMTLELIGEVESERDEAAEATPQDQTCLKIAALGRIRGVGDNFAAVLTREVFYRSFDNRRQIASYVGITPMPYQSGSMDRDRRISRAGNPRARTTMIQLAWLWLRYQPGSELAKWFRNRVGTLAGRTRRIAIVAMARKLLIALWRYVETGVVPAGAEIRAEA

SEQ ID NO: 76040 - protein, 349 aa, unidentified
MKILAIDLGKTKSVACVYDVDSGSATFRKIPTAAAAIQGLLTEHRPDRVVIEVCPAAGWIGDLVSCGCTELQLANTAAPAWRWSNTKRKTDRDDALRLAQLSALNQLPQVPATPRPTRQWRALIRYRHHLVCRRTQIRNRIRALFDREGLVLPEGMICWTQNGTAALRTYACDVNEVDDDDLWRGELGCELDALQSVDELITRVESKLDVLEQKQAKCRLLRTIPGVGPQLAEIVVAVLGDPHRFQNSKHVGSYVGLAPRQYQSGDSDRKGHISRQGNGLLRAMLVEVSWVSLQYNDWARSVYERVRRGSPARKKIAIVAVARRLLVRCWAMLRDATCWKQPTLAASRG

SEQ ID NO: 76041 - protein, 286 aa, unidentified
MDVCFGGEQRRVPNDVHGWDELTAMLQAGGVDLVVVEATGGYERGLVCALQDAGVCVARVNPRQARDFAKSMGVLAKTDQVDARTLRDFADVLARHANRAQYITPVLERARQELSELMTRRRQLVEMRVSEHNRLEHAGPRAARSIHSVLKLLDRQIAAVDRHIDDHLDRHFRSQRALLDSVKGVGPVTVLTLTAALPELGRLGRRQIAKLVGVAPLADDSGGRHGKRRIWGGRSDVRAVVYMAAIVAMRHNPVIRAFYERLVAAGKPKKVAIVACMRKLLTISMP

SEQ ID NO: 76042 - protein, 341 aa, unidentified
MEHCGIDLHLKSSEVCVLDETGSVSERSRIPTSEASFRRWFGGRERMRICIEASGLSPWVARILTALGHEVIVANAQRVRLIAESTLKNDRVDAETLARLVRMDPALVCPIRHRSEETQRLRGMLRVRRTLVNSRTACLNTARGLLRSFGYRVPGQRPERVARALTTGKVPEELCGLVAPLVATALELDEKIRALDDEVIAAGRAFPEVERFQQVPGIGPLVALSYVLCIEDPSRFRGSRDIPSFLGLRPRMRESAERSHFGPITRHGDAEMRRLLVQAAHGCLRSRQDTELKRWAEQLAGRIGKKKAVVALARKLAVLLHRLWVTGEDYEALRQEVAAAA

SEQ ID NO: 76043 - protein, 343 aa, unidentified
MEYYIGLDVSLKQTSICVVDQSGVIVREGVVESDPEPIASFVRSKAPGTVRIGIETGPTTTWLWTELKRLGLSVICIDARHATAVLKMQINKSDRNDAAGIARIMQTGWFKEVRVKDLDSHAVKALLASRALLVKIKRDLENQVRGLLKNLGLVIGRAKFDVFAVRAEGLVENHPELAAVIRPLLKARKAIEQQVDNLDRKVLKLARHDVQVRRFMTVPGVGPITALCFKATIDDPARFRRSRSVGAYIGLTTRRHASGEIDWSGRISKCGDAMMRMYLFEAAGVLLTRVPKWSGLKAWGAKLAKRNGLRKAKVAVARKLAVILHRMWIDGTEFNWSTKKAAA

SEQ ID NO: 76044 - protein, 360 aa, unidentified
MNAIHYIGFDVHKKTVAYCVKTADGQIVEEGTLQAQRMELRRWAKRRQVAWQGAMEATLFSAWIYDTLKPYAQQLSMGHPAKMKAITAGKKKSDCLDARTIADLLRCNLLPACYVLPPHLRDLRRLLRYRNLVVRQSVRMQNRMAGLLMESGAPFDRERLHRKKYFADLMKSLREVPESVKDLLRMSRGSMEMFESTQKQLIKRLLCDPALEQRLERLMSIDGVGPITALTWALEVADPHRFSSVADAVSYCGLTAAFRSSAGKQQRGPISKQRNAWLQTALIEAAKLAPRWNPQLAALHAQQRERGHANRATLQVARKLVAYLLAVDKNGQPFQVRTPPPRPKAKPRKRKQPATLASAA

SEQ ID NO: 76045 - protein, 347 aa, unidentified
MRFYNRQHRHYCGIDLHVKTMYVCILDAAGQVLVHRNVKSSAETFLEIVAPYRDDLVVAAECMFTWYWLADVCAAEGIVFVLGHALAMKAIHGGKAKNDKIDSQKIASLLRGGLLPQAYVYPAAMRSTRDLLRRRLHLVRKRGELLAHIQNTRAQYDLPAFERRLAYPANREGVGAHFSDPSVRKSMDVDLALIDQYDTLIIDLELTIVREAKRHDADAFHRLRSVPGIGKVLALTILYEIHDVTRFDRVQEFASYARLVKCVHQSAGKKLGTGGAKMGNVHLKWAFSEAAVLFLRHTKDGKKILAGIEKKHGKGKALSILAHKIGRAVFYMLSRGTVFSMEKFLAA

SEQ ID NO: 76046 - protein, 405 aa, unidentified
MDITPIHRRVIGLDVHQNKITACALIEQAAGSVAVEQREFGGFKRDRRALAAWVHGLAPDIVVMESTGIYWKSPYAALEKVGIAAWVVNARHVKNVPGRKTDISDAQWLATLARAGLVRASFIPPAEIRHLRLIARQRQKLGGMLAAEKNRLHKVLADAGIRLNVLLSDLHGQSARAMVKALLADAPIHAILARAGRLRASREDLFEALQPEELSAKHRFVLNEIMAHIEYLEATMARFEQQLLVGLAPWEPQMRLLETVPGIDRLGAAMLLVEIGTDMDSFGSAERLASWVGICPGNNESAGKRKSGRTRKGNAWVRRLLCEFAQAASRTRCALKDKFSALAIRKGHKRSIVALAHKMLRIVYAMLANTTPYQDRTVDYEALMVGRNAPRWLKMLAKHGYIATA

SEQ ID NO: 76047 - protein, 371 aa, unidentified
MNSILYVGMDVHKENYTLCCYSFDRDKVEYRQTVPSDYRLVLKYLEQVRRKYPEEVEFICGYEAGCLGYSLYHQLTDHGVKCIILAPTTMGITNTNRVKTDRKDAANIARCLAFHTYSTVYVPDGEDNAVKEYLRMRDDQKLALKKIKQQITAFVLRLGKQYTGGKSLWTENHLKWLRGLDLTLLEKETLQEYLITYDYLTDKLERLDARIEELARNERYGERVRRLGCFIGIKPHTALSLLVEVGDFRRFEKAPNFAGFLGLVPGEDSNGGGRNRLAITKAGNSHLRRLLVESSQSYSRGTIGFKSKELKKRQEGNPPEVVAYADRANERLRRRYYRMTLKNGAKRNVAIVAVARELACFIWGMMTDEIA

SEQ ID NO: 76048 - protein, 459 aa, unidentified
MSRKHKKAKRAGQGGAVPSLSCIEPNAAGIDVGATEIFVAVPQDRDPGPVRSFETFTEDLHRLKSWLQHCGITTVAMESTGVYWIPLFQILERAGLEVCLVNAQHVKHVPGRKSDVIDCQWLQYLHSVGLLRASFRPEERICAIRSLLRHRDSLVQMAAAHVQHMQKALTQMNLQLHHVLSDITGQSGLAILDAILAGERNPAVLAQLRHPRVQASPEVITKSLVGDYQREHLFTLRQSLQAYRYYQSLITTCDQEIAEQLQNLDSRTPPDASPLPAEPYPHRPRKNEFRFDMRSELYRIYGTDLTAIPSINALTGYTVLAEVGTDWSKFRNGDAFASWTCLCPQNKKSGGKILSAHTRRSANRVNRALRLAAQTLERSTSYLGTYYRKMRARHGAPAAITAAAHKLARIIFHLVTTGQAYDESLFAAEEQRQRKRLENKLKRSAQQLGYQLIPLGQTA

SEQ ID NO: 76049 - protein, 448 aa, unidentified
MARKQRRTRGLRVIYRNCAGIDIGGTSHWVAIDSSLDECPTREFGSETEYLDQMADWLIQKGVEQVAMEATGVYWIPVFELLERRGLRVMLVDTRATRQVSGRKSDVLDCEWIQQLMSCGLLRGAFRPQDDTCVLRALVRLRARLVRDSSRAVLHMQKALTQMNVQLSNTLSDIVGKTGLAILRAIVAGERDGAKLAALRDRRVKADEAQLARALRGNWRREHLYELSTALAQYDFLSMQISDCESEILAAIAPLARFEPPPSACSKPLRGKHRSTAQSDTLRLALQRVLGIDLTRLPTIAVETALVICSEIGRDLSRFPDSAHFCSWLQLAPPTRISGGKPLPGKPPKRFNRAGQALRMAAANARNSDSFIGAAHRARLARMDKPTAIKATAHHLARLIYAMMTKGEDYVEHGIAGYNELHQARQLTALRRRAKQLGFSVVPVESVA

SEQ ID NO: 76050 - protein, 289 aa, unidentified
MQTGQTAQTYALFVGVDIAATTAAVATQRPGAKASQSFIIDQTPEGYTSLLHTLQRTGHAPCQVLVVMEATGSYWISLATRLVHEGFGVSVINPAQAHHFAKALLKRAKTDVIDAQTLAQLAMVLQPEPWTPPPQIYYALQQRLAQRDDLLNLRQQVRNQLHALVQHPEVIPEVRARMDRLLATFEAQLTEVEREIAAALTQDSAWAAAATRLQSIKGVGWVTAAWTLVTTLNLTSCDTVDSLTAYAGLAPMPRQSGSSVWHRPSIGHTGNGRLRTAFYMATLSAAQPD

SEQ ID NO: 76051 - protein, 420 aa, unidentified
MIAVDPHKASNTAAVLDPVTKTLTGTARFANSDEGYARLTGFARKWEDRRWAVEGCRGAGRSLAQRLVADGETVLDVPAKLAARVRVYSQGHGRKTDRDDAVSIGLAALDGSGVAPVAPDDVLVSLRLLCDRREELCALRTQAVCRLHRLLAELTPGGMRRELTAGKARALLDRIRPGDDVTRVRLQLAEDHLAGIRALDARLKTAAAQISDLVAATGTTLTSLFGIGPVTAGRILAETGDVARFATKDKFASYNGTAPIDASSGDQVRHRLSRSGNRRINHALHMMAVTQIRYPWTDGRRYYERKRAEGKTPKEALRCLKRRLSDQVYRQLVRDRQGTIEGCGSPTTRPPTPPTFTSPASASAAAAPASPPNRPTASRPSSSWTGKTTASSASRSSTPAAACTPTSSKKRKSSTNTGAP

SEQ ID NO: 76052 - protein, 357 aa, unidentified
MPTSNVKYIGLDVHKEAITVAVRNSTGKLVMESVLEAQSSTLLEFLNEVRGELDVTLEEGTWAAWLYDVLKPHVSEVVVCNPRRNAFLKEGSKDDRVDARKLSELLRARMLRAVYHGENGLRTLRELARSCQVLSKDLRRVMNRIKALYRSWGIPCKGRQVYGRRHREQWLQKIREAGVRRRAELFYQQMDTLQGLRHTVRGELLAESRKHAAVKILRQIPFIGPLRATQLVALMQTPHRFRSKRQMWTYSGVAVVTRDCAQYCYVDGKLQRSKKPQQVCGLNQNHNHALKEILKSAALCATLRAGPFQDFYAGLVAKGMKPELARVTLARKTAAITLTLWKKGECFDLRYVKSQAA

SEQ ID NO: 76053 - protein, 379 aa, unidentified
MDVFIERCAGLDVHSETIVACVLTGKQDEDLIRVTETFPTLTKDLFRLLKWLEDHGVTHIAMESTGVYWKPVFNILEDFFDITLANAQRIKNVPGRKTDVSDAEWIAKLLRHGLIEKSFVPPSDIRELRDLTRLRKKWIGHLTSEKNRIQKVLECSNVKLSSVISDVFGVSGRKLLERLVEQGYVDAVDVESRIHGKMSSKKQLITDSLFGTINDHQRFLIKQSWLHIQQLEGHIVEVEKRIDHLLEEYKEELHLLLTIPGIKKDTAAIIIAEIGVDMNQFPTSQHLASWAGVSPGNHESAGKRKSTRTTKGNPHIKSAMCEAAWAVSRSRNRWLATKYWSTAARRGKKKALVATSHRMLRIIYSMLINKEPFKERQVI

SEQ ID NO: 76054 - protein, 420 aa, unidentified
MKPTKSKKVKVINEKTMIAALDIGKTAHYAYFRAPNGKDIKPFPFYNFRKSFNEFWTRLCHFKREHKLEDIVVGFESSGPYAEPLFHYLRKKPVKLVQINPMHSKRIKELTGNSPNKTDKKDPRVIADVISLGHALTLVVPEGPAAQLRRLSQARERALKRRTAAINQLQDLIFIIFPEFLAIMKNISTKTASYLIKKYPTPESIVALGIESLAVIIKRVSRGKLKQQRAGEILNAAQNSIGISEGKRSILLEVEYLISQIGADNRFIVNLEEQMEDYLEKIPYSYSLLSIKGFGRVTVAGLIGEVGDFKKFNTISEIMKLAGLDLYEISSGKHKGQRRISKRGRSLMRKLLFFASINAVKSNGIMHEPYQQMQSRGMLKMKALIAISRKLLRIAFALARDDTVYDENYSNIHDSFKLAA

SEQ ID NO: 76055 - protein, 343 aa, unidentified
MQGVTTIGLDIAKSVFQVHGVDAHGKVVVRRQLKRRYVLAFFKKLSPCLVGIEACATSHHWSRELQALGHTVRLMPPAYVKPYLKRQKNDAADAEAICEAVARPNMRFVATKTAEQQSCLMLHRTRHLFVRQQNAVINCIRAHLAELGIVAPVGRNGVEELLDVVADPDDDRVPEVARECLASLGAQLRMLKAQILEFDRRILAWHRSNETSKRLDEIPGVGPALATALVASVADPGAFRSGRDFSAWIGLVPKQNSSGGKEKLGNITKRGDRYLRSLFTAGALAVIRYAKVHGTKHRPWLTALLARRPTKVAAIALANKIARMAWAMMAKGERYKEPVALAA

SEQ ID NO: 76056 - protein, 327 aa, unidentified
MAKRITICAGIDTGKRKLDVALEGSSEQLQVDNTPEGYKVLLDWLRRHRVKRIGIEASGGYEQAVVAELRRKRFVVVVFQPAQVRAYAKFHGQRAKNDKIDAALIAACTAAVKKIHAAPDARLLPFAEQLTMIEQIGEDIARLKNRLESCRNPRFQQIWKEDIARLAKRERIEFKALVAAIREHRDLAERLDLIYSVGGAGLPTAVAILVRMPEIGQLTREQAAALAGLAPYDDDSGERVGGRHINGGRERLRRALYTAALPASFRWNPQLIALYNRLIAAGKGHKRALIACARKLLIFVNTVVARGTPWQDKPPPSAATTAVLQAG

SEQ ID NO: 76057 - protein, 361 aa, unidentified
MQSTTIIAFDQHAATTMAAVLLPEQGTPALHPLTSDIPTILRFVARLQREGAVRCCYEAGPCGFELRRALEARAVSCDVIAPALIPRRPGDRVKTDRRDARQLAVLYRAGALTAIHIPTEQEEAARDLLRCREDIRADLLRARHRLSKFLLRHGRRFTATKKAWSKRHEAWLRAQIWSLPALDQTHRAYLRAVTEAVARLHDVEADLRALLDLEPLRGRVRRLRCFRGIDDLTALTIAAEFGDPRRFATAPSTMAFVGLVPSEHSSGSKRARGGITKTGNAHLRRVLVEAAWHYRHHPFVGAALRARQRDAPAAVIAHAWSAQQRLHRRYARLAARGKPTQHIVTAVARELTGFVWAALTQ

SEQ ID NO: 76058 - protein, 362 aa, unidentified
MFRPHTLYIRIRIVRKVHEPVFAMRDQDVSDVIKTKNRTAMQYIGIDVSKATFVVAYSSDKGGEIRTFNNTTAGIKQFIGTLPKDGNIHCVMEATGNYSALLLYMLNVAGITVSMENPLKVKNFARAMLSTVKTDKIDARLIALYGEKMNPQPFKVQGEAILRLRQKRTVIRQLTKQITAMSNLRGSLACLPVPDKGATHTVDETIKFLEKRRDRLQSELTDLVEVEFSRQLALLTTIKGIGITLATALILTTGGFTYFQNAKQVSRYLGICPTYEQSGTSVNIRGHINRNGDAYTRGLLYIAAWPASRFNAQCKETYTRLRQNGKPGKLAMIAVANKLVRQAFAVVAHDKEYIDGFVSNRP

SEQ ID NO: 76059 - protein, 338 aa, unidentified
MTIAFMGIDLAKNVFQLHCVDADGKAVFKKRVRRQGLLAELADIPACRIGIEACTGAFWWQRQFEALGHTVKVIAPQYVKPFLKHQKNDRNDAEAICTALMQPNMKFVPSKNEEQQDIQALHRARRRLVNHRTALVCQMRGLLLDRGVTIPLTLGRARQRIPEILEDQSNGLTGMTREIIADLFEFMLQLDARIKAFDRRIDHVFRSNPDCQRIARICGVGSKTATAVVAAVGDGKEFKNRRHMAAWMGLVPRQHSSGDKRLLMGISKRGDKHLRTLLIHGARSVVRVSQSRTDAFSRWVNSIRERRGMNRAIVAVANKNARIIWAMLRRNEEFRAHA

SEQ ID NO: 76060 - protein, 353 aa, unidentified
MWIIGCDFHPRYQQIAALNLDTDELVERRLSHEGKEAAAFYEALPRGALIGMEATCTAQWFERLLERCGHTLRVGDAAQIRASVVRKQKTDTRDALHVLDLLLTDRFPSVWIPTPAERDARQLLLHRHTLVRWRTAVQNQLHALARNQGLLPHTSFWTRTGRQQLESLALDPWAHRRRQDLLCQLDHLNSQIDELTEQVRQQARQRTDTAELMQQPGVGPIVSLAFVLTLGTAKRFPRGKQVASYLGLNPAEHSSGGKQHLGHISKQGNRMMRWLLVEAAYVAVRKDPELKRIYQRLAFRRGRKIAAVAVARKLAVKLYWRLREVQEQRTAPPAPMQGCPGSGLVKAVSSPSV

SEQ ID NO: 76061 - protein, 409 aa, unidentified
MNRMLERCAGLDVHKRTVVATARIPDGVGGRQVITHTFGTTTADLLGLRDWLERLAVTHVAMESTGGYWKPIFYVLEDGFTVLLVNAQHLKHVPGRKSDVQDSAWIAQLLENGLLGGSFVPPVPIRDLRDLTRYRKKQIQERTREVNRLQKVLEEAGLKLTSVLSDIMGLSGRAMVKALAGGTTDPAVIADLARGRLRGKLPALRQALQGRFRPHHAFLLEQILAKIDFLEEVIAACSARIAEQLTPFGAPMARLQTIPGVKQRTAEVIVAETGGDMTQFPSAGHLCSWGGVCPGQEESAGKRRVTRTRHGNPALRMALIEAATAASRTKATALSALYQRIKRRRGHQRAVVAVAHQILTIAYHILARETTYEELGPNYFQQRHRERNARRHVRQLEQLGYHVTLAPAA

SEQ ID NO: 76062 - protein, 407 aa, unidentified
MMDSRKRYIGLDVHKYYLIAFGVDEDLNVVLPARRVELSHIEAWMRKTLTKHDEIVLEMTTNTWQLYDELVEYAGSVMVVHPPHVALITRSQVMNDKIAASILARLLAKGLLVGIWIPPQEIREARGLVAQRQKMVRLATQAKNRLHAVIQRHHLVPPRGNPFGANNKEWWQSLSLGKLERLNLQSDLETLQFAEQQVKDLTEIMEGMAVEQEEIGRLLHLAGFGIVTAVTVWAAIGDIRRFAEPQKLVGYAGLGTRVHDSGMTSRSGKITKAGRRDLRTVLIEAANAAANSHPHWKAELARLEPRLGRNKAVVAIARKLLIAVWFVLQGKTDKFAEPEAVAQKMLKFAYAVGKANRPKGQTAAQFARIRMDTLGVGRELTCIPWGSKKPIPLPPSALKEGSDVPNK

SEQ ID NO: 76063 - protein, 408 aa, unidentified
MNTLYVGIDVSSKSNVVYLMLPNGDKHSNFSVANSHEGSTLLVKKIYSALTSHSLDTVLIGLEATSVYGDNLVYFLREDATLAPFNRKIHVLNPKQVKKFHDTYNDLPKNDYVDSFVIADCLRFGRINKEVYMGDYRYKALQNLTRARFFAVQNLVKEKQRFMNVLFKKYSTMTQEKVFSDAFSTTALAVYDEFESAEALANMDLHELTDFIIEKGKNRFPDPVAVAKAIQKAARSSYRLPKTVNDSVNQVLSISITSMKALESQIKEFDKAIIALMELLPNVLISIPGIGPVYSAGIMAEIGDINRFDNQASLAKYAGLAWKQHQSGGFEAEVTRLIPSGNRFLKYYLCEAAFSLVRCDKKYSDFYHLKYKEVNRCQHKRALALTARKFVRLVFRLLKDNRLYCPAK

SEQ ID NO: 76064 - protein, 392 aa, unidentified
MAICIGIDAAKVVHWAVGIDGAGGVVLDRAVENNPAAIDAFISDLRALKGDVVIGIDVVGSFARFIEASLLAEGFALVHTPGIAVNRAGQGFAGGERKSDPRDARTIAELVRTRDLRPVLADDDTRVALRLKVGRRRDLMQDQVRRIARIRGLLCGIHPGLEQAFDLCCKGPLALLTRYVTPAEIRRAGQARIVAHLKKTPHLHGGATLARRALDCAGTQTIIVPGEAATAELIRELAAEALEARQKIARIEKDLEGILSDHPDAALIRSLPGMGVVLTAEFLAAIGNIGRFSSADALAAAAGLAPVQRQSGKRAGWRRAYGGDKVLKRVFYQSAFCAVTQKDPLSKAFYDRKRREGKHHTQALIALARRRVNVLWTMLQRREVFDPKRNAA

SEQ ID NO: 76065 - protein, 455 aa, unidentified
MPDQKPLPVRRPNQSWGRSPGAEIGAKASGKVCTRLPHEVKAGKRVTLVWDVAATTNAICELAAHLVEQRIERVVLESTSDYWRPFFYVLEAAGLCVWLVNASDVKQVSGRPKTDKLDAVWLAKLNERGMLRPSFVPPADIRRLRDYTRLRLDLTRERTRHKQRMEKLLEDALIKLSTVATDIFGKSGRDMIEALIAGKNDPKQLAELARGRMRVKHAALAQALDGRFDEHHADLARILLDQVDGLDIQIQRLTTTIDELIAAMPAAAAAGDHQAPTDANTNGGGGESERRTTLSAIARLDEVPGIAEHTAQVIIAELGLNMAQFPTAGHLVSWAKLSPRTIQSGPRTRGGKTGKGNPYLKGVLGEAATAAAKTNTFLGERYRRIVKRRGKLKALVAVARSILVIVWHLLTDPTARFRDLGPDFHTRRVNTDRKIRSLVHQLEVLGHTVTLQPAA

SEQ ID NO: 76066 - protein, 344 aa, unidentified
MKIAVLGIDLGKNVCSVVGLDPSGAVVLRRRVRRDTLIDLVAKLPSCIVGMEACCGAHHLGRLFAAQGHDIRLMSPEYVRPYVKAQKNDDRDAEGIAEAATRPTMRFVEMKTEDQLDMQTLHRSRERLVGERTALINQLRAILLDRGIVVPQGKRKLEQYLVILMNEHNGEGLSARMRMLVADIRAQWQELDRRIGEFDAEFVRWAKENEDARRLVTIPGVGVTISTALIAAVGKAETFEHGRDLAAWLGLVPRQSTTGGKPRLMGISKRGNKYLRKLLIHGARAALPYVAEKDTALGRWAKSLLSRVHQNVAVVAFANKLARICWAVLRSGQRFAAKGAPLVV

SEQ ID NO: 76067 - protein, 438 aa, unidentified
MSNKVIFNFDELFISVGIDVGADFSWMSIALPNQQFVGKPYKILHSNMNSLTTAVSKIKEAEELYSLESRIFLESTGIYHYPLFCYLRDKGFNCSVINPIITKNSTNMNIRKVHNDRFDSKKAALVGLKPDLKVSLMPSDLALNCRNLCREYYDLMDNRSAYVNKLQGELRMAFPQYLGIFSKVTINTSLTLLETYTSPSAFLEADKQEIIDIIKSTARFGLTYAQNKYNAIIQAANEANEFGYIINSNIKRIRLYISFIRKYDEEINRILDAMHELIDSNEDTDFVKQIHLIETFKGAGFLSAVSLMGEIGDFSAFSKPKQLFAYFGLDPAVKQSGKFEGTKIQMSKRGSAIARRVIHTLALQSISTSRTGEAKNPVLRDYYLKKCESKPKLVAIGAVSHKVCNIIFAILRDKKPFEIIAPEEHIKQYNAAKCDIAA

SEQ ID NO: 76068 - protein, 450 aa, unidentified
MSPHKTPPAATATLCVVHPHAAAIDVHSDNHVVCVGPGQVQTFGAYTADLRALVAHLSRHGVTSVVLESTGVYWIPLFELLESRGFEVFLIEPSQARHCGARPKTDVLDCQWLQRLHTFGLLRPSFRPPASVRPLRGYWRQRQTLVRYAASHVQHLQKALEQMNVKLTEVASDITGVTGSAIITAILAGERDPQVLAALRHDRCARSVDEYARALQGTWQPEHLFALKQAWELYQFCQRQITACDQQIRDELARLPDRAPGRPFTPKPRQRGRKSNDVRFEGTGPLFRAVGVDLTQIDGIDVSTALVILAELGADVSRFPTEKHFASWLRLCPCLEQSNHTTKNRAPRRGKNRLAQALRMAAQAASRTKTALAAFYHRIKARIGGRGAITATAHKLALLVYRMLKYGVAYVRQSLEEYAARVREQTERRLRRQAARLGYELVPRAAASPP

SEQ ID NO: 76069 - protein, 342 aa, unidentified
MAVYYIGADVHCNNTELAVEHNKKIIKRICVPTTVPAIRSVLADLGGRCHVTFEEGPMAGWLYRNLKESVASITVCDPRRNRLIACDGDKDDQIDSGKLAALLRGKFLRPVYHDHSREQLEFKQWIKLYHDFVKSATRNINKVRGLCRCEGIRIPSHAVRDVVYRSHWLEVLEHKVLADQVGLLWHGYDTAACQARAAKKQLERRIRGNAVLQRWSEIAGIGVIRAATIYCYLDTPWRFKTKSRLWKYCGIGLQHSCSGKDSKGVAKQGQLQLAWQVNKMLKNAVMGAAMSAIRQKNNEFALYYERLLRDGITPGNARHSVARRMAVVLWGTWKQLLRQDQN

SEQ ID NO: 76070 - protein, 413 aa, unidentified
MEVLYPRCAGLDVHKATVVAAVRLAAGGRVAREVRTFATTTAGLLELAEWLAASGCTHVAMEATGVYWRPVWHVLAEGGFALVLANAAQVKGVPGRKTDVGDATWLAELLAHGLVRASFVPDGPTQELRSLLRTRKQLVRERAGHVLRLQKTLEDANVKLDGVVTELLGRSGRAMLEALVAGETDPAKLAALAHPRLSATPERLREALRGRVTRHHRFLLRLHLDQVDALDAAIARVDREVEEHLAPFRAAVELLTSIPGVGPLAARVIVAEIGLDMGRFPSAGHLVSWAGLCPRNDESAGKRRSVRLRKGAPWLKTTLVQCAWAASRKKASYLQAQYHRLRGRRGPRKAVCAVAASILTAAYHMLKDGTPYRDLGPDHFDRRAKEVQARRLVRRLADLGYAVELAPLEPAPA

SEQ ID NO: 76071 - protein, 459 aa, unidentified
MQDNIETQENRRRQLAGLPVIRRGVAGIDLGSEHHWVCAPTEDGAGREITDFGSTTSELVRMAKWLKDRKVESIAMESTGVYWIAPHEVLEAAGLEILLVDTRQLAQVPGRDKKTDPTDCEWIQRLHSCGLLRGSFRPPEQVCMLRTLVRDKANLVAESGDWLRRMQKSLDQMNVRVHRAVSDIDGVTGLAILRAIANGERDARQLAKLRDKRSRKTEEEIAEQLNGHWREDHLFSLKQALKMYDDIQQRIGDYEQEIIRQLGAMQRTEFREQAAPKPQNRQKAKTIRQRGQEPMREALYRMSGVDLTSIDAIGVETVEVVLSEYGPDLSRFPTEKQFVSHVKLAPYTPRSGGKPLKKKRRNTASTRVAAALRMAAVSLRNSATALGAYYRKVARSIAGDVAVFATARKLAILIYRLLRWGQPYVDEGEEAFEKRYHERRINTLKSKAKELGYALVQKA

SEQ ID NO: 76072 - protein, 324 aa, unidentified
MRPIPSLGVDIAQRRLVAALWFEAGRFLKQEFANSPAGFRGLDRWLRQHFVGRLRVGIESTNVYGEMLAEWMHRKAHTVYLLNPERTACYARCRGQRNKTDPADAVTIAAFVAAHADLTRWSPPPPEQKDLRSLTRARHQLVALHAKLRNQLKTAAGLGRDHLAAAAQALAKELVQLGRRIAAHLRAFPALGDKVRRLMTVKGVGLVTAATAIAELPAITADTDTRAICSWVGLTPRRRQSGRTELPTRLSRHGNAYLRDALFMPALVAKRWNPLLRDFAQRLSDRGKSPNAILGAVSHKLLRILVGLLRSNRDFDPHWSTEKI

SEQ ID NO: 76073 - protein, 338 aa, unidentified
MKLYGGIDLHSNNSVVALTDEQDRVEYLKRLPNDLSVILSALQPHQESIEGLVVESTYNWYWLVDGLMDAGYRLHLANTAAIIQYAGLKYADDDSDACWLAKLLRLGLLPEGYIYPKEERPVRDLLRKRSQLVHQRTSNLQSVQNLMARNRGRSLSANSIKRLTYEEVDRLLPDADLALAVKGSVAVMRTLDGVIILLEKAVKGRIRLRPQFKPLLTVSGIGEILGLTIMLETGEIGRFAKVGNYASYCRCVGSEHLSNGKRKGRGNTKNGNKYLAWAYIEAANFAVRYNPQIKRYYQRKSARTKGIVAIKAVAHKLARACYYILRDQVTFDVNKAFT

SEQ ID NO: 76074 - protein, 371 aa, unidentified
MPHPVLSAVDPQPRTNPRIGAPVITIGIDPHKRTHTAVAVSGVGQLLGEVTIDADTAGQEELLAWALELESGEGIRFALEDCRHVNGRLERFLLTTGVAVLRVPPKLMAGARQSARTRGKSDAIDALAIARAALREEGKLHPASHDPKARELKLLVDHREGLVRERTILASRLRWRLHDLEPGLEPAARSLDQASTRRGLAQRLARREQSAQVRICRDLLGRIGDLTRRERQLAAEIGDLAKAYAPELLQVPGVARLTAGKLIGEIEGIERFKTEAALAHFAGCAPIPASSGNRQRRRFDRHGNRQLNAALYRIALTQARIHPGARAYLAKKRAEGKSGAEALRCLKRLLVRVIWRTLRASGEQRVALSQS

SEQ ID NO: 76075 - protein, 356 aa, unidentified
MQTQVTKKIDFTGKELFIGLDVHKKSWSVTIVVDGIEHRSFTQPPDPEALQKYLQRFFPGGNYHSVYEAGYCGYGIHRRLNELGIKNIVINAADIPTTQKDKLHKRDPVDSRKLARGLERNSLHGIHVFDRDKEELRTLNRTRFYLMRDLRRSKNRIKSFLLYYDIPIPGEFDNNQWSLKFIAWLKQVRLQTIAGQEAFSHLIDSYEHHRQQLLILSRLVRLRISQHDKELFNLLKTISGIGPLTASALITELGDINRFGHINDLASYVGLVPRVRESGETSYAGGITFRCNSFLRTLLIESSWQAIRIDPALMQYYHNHLVNNKGHKVIIKVARKLLNRIRYVMKNRKPYVTGVA

SEQ ID NO: 76076 - protein, 483 aa, unidentified
MKPKQQEKNKKAICRPTQNNRHAMNRKQRRELTRKLQSEDLSLEVVHPDAAGIDIGNESHYVAVPPTRDSQSVRRFGCTTSELKEMAVWLKQCAIRTIALQSTGVYWIAVYDILEESGFEVYLVNARETKNLPGRKSDVQESQWLMKLHTYGLLRNSFRPSQAIRTMRTYWRQRNDLVRAAGRHIQRMQKALTQMNIQLANVLSDVSGMTGQAIVKAILAGERDPYELAALRNWRVKASEEEIARSLEGNWQEDLLFVLQQEQDGYEFCQRQMAECDQRLQQYLQQLEDRSHGAGLPEEKRKERLRKKKKGNAPQFDLRAELFRMTGTDLTQIDGIDVTTTMTILSEAGWDMSKWKTEHHFVSWLRLCPDNRISGDKIIGKGRLPTNNRVTNALRMAASTLRLSNTYLGAQFRRLRTKLGAPVAIKAMAAKLARLVYRMLRYGMQFIDRGAEFYDAQHRKLQITYLKRKAAHLGFQIIEAPAA

SEQ ID NO: 76077 - protein, 366 aa, unidentified
MTKNITLVENTNEIFKSQQLTIGVDLGDRTSHYCVLDETGNVILEQRVATTPKGIQQVFSKISRSRIALETGTHSPWLSRLLTQLGHEVIVAHARNVQLITESTRKDDRLDARTLARLARIDPQLLGPVRHRSAKAQIHLTEIRARATLVSARTALVNAARGLTKSFGERLAKCGTEQMNREIAKGLSPELRDVLEPLLGEIESLKERIAEYDRRIEQVAKEVYPEVALLKQVKGVGTLIGLTYILTLDDPHRFRRSRDAGCFLGLRPGRRNSGMSEPQMHISKEGDAYLRTLMVQGAHYILGPFGQDSDLRRWGLKLAERGGKNAKKRAVVAVARKLAVLLHKLWVSGEVYEPLRNNHQVVSAVA

SEQ ID NO: 76078 - protein, 316 aa, unidentified
MSLNERIAVGIDISKAKLDIFHGSLQQHKAFEHSPAGIARLIAWLLENDPTDLVVLEAPGGYEMDVWHALCDARIPTARINPKRARDFARALGLLAKTDKIDARVLALFGATLSIEPDQPKEKALHEMEAWLTRRQQLVEMRVAEQNRQRQAPKAVQKRIDLHLRQLQREIDRIDDYLAEQIQQHPVWNEKLALLDNLKGVGANTCAWLIAALPELGQLNRRQIAALVGLAPMAHESGIYKGRRRIYGGRSAVRTALFLATLSAVRHDPRMKDFYQRLVQAGKPKKVALVAAMRKLLTIINAVFRSGEPYRVLVAD

SEQ ID NO: 76079 - protein, 350 aa, unidentified
MMIGVDYHPSFQQIAFLIEETGEYDEQRLNHEGGEAERFYRDLKRRGIRVRVGMEATGYARWFERLLAELDFELWIGDPAEIAAKRVKKRKTDREDARLLLRLMREDRFPRIWVPSPENRDLRQLLWHRHRLVQMRTRIMNQLQALAMNEGKRWKSKLFSQKGRAEFEKLALGPWASRRRSELLELLDRLNPSIEELTTAVQQEVNKRPEALRLMTHPGVGPITALAYVLIIGTPERFTRGKQIGTYVGMIPIEESSGGKQRLGQISKQGSSLLRYLLVEAAQAAARYNPHWRRRYIRLAIRRHRSIAKVAMGRRMAIRLYWMWRNGCDYSPSFEFGSYAGQLEKRHGGK

SEQ ID NO: 76080 - protein, 430 aa, unidentified
MTKLTPTPAGAVLVAIDMSKNRQEVLIERPEGGRRRRLSVMATKKDYDDFAEQLAAIGRPIVVGFEATGNYHRTLAHRLLTAGFELRLISSVALAHTREALHNGWDKNDSKDAQVILHMLRIGATQRYVDPLAAGINDLQELSKTHETISKAKTQTWHRILTHYLPLYFPEIARFAGNSRSDWFFALIERFPTPASITALDAETFSAVAWPLIGRKVSKARLINDIYETACASVALPVPEDSAAITMFRMVIAQGRSLIQQRDEIERLAHARLAEHVDYQLLRKIPGIGPINALTILAEAGDLRRFNHHRQFLKFCGLDLATCQSGTFRGRTKLSKYGNARLRRTFWMAAQVAARQRDNSFRDKLGRYVAGHADDADRRRKAMTALTAKMARVAHAVIKTGTEYRPFLERSDARWKDPSLMCREGARATL

SEQ ID NO: 76081 - protein, 353 aa, unidentified
MTSLTDLREVVDVVIGVDTHVHTHSAAAVEARTGGVLDEITVEATAEGYEQLVEFAAEHAVLRAWAIEGTGGHGAGLARHLARREEVVIELDRPQRAQRRNGAKSDPLDAIRAAREALARTRLGTPRSSGDRQALSVLLAARRSAVNAAGDAQRQVFSLVIAAPEPIRERFRGQKLPAMLKTAAGLRVHPSWDVETTTTVLTLRSLARRARALDEEAAEHERTILRIVRSWRPDLLDQLGIGPIVAATVLCAWSHPGRIHSEAAFAMLAGTAPIPATSGQVTTRHRLNRYGDRQLNRALHTIALTRIRYDQTTRDYVARRTSEGKTPREIKRCLKRYIARDLYRLLEHRPIAT

SEQ ID NO: 76082 - protein, 317 aa, unidentified
MNSPPETIPIQRYIGIDIHKYYMMIGGQNAHQEWILRPRQVQTVHFRTWAEKNLKEGDAVVVEATGSVWDIYDIVAPLVSKTVVANAHKVRQIAEARVKTDKEDIKRLITLLIADIVPEVWVPPVHVRELRSLISFRWRLTKQITMSKNRLHSVVQRFNLNAPEGGLLTDKNKSWWEKQEFTDLTGFQVDRDLEIVENLEQQKAAIDQKLAELSNIEPWASDMAFLMQIPGFGLIFSMVVLSAIGDVSRFSDPKKLVGYAGLGAGVHASGEKYQEKSITKAGRKELRWALVEAAWVAVRFDPYWKAQFIRLKKKDAC

SEQ ID NO: 76083 - protein, 411 aa, unidentified
MDVVHARCAGLDVHKATVVGCVRVPGERHQERRAQTKTFATTMGGLGKLADWLTAHGVTHVAMESTGVYWRPVYAVLEGTVELLLVNARHVKMVPGRKTDVRDCEWLAQLLECGLLRGSFVPPPAVRDLRDLTRYRKALIRERSHSVNRVAKTLELANIKLGCVVTDLMGKTGRAILEALIAGGEDPEALAALAQGLLQKKRAELREAVVGRMTPHYAFLLRQHLTLIDALGAQIAELDARIEAAMAPFAEAYACAQTMPGIAARAAQAILAETGVDMSRFPTPEQFASWARLCPGTHESAGKRRPTTIGKGATWLRATLQEAAWAAVKTKKSYYAALYHRLKARRGAKKAIVAVQHAMLVALWHMLRHRVPHRDLGRDYFDRRNPARIRRHHVRRLEQLGYQVLLVEPAA

SEQ ID NO: 76084 - protein, 458 aa, unidentified
MNTRIIGIDLAVTAAHKAIVLDQTSNTYVSPVLAFHTEPADLDYLLDTARAGASGPVCLQAVLEATAMSWYTVGQYLERHNVDVYRVNGQQVADLRRVYQRHAKSDRIDARVLARLPLVMPDSLHRCFFPSGPLITLQRACREVKRLKDLVIASKNRILATDQLTWLGLSSVVSPFSPLAFWLRENWYDPWRVQAASAEQLAQAWQTASPEEPAGISWAPALIRQAERVTALYNNPDLLDYAQFQASLQREQARLRQADEQAHQLRLKTVRPLYRQLHPTRNLETLRGVGQDSAAIYIAFIGDIQRFPSLRNFLGWTGLIPFSRQSGDAQARGLRVTKAGPNLIKATAFLNAGIARQWDPQIAAIYHRQMMQHGKHYLQAVCACATHLLTRIYAVLRDDRPYELQDADGTPVDKHTARRICQERYHVPAEVRQRNNRRVRKARQEARLEKSRKRKRRR

SEQ ID NO: 76085 - protein, 358 aa, unidentified
MAKPSQTSPVVGGVDTHKDLHVAAVVDQNDQVLGTHSFATTRQGYKLMLAWMRSFGDVQRIGVECTGSYGAGLLRYMQAARVDVLEVTAPDKLDRRRRGKNDDFDAESAAHAAFAKRRTVTPRSRDGMVESLRVLKVCRKTAVQARRIALQIIQTTIVCAPDRLRDTLRKMTRMQLIRTLAAWRPDLTAYRDIEEAYRIAFKSLARRYLELHDEIADLDTMIQAIVTDLAPELIARNSIGLNSAAQLLLTAGDNPERLKSEASFAALCGVSPVPASSGKTTRHRLNRGGDRAANSALHIIAIGRLRLDPKTQEYVARRVAQGHSKLEAIRCLKRYIAREVFNIIARRHKQINQAQIAA

SEQ ID NO: 76086 - protein, 385 aa, unidentified
MTIQIQAPGFIPRDYDVFGGLDVDKKSMSVVFTDHAGSQRALRMAHQVTPLVNYVRKHFAGQRVAFAYEAGPTGFGLHDELVRRAYTCVVVAPSKVPRAPGERVKTNRLDSRKLAESLRGGQLHSIHVPSAVYRNLRHLVQMRDTHVRQLTSSKLRIKSLLLYEGIAFPEEHEKWTARAMRELQTLPCSETVRFKLDDLLDTLHFHFQAAARATKQIRQYCLDDPELQQSIDLLLSLPGIGWIVGSHLVARLGNPREIKNGRRIAGFLGIVSSEHSTGDKQNRGEITRSGDSRLRNKLIQSAWTAIKKDPELRDFYRRIYQRHPKKVAARKAIVAVARKLTNRIYVVLKEQRPYVVRPDSSIAPLTVAETVGPRERLDTAQNDQS

SEQ ID NO: 76087 - protein, 505 aa, unidentified
MATPTTSRPPAASSPPSGQQAQAQAQRRAYHRRKTRAKVKSEALRQREAAHVEALPVQHPHAAGIDIGSRSHWVCVGFTTDAASCLIREFPAHTAGLKAIAAFLREHQVTSIAMESTGIYWIPLYELLQAEGFEVLLVDPSYSQQLRGRPKTDRRDCPWIYRLHSVGLLAAAFRPDEQTCQLRAYLRQRANLIRQASRHVQHMQKSLEQMNLKLTEVLSDITGVTGRAILRAILRGTRAPEKLAKHRDKACKASEAEIAQALTGTYREEHLFELKLAHEAWQFTLGQVEKVDGQIALQLGRMKGDRALPPLKPKARPKRRVNSPGFDVRTALYYVVGLDLTEIEGVSELTALTVVSEIGPGVSRFATVKQFCSWLGLCPNWQKTGGRVKSSRTRRGVSRAAQALRMAARSLHHSQGALGGFRRRMKGRLGAQAAVTATAHKLARIVYLALKHGMTYARQSQEEYEAQMRERQLKALRRKARQLGLEVVEKPSVSGAPAAAGPAQG

SEQ ID NO: 76088 - protein, 368 aa, unidentified
MDAGSIHVVPGAAAAAAPAELEEVPMSIVGGLDIHRKQITFDYVDTETGEARRGQVCPADREHLAKWLARFAGQDAHFALEGCTGWRYVAGEIIAAGLTPHLADPAETAHLRGPKRRAKTDRADARHQRVLLEQGRLPECWIPPSHVLECRALLETYLDLRKQRTGWVQRIHATLFHHGAPHIAGQRLGTAEGAAALRAAAAQCSPAGQLQLAIAAQMLSVYDERLHQVRRQLLDQARHIRGAAELTARLYGVGPITGLALTCWLGGAGRFSSSRKAVRFAGLDVTVRSSDGKGPPGRLSRQGPPVLRWCVYEAGKAHAHASAPGHAYYAQVKERIDGKRAAISQARKIIRQACHILTELGDDALTAC

SEQ ID NO: 76089 - protein, 310 aa, unidentified
MDRIIVGIDVSKDRLDVVVRPSGETFVVGRNAVGLEKLVARLRELSPHIVALEATGGFETVVAAALGSAGLPVAVVNPAQVRAFAKALGQRAKTDPIDAGVVAHFAEATNLEPRPLPDEQTRLLADLVGRRRQIVAMIGAERQREQRLTAPRISKSIARLIKALEKELASLDADIDDAVKGSPAWRAKEELLTSVPSVGPVIARTLVAELPELGQLGHKQITALVGLAPFTRQSGKWRGKSFIGGGRTAVRAALFMGAMVAKKHNPILKAFFDRLVAAGKPKMVALIAVARKLLIILNAIVRDNRPWQTA

SEQ ID NO: 76090 - protein, 343 aa, unidentified
MQAVTTIGLDIAKSVFQVHGVDAAGQVLIRRQLKRRAVLAFFQKLPVCLVGIEACASSHYWSRELQALGHSVRLMPPAYVKPYVKRQKNDMADAEAICEAVARANMRFVPTKTPEQQSCLMLHRTRHLFIRQQTAVINSIRAHLAEFGIVAPVGRKGVTELLHIVADPSDKRVPEVARACLAALGNQLLSLKEQIVEFDRMIMVWHRSNETSKRLHYIPGVGPMLATALVASVADPRTFRSGRNFSAWIGLVPKQHSSGGKDRLGSISKQGDRYLRSLFVAGALAVIRYAKIHGTKHRPWLTALLARRPTKVAAIALANKIARMAWAMMAKGERYKQPVALAA

SEQ ID NO: 76091 - protein, 356 aa, unidentified
MKKYIGCDMHKKYSVFITMDEHGRLSEARKVANDSLELDSYLKTLEPATPVAVEASGGWYWFVDRLEQAGLDVRLVNPLEAKKRMGGRYKTDPRDAAGLAMLLRNGTLPEVWIPPADLRDLRGLLRARLALRRHTTMLKNRVHAAIRRYGQWEPGEAKNLFAGKGRVQLAVYIGALPPETRIATRHEWQLIDEVEQHIQELEKRIRLGIGQTGYVRLLRSLPGVGAILSATIYLEIGDVRRFGCAARLASYAGLTPTVHSSGGKTRMGPTSSIANHYLKWAFVEAADCIVMRKQRYQGRHVVALYERLRAAKNHGKAAVAVARHLAEASWWMLQKKQAYREPAPASRSSSENGSAR

SEQ ID NO: 76092 - protein, 340 aa, unidentified
MDHFAGLDVSVNETSICIVDDTGKIVRELKIASEPEALLAVLKNPAYNFKRIGLEAGPLSQWLFGALAEAELPVVCVETRHMQAVLKAQINKTDRNDARGIAQMMRVGLFRPVHVKTIRSQKLRMLLTHRQLLQSKAIAIENDLRATLRNFGLKVGMVGKVRFEARIKELVENLPDLAALVEPLLIVRRVLREQMVILHRRLLAVVRDDEVCRRLMTVPGVGPVVSLTYRATVDAPARFRKSKAVGAVFGLTCSKYQSGEIDRSGRISRCGDEMMRVMLYEAAQSMLRSKKWSWLKAWAMQIARRRGMKKAIVALALLRDNLDENGSDNQSLKWRPVAKS

SEQ ID NO: 76093 - protein, 388 aa, unidentified
MNYVGIDISKYKHDCFIFNDFGEIIKDGFSFANDAAGFAELLKTLSLCGKNDIRIGFEATAHYGINLKLFLEKNGYSFMELNPALISKFVKSQTLRKTKTDKLDAKMIAQYMFQVDYKPHPSSFYHNYSLKSLARFRDKLVRQRSKYLVSLTNVLDCVFPEFKPFFGNKFSVTALYILANYGSPESIANMNSRSFDILRRKSRGSFTMDKFVRLKQLAKNTVGKSNEIYCLELETLLDIYSQLDSKINELETKITEIITEMNPPTLSIKGIGPVSAAIIVSEFGDFSRFSSPDKMLSFAGLEPGFFQSGTSEHTGRMVKRGSSILRYTIINCCRAMRLHNEIFAAYYLKKVAQGKPHRVALTHMAKKLVRVIYTLETTGIVFDPSKLR

SEQ ID NO: 76094 - protein, 346 aa, unidentified
MELHAIGIDLGKTVFHLVGVDSFGNVVVRKRCSRSQLLAYTANVRVHRIGMEACSGSHFLGRALRQQGHDVRLMPAQYVKPYVKTNKSDYIDAEAVAEAVQRPTMRFVPIKTEEQLDLQAVHRVRERWVMRRTAVVNQIRGLLLERGLTLPKGRSHVDQALPDILEDATLSLSGSFRSLLAQLKSELDQLTACVEEMDSVIEHAASNSEVCQRLTSIPGIGPVTATALIAAIGNGSAFRRGRDLAAWVGMVPREYSTGGKQKLLGISKRGNHYLRRLFVQGARAVLRCRTRQAPGLNSWLGQLIARRHQHVVVVALANKLLRVAWAVLCKNQTYRYAPLPTELTTP

SEQ ID NO: 76095 - protein, 339 aa, unidentified
MTTFVALDVSLEKTAICIMLADGQVAAEVVAASDPEAIAAELARQEAVGPDALIGLEAGLLSEWIARGLADLGAPVVLMETRQVRAALSSMVVKTDRNDARGMAQLLRMGWFRPVHLKSMDAREQRALLSARETLARRLMDVENSVRGLLRGFGLKLGAVPRSRWERRVRDVMAGNATLAAIFEPLVAARAALLEQLDRLHERLLAVVRDDPACRLLMSAPGVGAVVALTFRAAVDDPSRFGSSRTIGPCFGLTPRRYQSGETDRSLGISKAGDPSVRRALYNAAHVIMHQVRRGFALKSWAAALAARAGLRRAKVALARRLGVILHRMWADGTEFRFA

SEQ ID NO: 76096 - protein, 423 aa, unidentified
MKKNRMQTQIKFAATIGLDWADTHHDLWLQPADGSKPEHIILDQQPEALHQWIAQLRARFNNQPIAFAIETSRGPVLSALLGYDFITVFPINPKALSSYRDSFRVSGAKDDRSDARLLEQYLRHYRDQLKPLCPDTVLTRQLAGLVEKRRALVDLRTQLVNQLHAELKMYYPLARTLLDDLTLPLAATFLKKWPTLEALQKAGSQKLRAFFYAHNCRSAKKMEARLQALASAQALTTDMALIIPANLKVQALAAMLQTLHPAIANLDDEIQKAMDAHPDAPIFRSFPGAGPALAPRLLVAFGTQRDRFASAQEIQQLFGIAPVKKSSGQTEAIYMRCRCPKFGRQSFHENAGQALKKEPWARAYYDHQRKSKKHHPAVRALAFKLVRIYFACWRDRKTYDRNIYVSSLKKRGSTLVKAERKTT

SEQ ID NO: 76097 - protein, 407 aa, unidentified
MELAALYKRVIGLDIHQAQITACALLEEPDGTMRIEQRQFGGFKRDRRELAHWVASLKPEEVVMESTGIYWKSPYAALEAVGIRAKVVNARHVKHVPGRKTDVGDAHWLATLARAGLLRGSFVPPAKLRELRLIARQRQKLVGQLAAEKNRLHKVLTDSGIRLGVVVSDLHGQSARAMVKALIAGQPPHAVLKLASRRLKAAREEILDALQGELTASHRFVLDELMRHIEEIEARIARFDARLLAELESEHNTLALLQTIPGVDLIGAAMLLVEIGTDMDAFGSAERLASWVGICPGNNESAGKRKSGRVRKGNPYVRRLLCEFAHAASRTTSVFKSKFQSLLVRRGYKRAIIAIGHKILRTLFFMLKRREHYRDSATDYEALSVQRNAPRWIKSLIKFGFIAPTNA

SEQ ID NO: 76098 - protein, 338 aa, unidentified
MEQFSKYVGLDTHKQTIAVSIAERNGGKARYFGEISNTSASVKKLLARLSRDGEVVSYCYEAGPCGYGIYRQITQTGHDCQVVAPSLIPRRPGDRVKTDRRDSEALARLHRAGELTPVWVPDEEQEAMRDLTRAREDMKHLERQSKQRLNAFLLRHGQHYVPGKSKWTQAYWRWLERIKCGQPVQQIVLQEYVETVKVLTARVAGLEAEMAVAVQEWSLYPVVEALMALRGCRLITAMTVMAELGDISRFDTPRQLMAFLGLVPSESSSGASTRRGGITKTGNGHVRRVLIESAWCYRFSARKSAPLQRRAEKTSAAVQAIAWKAQKRLTFPTKMVPV

SEQ ID NO: 76099 - protein, 373 aa, unidentified
MSKGTRFVGLDVHKDTIAVAVAEPGGEVRSIGVIPNDADAVRRLVRRLEGPEHLHVCYEAGPCGYVLYWQLTKLGVRCDVVAPTLVPVKPGDRVKTDRRDAEKLARSLRSGDLTAVWIPDAEHEALRDLVRAREAAKSDQRRARQRLLKFLLRRGCTPPSKMRAWTDKHREWVMQLKFEQRALEETLTDYTTEVDRQRERIARLDLALDEAIAKVPTSMRAVIDALQGLRGISKLTAATIVAEVGQLSRFERATQLMSYAGVVSSEHSSGARTWRGGITKTGNAHLRRVLIEAAWTYRHRPRIYGALRERQLHVAEPIKAIAWKAQHRLHRRYRQLSDKGTPHQKVVTAVGRELLGFIWAIAVHVERQPTVSS

SEQ ID NO: 76100 - protein, 363 aa, unidentified
MKKDNRKQSKEKAKRARTVTIGMDLGDKTSRYCVLEEDRVIQESSVATTQPGMRQAFGKMRRCRIALEVGTHSPWVSRLLASLGHEVIVANPRQLKLITHSSRKNDQVDAKTLARLARIDPELLRPIRHRSEKAQMDLMKIRVRAALVETRTGLVNTLRGLAKSVGERVAPCDPDSLDAVRLETLPEALRETLRPVVQQIELLTEQIQEQDRKLEQIARVEYPNTALLKQVYGVGTLIALTFVLTVEDPQRFAKSRDVGSYVGLRPKRSQSGESDPQLPISKEGDAYLRKLLVQGAHRVLFRSSPDTDLKRWGERLASRGGKNAKKRAIVAVARKLAVLLHRLWVSGEVYQPVGYGQARAMAA

SEQ ID NO: 76101 - protein, 413 aa, unidentified
MDVLHPRCCGLDVHKSSISACILLREAGRVQKHQRRFGAMTQDLQELAEWLRQFRVTQVAMESSGVYWKPVWNILERQFTVVLANAQHIKNVPGRKTDQKDAEWIAQLLQYGLLRPSYVPCEIIRDLRDLTRMRASLSQEASRISSRIQKVLEDANVKLASVATNVLGKSGRAMLEDIITGEDDPEQLASLALGHLRVKIPQLRLALEGKIRAHHRFLLRRLLDQIQFVEHEIALLDERLEDIGRQRPELAQAVARWDTIPGVDRVAAWALLAEIGDNMAQFPTAEHLASWAALCPGNHESAGKRLRGATRQGSPWLCRMACQCAWAAARTKNTYLSSQFRRLAARRGKKRAIIAVAHTLIVIGYHLQKNQSNYEDLGGNYFDRIHSDGLKRYLVKRLEQLGHKVTLEPIEAA

SEQ ID NO: 76102 - protein, 413 aa, unidentified
MRVMIERVAGLDVHQETVVACVLIGKPGERPTKEVRTFRTMTRDLEALREWLLSLGVTHVGMESTGVYWKPVYAVLEGSFELIVGNARHIRNVPGRKTDVKDAEWIADLVRHGLIAKSFVPPPPLRELRDLLRYRRKLVESQAAERNRLLKLLETANIKLASVVSDVFGVSGRAMLKALIEGTASAQAMADLAKGQLRRKRADLVLALEGRVEEHHRFLLGLQLRRLEAAEEEIAALDARIDEKLEPYRAPHALLMQIPGVDRLVAAVLIAEIGIDMSVFLSVYHLASWAGVCPGNHESAGKQKSGRARNGNVHLRTMLVGAAISASRAKGSYLKDKFYRLKARRGSMRAALAIAHKILVAAYHMLAKGVGYREIGEAYLDQISQTRTVANLKRRLERLGFQVTLQSKAQSAA

SEQ ID NO: 76103 - protein, 339 aa, unidentified
MSLYCGIDLHSNNNYISIIDSNDKIVFERKLTNNIGAVTDALARMREPITGIAIESTYNWYWLVDGLQELGYKIHLVNTSKVKQYEGLKYTDDKYDAYWLAHLMKLGILPTGYIFPKEMRAVRDLLRRRMQLVQQRTANILSIGNQLTRNTGKQFSSNKIKSLKLVDMKSMIKDPNIQLSIKSNINIMQSLSVQIKLIEKAVLKQVELKEEYIKLTEIDGIGVILALTIMLETGDIARFKAVGNYASYCRCVNSKRTSNDKKKGEGNKKNGNKYLAWAFVEVANHSMRFNEKAKRYYQKKAAKTKRVVALKALAHKYARTCYYVIKNKESFDENRLFGC

SEQ ID NO: 76104 - protein, 321 aa, unidentified
MSKFYLGIDVSKAKLDCALRLPNGKFRTKVIPNNAEGFADLLTWLANQQANQPHVCMEATGIYWEAVAQFLATKGLAVSVVNPAQIKAYAASRLTRTKTDKVDAKLIANFCAERNPEPWQAPSAAELTLRALVLRLDALQTMRTQESNRLGVARDAVRGNIQGHLDWLDAELKHLAQAIKAHIDNHPGLKQQRDLLDSIPGLGERTIAIILAFYANTGRFANSRQAAAFSGLDPRQRESGSSVKGKPRLSKVGHAFLRKALYMPAMVTLYKTAWGKHFKERLSTSGKPPKLIIGAMMRKLIHVAFGVLKSQKPFNPNLHFA

SEQ ID NO: 76105 - protein, 370 aa, unidentified
MSNATTFVGLDVHARSVKACAFVPETGETIRRSFGYEPCEIASWASSLPQHAKCVYESGVTGFDLQKKLTALGVDCVVGAVSKMIKPSADRKRKNDRNDAEFLARMLSVGNVVEVWVPDDECEAARDLVRALDDAREDLKRCKQRLSKFLLRHGHAFSETTPSGRRKGNWTAAHWAWIRSIEFPEKADDEVLAYYVDAVRQATENKKRLEKLVEAEASKPRWKKRVDSLRCLKGVDAMTAADIVFEAGEFSRFKSARSFAAWLGLTPSEHSSGESARQGGITKAGNKHLRRVLVEAAWHYISASPHPKDLAKGQAPDPAARRHAAKGIRRLVKRREEMLGRGVHKNKANVATARELACWCWAVGRMVENG

SEQ ID NO: 76106 - protein, 348 aa, unidentified
MNSPHYIGFDVHKKTISFCVKTAAGEIVEEGSLPARRAELRHWAAARPQPWRGALEATLFSGWIYDTLQPYGEQLEMAHPAKMKAISAGKKKSDSIDARTIADLVRCNLLPACYVAPPHIRELRRLLRYRSLVVSEAVRMKNKMAGLLMETGAVYVKEKLHRKKYFARLLEELEEVPESVIDLLRLSRGALEMFESTQKRLVRELLADPQLTARIERLMTIPAVGEITALTWALEVGDPQRFHCNSDAMSYCGLTAALKSSAGKQQRGPISKQRNRWLQTTLIEAAKLAPRWNLPLAALHARELERGHRNRATLAVARKLVAYLLAVDKSGQPFQVRAPSEEPTPKAA

SEQ ID NO: 76107 - protein, 320 aa, unidentified
MSDNIVVGIDIAKHKFDVAVWAGENHYKMKHFPNDLKGFDAFINWLKPASNYHFCMEATGVYGDPLALYLSDKGLLISVVNPVQIHAFGKAELLRNKTDKIDAKLIARYCASQHPPAWQPAPLCERQLLALVRHRNKLNEMLLTEENRLSVADEVVCDSHAKIITLLKQELKDTELKIKKHIDDSPSLKKNKGLLESIPGIGERLSATLLAYIGDGSRFHHSGQVVAYAGLNPKLHESGQLKGRAHLSKQGSAELRKALYMPALAAISCNKVVKKQWEQLTARHKGGKVGVCAVMRKLLRLAYGVMKSGTLFNAEIPLAV

SEQ ID NO: 76108 - protein, 419 aa, unidentified
MTSKSAQFAALIGIDWASQRHALCLYDCATAKRESSILEHTPEAIAQWARGLQERFKGKKIALCLEQSKGPLIYALLEYPFFVLYPINPATAARYRMAFKTSRAKDDPSDAQVCLELVLHHREKLKPWLPNDAPTRELSCLLQHRRAAVDLRTLLTNMLRDALKSYYPQALELAGQDLFAPLGCQFLLKWPSLQELQKARKESVRKFYYAHNCRRMDVIEKRLDAIAQMTPLCRDRALLEPAMVQVRMLARQLLQLGGALKEYHSKIEQLFAQHSDALIWESFPGAGPTLAPRLACAFGTQRSRYQSAVAIQQYSGTAPVTEKSGKNQHWVHRRWARPHFTHQSFFEYASQSVLHCQWAKLYLKEQMARGKAYPTAIRALAFKWQRIMFVCWRDRVPYDETIYRQSLQRRGSHLARKLI

SEQ ID NO: 76109 - protein, 412 aa, unidentified
MDVVYRRCCGIDVHKRSIAVCVSIWTDDGAIRKEKRMFGTTTRELRQAADWLSKIAVTHIAMEATGVYWEPIWHVLEQRSGWQLLLVNAEHCKALRGKKTDLKDGERISDLLQHGLLSGSFVPPHDIRALRDLTRHRVQLQQRRATIANRIQKLLEKGNIKLASVATDVLGVSGRAMLARLAEGERDEQKLAELARRRLRGKRSELEAALEGCLQEHQCFLLREMLTDLEQLEKSVARVQDEIRKRMTQYEPILERLETIKGVSRVTAWSLVAELGVDMTQFPTADHVASWAGVCPGNNQSGGKRKSGKTRSGNRWLRRALCEAAWAAAHSKNTYLSVQFKRLAIRRGGKRALMAVAHTILRIAYHIIRSDKVYSDLGADYFDQGRERQLTNRLVKRLEKLGHQVVLSPAGS

SEQ ID NO: 76110 - protein, 476 aa, unidentified
MTAAAESTTKAKANRKQRRERNRRIWTDNPGLDVVHPDAAGIDIGNSEHYVAIAPDKSDEPVRTFACFTHSLRELAQFLKAHGIRSVAMQSTGVYWIPLYDVLEEEGFEVFLINARDTKNLPGRKSDVQESQWLLKLHTYGLLRNSFRPTSEIRVLRTFWRQRGEHVQTAGACVQRMQKSLTQMNLQLANVISDIMGVTGQKILRAILAGERDAEKLAGMRHAGIQASREEIVASLTGNWRAELLFALKQEMDRYDFCQWQIAECDAEIEGHLGTLPAKPQKTDSPDQPAPTQKKKRASGNSPSFALDKELVRITGVDFTRIEGINVMTAQTILSEVGLDMSKWKSEAHFASWLGLCPNNSVTGGKVLRRGTRKVVNRAATAFRIAASTLRRSDSYLGAQFRRFRTRLGAPKAITAMAHKMSRLFYRMLRYGQEYVDRGQQFYQDKYRQQQIALLNKQAAQLGLVVTAAINVPVSA

SEQ ID NO: 76111 - protein, 411 aa, unidentified
MSDSIFVGIDVSTKSNKVCILDQQGNRLAKMSVDNNSDGSGRIVKRVIEALCKTNCSNVSFGLEATSVYGDGLIFFLKQEPSLKPYNTKVFLLNPKQVHNFKKAYSDLPKTDDVDAWVIADCLRFGRINLREVYFDEQHKALQRLTRARYFVAQNIVREKNRYLTNLFLKFSGMCQEKLFSNNLGATATELAGSEFSLDEIVHMPLDELATFINTTGKGKFADPEALAAEIQKAARSSYRLPKTVEDSVNQVLAVSVISIQGYLQQLKTLDKSISTLMEAIPNTLTSIKGIGLVYSAGIISEIGSINRFKDQASLAKYAGLSWSRYQSGNFDADNTHLINSGNRYLRYYLIEATNLVRRHDPELKRFYELKYRETLKSPHKRALALTARKFVRLVYALLRDQRLYSPPRVR

SEQ ID NO: 76112 - protein, 409 aa, unidentified
MEVLLERCAGLDVHKETVVVCARLMVGRRVEHVIEQFGTTTSELLRLLDWLLAQGCPHAAMEATGVYWKPVWHILESQIELTLANAMEVRNVPGRKSDVSDAAWLADLLAHGLIRGSFVPPSPIQELRDLTRTRKQLSRQVAQATQRIEKVLEDANIKVTSVITHLLGRSGRAVLRALVEGETDPERLLARTTGRLKAPRERLIEGLRGAVTDHHRFLLRLHLSQIESVERLLADLDAEIARHLEPFQSQLKRLTTIPGVSDFVASVLIAEIGTDMTRFPSAGHLISWAGLCPRMDESAGKRRNTRTRKGARWLRSTLVHAAWPAARSKGTYLQAQFLRLKSRRGPKKAAVAVAASILTAAYHILKDDGVVYQDLGGDYFDRRDKKRAAQRLVKRLHDLGYTVALQEAA

SEQ ID NO: 76113 - protein, 408 aa, unidentified
MELVYPRCAGLDVHKDSVVARIRCVSAPLHDEVQTFATTTAALLQLNEWLRQHGVTHVAMEATGVYWKPVWHLLEGDFELVLANAQHIRNVPGRKTDVNDATWIAELLAHGLIRSSFVPPQPIQELRDLTRTRKQLVREIAQHATRIQKVLEDANLKLGSVLSDVMGKSGIAILRAIIAGQSNPEVLAGLAQGNARKKRAELVEALHGRIREHHRKLLRVHLELVQALKDAVEELDDQVGKSCASICESTRLLTTMPGISEITAHAIVADIGTDMTRFQSDAHLRSWACICPRNDESAGKRRSTRVRKGGTWLKTALVSAAWAAVRVKGSYFHGQFQRLRARRGPKKAILAVASSMLTCAYHMLKTGLEYRDLGADHFARRDREKMIQRLVRRINDLGCDVQLTPQAA

SEQ ID NO: 76114 - protein, 406 aa, unidentified
MKLTCGVDWAEAHYDVALVDGDGVVVARARIDTGATGFNKLLALIAEHEGSAQDTPVSIETDKNLLVVALVEAGFTVYPINPRAVARYRERYGQAGGKSEPGDAAVLAHILRTDRHLHRQMPAVSEQGRAVKALARQHQEAIWALHQTVSRLRSVLLEFYPQALQAFPNLTHKAALTVLAAAPTPASSRQLTRRRVVTLLQRSGRGNHPTLVEQILTDLHTAALRQPPQVEQALGHTVVGLVGIVVAMQRAVDDLELELAREFDQHPQTAILRSAPGLGPILAARILAEMVTTPGDFANPNSLRAFAGTAPVTIASGRSHYVKARKVRNKRLADACHWWAFTALTKSAGAREHYDKRRAAGDHHNAALRNLANKLLGRLWWCLANNQTWDDTAAWPHRLKPDSVAA

SEQ ID NO: 76115 - protein, 348 aa, unidentified
METIGLDLHKRESQLAIQAEDGTITERRIVTSRERFTAVLGHRPRARILLEASTESEWVACHLEALGHEVIVADPNYAPMYATRSRRVKTDKRDARTLMDACGQGTYRRAHRLSAPRRHLRAELAVRDALVRTRTRYVALAKALVRRDGLRVPSSTAERVGDRVQALALPAPLAAELAPLLTMLPPLNATIAAADHRLSALEQTDPIVALLMTAPGVGAVTASALVATLDDITRFPSAHQCEAYLGLVPGERSSGEQRRIGPITKAGNRRTRWLLVEAAWRILRAKDPESAALRAWTLRIAARRGKPIAVVALARRLAGIVYAMWRDGVPYDGRKIRAPHHARGAQAG

SEQ ID NO: 76116 - protein, 415 aa, unidentified
MALKIVYKICCGIDVYKNFVVACIAKTDKQGVTTYERHHFSTYTKGLKQLLKWLLDRNCKDVCMESTGKYWIPVYNVLEHDCSIVLAHPKYVKAIRGKKTDKKDAKWIADLFKHDLIAGSFMPPADIRQLRDLMRYRFKLTCFKSSEKNRYQNCLTVSNIQLGNVVSDTFGKSSQKIIAKILENPDDTSFDIGSLIHGSMKDKLPELELAIDGYITPEQAAKLKIIKEHFDNLEARKAELEELILALANPYQQEISIILTAPGFKNTFTAIGIISEIGTNMEAFPSAKHLCSWAGLTPTNNESAGKKKSVRVSKAGCYIKPLLVQCANAAIKSKKHPEIRDRYLRIKKRRGHKKAIIAIARMLLTALYHMLKNGENYNSDLYQKSDILPTTREITVEQAILMAQFQGFRIKSATE

SEQ ID NO: 76117 - protein, 402 aa, unidentified
MNAVGIDVSKGKSMVAIMRPFGEIVSTPFEIKHTSSDINSLVKLIKSIEGESRIVMEHTGRYYEVLAHQLSEANLFVSAINPKLIKDFDNDSLRKVKTDKADSVKIARYALDKWQNLKQYSVMDELRNQLKTMNRQFGFYMKHKTAMKNNLISILDQTYPGVNTYFDSPARSDGSQKWVDFASTYWHVDCVRKMSINAFIDHYENWCKRKKYNFSKSKAEEIYGKAKELVPVLPKDDITKLIIKQAVDQLNSASITVESLRTLMNETASKLPEYPVVMAMKGVGTSLGPQLMAEIGDVSRFTHKGAITAFAGVDPGVNESGSYEQKSVPTSKRGSSDLRKTIFQVMDVLIKTHPQDDPVYQFLDKKRAQKKPYYVYMTAGANKFLRIYYGRVKEYLASLPES

SEQ ID NO: 76118 - protein, 343 aa, unidentified
MQTITTIGLDIAKSVFQVHGVDAGGQVIVRRQLKRRYVLTFFQKLSPCLVGIEACGSAHYWSRELQALGHTVRLMPPAYVKPYVKRQKNDATDAEGICEAVTRTNMRFVPTKTAEQQSGLVLHRARHLFIRQQTSVINAIRAHLAEFGIVAPVGRHGVEELLNVVTDPNDKRVPDIARACLSALGDQLQRIKEQILEFDRLIRAWHRSNEMSMRLEEAPGVGPVLATALVAAVADPKSFRSGRNFSAWIGIVPKQHSSGGKNRLGNISKQGDRYLRGLFVAGALSVIRYAKIHGTKHRPWLTALLARRPTKVAAIALANKIARMVWAMMARGERYKEPVALAR

SEQ ID NO: 76119 - protein, 404 aa, unidentified
MISVGIDVSKGKSTVCAMKAYGEVLLSPKDYKHTTEELDRLIKNLSKFNEEIHIALEATGNYHLPIYMYLKSKGYFISIINPLEMKRYRCQGIRNPKTDRIDSMIIAQYGIDFWYRVKQQNDRVQERQELRLLGRQYEQFMKSRVARCQALNGLLDQTMPGVYELLSGFNRNNGKDKLSDFAYDYWHNDNIIKSSEKVFIKKYLNWLKKKGYHQNEKEARQLYVLAKISIPTLSSTAQSIKLLVQEAVNVLRGINQSLFTILNQMRELAKTMPEYSTVLSMGGVGETLAPRLIAEIGDPRMYHSGKALVAYAGIDAPPYQSGQFIGTKRHISKRGSSTLRKVGYELMDSINKHQVNLNEDAVCQFFMKKRAEGKAYRVAMIAGYNKFLRIYYAKVKEVLNKTIQ

SEQ ID NO: 76120 - protein, 403 aa, unidentified
MNTIFVGMDVSKDDFKTAVKDEQNNLIGPVKTYRHDRPGLEAFDKDIGIIKEQLRCGAIFGMESTGIYHLSLYQHLVEAGEHVKLFNALELKRFKSSIRKTKTDNLDAQAIAEALLLVREPSYHHVSEPDLIQIRELCRLRGRLVKKASQCKNQAVRDMDVLCRGYTNLFSDVFSPSSIAVMKDAVRTTRLFETDVENLTKILSKYMPRPTAVMKAGKLQVLFQNAVIPEHMKEICVLELHMVIQQYELLKLQVKRIEHRIEMLVKDTNTHLLTILGIGILTAGTILGELGNLSRFTSINQLTAFAGLDPSVMESGRSRRTGHISKRGSPMLREALYGAALSASRANPVCQQFYQRLKAKGKHHKVCMVAIARKLLHIAYSVETNNRDFYVPTYITEPQSQTA

SEQ ID NO: 76121 - protein, 338 aa, unidentified
MRYYCGIDLHSTNSVVVVIDDEDRVLFRQRLANDLNAILGALSPFAAELVGVVVESTYNWYWLVDGLMAAGFELHLANPAAIIQYSGLKHRDDDDDAAWLGHLLRLGLLAEGYIYPREERGTRDLLRRRGQLVRQNTANLLSIQNQVTRATGLRISGNRVKQLQPDEVAALGMGADAALGIGANLAVMASLKAQIQGLERTVLGRLVADDMYRMLLTVGGIGKILGLTIRLETGDPERFASAGNYASYCRCVTSQRVSNGRNKGQGNRRNGNAHLAWAFVEAAHMAIRFDGGAKRFYQRKKAKTKMVVARKAVAHKLARACWHVMRDRVPFESKRCFG

SEQ ID NO: 76122 - protein, 368 aa, unidentified
MKKETMTSDGISGASLVNDVNRVLNLGLDMHYRQVTVAMQEDGGRIKAAGKMGHADFLNWVPKKLEEGWEIYSCYEAGASGYWLHRELEKLGVKNLVVVPKAMGQGGKKQKTDQRDAGELCDSLDRYLRGQKKALSEVAVPTEEQEEKRALIRYHRQIMADRGRCEARGKGLLCAQGIQVRGRWWRGDSWLELTSDPRLKDWMKEQLVGWRNKILSTDEEQSALRERIAALAPAILPKGVGAYSAAVLHYELRGFEHFKNRRQVGSITGLCPGVHLSDGRGKEGSINRCGIGIVRWTLVEMVWRLMIWQPQYPPVRRLAAGLVKSKRARKRLVVQAARRLAIDLWRLSTGQTTPEKLGLVMQSNATGN

SEQ ID NO: 76123 - protein, 329 aa, unidentified
MSNLLKKVIGVDVGSKFLTLSFLDDEKGEQVLNLPNNERSILSFLSKISPSDYCFVIEATGNYSSRLLHFSIGKGFESSLINCMSVKHFARMKNIITKTDAEDAKLIRNYGEMFRPEFYIPKTQEIEYLDQEIKLLNDLEEEKRRYAVKLKALKFHPVLNPSTEKHYEKRLKQLDKEIKEVEARLPQLQDEEFTETKNLLQSVSGIGKKTSLQLMTATSGFKNFHSSKSLVKYFGLAPRIYQSGKKSYSPGKCRTSKTYIRSILYVCSWTAIKHNQKCKELYLRLLEKGKAKKLALIAVCNKLLRICFSVVKNKTAFQQDFQNKLKILT

SEQ ID NO: 76124 - protein, 340 aa, unidentified
MTQHKIIGIDLAKNIFFLFEINHKGKNLSRKKLQRSKLLSYIANKAPCTIAMEACSGAHYWAREFSQFGHEVILYAPQHVKTQRRKQKNDYNDAEAIAEVALYKRPHPVPHKSVEQQDIQSLIRMRRLLVTERTRIVNQVRGLISEYGIIMSKGAAAFRKAIPEILENDENQLSCILRELLSHQYERYLYIDEQVKWFDDKLNQTIKQFENAKRLMSIPGFGPLTSQAVAVWLGSGQQFKTGRDASAAMGLVPKQDTSGDKVILLGITKRGNTYIRSLLVHGARAALRRAKFKSDNLSKWMLELQERRGPNRAAVALANKLMRIAWAVITKNEEYRPTQS

SEQ ID NO: 76125 - protein, 344 aa, unidentified
MMQTVTTIGLDIAKSIFQVHAVDAHGNVVVRRQLKRRHVLGFFEKLPPCLVGIEACASSHHWSRELQKLGHTVRLMPPAYVKPYVKRQKNDAADAEAICEAVTRPNMRFVPTKTPEQQSCLMLHRTRHLFIRQQTAVINAIRAHLAEFGIVAPAGRKGVEELLKVVADEDDQRVPEIARACVAALGAQLQMLKAQILEFDRRIMAWHRSNATSKRLDAIPGVGPALATALVACVADPSAFRSGRDFSAWIGLVPTQRSSGGKDKLGGISKKGDRYLRSLFTAGALAVIRYAKIHGTKHRPWLTALLARRPTKVAAIALANKLARMAWAMMARGEYYREPAALAA

SEQ ID NO: 76126 - protein, 369 aa, unidentified
MTHSTVSTATTSTHTSVELPTTMGLDLSDRVSHYHVQRGDGLTLATGKVASLRDDLAALFEHWKGCRLVIEAGGHSPWISRLGQECGMEVVVANPRRVELISKSDRKTDRTDAETLAELGRSNVRLLAPITHRSKEAQADLGIKRARDAAVRVRTTLINHVRGVLKSNGHRAPGVSPECFGTRAAAAIPLELAPALNPMLRLIEQVNVQIKHFEQEMARLSKDRYPFTQLLKQISGIGLVVSLSYVLTLDDPKRFMRSRMVGAYVGLVPRKKSSGTRDPQMHITKAGDGEMRRLLVLAANHILGRFGPDCDLRRFGLRIVGNGTDRTAKKRARVAVARKLAVLMHHLWTTGEVYDPFYLAKKRGEPIPG

SEQ ID NO: 76127 - protein, 349 aa, unidentified
MTIVEDRPVITGGVDTHADLHVAAALDPIGGLLGVQEFPATAAGYASLLGWLGGFGDIALVGVEGTGSYGAGLARHLAAAGIRVVEVDRADRQDRHRAGKSDPLDAVSAARAAQSGRASGAPKGRDGAVEAIRALMVAKRSARAERTQAINQARALIVTGPDELRARFAGHRPAQLVEAIAALRPRPGDVPGYATRVALRELGRRAQFLDAQLDRLDELIGPLVTARAPGLLRLHGVGPDTAALLLIAAGDHPERLRSESSWAHLCGVAPIPASSGKVSRNRLNRGGDRQANHALWRIVITRLGSRPGHPATRAYVTRRTKEGLSKKEIIRCLKRYVAREVYHQLRAGA

SEQ ID NO: 76128 - protein, 343 aa, unidentified
MEQYIGLDVSLKDTAISIRQGGSRIWRGKCASDPALLADIIRRQAPLAKRVVFETGPLSTWFYHALTAEGVPAICIEARHAQKILNETLNKTDANDADGLAQLAEAGFYKAVRVKGFDAMLTRTLIGVRKQVAGMSIQLSNQIRGVMKTFGLIVPKSKGRVFEGHVRELLAGNDSLARIILPLLDAWRDIRKHTAILDRQLLAAARNSGATQLLMTIPGIGAITSLSFSAAIEDPGNFKRSRSVGAWLGLTTRRYQSGEIDYDGHISRRGDSHLRSLLYEAAMVMLTRTKSRHDSSLKDWGLKLRERLGIKRAAVAVARKLAVIMHSMLKTGEPFNKLADVPA

SEQ ID NO: 76129 - protein, 391 aa, unidentified
MTVIIGIDPHKASHTAVAIGCDERQLAEVRVRATCRQTAQLLAWAEPLGERTWAVESAGGLGYLLSQQLVGAGERVLDVPATLASRVRVLGTGRSNKNDPNDALSVAIAALRSPGLRSVEPANHREVLRLLAKRNHEIGRLRNMVVSRLHAALANLSPGGISKELNASDAVRLLGDFDPVTPVQQTRYDLALDLLDDVRRLDVQLKESHKRIKTAVRASGTSLTELYGVGPILACELIGYTGDVRRFTTRDQFASYAGVAPIELSSGGRIVHRLTRRGNRQLNHAIHMVAICQIRQKESEGRVYFERKVAEGKTKREAIRSLKRHVSNAVSLASSSSIPRSRDPGGRAGTTRSLRDRLCTLAAGSSAKSLPDPPNLRQSRPSTAPWFVAPE

SEQ ID NO: 76130 - protein, 403 aa, unidentified
MNAVGIDVSKGKSMVAALRPFGEIVAKPFEVPHTSSGFHQLVDQLNSLDGSTRIIMEHTGRYYEPMARWLSDSGFFVSTVNPKLIKDYGNNTLRKVKTDKADSVKIARYALDNWQDLRQYTSMDIIRNQLKTMNHQFSFYMKQKTSYKNNLISLLDQTYPGINDFFDSPARSDGSQKWVDFVSSFWHVDCVRSLGLAAFTERYQKWCKRHGYNFQPEKPEQIYSFSKELISVFTKDPVTKFLVKQAVEQLNTVSFTVEQLRLEMNRLAAQLPEYQVVMAMKGVGPSLGPQLMAEIGDLSRFSHREALTAFAGVDPGVNQSGTYEARSVRTSKRGSPQLRKTLFQIMDVLIKSAPSDDAVYRFLDKKRSEGKPYYVYMTAGANKFLRIYYGRVKEYLATLPKPE

SEQ ID NO: 76131 - protein, 408 aa, unidentified
MKTLLRRCAGLDVHKVEIVACLRLVEKGKVARRVRRFPTTTQGLLELVEWLEGAGCSHVAMEATGVYWKPVWHILDGHFALILANAMHVKAVPGRKSDVNDATWLADLLAHGLIRASFVPPTPIQELRDLTRTRKQLTREIVQHVQRIQAVLEEANVKLSSVISDIMGPSGRRILTAIIAGETDAEKLAALGSERLGCGRAALSEALKGRIREHHRFLFAQHLRTIEQLEESVAAFDARIAGALAPFRDVIERLNEVPGLGRIAIETIIAEIGTDMSRFPTAGHLVSWAGLAPRLDESAGKRRSTRIRNGAPWLKPALVQAGWAATRKKNTYLQAQFLRLRSRRGPKKALIAVAASILTIVYHMLRDGTFYRDLGPEYFARRSPAKLAANLANRIRNLGYHVEISAAT

SEQ ID NO: 76132 - protein, 360 aa, unidentified
MNNHKYVGLDTDQATIIARVEDAKGNFIMEAAIETSARSIRQFFKGLDGTIHVGFEEGTQAAWFYDVIRPLVAEVTVCDGRRNKLIQSGNKGDRIDAAKLTRLLRLGELHAVYHGERSTRGLKELVHGYESLVTDTTRAKNRLKAVFRSQAIRCRGDLVYSQPERKQWLGKLEAAALNARASILYEQYDCLTKLRDKAHKAMTTEARTHPAYKRLKKVSGLGEVRTAQLIAVVGSPHRFRTKRQFWPYCGLAVVTHNSSEYEIVDGQRRRKRNKQAQTRGLNQNYNRTLKAVFKGAAATAIERPPFKQYRQRLIDKGIRPELALLTVARKIAAITLTIWKKGEEFDPERVNQAVPGTGNK

SEQ ID NO: 76133 - protein, 353 aa, unidentified
MRMVVALDVHRKQITYKTLERETGEVKRGRIAPAARGDVRAWLARFAGCEAEFALEGTTGWRFVVEEIERAGHRAHLADPAETAAKRGRKRRAKTDRADCDLMLKLLLAAELPESWIPPAHILELRTRVRMRKTLIDQRTAWQQRLQAQLFHQGAPAGLRLRTRAGREALARVELSAAGRELVSLALRMIDTIDSELEPIDGWLGSFARRQPGSRALIEQLYGVGPVSATAILAELGDCRRFARSNDAVRHSGLDVTVYQSDSKRSAGHISHEGPEVLRWALFEAAQQASRRSSPDHAYYRQVADRIDHNRACLSVARKLCRRAHHILRELGDDALAPVDSDAQPDEVVAAAA

SEQ ID NO: 76134 - protein, 437 aa, unidentified
MEEVTGEPLYRDRVCGIDIGKAEMHATIRVPSDANPARRMSETRAFATTRRGVLALADWLRSWQVPAVVMEATSTYWMGPFFRLEAEGLECVLADAKQVKNLPGRPKRDPSDSSWLAQCFERGAVRPCFVATAEFRVIRLHTRYRRDLIEDRTREKNRTEKLLESAAVKLSSVVSDLHGVTGRDIMDHLIAGQRDPKVLAQLARARARRKITELEHALEGAEFFTGHHARLLKTMLERIDQICAQISELTAVIEELLAPYEEQLQQAESMPGWGRRAAEDAVAETGVDMTRFATGGHLVSWAGRAPLDHQSGKRKGQARHKKGNRYLGGILGETAISAGRTQTREGARYRKLARSRGKAKACVAVGNTQLKAYHKLLSNPGMRYQDLGPYYYERQAATRRKISRLVREIEAEGFEVTLCRPEPGPAEDNPAGTRHVA

SEQ ID NO: 76135 - protein, 462 aa, unidentified
MQDSDKRKSNAGSSKQIAGLPVVRHKVAGIDLGSERHWVCAPTIEGGGREVADFGATTSELIRMARWLNARKVESVAMESTGVYWIAPHEVLEAERLEVILVDTRQLAQVPGRDKKSDPFDCEWIQRLHSCGLLMGSFRPKEAVCMLRTLVRDKGNLVAEAGDWLRRMQKSLDQMNVRVHRAVSDIDGVTGMAILRAIVAGERDARQLAKLRNWRCHKSEEEIAEQLSGHWREDHLFSLRQGLKMYDSIQERITDYEKEILRKLAEMERGECRGQEVPKSKNPQKGRAIQSRGEEPMRQALYRMSGVDLTGIDAIGVETVQVVLSEYGPDLSRFPTEKQFVSHVTLAPHKPTSAGKPVKKKKRNSASTRVAAALRMAATSLRHSETALGAYYRQIARRIGGDVAVFATARKLATIIYRLLRWGQPYVDEGAEAYEKRYQESRIKSLTARAKELGYQLTPITA

SEQ ID NO: 76136 - protein, 408 aa, unidentified
MYNAVGIDASKLKSTITIIQPAGVVIRKPFDVLHTSDELNTLVTYLKSLVGETRAVIECTGRYHEPVVKSLSEAGIFISAVNPKLIKGQKQNTLRKVKSDPADARKIAKYALDNWAELREYSSMDTTREQLKTLNSQFTFFMKQKVAAKTNLISLLDNTYPGVNKLFDSPTRDDGSEKWVDYAYSFWHVDCVRKIGLKAFTERYEAFCKRHHYNYQKNKPALLFEESKQLVAVFPKEKSYKLLIQQSIQQLRLASEHIEIIRKEMNELASTLPEYETVMSMYGVGETYGPQLIAEIGDVSRFTHREAITAFAGVDPGVNESGQFKQRSNRASKNGSTRLRKTLFQVMSTYLQNKPVNEPVYQFLDRKRAEGKPYLVYMTAGANKFLRIYYGKVKECLRNLEQSQIEES

SEQ ID NO: 76137 - protein, 383 aa, unidentified
MTAATRNEKHIRSASQVLYLALELGVEEWKLAFITDLEAKPRVRTMPARDLKRLVEEVATAMRWFGLPDSTRVRGCYEAGRDGFWLHRYLATVGIDNRVVDSGSIEVNRRQRRAKSDGLDARKLVTMLVRYHAGESRVWSVVRIPTVEQEDRRQLHRELRTLKQDRVRVTNRIRGLLATQGVRLSKVRDVGALVDELRLWDGSPLPDGLRARLRREWEHAQFLHTKILALHRHRSRALKHDGSQPVGKIRQLLQLRGIGENAAWVYVHEFFGWRQFRNGKEVGAAAGLTPTHYQSGDVCREQGINKAGNRHIRAVAIELAWCWLRHQPGSRLSRWYNERFSRGGTRARKIGIVALARHLLIELWRFLKDGTMPEGALLKADAA

SEQ ID NO: 76138 - protein, 420 aa, unidentified
MAVPEGRDTVSVREFGTFTVDLQAIADWLEQCGVTTVAMESTGVYWIPLYEILEQRGFEVYLVDARRVKNVSGRKSDVLDCQWVQELHTYGLLAKAFRPAEEVCVLRGYLRQKEMLVQTAAMHIQHMQKALQQMNLLLHNVVSDITGATGMKILKAIIAGERNPKVLAKERDPRCRNSTETIAKSLVGNYRPEHLFALRQAVELYEIYQTKIADCEAAIVAYLEQQDHRTEDEPPSPPKPISARDRMRGGTDVRAKLYKMTAVDLFAIPGLAADTLLTLASEVGLDISPWQSEKHFTSWLALCPGTRRSGRRVLSRKTRPSANRAAQAFRMAAATQARAKTALGAFYRRIRARSGGREAITATAHKIARIFYSMLKNRTEYVEVGQAAYEQKFKERRLRSLKHQATALGYQLTPIATGSF

SEQ ID NO: 76139 - protein, 377 aa, unidentified
MDQPIRFFIGLDVHKDSIAIAASQANSRDEARFIGTTGHSVHQVVKALSKSQCSPSELAIAYEAGPCGYGLARELIARGYNCEVVAPSRVPRRPADRIKTDRRDALLLARLHRSAELVAVAVPDPSDEAVRDLTRARDDAVKAQRCARQQLMAWLLRLGKPYREGRGWTQKFLRFLADLQFDDPHHRIVFTEYRLAVQSAGERIERIEAGIREAFNTWRWQPVVTALMCLRGVDFLTAMTIVAEIGDLRRFEHPRQLMSYLGLVPSEFSSGNNRQRGALTRTGNSRVRRVLIEAAWNYRHRPKISREIETRQEGLPAAIIEIAWKAQVRLCHRFHKLRYRGLHQNKTCAAIARELVGFVWDIARRFRPIEHPTSSRQ

SEQ ID NO: 76140 - protein, 375 aa, unidentified
MWLDRGMFKILEVRVPTTASEPTRVKGQPSAVITIGIDPHKTSLTAVALDPTGRQLSARRITVNAGTYKTLTSWAARWPERRFAVEGANGLGRGIAQLLATAGEDVVDVPATLAARARLLDTGGTRKTDQADAASVAHAAMRRSQLRRVAAEDHTTQLRLLSERRDDLAAERVRVLNRLHVLLRDLVPAGAPTDLTAAKAAALLRSVRPLTTTDVCRRDLARDLLADLRRLDRQLAANEASTRQALPSTHTTITSIHGVGHVLAGKLLGHIGDVTRFPTADHFASYTGTSSLETASGERRRHRLNTTGNRQLNTALHIIALCQARDPGPGRDYYLRKIADGKTPAEARRALKRRLANVVYRRVLKDQQRRAPSTT

SEQ ID NO: 76141 - protein, 312 aa, unidentified
MAELSFGGIDVSKDRLDVLLLPEGLCFSVCNDAPGWAELIVRLRPLAVCAIGLEPSGGYERGIIRALLAAGLSVRRINPNKLRQFARARGVLAKNDRLDARLIAEYVAIMPTRVLQRDDAIERLAEIVTMRRQLCDEHVAAMNQATHLEDAMLRRISKRRLRRIEADILLLDKRLAELVAANPRLAHRYQLLISMPGVGPTLAYTLLATLPELGQIDRKQIAALVGLAPYDFDSGKLKGHRCIYGGRMPVRNVLYMAALSASRYNPALKAFSNRLAAAGKKSKVIIVAVMRKMIITLNAMLRDNTEWHPTAA

SEQ ID NO: 76142 - protein, 441 aa, unidentified
MKTHEMKIVNSNAAGIDVGSKSHYVGVGQNLTDVKEFGVYSSDHQSMIDYLSENRITTIAMESTGSYWQTLFFALQKAGFEVLLVSGHQTKNLRAKTDVKDCQWIQKLHSLGLLRGCFLPDEPTNRLRILHRHRHSLVEESAKMTNKMQKALRLMNLRLDVVLSDITGKSGIAIIKAILSGERNGNALAQLADNRVRKSKAQITDALQGQWSDEHIYELQDCFELYELLQTKIQCCDQRITTLLEGYTEDVVFDPKQIHLTKKQVKGKNQPRFDLTTLSYKYYGVDLFAIEGISMNTVLTLITEIGQGIYKFKTAKQFASFLRLTPNNRVSGGKIISSRTKKGSNKFALALRNAANTIDRKKEGNLMLFFKRIAYRKGRAAAITATARKLAVIIWNMIVKKQPYNPINQIDYKESIKAKAIKSIQKRMKKLGITNTQLSIT

SEQ ID NO: 76143 - protein, 338 aa, unidentified
MMAGIDIHKRVLQSAVLDPASGEFAEERFSGREGLADWATRWRGRVGAVVIEATTGWRWVARELEAAGFEVRLADPGQAKALRGKKRKAKTDRLDARWLCLLLARELLAEAEAWLAPAEIQQLRDKTRLRKALVDDRTRWAQRLHALLTQEGWPCERARLLTASGRRWVQGLALPPASRAQAELIVRLIEQLERESETLEAELRRFAKTDPRCQRLTGIFGVGPILACHLLAEIGQASRFRRARQVVRLAGLDPVVAESADSKRRGKLAKAGPPALRWALVQAAQHAGRERSPDRALYRQAAARCGSQRAKLTVARKIAHRAYHALHELERQQEAQAA

SEQ ID NO: 76144 - protein, 421 aa, unidentified
MAKTVEIVYPVCCGMDVHKSFIVACVAVTDEHSHTQHHIKRFSTFTGDLRRLAAWLASYNCRDVCMESCGKYWIPVFHALEKAAIHVCLTHPKYVKAIKGKKTDKKDAKWIAELFKCDLVRSSFIPPPDIRQLRDLCRYYVKLTGFASGEKNRAQNCLTLCNFKLDDVFTDVFGKSATRVLDALLEHGNGRFELDGLVSGQCKASHETIRAALDGELDPTQAEKLNLIRRHINDINALKAALETLIYKLAAKYQIQIDFLLTVPGISTPLTAIRILAEIGADMSVFETAKQLVSWAGLTPQNQESAGKKKTTRIGRAGAYLKPLLVQIALAVSKSDKHPELKTKYLALKKRRGGKKAVIAIARKLLTAIWHILSKSEAYNAELYKKADKPPAARELTTAQAVAFLRSKGFVIVDQETGEVA

SEQ ID NO: 76145 - protein, 423 aa, unidentified
MVAPGRTPRYVRRRAKEDIAVDRCAGLDWAKDTHQVCVLEGDAEPLVQRGFTHDERGLDEMCELLVESGVKRVAIERPDGVLVERLLEAGLIVLPIHPNQLKAARPRFRASGGKSDSFDAFCLAELARTDHHRFRILAPDSDETKALRALTRVREDLVKTKVSLTNRLQAELDAFWPGAARVFCRLDSPIALAFLERYPSPTDARSLGERRLQSFLARHSYCGGKSAAELLAKLRSAPRGLAKETEKAARRAAVLSLLAALRPVVEQIGLLESRIADAVRAHPDGELFLSLFRHPDSTLTAAKLLCEIGDRRERYPSAEALAADAGMSPVAKESGRRKVATFRRSCDKRLRDAMTTLADSSRLHNPWAKDIYLRARGRGCDHPHAIRVLGRAWLRVIWRMWQDSVPYDPLKHGGRRRLDAAGG

SEQ ID NO: 76146 - protein, 388 aa, unidentified
MQTAADRPEAPNAIRSDLAAIFVSLELSRSTWLITSLSPDGGEKMSKHVVRGGDVAGLLERFAQLQKKARARTGKVFHFVVIQEAGLDGFWIDRVLRKEGIESHVVDPASIATSRRRRRAKTDRIDGEALVRALLAYKRGEPRVCAMVKAPTPEEEDRRRLCRERKVLIGERIQHVNRVKGLLFSQGISGYEPLRRDRRERLDTLQTGDGRLLPDHLKAQVCRELDRLELLLEQIKAVEAERDVLLAAQQVAAPAPAAMLLDIKGIGPEFAAILWSEGLFRHFDNRRQVASYAGLAPTPWQSGSVDREQGMSKAGNPRLRTTLIQLAWLWLRNQPQSALALWFKDRVSRNGGRLKKTTVVALARKLLIALWKYVTAGVVIEGAIVKSA

SEQ ID NO: 76147 - protein, 344 aa, unidentified
MSKVSIIGLDIAKHAFHAHGADGRGRVMFSKRISRGKLLDFFATQPSCTVALEACGGAHHWARQLAQLGHEVRLIPPAYVKPFVRRQKNDAIDAEAICEAAQRPSMRFVAVKSQEQQAAGLVFRTRDLLVRQRTQLINAIRGHLTEYGWVAPKGPSHVAMLADLIDKDEMANSLPGAARAMFRVMLDLLTGLSSKIADLDKEIARRAREDEVSRRLMTVPGIGPISATAIAALAPPAETFAKGRDFAAWLGLTPLQRSTGGKRKLGATSKMGERTLRRLLIIGSSAVVKQASKRGAPRGSWLEQMLARKPRMLVTVALANKMARIVWALLVKQDTYRAPVAARA

SEQ ID NO: 76148 - protein, 374 aa, unidentified
MTDHSEVFVAFDTSKLRNAVAIAEGGRGGEVRFLGVIENTEAATTNLVRKLAAKYGRLTFCYEAGPTGYDLHRLIGSLGHACIVVAPSLIPKKAGDRVKTNRRDALGLVKLLRAGELTAVWVPDARHEAMRDLTRAREAAVENLRSKRQQVMSLLLRLGRRYAGKRTWNKAYADWLARQNIEHPEQRIVFEEMLLAVRQAQERITRLEEAIRAAVPDWSLAEVVTALMAMRGLDFVSATTFLAEVGDLSRFQTPRQLMGYLGLVPSEYSTGDKVKRGGITKAGNRRARRILVECSWSYRHPPRVGTKKLAKLAAVPPAVREIAWKAQSRLTSRFRALTKGGKQATVVATAVARELSAFIWAVNRAIVTRPTPVM

SEQ ID NO: 76149 - protein, 367 aa, unidentified
MSETIVAYQSFIGVDLHKNTVTLAAVRPDGTLLDRVKIPTKCRNRIENWLLALPRPSWLAVEAVGFVEWFIDEYRPCVDRIDIADATELANRRGKRRKNDPNDARDIAQRLARGECPLGYIADDELMQLRKLGRHWHQLSRLLSRSKHSMRSMLLAANIVGPKLDGSAAQKWILARGYLLKPVQQQAFANFLDIIQLVERQRARLHLQITFANRVPRFCKIVDILKSVPGIDEIWGCIIAAEIGPFDRFPNSDALEFWAGMTADLKESAGRTQSGNITKAGSRSLRWALCKAALTLCRSDKTQEAIRQRLIRRIGRPKANVAMGRRLLRILYAMIRDEKTYARGPATKHNLGANRARMARKQRKEVA

SEQ ID NO: 76150 - protein, 298 aa, unidentified
MKQSVVYIGVDVAKANLDVAWAAASRRFPNDRNGHAALVLWIKQSAASVQLICEASGGYEQALLESLEQNNLAVTLVQAIRVRQYARAAGILAKTDTLDAKVLAAFGAAMQPKPTPPLSAEQKRLRQYEAQRRHLSKVLLAEQNRLAQVSCAELRSLSRSLISKIKKQIDTLDAGVAHLIAQDQVLCLKAQKLTAISGVGTRTAALLLAQMPELGQLNRGEAAALAGLAPFNHDSGSIRGKRAIFGGRPALRSGLYMAALSAARYNPILSSFYQRLRAKGKPHKLALTAVNAKTPPRP

SEQ ID NO: 76151 - protein, 344 aa, unidentified
MSNLQLIERQSEPKQTLFAGIDVGSEELVLAVRKDGKPSEPQTFANTAAGRTQLTKKLVKLTGIKTCLEATGIYHFDLAIALHDAGVPLMVVNPKASHNFAKVLLKNSKTDAVDAQTLAEYAERMDFVPWTRPSDEKLAVRGFARRIHVLTEQRAAAKNHLHALCATSETPKAVLKDAQLAIAQLQKRIDRLTDGALALINKHPDLKQALALLVSIKGVGNTSAIALMGELLLLPPNLSHREWVKFAGLDPKAFDSGKSVHKKMRLSKAGNRHIRSALYMPALSAKQHDPHVSAYFQHLVANGKKPLQAICAVMRKLLHAIHGMLKHNQPFDNSRFYSIPIIAE

SEQ ID NO: 76152 - protein, 334 aa, unidentified
MLYAAIDIHKHAFQTAVLDPETGVVVEERFSADRESLARWAEPWRGRVGAVAIEATTGWRWVWRELVANGFDVRLAEPVQTRALLGRRRSAKTDRLDARWLARLLAKEMLPQSWIPPAQIQELRDRTRLRKALAEDRRRWGQRLHAYLLHEGWPCSRSNLLRPPGLRWAAALQLSEHARLQVDSLLSVMAALEAQLETVDVELRRFARADERCQALQSIYGIGPILACHLLAEIGEARRFQRAEQITRLAGLDPVVDESGETRRRGHLAKAGSPHLRWALVEAAVHAHRTTAPDLALYRATRERRDTTVARLTVARKIGKRAFHALRELELATT

SEQ ID NO: 76153 - protein, 411 aa, unidentified
MHEKQKHIYVGVDLHKHQHVAVIINCCQEKLDEIKVENKPSAFSTFLLDIDTLTEEGLTPVFGLEDVGGYGRALAQYLTDHGQVVKEVNPALSYAERKSHVIVQKSDSWDAECVARILVNKLDQLPDAKPHDLFWSIQQLVTRRNALVKAQGALKNQLHIQLSHHYPSYKKFFSEVDGKTALAFWERYPSPSCLEGVSIKQLTTFLLEVSHNTCSVKKAIEILKLVKEDGNTTKEHQETRNFLVESMVRHILFGKQEIGKVERELKELMSLLDFQLDSMPGIDLVTASALIAEIGDVRRFPNANKLARFAGIAPVYFGSGGKGKEHKSKQGNRALHAIFYNLAVQQVQVAKGSKLPRNPVFYTYYQKKLKEGKSKGQALVCIMRRLVNIIYGMMKHKTAYKLPIVQEKEVV

SEQ ID NO: 76154 - protein, 397 aa, unidentified
MKGFCISLDVSKGSSFYQGFKGFDEPITKPKKIEHNLEGFKELLNLKEKIRKEYNEECVVIFESTGVYHRSLQTYLDEHDFKYTIISPLLSAKVRKSDIRGTKTDSKDCASIAKVFYLKELRIYSKVDEIYADLKEKSRYYDFLMDEMKRWKIEFRRLLDIIYPGFDKVYDDLYGDFIQTFLLEYSHPEIIRKRRLDTIAKFLEKHTCHKEAYCIRQAQTLKEYAENCASGCSSKSYLVNQFDTVIHNLNAQIKHLKIVLEEIVELAKTLPNYDSIRSIPGIGDSLAARILAEIGDTKRFNNASQLVAYSGIDPQIYQSGQISGLHLKISKKGNKKLRCLLYLAVTCMIRTSRDTVIVDFYKKKKADGLASKSALVASMNKLVRIIYSLCKNGYLFK

SEQ ID NO: 76155 - protein, 356 aa, unidentified
MAMLSEVVDGVIGADTHRDTNELEIAHPSGAVIATAQFGNDGAGYAATLAWIAAHAPGPRLALSIEGTRSYGIGLARAATAAGIAVIEAEQPTRKARRGKGKSDPIDAHLAVLYAIGLDAEKLPTPRADGDREALRILLCAREEMTTTSTGQTNRLKALLRDGDDTDRRLARGKLTLTKLSALVNQGQPRDATRAQAIRHGEIHRLAVAVRDATHALATNRKQLAGICQDLVPGLIDQHGIGPVSAAQAIVSFSHAGRCRSDAAYAKLAGSSPIEASSGQITRHRLNRGGDRALNKALHIIAVTRMRDDPATRAYIARRTAEGKSEREIRRCLKRYITRQLYRAMTAAPALAAASR

SEQ ID NO: 76156 - protein, 351 aa, unidentified
MLLIGVDYHPSFQAIAFFDEETGECGEPELNHSDGQAERFYRGLQQRGICVRVGMEATGYSRWFERLLAELGIEIWMGDPAEIKAKRVKKRKTDRNDALLLLRLLRENNFPQIWVASPENRDLRQLLWHRHRLVQMRTRIMNPLQALAMNEGYRWKKKLFSEQGRAQLEKLALAPWASRRRRELLELLDRMNPTIEELTSAVEQEAKKRPEVLRLMTHPGVGPLTALAFVLIIGTPTRFQRGKQIGTYVGMIPCEDSSAHKQRLGHISKQGNSLLRFLLVEAAQAAARIHPEWRRRYLRLAVRRHQSIAKVAMGRKLAIRLYWMWRNGSEYSQSLEFGSYAGQLGTGHGVK

SEQ ID NO: 76157 - protein, 429 aa, unidentified
MNYTQNEKIEQVTDSTIVVGVDIGSQIHYARAFDNRGRELTKRVFSFHNDLEGFNSFNLWAETLKTENNKTAVLIGCEPTGHYWFAFAKYVNDHQKRLVMVNPFSVKKIKELDDNSPKKTDSKDPKTIAKLVVEGRYSIPYMPEGIYAEIRDLVYSCDRIMKQHNISANRIQRWLAIHFPEYLGLYTRFDAISGLAVLEKAPLPKDVIALGVNGIRKIWHDKKMRGRGVTEDRAKTLVEAAHNSVGLDGGIGTKSELYMLLEEHRLWTSQLEAVNKVLEEIILKVPYVEKLLAIKGVGSITIAGFIAEVGDIRRFDSPKQIQKYAGLELVENSSGKHKGRTRISKRGRRKLRKILYQVMVPLLARNGEFQEIYDYYVTRVKNPLKRRQAMVAVSCKLIRVFYAVLMKGVDYDRFKMMSDIHREGNFIAA

SEQ ID NO: 76158 - protein, 291 aa, unidentified
MRDVSITRYNVGVDFGSEQMDAKLAAQYEDGTRKILFSRRFENKETGFKNLDGWLKEKCRCKDAEIRISCEATGVYHERCCYFLDGLGYYVTVEVPSRVKSYKKSYGFNSRNDKIDATALAYMGLERNLRKWEPINSFYYELRMLTRYHQSVQEMHTSACNQLHAQQAGMRISELVVKQLKANIELYEKQLAELERAIEEKLTSEPEVKRKMEYTTKDMKGVGMMTVAVMLAETNGFSWFTNRRQVVKYAGYDIVEDQSGKRRGKTKISKKAMRISEEHCTSLPLIWLHTM

SEQ ID NO: 76159 - protein, 455 aa, unidentified
MPRRRPSTRPVTMPVLLPHAGGIDVGATDLYVCVPLDCDPQPIRRFGTFTEDLHTLADWLTQCGVTSVAMESTGVYWIPLYQILESRGFAVCLVNARHVKNVPGRKTDVQDCQWLQYLHSVGLLRASFRPPETVCAVRSLLRHRETLVQLAATHTQHMQKALNQMNLQLHHVLSDVTGVTGLAILEAILAGERDPQVLAQHRDGRIKASRATIAKALVGDYRPEHLFTLRQALASYRHYQRLIAECDGEVQRLLGAVASQVDLARQPLPPAPAGRRKPHRKSPSFDLRAELYRVLGTDLTQVPGLQTPTVHTLFAELGADLSAFPSDAHFASWLGLCPDNRISGGRILSVTTRPVKHRVAQALRLAAQSLCRSQSVLGDFFRRMRAKFGTPKAITATAHKLARIVYHLITTRQPYDERRLAAADAAHRRHSESRLRAQARALGFELVPAPEQAVS

SEQ ID NO: 76160 - protein, 355 aa, unidentified
MNSVKYIGMDVHKEAIAIAVLNFSGKLVMECVIETKASTILQFFHGLSGSLHVTFEEGTWAAWLYDLLKPHVTELVVCDPRRNAYMKEGSKSDRIDARKLAELLRLNSLRPVYHGEHGVRTLKELARSYLTISKDLGRVMSRLKAIYRSWGIPCTGKQVYASRYRAEWLAKIAEAGVRRRAEFCYQQFDALRLLRQDVRQELLGEAKKHDAWKLLRQIPFIGPIRAALIIAMLQTPHRFRTKRQLWSYIGFGIETHSSADHHSIDGKLQRSKKQISIRGLNRNHNHDLKNLFKSAATVAAAKPGPFQKFYDALVNKGIKPEMARLTLARKIASITLTIWKKGVRFDAKYLKPQTA

SEQ ID NO: 76161 - protein, 369 aa, unidentified
MNSITYVGLDVHKTTIAVAVAEGGRSGEVRQLVIYANRADVLRKMVERLARGRSQLSFCYEAGPCGYGLHRFLLGLGHTCSVVAPGLIPIKAGERIKTNGRDAVTLARLHRAGELTEVWVPDAAHEAMRDLVRARTTAAKVLSKARQHLSGFLLRHGKIYSGVRSWTQAYRRWLTTVRFDHPGQQVVLQDYIDAVITAEQRVARLTRQIIELMPTWSMAPVATAIQAMRGVALINAVTIVAEVGDFARFGNPRQLMAYLGLVPSEHSSGIRVRRGGITKAGNAQARRALIEGAWTYRMQARVSRKLHDRLEALPQNIRDIAWKAQVRLCSRWRRLAASGKPKVVVTTAIAREMAGFIWAIARRVPPAAG

SEQ ID NO: 76162 - protein, 360 aa, unidentified
MAKARTLVGLDVHATKIVAAVLDADTGELGMFVLNGENAGAAALCAGLPRPVRAAYEAGPTGYTLARELAKRGIECVVAAPSKIPRATGDKVKNDRRDAEHLVRLLLAGKLHPVRVPGPEEEALRDLVRARETLRLDLMRARHRLSKMLMRHGVQFDDGRAWTDRHRTWLKTVCLDWPAAQTTLLDLEGVIDVLVHRRDHLEREIVAILPGSPWETQVGRLRCLRGVDTLTAVGLCAEVGDFARFAKAGQLMSYLGVVPSESTTGNSRRLGSITNTGSAHARRLLVEAAWHYRKAPATRKTLTERQAGQPPEAIAIAWTAQRRLHRTWTRLEQRSKRRTIIAVAAARELVGFCWAITQIE

SEQ ID NO: 76163 - protein, 342 aa, unidentified
MPFLGGDNISLIGVDIHTKYCLGIIEGNNTETTLRFPNTPNGWKDFLKNEEHIDKVIIEAGSVSEKTIRFLEDLKIPIKMAHPKKARLIAEATIKTDELDAKRLIDLEKVGILPEAWIPSREIRDIRHLCRYRFFLVQTRTRIKNRIHCELDREDINVKTLTYKYLETVKEKTIMIDQLYRLLREVNEKIREVEKEIGKKYSENEYSRIIDTIPGISKYGSLLLSMEIADINRFSNSKKLTSYAGLVPREYQSGAREWKGHITKEGNKWIRWILDECLAIHINICPYSPISIYYRRLLPIKGKGKAKIAAERRLLSVIYVMLKEKITFDQYIKMIEQSEPLV

SEQ ID NO: 76164 - protein, 460 aa, unidentified
MRTQKMEMEIVNPNSAGIDIGSRSHFVAVGQGENDVKEFGVYADDLTDICLHLKSHNITSVAMESTGMYWQNLYVELMKHGFDVCLCNGKFTKNIKGKKTDVKDARWIQKLHSIGLLSSSFLPDETTETLRTYCRQRQNMIALAAEASHKMQKYLKLLNFRLDVVVNDICGQTGMAIIEDICKGNLDPSTLAEHRNGNCRKTKEEIAKALKGNNRTDYLFGLKQELDSYHFYQKKIAECDKQISAFLKNQINTDPKKKKLKTADKPHKRVNKNALTGIDLNQASYQYFGGVDLMTIEGMSHATILSIISEIGPEGFLKFQSAKQFASWLRLAPNNKISGGKVLSSKIPKGSNRLKIALRSAANVIGNLKDTPLSDFFRRVCYRKGRMVAISATARKLAVIIWNMVVKRQPYQSPVKYLFLDQKRKMKTALNIRKQIAKFALTNEDLGISNNLIISAGQKR

SEQ ID NO: 76165 - protein, 389 aa, unidentified
MIYVGIDVAAEKHACCILAESGKVLKQFTFSNDMPGFEKFHKALLTPSETKIGLESTGVYGNNLAEFLRRNGYETHIFNPLLVKKSIQATTLRKTKTDKSDAKHIAQYTKEHSQPNPKISYHTSELKSLSRGRFSLVRERSKVKAQAKGLLVQLFPEFSQIFSDVFGAAASAVLRQLPSARMIAQCPVGVLTDLLRTASHGRLGKVKAELLIDLAEHSVGIQSMALELQMQMLLQQIDLFTLQINRYEAAIKSEMETIQSPITTIPGIGCVLGAAILSEIGDIHRFTTPAKLQAYAGVDPSVGESGTSVSTPGRMVKHGSHYLRWALCQAARCVSLYDPIFAAYMKAKRDEGKHYCVACSHVAKKLTRVIYSILKNNTAYSLTYSQIGA

SEQ ID NO: 76166 - protein, 431 aa, unidentified
MLFAGLDIHKRVVEAVVLDASGTLLHRQRFDCTREELVRFAKKHLGPNARVALEATTNTWSIVDVLRPHAGEVVVSNPLRTRAIAEAKIKTDKVDSLVLAQLLRADFLPRVWQPDAPTQARRRTTTRRASLVSDRTRVKNRIHAVLHQRLIAAPVDDLFSKRGLTWLRGVELDAPGRCYIDGELRLLETIDGEIEGVDASLVLDAHADPRAKLLMTLPGVDYTIAITLLATLGDIARFKDGDHAASYLGIVPSTRQSAEHCYHGPITKQGRAHARWMLVQAAQHLSKHPGPLGVFFRRIAKKKNRNVAVVAAARKLVVVAFHMLKNNEPYRYAIPSTVDAKLARLRVKATGQKRKAASTRGAPRSPNYGSGQRTRPVHALGVILEREGLPPLHPPRPAETRALAEQGLTEFVDSLHVPRRVPKPRRPKNST

SEQ ID NO: 76167 - protein, 441 aa, unidentified
MANRRPLTRGDRRRNDKLTRLRSIVRQDLAVVGIDLASAKQAAVVADHDSITVGRRMFDGDPWVIDEILDWALPVALDAGFTGVVVGCEPTGHRWKPVLERCRARGIEVVCVNPMLVHRGREEEDFTRDRSDFKDSTIIARRVADRHCYIPYALEGDWCRLRHLGARRNDQLVKAGSARQQLRDLLECVWPNVLHAAADPLDSITWRAAMAVSCDPDEIVAMNFDAFASAVRDELSRWGGQRRCLRILRAIWDAALDPGGVERERAAATERARDAIRDWRRALDELTDVETRMLAVLDALELTDLVTTIDGLSAVGAAAILAEAGDPARFDCARTWVKHAGLCPRANESGTFQGQTKTSRRGRPALRTAAWRAVWGALPNNAVYAARFEHLRTRTDNPLKAGQARAAIAAALLRQLFIVVTRRVPWNPATAAGKEVTPAAA

SEQ ID NO: 76168 - protein, 328 aa, unidentified
MCTLGIDVSKNKIDLCLLTAGHGGKKKHKVLTNEPAVARKVIDWLNAQKCVPESVTVVLEATGIYHENLAYGLHEAGVSVCMANPCRVREFAHGMDILNKNDAVDAFVLACYGELKSPAVWVPPSPEVRKLRALLRQRDALREDVQRTVNRLEKANSTSTPQEVIRSLERTKSWLNEELARIEKLITDHTDNDPGLKADLDLLKSIKGVKDQIGREMLALLKDGMFKSASQVAAYLGLTPVEKTSGSSVRGRTHMSKTGPSGVRAKLYVAALTASRWNKQAKAIYERLVAKGKAKKAALGAVMRKLVHLCFGVLKTRLPWDENYVATA

SEQ ID NO: 76169 - protein, 329 aa, unidentified
MNVNSQGRETAPTPRANAGIDVSKDWLDVALGSRSERFANDAAGMESLTALMRQKSIDLVVLEATGGYEAAVAAALQVAGLAVAVVNPRQARDFAKSMGVLAKTDRVDAQVLRAFADVIARHEKRGQFLHQLPDAQRAQLAALVARRRQLLDMRTAESNRLIMAHKATRKSLAAIIKALDQQLRQVDQDLDRHIREHFKPLTDLLKSAKGIGAVTSQTLAAALPELGRLDRRAIAALVGVAPLACESGQHRGSRHVWGGRGEVRHALYMATLTATRFNPVIRAFYERLLAKGKPFKVAMVACMRKLLTILNAMARDGTAWNAQLHVKNP

SEQ ID NO: 76170 - protein, 392 aa, unidentified
MYIVGIDIGKNHHEASIVSPEGKQIGHSLRFATTHKGADSLMSFIFKNIGNSPCVFGMEATGHYWYPIYSFLKAKGYTICVINPIQSDSLRKMYIRQTKNDSIDSFLIAEVIRFGQFGTTSMADENILAMRQLCRYRDSVISSRTEIKLRIGAIMEQIFPEYEKQFSSLWLSTSMGILEKYLTPENIENAPIDELFEIIKDKSHNRLTKAKAISIKEAAADTFGIKIAQDAFSFQLKQLIDRMNFLDKQIEALDTEIIKYYEQFDCYLHTIPGIGMIAAATILAEIGDIHRFKSSSALVAFAGIDPTVRQSGEFNSTHNHMSKQGSPYLRHAIFLAATTCSFHNSPLNAYYKKKRDQGKHHLTATGAVARKLTTVIYAVLQDGKPYEPKKFC

SEQ ID NO: 76171 - protein, 332 aa, unidentified
MNAVGIDVSKGKSTVAVIQPFGVVIAEPFDVFHTDSGLKELVNFIKSLSGETKVVMEYTGTYYEPTANALHNAGIFVSVVNPLMIDDYDTNRVRKVKTDRIDALKIASFALDKWMKLREYTPVETVRKTLQIMNRHCIKLNKILVMQKNSLIALLDCCFPNANTLFTSPRRESDGHEKWVDFVLKFPHVDSVAKLSLSAFKTKYQSWCKKDHYNYSESKAEQIHAYARTLVSTLPMTDAIKKMVSDSAKLLNSTLEALGTLHSEMDSLTSQLPEYETVMNLFAFGKVTCSQLIAEIGDVTKLKSGKSLVALAGIDPPPNQSGKEDKKSRSIS

SEQ ID NO: 76172 - protein, 345 aa, unidentified
MDKIIRIGMDTSKHVFQLHGVNAADKPVLRKKMRRKEMIDFFTTCPPTLVAIEACGGSHHWARLLTSFGHEVKMIAPQLAKPYVKRNKNDAADAEGLCEAMSRPTMRFVPVKTVDEQAALMLISVRTRLIANRTQLANAIRGYANEFGISAAKGLAHIPMLLERVQVEKTVPELAQELFMSQAEEYAQLEKKIAAVEAKVKAWQRNDERSRRLNTIPGIGPIGSALLIMKTPAPELFQSGRQFAAWIGLTPKDHSTGGKLRLGGITRAGDEALRAVLVAGATAVIHHARRSGKASQWLAELLRRKPPKLAAVALANKMARIAWKLMISGQTYSAQSGAALTGCAT

SEQ ID NO: 76173 - protein, 318 aa, unidentified
MPELSHVGIDVSKDALEVACGPESPTQCFTNDDAGHEALVNVLHVHRVDLIVVEATGGYEAPCACALQAAGLAVAVVNARQARDFAKAMGYLAKTDRIDAQVLAALAAVLANRADRQKLIKALPSDEQQRLHALVLRRRQLVQMLVAERNRLPMSHQAARVSIEALIKAIRKQIVDIEADLSSHIAHHHADLAGLLRSAKGIGPHTSMALIADLPELGKLSNREISALVGLAPFNRDSGKMRGKRMIFGGRTQVRCALYMATIVAMRHNRVIQRFYQRLLAAGKPKKVAIVACMRKLLTILNAMVRTGKQWDETFHFA

SEQ ID NO: 76174 - protein, 540 aa, unidentified
MLHLPMWGKIPHVEIEEVLEGLANACLKSATESVCPLRQDKQAAPGGFDSNMSSRAPSGDSLSHPPIGDGEHTELDEAYSLRPYGVGIDTHKKFIQVCVLVRTEHGVKRMDRTFNTTWASLCEAAEFAKWCIYEHGSTEAVDELEATGLHYCIESTGTYHLPVLRAWKGDPSVVNPLLANPSRRKTDVLDSRLLAYHSITGMWPSSYTPPPPLQTLRILLNMREDAGRAALRSSNRINNFLLRYGHTIGAEDSVTSPRGRALVEDLLADRALPGGGVCPDGLPPESKAIFQALYETHDANVKARAHWERTALQWAKGACTCVLGTGEIVSGERVFDLLATIPGFAQMSSLYWLAEVCTPTRFPSANALAAFAGCDPSLKVSAGKVTSQARRRGNQKLHLALTRAAQIQITRPKCRLGEWGYRLWKRHKVGGFKKACAAVARRMAMFSYHVTRTGEPFEERLYSFFDPPKYVERGLTLSEMGRYSKVLETFNTTTELAAAYEDGRLAATKGAGEKCLEQVKLILERARKPAKLPALRPSER

SEQ ID NO: 76175 - protein, 344 aa, unidentified
MELSTLGIDLGKTTFHLVGMNRRGEVVLRKRFSRSQLLHCTANLKVDLIGMEACGGSHFLGRALRDQGHEVRLIPAQYVKPYVKTNKSDYIDAEAIAEAVGRPRMRFVPVKSEDQLDLQSLHRVRERWVMRRTAVVNQIRGLLLERGTTLRKGRRYVDEALPGILAGGSSKLSGAVLVLLAELKQELEQLAEKIDRSDKSIEKIARGNESCRRLVAMPGVGPVTATAIIATIGNGAAFRKGRDFAAWLGVVPEEHSTGGKQTLWKIPQRGNQYLRRLFVQGARAVMQHRTKQSSGLSAWLAQLTARTHQNIAVVALANKLARMAWAVLAKNEAYRPPLLAGNTI

SEQ ID NO: 76176 - protein, 394 aa, unidentified
MKLVGIDVGKNSHHFCVMDKETGEFNVAPSSFSNNKEGFDFLINSLKPYSKKSILLGMEDTGHYHVALLKFLLSNGYTVALINPKTTDLTRKMEGGITKNDKLDTITICDVLDTPERKKQYRITKVDRFDLYEQRQLTRHHHNLKEELNVYCNRLQKSIDLVFPEFNTLFSSKYGIVYMNLLKTFGSAEAIASTDIRTIRKCFEIKGRGNRISLTPEKLKECAKNSIGISSEVETIQIKHLVSQITLIKEQIAEIDKKIEEFSITNNSPILSIPGISHFSGTSILAELGDIGNYSKPSQIIKFAGVAPYHYESSQYNAQHTGITKKGSKYLRKTLYQIILTVINNNPVFKKYYLLKISQGKGHRCAQGHCIRKLLRIIYHLLETGQSFDPALLR

SEQ ID NO: 76177 - protein, 337 aa, unidentified
MERHYVGIDLHRRRSVIVRRDAAGVTHSTVRLDNRDIGGILKEVRAAGPEPDVIVEATYGWYWLADLLAAEGARVHLAHPLGNNWGTRRVKNDERDATDLVDLFQLGRLVESYIATPELREQRELVRYRHKLVSFRSSCKAQIHAVLAKEGVVVPMTDLFGVTGTTLLDTVDLGSGFAIRVESLRDLIELIDREVTMLDREIHKRLRADPRYTAVQMLPGIGPVTAAILLVEIGDITRFASPDKLCSWAGLTPRHRESDTTVHRGSITKQGSRLVRWAMIEAVQRCNGSSLLVGTAKARVAERRGRRIAKVAAARRLLTFVFYALRDGELRCLKKAG

SEQ ID NO: 76178 - protein, 341 aa, unidentified
MEQKLSVLGIDLAKQVFHLVGMDAHGTMLVRKRLYRAQMMAFIAQLPPTLIGMEACGGAHYWARRFREHGHEVRLMAPQFVTPYRKAHKNDMRDAEAIAEAMTRPTRRFVPVKSVAQQALQALHRVRERLMKARTALINETRGLLHEYGIIVPQGAATFRQHVLEKLTTEDAKLTPHSLALFRQLLEELAALDARVATYDAQLAQVAQTHPVCQRLMTIPGLGELTATALVAAVSDATQCKNGRQFAAWLGLVPRQHSTGGKSRLLGISKHGESYLRTLLVHGARSCLRWVGRKRDRRSQWAQSLMERRGWNKAAVALANKNARVAWALMGTEQVYRVAEA

SEQ ID NO: 76179 - protein, 320 aa, unidentified
MKSSHVNSEEWIGIDVSKRSLDVHCDLGGEDFRVANDANGIAAIAQRLKGRPVAGCVLEATAGYERAPLEGLIALGLPAALVNPARVRFFAKGMDEQAKTDRIDARILALYGRVRQPALATPATGTRSRLRELLTFRSQLVGEVVARKSQLRLYVSENLSKRALEALEERKQEIKNLDRDIADLTASEPGMKEAWRLIVSVPGAGPVTAATLIAELPELGRLSRRKIAALAGLAPFPRDSGQRKGHRSIRGGRADVRRALFNAARVAVRFNPVLKAFHDRLITKGKPPRVVLVAAMRKLLTCLNAMLKTQTEWKKATQTP

SEQ ID NO: 76180 - protein, 427 aa, unidentified
MWDARRRVLKIKSLKHGIIQDKRGNIMRTVFGIDVSKASSEVAILVNGEKIHGYTMLNDAIGFNRLLNDLKTVHNPEIIFETTGVYSRRLRAFLEEYGYAYTQLNPLEAKKQLDSLRVRKTDKIDAEKLAHSQFILNRKPTYAQEEVYQHLRDLSRFYQNLTEDIVRAKKIVYTRSYKSPFLNWKNLLSTPTGEQYWNLVMAFPCKEFVLNLSQNELCKIIRQSTSKRISEKRIAYLTDKLIKLAKQSFCAVKKISPMLEEVRYYAQELLRLSEHRQVVLDDMVALAQPLPEYDILRSIPGIAEITATSIIGELGDIRRFQSTNQINAFIGIDLRHYESGNFLAKEHITKRGNPYARKILFKCIHNIASASHTNPCHIADFYEKRKRQSTIASTKPHAIASIHRLIRTMYYLITHNKLYDYSLTQNR

SEQ ID NO: 76181 - protein, 313 aa, unidentified
MPVSLSKPIVGVDVAKNELVIYQSDGDLLEEIANTKTSIKQWLKALSGTVAIAIEATNIYHLDFADLAYEAGCTIYMVGGYELKHYREGVKIRAKTDALDAKLLARYLKNEAEELRPWTPPSPLYRQLLSLFRRRAALVQARVGLVQSWSNEPLLKAAFAEQVKSMQQLETLIEKTINDQLKEAGLLGQLKRCLKVEGIGFLTGARLITAFQRGDFRNADAFIAFLGMDLRVAKSGQKDARRCLTKRGDPEARRLLHNAAMSASRTKAWKGYYEEQRTRGFSTTQALVMLARKLARVVFALLKGQSEYQPKAS

SEQ ID NO: 76182 - protein, 441 aa, unidentified
MNNTKSVAKSGKGSKSKLDKSEKTKNESAQPVMAVKNQKQAAEPEPAAPSGALAEVAALGICMTKAESNTLRGLRQIAEGKDKQRLFVGVDVHKKQWHVAVWSKEHDLLVASWVTPSFYDGLSRIIRVARARIESVVYEAGPTGFSLARRLESDGWPVQVISPAHTPRKPGGDDKSDRLDARKLAEYSSKGLLHVVAIPTEQEEADRALARQYGACTDDVRRAKMQIRSFLLFHGVAEPEGLEHWTRASREALTRIELNLELRATLDLLLKRLAQALELRSQALKCLRRLSQTERHAASVKRLRTVPGVGLIIATVFLCELFRPKRFGSPRQVSRMLGLAPEVRSSGQSEERGGRHAAGQARLRSLLVEGAWQWRRHDANALRLYQSQVSRSGLKQKAITAVARKLGVILWRIALGPRDYCPGLVNIPPGVFEGMKRRQAA

SEQ ID NO: 76183 - protein, 318 aa, unidentified
MTSHPLALAAGIDVGQRFLDIGLAPSGKTFRVPNVADGIAIIIERLTQEGVGRVVLEAVGPYAQRLVSALAVAGFEVGLINPRRIKAFREFEGRRAKTDRLDARLIARFALAMTDAIRPLPTAEQLALKALSTRRRQLTEMIAMEKTRLKQAVEPLILASHRAAIASLTAQCRQIETELARRIGDNPQLACSFEILTSIPGVGERVATALITELPEIGRTDRKAIASLAGLAPHISQSGNAPPRAAIAGGRPCVRTALYMAALVASRHNPQMKLAYQSLRNQGKPAKLALIAIARKLLVTANALIKSNTRYKPQSLDN

SEQ ID NO: 76184 - protein, 403 aa, unidentified
MNRIIGLDVGRGSAVLCCLEKFPDNILLHYRKLRNEKKFYRASCNKAGIDLLLSLKPTGIVLEPTGHWYSQFWVIVASQHNISIYWVGHNDLDSKRKGHGFANKRDEEDALCLAALYFDDQFIDIRGQKRFLKLTHSHLITKIRELFNEKEQLQKLRTNLVSVLRQRLSYEYPEAACHSMTISPTKGYSPFIYWLATLQKCPRYDNKYAQSVAHELNINISHYTRAHALMIHELELRFTDTVEQIEAAIHLPQFDSYHRVFDRFLFGTTVRALLLFNFYPFEKYLVNGKPWIEYERSKNKLQKRNRSLRKFQAYAGLSFSYKQSGDKVSRKFHGNATIRSHLYMWAICTITRKSSVHHTDITQELSDRYQELRKTARGKDATTRILFKVTRMLFYELTKETRT

SEQ ID NO: 76185 - protein, 417 aa, unidentified
MNAQAWNERSYFAALDWAHAHHDLVVLDRLGQITATLHFEHTAAGWQNCAAVIRRYAPLPVAVETSQGTVVEQLFAAGASVYPINPRAAERYRERHAPSGVKDDQRDAWSMADALRMDGHGWRELAPLDPVVAELRLLCRDEIALIEQRTALVNQLQQALHEYYPAALEAFDNWTIPGPWHFVLEFPTPAELERAGRRRWQHFLHTHRLWREHTAEHRLEVFARASQFAGSAPTTAAKSLLAQSLARLLLTLEEQLGLYRRQIEAVFARHPDHDLFGSLPGSGDKLAPRLLGEIGDDRARFHCAEGLQEIAGTAPVTVKSGLSCHQHLRYACNDTLRSTVHLWADLSRKRCAWAEAYYQAHRAKGQSHACALRCLGQRWLKILWKMWQTRTRYDEALHTRNQTRHGSWVLSLTSATS

SEQ ID NO: 76186 - protein, 360 aa, unidentified
MNNNNTLYVGLDVHKESITVAYAINSEPVELMGKIGTSPTDIQNLCKRLRSKSSQVSIVYEAGPCGYGLYRRLVKSGFDCMVCAPSLIPKKPGERVKTDRRDAIRLVRSLRAGDLSAVYVPGIEDEAFRDLARAWASARDDLRHARQRLKSFLLVHGVHYVGRADWGPAHRRWLSKYSFESPWRQLAFDEHRRTIEDRQAQCERLESALKEAVTEWRLYPAVEALQAMRGIQFITAVGLISELGDLTRFEHPRQLMSWFGITPSEYSSGGSRHQGSITKAGNSYARKLLVEAAWSYRHPARISPAIQKRQENLPRPVIDRAWDAQLRLCKRYRKLQAKGKNVNITIVAVARVNRPGNPGD

SEQ ID NO: 76187 - protein, 360 aa, unidentified
MNKKMLNYVVKSKKVFVGLEDSKRTWKICVRSEKREIHTTSMEAKYSTLLSYLRNKFPDCEIIVIYEAGFKGFDLCEKLEADGIKCVVTPPSKVTQEKCSKVKTDKIDARRLATVLEIGDYKSCDVPDRERREDRQVNRHLVQIQKELTREKNRIRKFFDFHGYAEFFKPGDWKEKDYQYARTTELPDTLSTLRDLYFDLVDKLKEMRKTLHKKVMEIAKKDRYKRMVEIISSVSGVGKLTAIRLVLEWGDHLGTRFRSGAALACFSGLTQSEYSTGETVRKGRITRVGRGFIRAWLIQCSWISLRKDPVMLESFDRITKNTGSKKKAIVAIARKMVVRMWTCVNKNELYTVGLVQTYTK

SEQ ID NO: 76188 - protein, 316 aa, unidentified
METPQPFVGIDVSSQRLDVDMLPVSQRSSEPNTEDGIASLVLRLRKLNPQIVLLEATGGYEVPAAYALYEAGLPVVIMNPKALRHFAKAIGKLAKTDKLDAQVLALYAQSIQPPVRPLKDQEQLELANLMTRRRQLQGMIVMEENRRRTCTPRVRGNIELSLAHLRQLLKDLDREIHDSIRRTPLWHENSEILQSFKGIGPKVSASLIAVIPELGTLPGTKVAALAGLAPMNRDSGQYRGKRKIQGGRPAVRQALYMAALVASHHNPVIMEFYQRLRLAGKPAKVALTACMRKILVILNAMLKNRTYWNPQLPLAA

SEQ ID NO: 76189 - protein, 355 aa, unidentified
MNSEKYIGLDVHQATISIAVMDSTGKVVMESILETNGATILEFFEGLRGTLSVTFEEGTWAAWLYDLLKPHVAKLVVCNPRKNALLKDGNKSDRIDARKLAELLYLNKLSPVYHGETGLRMLRELARSYLTIVKDTARVMSRLKAVYRSWAIPCAGRDVYYRRHRDEWLGKITEAGVRRRTEQLYLQLDMLQHLRQQARRELLTESRRHPITATLRQIPSLGPIRSALAVALIQTPNRFRTKRQLWAYSGLALETRTSGEYRYVKGQLQRSKKQISIRGLNKDHNHDLKGLFKGAATTASVRPGPFQDFYERSLAKGIKPTMVRLTLARKIAAITLTLWKKGENFDADKLKSQAA

SEQ ID NO: 76190 - protein, 340 aa, unidentified
MKLYGAIDLHSTNSVLVVIDEEDKIVYQKRLPNELAVILQELSVYQWRLEGIVVESTYNWYWLVDGLMEQGYKVHLANTAAIQQYEGLKYTDDHSDARWLAHLLRLEVLPEGYIYPKAERPVRDLLRKRSQLVRQRTMNLLSIQNLMTRNTGSSMTANQIKGLDKTQVDGLLPDADLSLAVQANWSVMCSADEQVERLEQRVTERVKLRAQFSFLKTVPGIGQILALTIMLETGDIGRFATVGNYASYCRCVGSQKISNGKRKGSGNTKNGNKYLAWAFVEAANFAIRFNSKIKSFYQRKKAKTKAVVAIKAVAHKLCRACYHIMKDRVAFDVTKAFGQK

SEQ ID NO: 76191 - protein, 419 aa, unidentified
MQVCHTVCCGLDVHKKKVVACLRSSGTDGRRRSEVRTFATTTRALMALADWLVSASCTDVAMESTGIYWRPVYQILEERQLAMLLVNAAHVKKVPGRKTDVTDCEWIAELLEHGLLRGSFVPSAPLRKLRELTRTRRQLIDIHSQQANRLQKVLETANIKLGDVATDVLGTSGRAMLKALIAGERDPQKLAKMAVGRLKEKRAALADALDGHFTDHHAFLLRSLLVHVEFLEQQIGEFDQRIAEATAPMVTHIEHLDTIPGVARRSAEQIIAELGDDMRQFPTAEDAASWAGICPGNHESAGKRRRARTPKGNRWLRSTLVESARGAARKRNCYLAAQYGRLAKRRGDKKAIVAVAHSILVAAYYMLRDGVEYREVGAQHFDRIQREHLIHYYQRRLSDLGLDVMVIEGAAAEPSTLRH

SEQ ID NO: 76192 - protein, 596 aa, unidentified
MLPQPAPAPQPPRRVGVGIDTSRYGHYAAFLRDDLQPAAPELQFAESAAGYALLRQRLECIAQRHPPAHFVVRLDAAGQYAENLPHFLHRLATPPADPLAPAARLALTISCGDPQRNQNYRAAVFGPQKSDPVAARAAARFALTERPGRDRPLSLPLRTLRQVAGRLQAVVRQRTRLINQFHHLLALTFPELALQTRDLAAGWVLELVHRYPTAVCLAGASLADLLDVPYLPDAQAGPLLEHARASVASPGGAATEELVRDHVRQLRDAGARQKRLEKLLVSAYQTLPRDNHLATIPGIGDVTAAVLTAFVLDIDRFATPGQLVAYFGVLPIEASSGVDREGQARGPRRYVMSRRGNDLVRRYLWMAALSAVRYNPAVRALYARVVAKHPGRKAIAIGHAMRKLLHLAFAIWKSGRPFDPGHYPWQAPGHVETRGQDKGTEEEAGGKGPAEGDQAAGHRPDTQPARPVVTAACADSVAGAVPFGEATAIDFAHRKRQLPIARALDQLGLSDRLRGRGPQRRCACPLHRGDARGRSFSANLEENVFPCFDRQCGRKGDVIDLWAAAHGYALREAALDLVRTFGLEPTPRSGTEKRNG

SEQ ID NO: 76193 - protein, 350 aa, unidentified
MWYAGIDWADDHHDVVVIDEAGAMVASFRVAHTAAGLADLTTALAQITGEAAKDQLACIVETNHGLLIAALLDAGFPVYPVNPKTVDRRRSAAGVKTDQIDAYLLAKTGRSDLADLRRLTPDSPLVQELKALTRDQDSLIQSQTRVVNQLTACLKAYYPVALELFSKLRQPSTLAFLRAYPTPEAARGASVTDIQQTLKAAGHRRAVQTATKIRQVLQQPQLTADAVTTRTKMRLMLALIAQLQPLMDQIAAYDEELTRLFLTHADQRLFASLPGAGKRLAPRLLAEIGDDRTRYMDAASLQMLGGTAPVMFQSGAYAKAHRRYACIKPLRNAMQQFAWQSTLQEPGALS

SEQ ID NO: 76194 - protein, 374 aa, unidentified
MFVVGVDTHKTTHTFVAVDSVGQQLGELTVKAVTGGHLSALSWARQKFGADLVWGIEDCRNLSGRLERDLLDAGQHVVRVPPHLMAYTRASARARGKSDSMDALAVARAVLREPDLPVASHDEVSRELKLLVDRREDLIKHRSSTMYRLLWRVHELDPAHAPKPGSLSRAKTVNELRTWLACQPGMVAELARDELADIIALTAEIDALERRIAVRVRAVAPSLLALYGCGELTAAKIVGEAAAVSRFRSEAAFASYAGLAPIPRSSGGTRVRMKGQRSGNRQLNSALYRIAIVQISHPSPGQSYYRKRCDAQDSPVVALRRLKRRISRTVFARLRADDANRSTTPAPPLSLPELERINTQWAAALADLGVDAPC

SEQ ID NO: 76195 - protein, 408 aa, unidentified
METLHRRCAGLDVHQKEIVACRRIASGRKVKSEFARFPTTTRGLVELSAWLSEAKVTHVAMEATGIYWKPVWHVLCHDFKLILANASHIRNVPGRKSDANDATWIADLLAHGLIRASFVPPQPIQELRDLIRTRRELTREIVRHTQRIQATLEEANIKLTSVISDILGLSGRRILRAIVAGESDPHALADLRHPRLACPHEKLIAALDGRLGDHHRFLIGQHLKTIEQLEATIAEFDVRLEAALAPFREAIERLKGIPGVSDNVAQTLIAEIGADMSTFPTADHLVSWAGMCPRLDESAGRKRSKRLRKGAPWLKPVLVQAALSATKVKSSSMRARYLSLTPRLGHKKAVVAVAAAILRTAYHMLKDGTFYQDLGPDYRRPKNPQRAANNLAKRIQALGFIVQFKSAA

SEQ ID NO: 76196 - protein, 337 aa, unidentified
MELYSGLDLHSTNTYIGILDTDFKRVFKKRVSNKLDLILETLQPFKDQLKGLVVESTYNWYWLVDGLMDAGFGRVHLANPSAIKQYEGLKHSDDQHDAFFLAQLLILGILPQGYIYPKEDRPVRDLARKRMLLVKHKTAHILSLQSLIARCCGQRMSKHQIRKLKIADLRQLLKEEYLLLSAQANLNIIDFLVQQIKALEKAIKKKVKLDKGFEQLMTVPGIGFILAMTIMLEVGDISRFAKVGNFASYCRCVSSQRLSDGKPKGSGNRKNGNRYLSWAFVEAAQLGRRYSQRFGRYYDRKAAQTNTIVATKALSNKLARICYYIMRDQVSFKEELF

SEQ ID NO: 76197 - protein, 376 aa, unidentified
MTRVIYTGMDVHKDTYSLCSYDAQDNVMFSETTVKAETASVLSYIKSIEKRYSNDDVMIVCGYEAGPTGFSLCRQLQKKNISCVVMAPTSLPKAPDEKKRKTDKGDARSLALHLAHKTYKAVHVLSPEIETIKELTRTRATALKAQKRAKQNLLSFLLRKGMVYPYGGRAKYWTQKFYAWLKTLEFANDIERYSFEEYLSEVNHQMSRVSRLDEKIGEIAEDPLIRDDVKKLCCFSGISTLTAVSLVSEIGDFNRFEKARYFASYLGLCPGIHSSGLSSQTLGITKAGNKNLRCLLIEAAQAMSRSQICGKKSLRLLARQKNMNPLVVAYADRATERIKRRRSSMIFRGVNCNKATTAAAREMACFIWGLMTNNIA

SEQ ID NO: 76198 - protein, 341 aa, unidentified
MQITTIGLDIAKNVFQVHSIDAAEKVVVRKQLRRGQVMKFFAALPPCLIGMEACATAHHWARELTKLGHEVRLMPAKDVKAYVKRNKNDAADAEAICEAVRRPTMRFVGAKSAEQQGRLMQHRTRDLLMRQRTQVINALRGHLAELGIVAAQGREGLKQLLTIIADEKDARLPIDARASLIVLAAQLQALHTMIGSIEKRLTVQHRANESSKRLESVPGIGIIGASAIAATVTDPNAFRSGRDFAAWIGLVPRQDSTGGKQKLGPISKQGDRYLRRILVVGAHSVLRRAKQNPEKYPWLTKLLARRPFKVVAIALANKMARVAWALLARGGTYRVPALAAA

SEQ ID NO: 76199 - protein, 353 aa, unidentified
MKCDKYMGMDVHQATTVVVVLDADGKVILETIVATETGAIIRLVQSLNGPLHVTFEETTQAAWLYEVVRTFVAEVIVCDPRRNKLLSEGSKADKPDARRLADLLRTGMLRTVYHGHEGTRKLKELVRGYETLSIDTQRVMVRIKAIYRGRGIRTPGRGVYQPQQREQWLQRLSEPGVRQRVGWLYEQLDQLRPLRRQAKQAMLAESRKHRAIRLLQTIPQLGAIRSALILATVDTPHRFRTRQQLWSYSGLAVVTHMSSEYEIKEGRVVRSRKPMATRGLNRNCNRRLKQVFIGAATGGSQTEPYCSYLQGLEKKGIRKEMARLTLARKIAAVALRIWKKGETFDPKKLNWTT

SEQ ID NO: 76200 - protein, 372 aa, unidentified
MTSIIYVGMDVHTTNYTLCCYSMEDDRFFAEVQVEPDAKNILKNLARIEKQQSRDCRIVCGYEAGCLGYSLYHQLHAHGIDCVILAPTTMMTKPGKRIKTDRRDARLISKCLAFHTYSPVYIPTEVDDAVKEYIRMRDDANSALARVKQQIIAFCIRHGKIHDGKSYWTNKHLEWLSSLDLGNKILSEVLQEYLIRYYQLREQVDMYDMRINELAQAEPYRQKVEKLGCFRGIAAYTALSFCVEVGDFRRFATAQQFASYLGLVPGECSSGDKQQYTGITKAGNSHLRKLLVETAQVFGRSATKSGKSVALKERQAKCDSLTVAYADKANARLKKKYFKIAMRSKVNIAKTAVAREMACFIWGMMTDNISCA

SEQ ID NO: 76201 - protein, 368 aa, unidentified
MDAAYCTTIGADVSDRTTKICVMSKADGKPKIVQETTVPTTPDGFRAFLERQDKAAALVFETGTHCRWIDKVASGLGFKTFVANPCRLRMITESTTKNDKNDARTLARMALADIELLHPVKLRGDEHQKMVNLHEIRDQLVKERTAEVLQIRAIAKSMGFRLPDCSAECFHNVAKRDLPKELSDIVWPLMKELKSKAVTIKTVEKQMRRLAKSDTFRVQVERLMEIPSVGFITATCFVAVTGGDMDRFDRSRDIGPWLGVTPKQDQSGDIDRQCHITKAGSKMLRWKLTECAQRVLQKNSADIDLKVKGLRIRARGGKIAKGKSITAVARGLAVLMVAMLKKPDEPYVPLSEDKARELEQIRAAMTSA

SEQ ID NO: 76202 - protein, 346 aa, unidentified
MVHVGLDLSRTRLDVHVMDEAGTPLAVTTAVPDRDGLAVLAERIGGFGAPVYAAIESMNGARFVHDQLELAGWQVEIADAQKVKGLAPLACKTDKIDSWVLAELSRRDLVPAIWLPTPAVRAERERARWRLHLVRHRSALKNRIHATLLAFGHPCPVSDLFGVGGRDLLARLQLPEPWAADTTAALYLIDELDHQVIECERALRQLGAEHRYVPLLMTTPGIGWVLGYTIAAEIGDISRFPSPTKLAGYTGLCPRVYQSGGKDHRGPLAKNGPKYLRWALIEAATHAARHPVYAERYRRTKTRLGRQRGPKIAQVDLARRLAEAIWHMLSTNRPFAPAGAAQPLAS

SEQ ID NO: 76203 - protein, 358 aa, unidentified
MKYIGCDFHPSFQVIAMADQETGDWVERKLLHTEEAKKFYEELKGPVVVGVEASGNTHWFESWLARCGHELWIGDAAAIARQEGRKQKHDRRAAQLILQLMLENRFPKIWVPTVGERDLRQLLIHRQHLVRMRTRIKNQLQHIALNQGWQKKRKLWSEAGLELLRRLELEPWTGQRRDTLLTMLAELEDKIRPLDLAVAQEAQAREAARRLATHPGVGPVISLATVLTLGDVKRFADSRSWVSYLGLNPSEQSSGQRRRLGSISKQGNPFLRYLLVEGAATAVRGDKDLARMYARLKAKKHHGVAKVAVARKLAVRLYWMARTEKSYPEVVRTQGSQSHSVAEVMAERLNRPPASHQK

SEQ ID NO: 76204 - protein, 308 aa, unidentified
MPRNCIGVDVAKDWIDVFHPVDGAARLASDPGTLRAFARRVARERRLVVFEASGGYDRPLAEALRNVGAGYCRVNPGQARHFARALGVLGKTDRVDARLLAEMGARLELAATPSPAPVQRALKAQAARRRQLVEMRKQERTRLRQAAGRAERRSLERHLRWLDGEITRIEAALDETLAADAPAARVLARLCTAPGVGRVLATTLVAELPELGARDRRRIAAMAGIAPVARDSGKRSPARSIGGGRPVVRSALYLAALSASRFDPGLASFRNRLERRGRTPKQAIIAVARKLLTILNAMIRDGTDCRPA

SEQ ID NO: 76205 - protein, 309 aa, unidentified
MEKVYVGIDISKDSLDMAVHASDKQWRFTNDTAGIAKLCRMLVKLDPTLVVFEATGGYEMPLYLSLDKANLPAAPVNPRQVRDFARSTGKLAKTDTLDARVIAHFGFAIEPTPHPVPDTHGLKMAQARRIQLLEMITAETNRLRGKPKALRRRIEAHIAWLQKELADTDYEIKEMIREDPIWRDKDNLLQSTPGVGPTLSATLIAQLPELGTLNRRKIAALVGVAPLNRDSGIRRGRRAIWGGRGHVRAVLYMATLVASRFNPAIRTFYSRLCSAGKTKKVALTACMRKLLTILNSMLKHRVPWSYSPC

SEQ ID NO: 76206 - protein, 352 aa, unidentified
MNNIKYVGMDVHKVITVIVVLNALGQMESHSKVKTKAENISDFFRGLSGKVEVVFEEGTHSAWLHKLIKPLVASVTVCDPRHNKLIEDGNKSDDDDAETLAQLLRIGAVKAVYKGDDEQQELKEFCRAYENLVSDATRAKNRLQAIYRGRGLDPGRAIYRADQRQEWLAKLKDEAMRFRAESLLDQLAALQELRKQAKQRFVLRVRQHPDYRILSGLPGFGPVHVGQLIATVGTPHRFRTKRQFWPYCGLAVVTRSSADYTITEGKIVKSQKKVSTRGLNRNHNPRLKHVFKSAALTSLRYEECKAYYQRLVEDGTRPELARVSVARKLAAAALALWQRKEEYDPKKFFATV

SEQ ID NO: 76207 - protein, 343 aa, unidentified
MSTYYYIGLDIHKRTVSYCIKAIDGALIGQGKIEADRKSLGEWVQGLPGPWVGAMEATIFTGWVYDFLKPYAVDLKVAHPEMLKAITAAKKKNDRADAEKIADLLRVNLLPECHMLSEEIRELRRVLRYRNHIVRTAVKMQNKISGLLMEVGVSYSKRRIHGRKYFHEILDRVEEIPPSVKELLKLSRSGYEMFRTFQKRLVETLRTNTLIHDRVQRLMTIPGVGEITALTWVLEIGDPGRFASIRQAVSYCGLCSAQRESAGKEQRGPISKKRNKHLQTMLIEAAKLAPHWSEQLAIVHERELKKGNRNRATLAVARRLVAYMLAVDKKQADFKLPVEFQAA

SEQ ID NO: 76208 - protein, 357 aa, unidentified
MGKSIQKLSSVTRLGLDLAKRVFQVHAVDANGEMVVARKLARGRLVGFFSQLPRCVVAMEACSSAHHWGRQLLALGFEVRLIPPAHVKPYVRRNKNDAVDAAAICEAAGRPSQRFVPVRSIENQAELMRHRARELLAGQRTAALNALRGHLAEIGVIAPQGVQHAYDLKRLAVDGFDEYGEVVVPDCVRVALRPLVSQIDALDAAIGAIDNEIAMSVKADETAKRLMTVPGVGPVTASAIVATIQDIGDFASGREFAAFLGLTPRQSSTGGKPRLGRVTKMGDRYLRKLLVVGACSTLSHRKGHNDALRRWASGMLERKTVRYKFKLTAVALANKVARIVFVLMTRGGQYDDRPVAA

SEQ ID NO: 76209 - protein, 381 aa, unidentified
MKPTKKLTPTSHQQTEATAEVIKLGIDIHKTKYVVIRQIDNQAAQSPQSFSPDEFIVWVQRQRLLAKRVVSCYEAGCFGFVLHRKLAEVGVDNFVVRPRNWDEYGSSVKTDARDARELCGHLDRYLAGNERALCVVRVPTEEQEQARSLSRQRETLAKERKRLQNVGTSSGLYHGVDVPANWWKPKVFTKLCTGIPEFMKLILDPFQQVLEIIDKQLRETTAREERKANRKIPVGLGALTTSILDQEFVDYTRFSNRGQVSSFTGLCPGESSSANKRQQGSINKHGNPRIRHMLLEAVWRMIQFQPDYKPVLHWKARMANEPFGAAKKKKMAVAIARQFAVDWWRIQTGRITPEDVGLRVDFPSAYSTRALREGRVSKVYA

SEQ ID NO: 76210 - protein, 339 aa, unidentified
MQVTTVGLDLAKNVFQVHGITDNGEVAFNRALRRAQVLAFFERLDPCLIGIEACSTSHHWARELIKLGHKVKLIPPVYVKPYVKRGKSDAADAAAICEAVTRPTMRFVEVKTPDQQAILALHRTRDLVVRQRTQTINMLRGQLAEFGVVFPKGVGHATQFAKRMLDGECPDLPEVAGGVVTELCEQLLFLHGKIAGYSREMTRIAKREERVALLQTIPGVGPITASAIVATVGTGRQFGNGREFAAWLGLTPLNRSSGGKERLGRISKMGDQYIRRLLVIGMMSRMRQIIQNPDRYERWFADILARKPGKVAAVAMANKTARMVWAVLTRNEPFRVRTI

SEQ ID NO: 76211 - protein, 343 aa, unidentified
MDHFAGLDVSVKDTSICIVDDTGRITREVKVASEPGALLAVLMNASHRFKRIGLEAGPLSQWLFSALAEAGLPVICVETRHMRAVLKAQINKTDRNDARGIAQMMRVGLYRPVHVKTLRSQKLRMLLTHRKLLQSKAIAVENDLRATLRNFGLKVGMVGTVRFEARIRELVENVADLVVLVEPLLVVRRVVREQIGILHRRLLAIVRDDEVCRRLMTVPGVGPVVALTYRATVDVPARFRKSKSVGAVFGLTCSRDQSGERDRPGAISRCGDEMMRAMLYEAAQAMLLRSAKWSWLKAWAMQIARRRGMKRAIVALARRLAVIMHRIWTDGTEFRWTREAAAA

SEQ ID NO: 76212 - protein, 335 aa, unidentified
MLHVGLDAHYRTSTVCILDRHGRKIKHETIRGGREKLLARLDAIGSPFEICFEASCGYGPLYDELARRARRVVMAHPGQLRLIFRSKRKNDRVDAEKIAKLLYLDEVPAAHVPSEDVRQWRELIEFRRRLVDRQTACKNQIRALIRGQGWQAPRSLWSRKGLAWLAGRDWPTPLAAVRCDVLLEDYRSNREKIGRVTRMLDRIGGRHPGVLLLRTIPGVGARTAETIMAYIDDPRRFARPSQAAAYFGLVPCQDASAGVNRLGHITKQGPATARKYLVQAAWQAVRRSPTVRRRFERVLDGRRERRKIALVAVAQWLVRCMQAMLCTGEVWRETA

SEQ ID NO: 76213 - protein, 343 aa, unidentified
MNGRAKRKAMNHGILYVGVDVHEKESQLAVLEKEGSLVMEERIPTKELGKFISSLPGEKRVAIESVGFIHPIYEKLSSLKGCTVSVANPSRLRLISQSGTKNDRNDAKVLGDLLRTNYLPLAHMRDEETREKLFVVNDRVTYGLRRGELRGTMRWLLKRRGIEVDSPFSDEGRRKLKGLRLQEIDIRLDELQLVESTIEKLDHQIVDIVSKDARAKLLDTLPGVAPYTALFLACVLDDIDRFPDSKHACAYLGLVPWLDESADVTHLGHITKRGDKWLRRNLVECARAAVRKDPHLSEFYTRLKHKRGERKALIAVARKLVSYAYWMLKRNKTYEELSPWRLD

SEQ ID NO: 76214 - protein, 388 aa, unidentified
MQVIADRPEAPNAIRSDLGAIFVSLELSRSTWLITSLSPGAGEKMSKHSVPAGDIGVLLARFSEFKQKTFARTGKSFPIIVIQEAGLDGFWIHRVLQKEGIESHVVDPASIATSRRRRRAKTDRIDGEALLRALLAYKRGEPRVCAMVKAPTPEEEDRRRLCRERKALIAERVRHVNRIKGLLFCQGVSGYEPLRRNRRQHLGELKTGDGRVLPDHLKAQISRELDRLELLLEQIKAVEAERNTLFDAATTPTPTPVAMLLDLKGIGPEFAAILWMEAFFRSFANRRQVAAYAGLAPTPWQSGSVDREQGVSKAGNPRLRTTLIQLAWLWLRHQPQSALALWFKERVTRNGGRFKKTAIVALARKLLVALWKYVTAGVVIEGAVMKSA

SEQ ID NO: 76215 - protein, 434 aa, unidentified
MSTAMSGLSAGSAAVVRPSSSSLSSSSSSSSSSSSSSSSSSSSNRMYYVGLDVHARQTTLEMLNDRGQTVKRQTIRGGLDKVVEEVEKLPGPLSIAYEASCGYGYLHDRLAPLAKRVVVGHPAQMRLIFKSKRKNDRIDGGKIAKLLYLDVMPQVHVPGVDVRQWRGLIEFRAATLNRRVALKNQVRALLRGLGLAASVPRGLWSKKGIVWLKDLSGLGETEALRRDMLIDELSEVNRRIKLLEQALAKIAAAHPAVRLLMTIPGVGIRTAEAVVAYVDDVNRFGKMTQLGTYFGLVPCQDSSAAVNRLGHITKEGPATVRKLLCEAAWQARRRSRRVSGWFERITGGDTDRRKIAAVAVARKLVVVMGHMLRSGEAWREGPASTSSSTNTSMRTGCARRLRGSPPEDTVTGNDRRSSVAGAVAGPTVNGERRR

SEQ ID NO: 76216 - protein, 339 aa, unidentified
MKPKLYCGIDLHSNNHYVSIIDQDDKRLKEKRLSNDLSKTLSLLEPYQNDLQGIAIESTFNWYWLVDGLMEAGFPVSLVNTSAVKQYEGLKHTDDKYDVFWLAHLMRLGILPTGYIYPKAQRGLWDLLRKRMQLVQCRTSHVISAQAQVWHSTGKRLKSQDIKKCPDDLLSNIADSNLFLSIQSNLNVIQLINQQIETIEETILPQCKKLPGHKQLKTVFGIGDILSQTITLETGDIHRFFKVGNYTSYCRCVDSKKTSNGKKKGAGNKKSGNKYLAWAFMEAANFAIRFYDPANQFYQRKLSKRNVIVARKALAHKLARASYYVMRDNIPFKSEQLFR

SEQ ID NO: 76217 - protein, 342 aa, unidentified
MEHTTIAVDLAKSVFQVAVSHRPGHLDEERRLSRDRFLAFFAQRPPATIVLEACGSAHYGARQLQPLGHAGRLLPAHDVRPYVRRNATDRTDAKGLLEANRNEEIHPVPVKSIEHQAIASLHRLRSTWVATRTARVNTLRGLRREFGIFIPTGSRRVVPRVRALHEDPAVPSLLHATLAAACDEIEMLEVNRRAVERQLTALADDMPDVQLLQTIPGVGLITATALVALVTDIRRFPSGRHVASFLGLTPREDSSALRRRLGAISKQGDVYVRMLLTHGARSLVWHAKAAGRPTSLQQWAMQTELRRGRNVAAVAMANKLARIVWAVWVQQRPFAADHRLGS

SEQ ID NO: 76218 - protein, 343 aa, unidentified
MTKITTVGLDLAKSVFQVHAENHDGSPVVRRKLRRAQVVPFFAALPPCLIGMEACASAHHWARELQALGHEVRLIPPQYVKPFVKTNKNDAVDAEAICEALMRPTMRFAAVKTAEQQSVLMLHRARELLVRQRTMLINALRGHCGELGVVAAQGAPKVADLIEVIEDPEDRRVPTLAREALGSLIGQLRMVQAQISGLEKKLTVWHRANEASRRLEAIPGVGVITATALVATIGDASQFRSGRQLAAWLGLVPRQHSSGGKERLGRISKRGDGYLRRLLVHGARADLRWSRHRKAQRSLWQESLLERRPTNVVLVAMANKTARVVWAMLSRGEAFRTEASTTA

SEQ ID NO: 76219 - protein, 281 aa, unidentified
MKIVGCDFHPAWQQVAVFDPETGEISELKLLHGDGEAERFYGDLESPALIGIEACGNSQWFIELAERLGHVVWIGDAAQIRASYVRRQKTDRRDAGHILKLLMESRFPRLWTPNSEQRDLRQLLIHRHKLVEIRTRIKNGLQHLALNRGVQKKSALWSVRGRAYLETLPLAGWTARRREDLLSLLGELDRHVDELDQAVKQAACEHPQARLLMTQPGVGPITSLAFVLTIGDVSRFRHSNQVASYLGLSPREHSSGGKQRLGAITKQGNRFMRQLLVESAG

SEQ ID NO: 76220 - protein, 342 aa, unidentified
MNITTIGIDLAKSVFQVHGTDERGKAVVSKVLRRSQMMQFFTQLPPCLIGMEACGGAHFWARKLTVLGHTVKLMAPQFVKPYVKTNKNDARDAEAICAAVGRANMRFVAIKTPEQQALLALHRARQGFVRARTAQGNQIRGLLAELGLVMGKGRSQLERHIPDVLEDAENGLSGMSRELFARLLEHFRHLDAQVQALEAQIKAWHREDAASRRLEAVPGIGPLTASALVASIGDARNFKNGRQLSAWLGLVPRQHSSGGKPVLLGISKRGDVYLRTLLIHGARSALRQSKPSEHWGAALAERCHKNLAAVALANKNARIVWALLAHGRTFQADYRAVRNQAA

SEQ ID NO: 76221 - protein, 418 aa, unidentified
MNKDWTQHLYFAALDWASDHHDIIVLDRHGAVQVEFRIAHSAEGWAEFTQKMVPYVGAPITLETSCGPAVDQLLQRNWDIYPVAPTAAARYRERKVPSGTKTDRHDTWALADALRTDGHAWRPLRPQDEATSALRALCRDEIALIEQRTALVNQLIAALREYYPAALKVFEDWTAPYAWALVLTFPTPGQLQGAGKRRWEKFLHTHRLWRPQTVEARLKIFANAQALPASSVVVRTKSLLAVSIAKVLMTLQAQLDEYREQITKAFKDHPDHDIFGSLPGAKAVLGPRLLAELGSIREVYEDPDALMCMAGVSPVRYQSGQIDKCRLRRACNKVLRATVHLWVNGSRLSCAWAQAYYQAKRDQGFSHAAALRCLGKRWLKILWRLWINREAYDEAKYLARLKNRGSFTWSKLNPQPTL

SEQ ID NO: 76222 - protein, 307 aa, unidentified
MFVGIDIAKDRLDVHVRPAGESFAVTRDGEGVEELAKRLTAMTPALVVLEATGGFETIVAAGLAAAGLPVAVVNPRQIRDFARATARLAKTDTLDAAVIAHFAEAVNPPVRPLADPQQRLLGELMARRRQLIEMMVAEGNRRRLLTARRTLKSVDRVLATLKAQLEEIDHDIDIAVRGTPAWREAEDLLVSVPGIGPKIARTLLAEMPELGRLDRRRIAALTGVAPFNRDSGTLRGRRAITGGRSVVRSALYMSVLVSIRRNLPLALTYHRLRASGKPAKVAIVACMRKLVTILNAILRDKKPWVTA

SEQ ID NO: 76223 - protein, 322 aa, unidentified
MAKHTTICAGIDTGKRKLDVAIEGRRELLQVDNTAEGHKVLLAWLRQRRVKRVGIEASGGYEQPVVAELRRKRFVVVVFQPAQVRAYAKFHLQRAKNDKIDAALIAACTAAVRKIHAAPDPRLLPFAEQLTMIDQINEDTARLKNRIESCRNARINKLWQEDIARLEMREKAELKTLVASIRKHPDLAKRLELINSVDGIGLPTAVAILVRLPEIGRITREQAVALAGLAPYDDDSGEQVGVRHIEGGRKRLRRALYTASLAASFRWNRQLIQLYQRLTAAGKEHKRALVACARKMLIFANTVVARGTPWCDEPPVGSLSVS

SEQ ID NO: 76224 - protein, 335 aa, unidentified
MENQSSDYCVQTSVIVSVELSKRTWLVASLTPGAAKISLRTIPAGDSAALLGHLRNLESKTGERIGKPAAIRLCFEIGYDGFWLARLLRANGIDTYVLDPASFLVSRRGKRVKTDRIDAEAMIGILKAYLAGDKSVCRVVDVPTPDEEDARRVMRERGDLVHERTRIISRIRGLLALQGIQSVKAISGGDWSKQLDDMRTGDGRLLPPNLRRQIERCFGRLELLNEQIKSIERDRADVVLDEASTFPCREKAIRLEQLKGIGANSAVMLVAEVFCRKFESRRHVAAFLGLAPAPYASGDVSRDQGISKAGNHGTRVLMVELAWCWLRLCCKNREA

SEQ ID NO: 76225 - protein, 369 aa, unidentified
MSIDKYVGLDVHKDTTVIAVADGGRSGEVRLFGTVSSDLRALEKVLKKIGGEDITLHVVYEAGPTGYVVYRRLKRLRIDCIVVAPSRIPQANGTRQKNDRRDATMLARLHRAGELTPIHVPEDVDEAIRDLTRARADAMQDLCRAKHRIKSFLLRQGMHYPGKASWSAEHQRYLRALQFPIPSLRAVLEEYLFAYDQIVQRVQRLEELLEVHVPQWRMYPAVQALMCMRGFRLTAAAMLVAEMGDIRRFAHPRHVMAFLGLVPKQDSSGQTTRMGSITKAGNAHARWILVEVVQHALMTPKVSRQLGIRQEGQPAIYRELSWKAQTRLHKRGWHLLRRGVMKAKVNIAMARELVGFIWDLLCHVPEPTP

SEQ ID NO: 76226 - protein, 401 aa, unidentified
MKYVLALDVAKGKSMFMLSSDVGEILLEPTEYTHNKSDFEKIDSNINKLNIKDNLTIIMEATSIYHKAPERFFKENNYHVIVFNPLIGKEITNTIRKTKTDKQDCIKLTNLFWKGSIPDRKYTEDEIYTKLNELSRQYYHLDEGLTRHKNRYKELLHLCFPEFELCFKDGKIYDLTALNFIKEFPHAYIIKGKRVNALAYNMANTNNRHLNYYKRKANVIKEYAINSYPGVSQNSKDVDNLKQLADVVVDLTKRKDEVKNQVIQLAKETKNYECINSLFGIGELSASLIIAELKDITRFNNIKQINASCGLDPTIIQSGKSINYHGPISKRGNRYARKLLFNCSRNIITLSAKCNKENSIYVYYLKKKQEGKHFYACLTACSTKLIRIIYALCMNNSTKQN

SEQ ID NO: 76227 - protein, 407 aa, unidentified
MDVIYPRCAGLDVHKQTVVACVRITSDVPLLQEVRTFETTTSGLLKLCDWLQSFGVEHVAMEATGVYWKPVWHVLEGHFELVLANAAHVKNVPGRKTDVNDATWLADLLAHGLIRASFVPPVGVQELRSLTRTRKQFVRERSAHVQRIDKLLEDANLKLGVVLSDILGKSGRAVLQAIIDGEDDPQRLATHVSVRVKASRAEVLEALRGRVRAHHRFMLKLHRGHIDALDQAIAEIEREVGRALQPFRQAAKLLSTMPGLSDTSANVIVAEIGIDMSRFATPGHLLSWACMCPRNDESAGKRRSTRLRRGGKWLKTTMVQAAWAAIKVKGSYLQAQFHRLRARRGAKKAIIGVAASMLTAAWHMLRDGTEWQDLGAAHFDRADAKKTAARLIRRLQQIGYTVQATPA

SEQ ID NO: 76228 - protein, 384 aa, unidentified
MKKRSTEGTRKMREAKAVGGIKGAVSGGAGTARSLTIGLDLGDRMSQICMLDSMGEIVEETRVATTKSSLVRIFDVDRLGKCRIAMEVGTHSPWVSRLLREMGHEVLVANSRKLRFIYQNRGKTDRVDAESLARVARMDPALLSPVKHRDEEVAQDLAVLRARDLLVRTRVKLIGHARGAVKSAGHRLKASSTKSFTAETESMLPEELRETLGAVYTAIDALSEQIRALNQRVREMATKKYPETGLLRQVAGVGYILSLAYVLTLETPDRFEKSRMVGPYLGMVPARRQSGDSDPQLRITKEGDGFMRCLLVQGAQYILGPFGPDCDLRRFGLALEGRGGKYARKRAVIAVARKLAVLLHKLWRSGEVYEANRRLALLAEPAKA

SEQ ID NO: 76229 - protein, 337 aa, unidentified
MKTTIEPINPPSFFLGIDVGKAELFCHIIGPEETCSECFENSGAGIRLLTKWLAKNAPCKQLQVCLEQTGHYGDAVVAALYQKHPDGIHLVNPHRIKAFGMQKLRRNKSDTADAKLIARFLKSEHLELVPWHPRSHDQQRITELSRYADSLTQDTARLKTKLEAQPEKSITVSIKRRIKMQEKELADTRAAISKLIKANSELLAKSKLLKSIPGLGEVSTQIVIAELPNLGEFTDARQLAAWAGLTPQHYESGTSGRTRTPITKIGSVHLRRGLFMPAMTARVFNPLLKTFADRLLANGKKPKQIIIAVMRKLLHQIYGILKSGVPYNPEKRGFAGS

SEQ ID NO: 76230 - protein, 333 aa, unidentified
MDNVLYVGIDLHERESQLAIFEKDGALVEERRLATGELASFLSSLPGEKRVAIESVGFVYPIYDKLSSLQGCTVTVANVNRLQLISRSSTKHDSADARILGDLLRTNYLPVAHMKDEETREKLAVVQERVNYGVKRAELRGSVRWLLKRRGIDVEKPFGPEGRARLRELHLQEVDNRVAELDLVESFVERLDAQIADIASRDHRARLLDTLPGLGAYTALYLACALDDVGRFPDSKHACAYLGLVPWLDESADTRHLGHITKKGDKWLRRNLVECAAVAVRKDPHLNEFYTRLRHKRGERRARIAVARKLVSYAYWMIKRNKTYEELSPWTTT

SEQ ID NO: 76231 - protein, 330 aa, unidentified
MKEYTIIFGVDVSKKTLDISYLCGAVTEHKKFSNTVTGMKDLRQWITAYNCTLQNTLFCMETTGIYCFTLTKFLYDNKYDTWVEHATQIKKSMALARGKNDKIDSKRIAQYAAKNLDRLTLFVPASTTLEKIKHLAKTRDRIIDTQSRLTVPVAEFEDVGNKEMAKLLGKSIKKTLSALEADLKNIEKQLLDLIMKDENLCRKYASATSVIGIGFVTAVNLIVHTQGFTQMTDVRKLACYCGVAPFEYSSGTSIKGKTKVHFMANKKLKSNLHMASLSAVKLDVDLKKYYERKVEEGKNKMSVLNAVRNKLLARVLACVNNDKLYVKRVA

SEQ ID NO: 76232 - protein, 366 aa, unidentified
MDTIYIGVDFHARQQTICYLKIETGELVISELKHQDKEQVRAFYAQFQGPVIIGLEASGYSPWFETMLEQLGCEVWLGDATEIRRRARWRQKNDRRDAELIWDLMVHNEFPLLHRPTLQSREILRMLRYRQKLIKFRTMSKNSLQAIALQAGLAKGSRLFTTAGQQELRTTEMSPVLQWQRDHWFALMQPLNQQLLETMVWFKAASKGDAAITRLRTHPGIGLLTSLCILHTLQPVSRFRNQRKVVAYAGFDPMVRSSAERAIYLGISKAGSRMLRYLLVEAVHTAIRYDEDLKRFYKRVAERRGRPKAKVAAARKLLIRAYIMLRDEIDYAEFRRRAVAARLARRGQGPTKVPEVLIGQSASPGA

SEQ ID NO: 76233 - protein, 361 aa, unidentified
MVVVGTDAHKYSHTFVATDEVGRQLGEKTVKATTAGHATAIMWAREQFGLELIWGIEDCRNMSARLERDLLAAGQQVVRVPTKLMAQTRKSARSRGKSDPIDALAVARAVLRETDLPLATHDETSRELKLLTDRRDVLVAQRTSAINRLRWLVHELDPERAPAARSLDAAKHQQALRTWLDTQPGLVAELARAELTDIIRLTGEINTLAQRISARVHQVAPALLEIPGCAELTAAKIVGEAAGVTRFKSEAAFACHAAVAPIPVWSGNTAGQMRLSRSGNRQLNAALHRIALTQIRMTDSRGQAYYQRLQDAGKTKRAALRCLKRRLARTVFQALRTVHQPSSEHTQPAAACHRSYCSKSG

SEQ ID NO: 76234 - protein, 405 aa, unidentified
MNKRYAIYCGIDVGKSAHHAIALTADGRRILSRDLPQDETMLRALFSELAAHGSVLMVVDQPRNIGALPIAVARDSGLDVAYLPGLRMRRIAALYPGQAKTDARDAFIIADAARTLPDTLLPVTQDDDIVEGLRMLAGFDADLATEENRITSRIRSVLLSVHPALERAIGKHLYRPVALTLLAEFGGPIGFAAATPASLRRVAKRSAPRIGDTIAESIIAALAEQTVIVPGAEKTNFVLKTLARQLSEVRRARAELEEQFESELNKHPAGPILTSMPGVGARIAATILVEIVDVDRFDSAGNLAAYAGVAPRTHRSGTSIRGEHRQRGGNTRLKRALYLSAFASLREPPSREYYDRKRAEGKDHRSALICLARRRCTVLFTMLKTGSVYERREGRPGRAAAVAAA

SEQ ID NO: 76235 - protein, 427 aa, unidentified
MGAMSESEVQELQFAALVGIDWADQKHAWSLQAADTSERENGEVEHTPEAIEAWVGQLCRRFDNRPIAVAVEQVKGALVFMLSKYGSLHLFPVPPTMSAKMREALYPSGSKDDPRDADLLLELLLQHRDKLRRLSPDSEATRRVQNLVDERRNLVDEKTAQINRLTHPLKIYFPQMLEWFEQLDTELVCALLERWPTLEELQKVPPERLRTFFHKQRCRYPELIERRLVGIRQAIPAIRDRAVIEAKSAVVKVSAQVIRSLVRGIADLDSKIEEAAAAHPDFFIFESLPGAGAVLAPRLLAAFGSQRARYASAEEVQTYSGIAPVMKRSGKKKWVHFRWACPKFVRQSFHEWAGHSIAHSQWARSYYQQQRERGKGHHAAVRGLAFKWIRIVFRCWKDRAAYDESRYLMTLAKRNSPLTAVPGGTML

SEQ ID NO: 76236 - protein, 315 aa, unidentified
MKRSTSFVNVGIDVGRDRLDVFIHERQLALSYSNDDAGIRAVLRRLAYYRLARIVLEATGRREQALVSAALERQMPVIVVNPIMVRRFAGALGMMAKTDAIDARVIAHFAATIQPCVRAAPDPKARELKDLVVRRRQLLDMRTMEKNRLQIMPKALTGRIRRHINALADDVHELDSLIDSLVGKLAHWRERRELLLSMPGVGAVVAHTLIAELPELGKLNNKQVAALTGVAPFNRDSGLLRGKRRIRGGRRTVRTVLYLGAMAAVRFNPVIKQFYARLVAAGKNKKLALTACVRKMVVMLNAMLRDGRKWNPSTV

SEQ ID NO: 76237 - protein, 421 aa, unidentified
MRGLRAKRVRTIKEGTLIATIDIGMACNTGYCATTDGRDIKSFKFNNTREGFDTFWDMIVINKNRFVCGEVIVGYESTGPYAEPLVHYLRSKPVKIVQVNPMHTKRMKEVNDNSPLKTDDKDPWVIADIIRLGHALTVVVPEGDAAYLRRLNNARERHIRERTALLNQLQQLVFLIFPEFKTVIKDIKIKTARYILRSYTTPQSMGVLNKETLGEEMRKKSMGKFGIKDAEALIGLAQGTVGIKEGITGLDLDVKHILIQLETVESFITEIESKMEGTLSEISCSIKLLSIKGLGVVSVAGIIGEVGDFMKFGTQSEIMKLAGLDLYEISSGKRKGERRISKRGRSLLRKILYYAAIQTIRKNGIMCEYYVNLTSRGMKRIMALVAIARKLLRIIYAIVRDDSEYKADYGLLKRKVIKKAA

SEQ ID NO: 76238 - protein, 430 aa, unidentified
MKSNTQNAKIEAITEKTLVLGIDVGSETHYARAFDYRGIEYSKKPFKFSNTEAGFVTFKEWILDIKERHEKDKVVLGMEPTGHYWFNLGKFLQDNEMKPVLVNPHHVKKSKELDDNNPTKNDRKDPKVIAGLVREGRYMIPYLPDGVYADLRTASNIRFQLQAELTRIQNRISRWFNIYFPEYKTVYGKPDAKSGMLILKAAPLPEDILTLGIDGVNQIWRDAKLRAVGKARAKTLIEAAEHSVGSKEGAVSARMEIRMLLEDYESRNIRLQEVMGLIEGLVNQIPMAEKLLEIKGVGIKTVSGFLAEVGDIRRFNDPKELQKLAGLALVENSSGKHKGKTTISRRGRKRLRYLLFEVAMSLVAKNPEFRELHNYYTTRRLNPLKKMQSLMAIAAKLLRVFYAILTKGVGYDPKKMVNDIRRPAAYAQAA

SEQ ID NO: 76239 - protein, 340 aa, unidentified
MSDITTIGLDLAKNIFQVHAVDATGAVVVRRQLRRREVLRYFERLPHCLIGIEACATAHYWGRELRAMGHEVRLIPPAYVKPYVKRNKNDAADAEAICEAVVRPSMRFVGIKTVEQQAILSVHRARDLLVRQRTMLVNSLRGLMAEFGVAEAQGRMGAGRLIEIVGDETDQRVPALARRALASLVAQLHGVGREIRALDREISAWHRQSDVSRRLATIPGIGPITATALVASVPDPSVFTSARQFSAWLGLVPRQYSTGGKPRLGGISKRGDGYLRRLLMTGATAALQHSKVIKAQPWVLGLLERRPRKLVAVALANKMARIAWAVMSRETRYQPVPTRS

SEQ ID NO: 76240 - protein, 324 aa, unidentified
MLFIGIDISKLTFDMAYHVNQRYNHKQFTNNEKGFDLFIKYIDKHQSDVLVCLEATGIYSFSLAQYLSQKSIKVMVVNPIVTHAFFKLEMNRNKTDKADAQLIARYCEHIANKGDFETKLYQPKGDDYEAIQRLVTRCDQLEKSKTQENNRLEASCNKHTTRSIKRLIKAIAAEIIQIKKTIADIVSNNEQLNQQVALLTSINGIGDRTAWSILAYIGDIQFFAHAKQVASYAGLTPKIMQSGTSINRSSLSKLGHKRLRKSLYMPALVAVRYNPILKRFYERLVANGKSKKTALIAVMRKLIMIAYAVLKSGKVFDVNYQQAV

SEQ ID NO: 76241 - protein, 410 aa, unidentified
MDVVYPRCAGLDVHKKTVVACVIVQGAKGKPQKTIRTFGTMTDDLLALGDWLAQQEVTHVAMESTGVYWQPIWNLLEERFTLLLVNAHHIKQVPGRKTDVGDCEWIADLLRHGLLKGSFVPDRTQRELRGLTRYRTALMQERAAEVNRLQKTLEGANIKLAAVATDVLGKSGRQILEALVAGATEAGDLAQLAKGRMRDKIPQLERALTGSFRPHQQFMVARHLAFIDAMDEIVAQVSAEIAERLRPAEVDVELLDAITGIGRPTAEVWLAEVGSDLERFPTHGHLASWAGMCPGNNESAGKRKSGKTRKGNPALRTALVVAAQAAARKRDSYLSAQFRRLAARRGPKKAIVALAHSLLVIAYHVLKRRVNFMDLGPTYFDERNRMSVQRQLVRRLERLGYKVALEPLPA

SEQ ID NO: 76242 - protein, 340 aa, unidentified
MRLIGCDLHASQQSIAMLNRDTGEIVEKTLAHEGGAVREFYASIPPPVVVGIEATGSMGWFLRLMEELAIECRVGHPTAIRKAETRRQKHDRRDAALLLQLLAEDRFPAIWMPSTEYRDLRSLLLHRHQWVRMRTRVQNALHAIVLAHGVRRGHTLWNREGQALLASLPLPPHTADRRSELQALYQHFEAHIDRLDEQVKHVADERPRATLLMTHPGVGPVTALATEVFVGDPARFLDGKALASYVGMIPREYSSGQRQRLGALSKQGNPFLRFLWCEAAAHAVRRDPDLQRFYRRKVVQKGFAKARVAAARKLGIRLWIMLRDQIDYAEFCRRGLARQS

SEQ ID NO: 76243 - protein, 320 aa, unidentified
MYSIGLDIAKSSIAVHIPIHSLDLEIENNLKSLKALYAKLKKLYKKEIDKVVWVFESTGSYSSLIYRFCADKGIKIFMPNPKQARGFAKAIAQRNKSDKIDAQVLAQSILIAKEDEIKIPSINPLVEEFKELIGYYRLLVKQVSQLKNHKESLVAKGSSNTVIKRVNQQIKALTKQQQALIDTMLQTVKRDQALLVKFNAMVSIPGISTRTALVLLHLFLRYPDANQRQIVSLSGLDPIKRESGSSMRGKTKISKAGDKIYRAALFMPAMVIIRHDARFKTYYERLKAHGKHTTVAQVAVMRKLLITAHAIYKSEERYRR

SEQ ID NO: 76244 - protein, 310 aa, unidentified
MDRIIVGIDVSKDRLDVAVRPSGEAFAVSRNAAGIEQLVARLRKLSPHIVALEATGGFETVVVAALGAAGLPGAVVNPAQVRAFAKALGQRAKTDPIDAGVIAHFAEATNLEPRPLPDEQTRLLADLVARRRQIVAMIGAERQRQQRLTAPRLSKSIARLVKALEKELASLDADIGDAVQGSPAWRAKEELVTSVPGIGPVISRTLVADLPELGQIGHKQITALVGYAPFTRQSGKWRGKSFIGGGRTAVRAAIFMGAMVAKKHNPVLKAFFDRLVAAGKPKLVALIAVARKLLIILNAIVRDNRPWQNA

SEQ ID NO: 76245 - protein, 339 aa, unidentified
MNITTVGLDLAKNVFHVVGLDARGHEQMKKCLSRSQVLKHFANHPACAIGMEACASSHYFAREFRKLGHEAKLIPPQYVKAYVRGQKNDTNDARAIAEAVRVPSMRFVAVKSVEQQDVQALIRLREGAINARTAAANRLRGLLGEYGIVTGKGITTLRRALPEILEDGGNGLTDVFRRLLNHERQHLLGLDAHIDQLTAELTSLSKQNDRVQRLQTAPGYGPIVASVFASVIGDGAQYRRGREASASVGLVPRQHSSGGKHVLLGISKRGDRYLRSLLIHGARAVVNAAQKKDDPLSRWINRLRETRGVNKATVAYANKMARIGWAILRNGTTYQPAQT

SEQ ID NO: 76246 - protein, 408 aa, unidentified
MDLTPMHKCVVALDVHQAKITACAIVEHDDGELEVIKREFGAFKRDRRDLAQWVRSIAPDVVVMESTGVYWKSPFAALEAVGIAAWVVNARHVKTVPGRKTDMADAQWLATLARAGMLRASFIPPLQMRQLRLVARQRQKLVGMCSAEKNRLHKVLVDAGIRINVVVSDVHGASARTMIKALIAGQPMHEILACKGRLRASAEQLCEALSTDQWSAVHCFVAEQIMHHIEEMERQIARFDEYLLKGLQPWQPQLNLLQTIPGIDLQGAAMLLVEIGSDMAAFGSAERLSSWVGICPGNNESAGKRKSGRIRKGNAWVRRLLCEFAQAAARTRCAFKAKFQAMAIRKGHKKSVVALAHKMLRTVYAMLSNGTHYQDKEVDYEALNVQRNAPRWLRMLEKHGYIASKAAT

SEQ ID NO: 76247 - protein, 404 aa, unidentified
MWYAGIDWADSHHDIVVIDDTGRKVGSRRIAHTPEGLAELKEFLLSISGPERKEEVACIIETNHGMLITLLLEAGYPVFPVNPKTVDRRRAPSGAKTDLIDAYLLAKTGRADFVDLRKLEPDSPLIQELKTLTRDQDHLIQCQTRLVNQLTACLKAYYPVALDLFGKLQQRSTLTFLQTYPVPQAAMAASIDDLEATLRKTGYPNPTKAARQIFERVHQPHLQADEVTTRTKSRLMGALVAQLLPLIEQIAAYDKEIENLFLAHKDHDLFESLPRAGQRLAPRLLAEIGDDRARYADATRVQALAGTAPAPYESGNYSKVHQRYACSKPLRNAFQQFAWQTTQSEPWARDYYQRKRKEGKSHSMAIRALANIWVRILFAIWQKRESYERTTFEKAKLLHAPRAA

SEQ ID NO: 76248 - protein, 346 aa, unidentified
MMIIGCDFHPSWQQVSWLDTETGETGERKLVQAAGDAERFYRQLPAPALIGMEATGNCHWLVDLLAELGHELWVGDAAQIRASCVRQQKTDRRDAEHIRILLQEGRFPRIWMPSSKVRDLRQLLLHRYKLVTIRARVKNELQHLCLNQGVQRKHKLWSQGGLKALRELPLKPWAARRREDLLALLAMLDQQIEPLDRAVKEEAQRDKMALLLQTQPGVRAVTALAYVLTMGDVSRFPRGKQVASYLGLIPREHSSGGRQKLGAISKQGNRMLRMLLVEAAQTAVRLDPGLRKEYLHRCHQKPKAVAKVAAARKLAVRLYWMLRTEKPYPAVVRIESSPRVPLVGAS

SEQ ID NO: 76249 - protein, 330 aa, unidentified
MNSNTNFFIGLDVHSKSTSYAVRTWQGEIILEGECTSMYRDLKVALEPYFHSCIVGMEASTSFYPLRNGFINDNVPVKVANVLRLRQLVVKNDKLDALRLSDMLRIGTFPESYIPCKEIQALRDLVSIRHSFLEELNKTQNRVWALLQRNGIKIPTRSIFSKKGLEHLKEITEKDSCPPDLRHLYSHLGYLKLQLQKSTEEMVDYASKTFPNEWLALQSIDGIAKIISSYVIANVCPISRFADRKKLRRYAGVIPCMRESAGKCYGSMLPKSSSRRLLRWALTQAAHCATRKKESKLRLYYERKKIKSKQKAKMAVARSICDLVYSKLNE

SEQ ID NO: 76250 - protein, 342 aa, unidentified
MDHIGIDVHKNASQVCMRTETGQLIERRVRTDRDSFAKWLGKRDKARILIESSTESEWVARCLEELGHEVIVADPNFAPMYAQRSRKVKTDRRDARALCEACELGAYRPAHRSSDRSRALRAQVTVREALVQTRTRHISLIRALLRQQGYRVRSGGAATFAERVDELELPEAFGAQMAPLLEVMGSVNAELKAMDKALAEQAKTHEVAKRLCTAAGVGPVTAISFVATIDRVERFAHAKQVRAYLGLVPRELSSGEKQHRGHITKAGNRRMRALLVEASWQLLRSRRADTEALRAWAHRIAIRRGKRIAVVALARKLAGILFAMWRDGTDFGQTKTSAAHAA

SEQ ID NO: 76251 - protein, 273 aa, unidentified
MNYYAGIDVSLEASSVCVVDSNGKIACEGKIGSEPDDLIEWLTALKLELTRIGLEAGPLSQWLYAAMRQAGLAVELLETRHVRNALKTMPVKTDRNDARGIAQLMRLGWFRPVHCKSMPAQETRALLAARKVVQVKLHDVEMSMRGILRGFGLKVGKTTPAHFEGRIRELTAGHPSLEAIAAGLLAVRAAMRRELDRFEKQVRALARCDTRVRLLMSVPGVGPIVSLTFAAAIDDPARFKSSKQVGPHFGLTPTKYQSGETDINGRISKIGDS

SEQ ID NO: 76252 - protein, 362 aa, unidentified
MKASRITGLPPKSATIVAPPIVIKHCVGIDVSKDHLEVCFSQMDIQQTVQIKATRKFANRLGGWKSVDAWVKRLSKTNIPLWLVMEATGVYYEGAAYYLASQQYQVAVVLPNKSKSFIQSLNLKTKTDAMEARALAQMGLERKMKAWRGFSKTMLTLKRLCRERETIQEHMVAASNQLHAHKYEHNAEKKTLQRAQQHIKFLQKQIQDIDRQIEQTLVQDPDLKAKIDKVCTLKGVSTLTAVTIISETNGFELIENKAQLVSYAGYDVVERQSGSSIKGKTRISKKGNAHIRRALHYPALSAARYDPNLHALYQRVVERNPKAKMVALVAVQRKLLVLIYTLFKNNMEYDPNYAKNKTPIPN

SEQ ID NO: 76253 - protein, 461 aa, unidentified
MRKARKAAGRRGKKRVDVTANLEILHPHAAGIDVGNAQHYAAVPVGRDPQPVQTFGSFTADLHRLGQWLRACQIETVVMQATGVYWIALYEVLESYAFKVYVVNAKHTKTLPGRKTDVLECQWLQKLHTFGLLNNSFLPPEEIRVLRTYLRQRENLVAGAGTCIQQMQKVLTQMNVQLANVLSDLSGKSGLEILKAILSGERDPYRLAALADPRVQASRKEIAQSLEGHWREDLLFVLRQVHDLYFFHLDNIAECDRRIQAHLQTLESKVDLASQPLPQPTSLPRRKHIPQTNLQEELYRIAGVDLTRIDGIQVQTAQVVLSETGVNMTHWEDEHHFASWLGLSPNHQITGGKVIRRGTKKVLNRATTALRLAAQTLHHSQSYLGAKYRRLRAKLGAPKAITAMAHQLARLIYRLLRFGTEYHDKGMEHYQRQYRKNQIEWLKRQAAQLNMQLIPNTGVAR

SEQ ID NO: 76254 - protein, 409 aa, unidentified
MYTSTLYVGIDVSKSKHDVAILDEGKKLLRRPFVITEDKQEYEKLLEIIGNEQHKTQASRVVIGMEATADYWRNLYHFLWESAAEPGRFQLVVINPFQSRAFARAELRRAKTDPVDAKEIARYLVEKQPRGYQHRQRLLDYIVDLDRQLYGVKKQKSRTINRLRHELFKVAPEIEREKRYLDRGQILALLEVFSTAEQIDQATFSQLKAITYGKHAWHLPDNFIHRMKSLSRHSIGYKRGVGADRVIQSLVRQVQNDNREIETLKAQLLELYATIRQEDSILTSIGHFSKSNAVALEACLGDVRRFPNKKAIVAFYGMNPIIEESGSSRKRRSRLQKKGNGYVRYKLYMAVLSMIRRKKEPIYSYYTRLVANGKPKMVAIGACMRKLLIIIYQILKNNIPFDENYAKKN

SEQ ID NO: 76255 - protein, 354 aa, unidentified
MSQQLNTTIAVIGIDIGKNSFHIVGLDKPGAIALRQKWSRGQVEAHLANMPPCLIGMEACVGAHHLSRKLKALGHDARLMPAKYVRPYSKGQKNDFRDAEAIAEAVQRPTMKFVATKTTDQLDLQALHRVRERLVSQRTGIINQIRAFLLERGIAARQGQRFLRAGLPTILTTPPDVLSPRMVRIIEGLASNWRRLDERIEGLSSEIKAIACQDSSCERLMSVPGIGPIISSAMVAAIGTGDTFSKGRDYAAWLGLVPKQMSTGDRTILGKISKRGNRYLRVLFVQAAWVVLIKPKSWQRHGLKPWIEAAKKRLHRNVLAIALANKLARIAWSVLAHGRGFEASTINDTATQPA

SEQ ID NO: 76256 - protein, 372 aa, unidentified
MKKLITFIGLDVHKNSIEVAIAESDRDGEVRSYGKIDGSLTALDKAVRKLVSLNYELHFVYEAGPCGYTIYRHLTAQGFDCAVVAPSKIPRQSGDRIKNDRRDAIKLARLHRAGELTSVYVPCVEDEAIRDLTRAREDGKEAEKKSRQRLSAFLLRHGYRFTGRTPWSTAHMRWIADIKMPHPAQQIVLQEYVDTIAECANRVERLTGQIQQLLPTWKLFPVAKALQALRGVSLIVAATTVAEIGDLKRFDNPSELMSYLGLVPSEHSSGEKTKRGSITKTGNGHVRRVLVEGAWAYRYPARVSRELLKRQEGLSQEVCAISWKAQFRLCARYRRLLAKGKSKQVVVTAIARELCAFMWAIAHEVETPAMGK

SEQ ID NO: 76257 - protein, 366 aa, unidentified
MEKIYIGVDFHARQQTICYLKTETGELVIAALKHQDKEQVRAFYQQFQGPVIVGLEASGYSPWFENMLEQMGCEVWVGHATEIRRRARWRQKNDRRDAELIWDLMVHDEFPRLHRPAGQSREVLRMLRYRQKLIKLRTMTKNSLQAIALQAGLAKGPQLFSAAGQEQFQAAAMSPVLHWQREHWFELLKPFNQQLLETMVWFKAQSKDDVSLQRLRTHPGIGLLTGLCLLHTLQPVSRFRNARKVTAYAGFDPVERSSAERQRFLGISKAGSRMLRYLLVEAVHTTVRYDEDLKRFYQRLAARRGRPKAKVAAARKLLIRAYIMMRDEIDYAEFRRRAVAARLARHSQGPINVPAVLIEQPASPSA

SEQ ID NO: 76258 - protein, 510 aa, unidentified
MAKRKMSTFERLTTGKMNRSQRRELGRRVAASDPGLTIVHPNAGGIDVGNESHFVAVPADRDEHPVREFGCWTAALNEIAEWLISCRIDTVAMQATGVYWIALYDVLEQHGIRVALVNAQHTKNVPGRKTDVQECQWLMKLHTYGLMRDSFRLQPDMESVRTIWRVRDRHVKEAGRAVQHMQKAMTKMNIQLANTISDVSGVSGQAIIAAILQGERDPYKLAALADYRIKASREQVARSLEGNWRADVLFELQQAVDSYHFAHRQMQECDEKLRLYLANLPTRLLDQPAQSAGEAESPARKSKKPRKPRDNEPRTDMTEELQRICGVDLTSIDGIHVMTAFTVISEVGTDMSRFADENHFASWMGLTPSKDITGGKVIGPAKKKVKNRAAGAWRTAATTLLDSDTHLGAGYRYLRRQLPPFKSAVKAMARYLALLIYRLLTKGEAWVDRGAAQFEKRRLQRELVNLQTKAKAQRVPLNSSRRSPLRQPRGETPPRKTRQELTPEVCPISG

SEQ ID NO: 76259 - protein, 270 aa, unidentified
MRSIALDVHRDFCEVAIKDTAGLRLTGRVKTKPEELELFAQSLAPDDQVALEASEPALQIARILEPHVGRVVIANTRKLRAIAESKVKTDKLDASTLCELLAAGYLPAVWSPDEFTRTLRRRLQRRAKLVRSRTCAKNECHAVLARNLKGRPPMSDVFGRAGRAWLAALELPADERETVECGLREVDFLDHEIGLIERELAHQALDSDEILRLMTVPGVSLVSAATFVAVVGDAHRFSTPKKLVSYLGLDPRVRQSGETPARHGRISKMA

SEQ ID NO: 76260 - protein, 394 aa, unidentified
MMRLGIDAHKKKCVAACMMDGNTEPSEIFEFQTTMQGMETLYARVPERSVVVIEASTTGKVISRLLSQRYEVHMVAPPERKPSIKTDERDAVRIVREDSLGYLRRVYVPSQYIEEMRSLVMQQIQVGRKIARVKNQIHSLLERNMVHDLDDLSDPFGVEGLERIARLKLPADDTATLRTYLDEMKLHLLHHERFESRLAKMAESDDDVGLLMTIPGMNIFTAVTTKSRIGDIARFPTKKRLCSYAGLVPKVDNSGEYRSNHRGIKHGDAVLKYALTCAVRGAVTARKQTVVKRYYRKMLKRQGVAQKAEVAAARKLVCIIWKVLSSKQSYVEEDRYLTAKKMKSVRYKAKRSLPSSDEDRTSVSSLLKDISSHADIISRYPFDMEGLSGDEGDT

SEQ ID NO: 76261 - protein, 337 aa, unidentified
MKLYCGIDLHSNNSVLTILDENDQIVYQRRLKNDLKKILSVLELYSGAIEGIAVESTFNWYWLVDGMIEAGYKVHLVNTAAIKQYEGLKYGDDHTDSHWLAHVLRLGILPEGYIYPKEDRAVRDLLRKRGQLVQLRTTNILSIQNLMSRNTGSSLSSNAIKRLQAEEVSAMLPNEDHALAVNSNLNVMRTLNEQIKVVEQTVKKKAKLKPEFNKLQSVPGIGIVLALTIMLETGDIRRFAKVGNYASYCRCVGSTRLSNGKQKGKGNAKNGNRYLSWAFVEAANFAIRYNDSIKRYYQRKQAKTNKTVAIKTVAHKLARACYYIMRDQVEFDLQKAF

SEQ ID NO: 76262 - protein, 356 aa, unidentified
MEHVSKLNFSGQTIYVGLDVHKKSWSVSIFSEQCEHKTFTQPPKTDTLVHYLKRNFPGAAYHAVYEAGFSGFWAQEQLQEKGVNCIVVNPADVPTTNKERTTKRDRTDCRKLARSLRSGELEGIYVPSRLKLEDRSLVRTRQSMVRKQTRCKNQIKALLYFYGINLPEEVVDSHWSQKFLHWLESLRMKRASGDMVLKVHLDELQHLKRNIASLNRAIILLSREPEYHHSVRLLKTIPGISTLAAMIFLTELGELARFASLDKLASYVGLIPDVESTGDTEQIKNLTRRRNPQLRALLIEAAWVAARKDPVLLLAFNNYCQRMKKTRAVVKIARKLLNRMRYVLKNQAEYVPAVVQ

SEQ ID NO: 76263 - protein, 395 aa, unidentified
MTVVGIDVSKGKSMVAAMKPGGELVAAPYEVRHSDIELSHLALDVLCMEPDTRVVMEATGRYHEPVAALLHSEGIFVSILNPLLIKQSGAGSLRKVKSDPKDALKIAKYGLDNWSTLREYTPMEAIRQQLKLCARQCDLYNKNIVMLTNNLISLSDKTFPGVNELFSSPEKADGHLKWVDFYRSFWHCDCINRMSPDAFEERYKKWCKRKGYHFSTDAADALYAASCGSYTTLPRDNNAKLLVTVAADQLIALRENQSKLEAEMLNLCKQLPEYETVMAMYGVGKSTGPHLMAELGDVRRFPHRSSIVAFAGVDPGVVGSGKMQLSSVTTSKRGSPQLRKALFQVVSTYVKCKPENEAVYQSTPKSVTRGSRSSFALLLPRTSSCVFTMPALRSA

SEQ ID NO: 76264 - protein, 341 aa, unidentified
MQNVTLVGIDLGKHSFHVHGQDKAGKAVFRRKLSRKQLVEFFATFHACTVAMEACAGAHWMARKLSEFGHTVKRISPQFVRPFVKSNKNDFVDAEAICEAAARPSMRFVTPKTESQQTLAALHRVRQALVRDRVRTTNQMHGFLLEFGISLPVGHAVVRRLSVVLAEHRLPPRLVAILERLHAHFKYLTEQIGDIEKELDRQLAEDPLGQRLLTIPGVGPITASLLASELGDGKQYRCGRDFAAAVGLVPRQYSTGGRANLLGISKRGDKNIRHLLVQCARAFMLRLDKQSGRVADWVRAMLTRRHSSVVACALASKLARIAWAIVSSNTVFERQPSVPVL

SEQ ID NO: 76265 - protein, 455 aa, unidentified
MPKTITGGRPELKPVNAGAAAIDIGSKMHMAAVDPTGTDTPVRAFGTFTQDLHDLADWFKACGVTSVAMESTGVYWIPAYEILEQHGFEVILVNARYAKNVPGRKTDVGDAAWLRQLHSYGLLRGSFRPDAEIATLRAYLRQRERLVEYAAAHIQHMQKALMEMNLQLHHVVSDITGATGMRIIRAIVAGERNPDVLATYRDVRCHSSTETIRAALVGNNREEHVFALTQSLELYDTYQAKMLDCDRKLESLMSALSDKAAKPIGKLSRPRVKTKQINTPSFDVRAALYGVIGVDLTEIHGLGPSLALKLVGECGTDLRAWPTAKHFTSWLCLAPGSKISGGKVLSSRTRRSSSRAAALLRLAATTIGRSDTALGAFYRRLSSRAGKAKAVTATARKIAVLFYNTLRHGMTYKDPGADCYEEQYRSRVLANLKRRAKSLGFVVLPAPCDVEVAVS

SEQ ID NO: 76266 - protein, 462 aa, unidentified
MMNVQEQREMVEKANRILSEMKSFTWRDLETQGKFSKNDKLSFISDDMLILGCDIGSETHYVRAIDTRGRELSRKALAFDNNAEGFQKAHDWAVQLAASNDKKQIVLGLEPTGHYWFCLAAWMVSNGISVVQVNPYAVKQTKELEDNSQQKDDRKDPKLIANLVKDGNYGMPYLPEKVYAELRRLSMFREQLTEDRNRSMNRLHREMKIYFPEYKDAFGKIDGAFCMAVLKEAPFPEDILKLGGEGIREIWHQAKLRGRGYSRAAEIVKYAETSIGLKDGTAAGRKAVRWFAEKIMELDEELAEIENRLNEKCREIPHAENVLEIPGIGGKILSGILAEMGDISRFDDAKELQKLSGLGLVSCSSGKHKGETRISHRGRKRLRYWLFQAARSAVAHGEEYKWIHAHYTTRAGNALQKMQSLMVIACKLLRVIYTMLKTGKPYDPEKLLKDIRYPENVQTAAA

SEQ ID NO: 76267 - protein, 356 aa, unidentified
MSRDIKYIGMDVHKEAVVIAVLNSTGKLVMESIVETKASSILQFIHGLRGELHVTWEEGTWAAWLYDLLQPHVQQVLVCDPRRNALLKEGNKSDKVDARKLADLLRTGMLRPVYHGEHGLRTLRELARSYQTISKDLNRVMNRIKALYRGWSIPCAGTQVYAPRYRQEWLHKIEHAGVRRRAELLYQQLDGLQRLRRTLRPELLAESRKHKAAKLLRQIPCIGPIRAARLLALMQTPHRFRSKRQLWTYSGLGIETRDSAQYRFVCGQLQRSKKPQQLRGLNRNHNHEMKEIFKGAATRASCGVGPLREFYVALLDKGMKPEMARLTLARKIAAITLTLWKKEEGFDAELLKTQAA

SEQ ID NO: 76268 - protein, 382 aa, unidentified
MRHGGILLEANDSEGESMKKNTTTNQFVPTDVLKCTVIAVDLAKRVFQVAGQDAAGLTVYEERINSRESFHAFLRKLPTSVTVLVETGPGAQAWAQLLKTQGNPVRILPAQHVANHRSGPKNDRNDALAILRAGRDTSISSVPVKSAAALAMQALHRVRQGYVRRRTAMSNQMRGLLLEHGLAMAQGDSAFSQGIPRILEDATQPLPDMLRELIDELLGEWSQLGERINVLTGRLETAAKNDETAKRLMTVRGIGPIISTAVIAKQTEPERFANARQFAAYFGLVPKQNSSGEKVRLGKMSKHGDAYLRSLAIQGAHAVLRQVQANSEDPDDRRLQRWVSRLGRKEAAVRLANRNLRIIWVLLQNDQTYRRQVNNDLEKAMS

SEQ ID NO: 76269 - protein, 338 aa, unidentified
MKVVKQNVGIDVSKKELAVCLIFFLENLSIAIKGTRKFSNNKSGFKFMFEWVGRKKDTSLPLHFTMEPTGVYHENLAYFLNDMEQLVHIVLGNKAKKYAESLNTNSKTDKLDSKALARMGIERELELWNPGSPVYRKLKVLTRERSAVLKLRVMIKNQLEAMMNSAFPNKKSVNRLNRLIKEFNSQVEKIEKDINDIVEKDIELKPKVLKVTTIPGVGFLTAIIIIAETDGFALIKSIKQIVSYAGLDIKIRESGKWSGKSKISKAGNVHIRKALYWPAYTSITHTLTYKIFYERILDRKNISMVASVAVQRKLLGLIYTLWKNGTVYIDNYERQKAA

SEQ ID NO: 76270 - protein, 334 aa, unidentified
MENIALIGIDLGKNSFHIHCQDHRGKAVYRKKFTRPKLIEFLATCPATTIAMEACGGSHFMARKLEELGHFPKLISPQFVRPFVKSNKNDFVDAEAICEAASRPSMRFVQPRTESQQAMRALHRVRESLVQDKVKTTNQMDAFLLEFGISVPRGAAVISRLSTLLEDSSLPLYLSQLLLKLQQHYHYLVEQIKDLESQLKRKLDEDEVGQRLLSIPCVGTLTASTISTEIGDGKQYASSRDFAAATGLVPRQYSTGGRTTLLGISKRGNKKIRTLLVQCARVFIQKLEHQSGKLADWVRELLCRKSNFVVTCALANKLARIAWALTARQQTYEA

SEQ ID NO: 76271 - protein, 341 aa, unidentified
MSNANTYIGVDLHKKTCYITVMNGDGKIKKQTEISTDTDKVAKFFGKYQSASVAVESTLNWIPFYENLESIGCNVSLSNPLQTKAIAAARIKNDKVDSRILADLLRTNLLPTSFIQPRDIRDLKELVRQRMSFVQMRTQIKNRIHSVLFKNNLKHDFTNLYGKAGMSWLKDLKLRHIYRQELDWSLAALDKLDQLIDEISQKILAAAKDDFDCQLLMTIPGISYFTALVIKSEIGDISRFPNAKKLCSYAGLIPSTYASAEKVRYGRITKRGSKWLRKALIDSITSGSRHPSRLCFTYRRLKKDKGTGKAKVATARKLCGIIFAMLTDKQPFRQFTPVKQR

SEQ ID NO: 76272 - protein, 341 aa, unidentified
MQITTIGLDIAKNVFQVHGIDAAEKVVVRKQLRRGQVMKFFGALPACLVGMEACATAHHWARELTKLGHEVRLMPAKDVKAYVKRNKNDAADAEAICEAVRRPTMRFVRAKSAGQQGRLMQHRTRDLLLRQQTQVINALRAHLAELGIVAAQGREGLKQLLTIIADEKDARLPMDARASLIVLAAQLQALHTMIGSIEKRLTVQHRANEASKRLESVPGIGIIGASAITATVTDPKSFQSGRDFAAWIGLVPRQDSTGGKQKLGSISKQGDRYLRRILVVGAHSVLRRAKQNPEKYPWLTKLLARRPFKVVAIALANKMARIAWALLASGGHYRPRLAAAA

SEQ ID NO: 76273 - protein, 345 aa, unidentified
MALYVGLDVLLRMTSICVVEADGSSVWEGKAESEPVPLVKVLSPWRDKIALVGIEACPLSEWLYGALVESGFQIICIETRHAQRFLSSRPNKTDRSDARGIAEMMRLGHYRSVHVKSKASQLLRTTLIARKKFVDHMLAIEDTIRGLMKVHGLKLGAVHRSRFAARVETLLADAPDLRMAIEPLLEARNMMRKHKALMDRQLSQMARKDDVCKRLMTVSGVGPLVSLSFKATIDDPNRFKDSKAVAAHLGLTPRVYQSGEIDRSGNISKCGDKLMRHALYEAANSHMRISKKWSTLWAWGVKLAKRIGSRKACVAVARKLAIIMHRMWVEETDFRFGKPPVTQPT

SEQ ID NO: 76274 - protein, 317 aa, unidentified
MMNTKSHIEINVGVDVGKSKLDIVLHPLDLHFSIPNDDEHIQKIVQVLKTHQVKRIVTEATGRYEHAFVFACDKADLPVVVVNPTNIRRYAQAIGVLAKTDKIDATVIAQFAATIQPDIKPIPDRQSRIIKDLLIRRAQLLEMQTMEKNRLQIMPKELHSSIKALLKSLQTQIEKLTLKLDQLVAEVKHWRIKTEILTSVPGVGKVLAYTLLSELPELGKLNRKEIAALVGVAPMNRDSGSYNGKRHIRGGRHRIRTVMFMAMLSSIQCNPVFKRYYEHLKAVGKLPKVALIACMRKLIVILNTMLKNEERWNEKSA

SEQ ID NO: 76275 - protein, 382 aa, unidentified
MDVVHRCCAGLDVHKATVVACVRRVGPDGAAEAQVRTFGTMTAALLELADWLAAAGVTHVAMESTGVYWRPVYAVLEGLFVPLVVNAHRIKHVPGRKTDVKDAEWLAQLLQYGLLTASLVPPRPVRELRDLTRQRAQLVADRARVVNRVQKVLESANVKLACVATDVLGASGRAMIAALIAGQTDPAALAELARGRLRGKRAELRLALRGQVTDHHRFQLAALLDQEAHLEGQIARYEARIAAVVAPFAQAAARLRQVPGVGPRAAEVLVAELGTDMAKFPSAGHLASWAGVCPGNDRSAGKRRSGKTTKGSRWLRSTLVQVAWAAARTKGTVFQAAYRRWSRRLGAKKALVAVGHKVLTVIYAMLKDRTDYRERGAPGLAA

SEQ ID NO: 76276 - protein, 417 aa, unidentified
MDPQISFNQVVSRGCGIDVHQKVVVATIGGEGLKKATREFGTFTRSLTELKDWLLENGVTHVAMESTGIYWKPVYHVLEPTSLKVWIVNARHIKYVPGHKTDKQDSAWICKLLLAGLLKPSYIPAKEQRELRDLTRFRTKMIQHVASEKNRIVRILEDCNIKLSSVLSTTQGVVATKLIDKLCEVGTITMSDIEEVYHKRLEASKEDLYEACQGLIDKHHIYLLGLIRQDIASTEAVIKNLNARIKEVLSGYDNVLEHLKAIPGLSTKTVEDLVAEIGLDMSVFPTEKHLASWAGMCPGNNESAGKKKSGRTTHGNKQVKAVITEAAWAATRTKNTFYSARYHRVAARRGKKRALIAVGHSILKSVYHVINGMEGYKELGADYVTQRVEKRRKLYLKKELEKLGYAVQLTPPVPQAG

SEQ ID NO: 76277 - protein, 370 aa, unidentified
MSQSSMLYVGLDVHQESIAVAYVAQDHGAEVVSLGTIGTRQCDLDKLIRQLHSKAKHLVFVYEAGPCGYWLYRYLTKTGHECWVVAPSLIPKKAGDRVKTDRRDARQLARLMRSGDLTPVYVPQVEDEAIRDLSRAREDSIRDLKAAKYRLKAFLLRQDIRYTGQANWSPAHLRWLAEVVCPTPAQQIVFQEYVRAVSEHTERLQRLDQELQERVKTWRLAPVVEALQALRGVQFTVAVTTVAELGDLTRFTNPKQLMRYLGLTPSAYSSGPRRSQGGITKTGNSHARRVLVEGAWAYRYPAKVSRHLQLRLEQLPKPIQDISWRAQVRLCKRYRQLMARGKNANQVVVAMARALVAFMWAIAREITLPA

SEQ ID NO: 76278 - protein, 322 aa, unidentified
MAEQQVKYNQLIQCGCGIDVHQQVIVATVRHSDSEYETREFDAYTSSLTKLREWCKTEGVTHIAMESTGIYWKPVFNILEEAFEIILVNARHIKNVPGHKTDKKDSIWISKLLLSGLLKGSFIPPQDIRELRDLVRYKRKLTNQAASEKNRLIKMLEDCNIKLSSVVSDVNDGVSATKIINDLIAGETDIEKMMKHLHGCIKASREEIRKALEGRITGHHRFMLNIIKESISETEKIISKVDKQIDKAVKRYPVEVELLQTIPGIGKDSAISIISEIGVNMSIFPNEQHLSSWAGMSPGSNESAGKKKVPEPPMEINMSNQL

SEQ ID NO: 76279 - protein, 404 aa, unidentified
MGSGADCPCMVADAPSTGQINHASVLASERSEEAKTLAVGDRSIALCSAASENAGERDRRRPLDKSPNSRQSRRPPRATSSHMQGRDTSKMNFEHFIGIDVAKAKVDIAKAIDGPVLKVANEPSAINAMIKELPRPKSALVVVEATGGYEKALVIELVEAGHIVSVVNPRQVRDFAKALGILAKTDKIDARVIARFGQQVRPRAYVKTHEKQGELDQLVARRRQLVGLRTSEKNRQQQADSKAVAKSIARTLDHLRKDIRRIDEEIRKLVQSDDQWKGRAELLKTAPGIGKVTSTTLIAELPELGDLNRQQISALVGVAPFNCESGTMRGKQMIYGGRKSVRNTLYMATLTAMRFNPTIRAFSERLSSQGKPYKVVATACMRKLLVVLNAMVKENKPWKNPETT

SEQ ID NO: 76280 - protein, 371 aa, unidentified
MEKDITHVGLDAHQETIQAAVLLPDGKKSAEDRLANTPEAIRRWARRLLQRAPGAVVCCYEAGPLGYGLKRELEALGLRCVVVAPALIPVKPGDRIKTDRRDARKLAELLRAGLLTEVHAPSAEQEAVRDLSRAREAVKRDQVRMRHRLSKFLLRRGVRWTPGRRAWTQAHLEWLRGRRLGYPADQAILDDHLLGLEQMESRLLALDAKLEAIGSEAPYRQPVGWLRCFRGIDTLTALALVVELHDFRRFASPRALMGYLGLVPSESSSGGKERRGAITKAGNSRLRRLLVESAWHYRHRPGVSYRLRERRAGQPARVIAIADRAQHRLHARDIRFQARGKPHNKIVVAIGRELIGFVWAALDPKANAPTA

SEQ ID NO: 76281 - protein, 449 aa, unidentified
MTRKKARVGRSKLQIINRLAAGIDIGASSIFVAVDPGSSEPAVREFSTFTDDLHSLAKWLKSCKITTVAMEATGIYWIPLYEVLESKGFEVILANAKHVKNVPGRKSDVLDCQWIQQLHSYGLLSASFRPGAEVVTLRAYVRQRGTLIRYCSSHILHMQKALGQMNILLHQVVSDIAGQTGLKIIHAILSGERDPQKLAALRDWRCKRSEAEIARALYGNYRPEHLLQLRQAVRSYEFYQAEILECEQAISHQLELIMRESDPGNNQDGGYGPSGDLTRTEALERICGVDLTKIEGISQASALTILAEIGTDMSRWKSAKHFASWLGLCPGIKKSGGRLISGASRRVLNRAAVALRLSAYCLHRSKSALGGYLRRMKSRIGAPKAITATAHKLARLIYTLLKHGQEYVQTGQEAYEKQFQTRKLRALHNNAKSMGFKLISIEHTTGCSL

SEQ ID NO: 76282 - protein, 410 aa, unidentified
MQITCGIDWAEQHHDVAVLNADGSVLARARIDTGATGFSRLMSLLAEHVDDADQLASVPIGIETDKNLLVVALQAAGMTVFAINPRAVARYRERHGQSGKKSDPGDAFVLADLLRTDRHQHRPLPSISVHASAIKTLARQHQDAIWSLNQTVSRLRSLLLEFYPQALRAFPNLKHKAALAVLSAAPTPEAGLRLTARRLATLLRRCRRRNDPSLAEHVLSALHSPALRQPTAVEAAYGVTAQTLTAIVVAMQTAVEELEQALAAEFDQHPLATILRSAPGLGPVLAARVLAEIGDDPTRFTTTAGLRAFAGTAPVTRASGRSRYVKARKVRNKRLGDACHWWAFVTITKSAGARAHYDRRRAAGDHHNAALRNLANKLIGRLWWCLQHDETWNENTAWNIDIATPDPRTA

SEQ ID NO: 76283 - protein, 419 aa, unidentified
MTQRNNSKVIGIVHPICCGLDVHKEIISACIIFSDNEGVDQCAVKEFGTFTDELMCLRAWLLDHECPVVAMESTGIYWRPVHNVLEGSFQTVLVNARDIKNVPGRKTDIGDSKWLAGLLRHGLLKGSFIPPQAVRQWRDLTRLRKKYVQTVGDYRKRTHKLFESANIKIDSVVSDLFGVTGRNLMQLLIKEGEPLKLSDIESCVRGKLRGKETELFRSIQGFFTGHHRVLLKTILETITGLESQIAALDRQIRSDMAEHKPLLDRMKKAPGISDVSSCDILAEIGPTLDTFGTDMALISWSGLCPGNNESAGKRKSGRSHVKKHHLKTIMIEVAWAAIKKKGSYFKDKYYRLKARRGAKKAIVAIAHRILLGIYHVIKDGTEFRDLGEDYLTLKNKSRKVINLRKQAQALGYDLVPQTK

SEQ ID NO: 76284 - protein, 382 aa, unidentified
MQALTIGTPTAGHCGTIFVTIELSQKTWLVTLHSPDRDRISRHKLEGGDHAGLLALIESIRARSALKLGAAPKVVSCYEAGYDGFWLHRLLAAAGITNLVFDPASIAVEQRSRRTKTDRIDGELLLRTLMAHLRGEPRVVRIVRVPSVEQEDARRASRERDRLVKEQTGHTNRIKALLRLAGMAVGYPRQGNWLNWLAQQRDWQGQPLSPHLLAEVTREHTRLMLVREQLAALEQVQAAQVPPVPAAMAERRDLLQRLKALGPAFATTLTNEVFYKDFRNRRQVGAYCGLTSSPWRSGGIDREQGISKAGNPRARLKAIELAWLWLRHQPESELSRWFRTRTANAGKRAKRVAIVALARKLIVALWRYLTTGLVPAGATMKA

SEQ ID NO: 76285 - protein, 323 aa, unidentified
MMAQDDLVVVGIDVAKDKVDACIRAFALRQVFPSAAQGHRKLIAWLGKHKVTKAVMEASGGYERDWAKVLRQAGIEVRIVDPKRVRSFALSAGRLAKNDAIDAEMIAWFAETFSEAPSQRHDAAHEELLALVKARKALLDLKTRLQSQNEHAAPGPVQKAHARVVKSLATEIAKLEAAISAKIKATPDFAERTEIIESVPGFAETTSANLIAGMPELGQVSNKIAAALLGAAPYDDDSGHRRGERHIKGGRRWVRNAIYMPCLGAATQNNPVLKAFYHRLIAKGKPPKVALVACMRKLIIILNSLIARRQKWDPSRYPHSERA

SEQ ID NO: 76286 - protein, 425 aa, unidentified
MLQSLNIGGFMATHLEINQYSAFVGIDWANAKHDICLHDPSNNKREFSVIKHSVEDIEKWALSLKKRFGGLIAVAVELTKGPIIYALQRYEFLVIVPINPTTLSKYRSAFKPSKAKDDPTDAEIALELMLRYPEIFTPLKIQSLNIRKLMYLVEKRKKLVNDKQRFVNQIINNLKQYYPQAIDWFPKKETNIFCNFISRWPTLQQAQKARRTTLQSFFNDNHIRSPKKVEERINEVKSALPLTDDEAVIETHAMMVLALVEIISILMKHIKCFDKKIAELMKILPDANLFETLPGAGVCYAARLLVAFGEQRDRFSSANEVQQYSGIAPVTERSGNKCWVHWRWQCSKFLRQTFVEWAAHSIYSSYWANIYYQKKRESGSSHQAAVRALAFKWIRIVYRCWKDRKPYDEVKYLNALKQRGSPLLG

SEQ ID NO: 76287 - protein, 328 aa, unidentified
MTVLADRVDGVIGVDTHRDTLTAAAVTAVGGLLGQLVVAADAAGYQRLLDFARARVPGRRCFAVEGAGSYGAGLTRLLVERGEWVVEVDRPKRPARRGGKSDALDAVRAAREALAQERLAAPRRRGDREALRVLLATRQGAVTARTGAINQLKALIVGAPEQLRAELRRYSTSGQVGYCAGLRDRPTRSLEHRMTVSGLRSTALRVQFLTAEASQLEGEIGRLVGAVAPWLLELPGIGPISAAQVLVSWSHAGRLRSEAAFAALAGVAPIPASSGQVTRHRLNRGGDRQLNRRCIPWPWCGCATTQPRVPTRPAAGAMARAHARSDGA

SEQ ID NO: 76288 - protein, 349 aa, unidentified
MNIYVGMDLHSDNVMLGWMDAEGKRLKHQRLPNDIDLILSCLKPHMDQIVQIGVEVTYNWYWLVDALLEAQYPVVLAHAAGMQQYSGLKYTNDVSDAFWVTELMRLKLLPTGHIYDAKLRPYRDLLRRRQLLVHQRTSLLLSVKSLYSRTTGAKLSQGEAKALEPETVAEWFDHPADQLIAGHEVKLIREYNESIRALEQEVEAVAGQLPCYQYIQQLPGIGRILGLTISMETGPIARFPEDGRYASYCRCVPTDRESNGKSKGENNGKCGNQYLAWAYLEASHFARRYDPPSQRFYEHKKAKTNTMVATKALASKLSKAGWHVMSKNEPYDPQRVFPFLRKPAGKKTN

SEQ ID NO: 76289 - protein, 347 aa, unidentified
MVTLGSDSHKRTHTFVAVDENGKQLDYQTFPATTPGHLEALRWASRWPDRRWALENCRHLSRRLESDLLHAGEAVVLVQARLMATVRVTGRQLGKSDPIDALAVARAALREPNLPVARLEGKSREVKLLLDHREDLVGERTRICCRLHWNLHEIEPGLELSDSALIRWCVMDQVERIVRQHSGLLAEIALEQLETIRRLTRRIKALGLQLRALMRQLTPSLLQLQGCATLSAAKIFAESADIRRFETRAAFALNNGTAPIPVWSGNNVRHRLNRGGNRQLNAALYRIAIIQARDEGLGRTYIAKRLALGNTRREALRSLKRRISDEVFRRLWNDLPLVLNERFSEAA

SEQ ID NO: 76290 - protein, 587 aa, unidentified
MSTSSAPLDRIGVGIDTARYGHRVCFLRPDRQPAAKPLTVLENHAGYQALQQRLEQLHRQHPQAHFHVRLDAAGQYAANLEHFLRGLTLPLTLSIGEPKRNKDYQKAHFPKRTTDDTESQAMARFAVVELPAATLPVPPQLALLREITARLQAQVKQTTQAVNRLHNLLARVFPELATLAEDLSARWVLHLLARYPSAERIAHAQLRSLEQIPYLPKDQALPLHQAAKQSVGSLRGDVAETLVRELVTQVRHCLQHEEKLRDLLEEAFTQLPPSGHQRVATIPGIGTATAAVLVAKVIDIERFTSPEHLVGYFGVFPQEDSSGVDKKGLPLPPGTLRMSPKGNDLVRGYLCNAARSAAQHNPAIRALYQRLRAKGKRGDVALGHCMRKLLHLVFAVWKTDRPFDENHFPWEPPPDTPAATPAPAATGTAADQGKEKAVGPTQAAPAKPVVTTACAKVEEATPPVNPPAPPTPAPSRPRLDFAFVREQITMEQVLRHLGLLDRLRGRGPQLRGCCPVHGQTGTKGPTFSVHLEKNVFQCFQAECGAHGNVLDLWAAVHGLSLYEAALQLADTFGLRRNREEEPVGGTR

SEQ ID NO: 76291 - protein, 408 aa, unidentified
MDIVMERCAGLDVHQATVVATVRVPGPKGRQVITETFGTMAPDLLALCEWLQAYGGTHVALESTGAYWKPVYYVLEEGFTLLLINMQALKHVPGRKTDVKDSEWLAQLLECGLLRASFVPPPPIRELRDLTRYRVKQVQERAREVNRLCKVLEDTGLKLTSVLTDVMGVSGRAMLTALVEDTTDPVILAELARGRLRTKLPELRRALQGRFRRHHAFLVEQILAKIDFLDDTIARLNTEIDERLVPFEAMLTALDTIPGIDRIGAISIVAETGGDMSRFPTAGHLCSWGAMSPGHNESAGKRRRGKTRKGNRYLRATLIQAALGATHKKGSALQARYHRVKRHRGHKKAVVAVGHQILEIAYYVMRDGATYDELGADYFDRRHAERAVRRHVRQLEALGFQVTIEKAA

SEQ ID NO: 76292 - protein, 446 aa, unidentified
MPAKKKRSPSPPPRVVRPNAAGIDVGSEAHVVAVPADRDAEPVRTFGVFTADLRALADWLKQCGVTSVVLESTGVYWMSLCDFLEAQGFEVLIVDPRTLARNLKKKTDVSDAAWLQELHAFGMLKSCFRPDQEVRALRTLWRHRDHLVTEAAKLLQMMQKVLVQMNVYLHLAVADIAGVTGMRILRAIAQGQHDPQTLAAMRDANCKKTRAEIAKALEGTWDSAHLFELKQLLKAWDFYQGQLHRCDKEYDKAAGKMPDQTQGQALPEPEKRPNKHRNAPTAFASDALIFKMTGVRITEVDGLGANTVLTVLSETGPNLAAKFATEKHFAAWTTLAPRKHQSGKRTKFPAQTASRVAKAFRLAARALLNCKCVLGNFLRRLRARLGIGTALRATACKLAKLFYRLITKGEAYRRESTAVEEAKQRERQLKNLEAKARELGMRVFPA

SEQ ID NO: 76293 - protein, 373 aa, unidentified
MIFVGIDVAKDKHDCFILNSEGTVLADVFTIANNRIGFETLLSRIQSCSQGESKIKVGLEATGHYSYNLLGFLLDSGLATYVINPLHTNLYRKSLSLRRTKTDRIDARTIAMMLMSDVDLKSYSNTAYHNEELKSLTRYRFDKVKERAKLKSSVARLVNILFPELEKLVSSLHIAVVYALLSNYPGASYIANANTEELAETLCTASKGRYTKSKTAEIQVAAGVSIGSKMPAKSMELKHTIALIRELDKEISEVESAIDKITSQMDSPIFTIPGIGRHMGAMILAEVGDFSNFASADKLLAYAGLSPSTYQSGQLQNCYAHMEKRGSRYLRYALFNAAKYVCLWCPTFSAILKRSVLRESITMLPSLMLLKSW

SEQ ID NO: 76294 - protein, 338 aa, unidentified
MVYGAIDLHMRYSQIRILDEAGVVQRDQRVLTTRERLIAAFAPHGPMRILLETGTESEWVAQALEAAGHEVIVADPNYAPMYGEVTRRIKTDRRDAVALAEANRRGWYRAAHRTSAAQRDTKQILRSRRFLVQARSGAVSLLRSLLRQSGYRLGTGSCDTVPARVARLPLPTALAETLAPLGRQIAALTTEIHAMDARLQTRTASDAIVARLRSVPGIGLIVATTFRAFVDRHERFGHGGQVSAAIGLVPREDSSAERRHRGHITKAGPRELRSLLIQAAWVCWRHGGSGTLRAWADRVAARRGRRIAVVALARRLSRILFALWRDATTFDGRTLATT

SEQ ID NO: 76295 - protein, 403 aa, unidentified
MNSVGIDISKGRSTIAVMRPFGEVVISPFEVRHTDSELSELARQLKILDGETRVVMEATGNYHASVAKLLHDAGLYVSVVNAKLVHDYGNNELRRVKTDRKDAVKPANYGLDRWFTLPRYIPEEDTRLLLKNCYRQYRQYSKVQTVLKNNLISLLDTVCPNANRLFSSPIRGDGSEKWVDFVAEFWHCRCVSEKSEKTFTNHYRRWCRKHGYNFSEEKAHTIHAETCGHIGVIPKSETTKLLVEQAVAQLRATSAALAALKHEMQSLASMLPEYPVVMGMFGVGPTLGPQLIAEIGDVRRFYSKKALVAYAGLDAPPNDSGDVTGRHKSMSKIGASSLRRTLFLVMSVYLQTAPLDEPVYQFMDRKRAEGKPYRVYMMASANKFLRIYYATVKAYLESLEHTA

SEQ ID NO: 76296 - protein, 404 aa, unidentified
MKTSGLDVHKETIFCAIYGDDSPKKKSKHEVKEFQSLTCEIKRMGNYLQEAGVKRVAMESTGIYWIPVWNILEHMGFELMLVNPYLVKALPGKKSDVKDSERIAELLHKGLLQGSLIPDEHIRALRSYGRKYKKLQVKQTICVQEMEKILIMCNIRISSFVSNINSKSMIRVIENIISGEDNPEKLAELIHGRILKKGKDKIIASLQGFVCDHHRDLLSLSLEEYKMYLHQEEECIKQMKKLGSEYYQQDIDLLKTIPGVSDISAIIILAETGGDMNAFEKSSKISGWAGLRPRNDESAGKYKSRAITKGNQYLRTILVQISWASIRVKGSYFKEKYQKLVVRKPYNKALIAIARKMLVVIWNILKERKAFNPELLPIYDPIRLESKLKYHKKEFEKVQALLDK

SEQ ID NO: 76297 - protein, 312 aa, unidentified
MAMLSFCGVDVSKDRLDVVVLPEGWFFSVSNDTAGWAELVARLRPLTVSAIGLEPSGGYERGIIRALLAAGLSVRRINPNKLRQFARARGVLAKNDCLDARLIAEYVAIMPTRVVQRDAAVERLAEIVTMRRQLCDEHVAAENQAAHLEDAMLRRLSKRRQTRLEADIRLLDKRLAEMVAANVALAQRYELLTSMPGVGPVLAFTLIALLPELGKMSRKQIAALVGLAPYDFDSGKLKGHRSIYGGRMPVRNVLYMAALSASRYSPALKTFHKRLAAADKKSKVIIVAVMRKMITTLNAMLRDSAAWQPRSA

SEQ ID NO: 76298 - protein, 369 aa, unidentified
MPHVTSIGLDVHARSVAAAAFNPFTGEVVHRDFGTDAAEIAEWALGFEEPRACYESGPTGFHMARELRALGLDCAVAAVSKMQRPAADARRKNDRRDAEFIARMLATHNIVEVPLPDAAVEAARDLDRALDDATAEYRRARQRLNMFLIRLGHVWDERNADGTRKGSWTRAHWRWISGIRLEGPQRDVLEYYVTAARCAESDRRQLEKKVLALARTDRWRPAVEALSCIKGIDTLTAFRLAAEAGSFTRFRTAPAFASWCGLVPSERSSGETERRGGITKTGNRLARTALVESAWHYLTCTPRPKPPAPGADVPAAIRARADACTARLCRRREALAAAGKSSCKANAAVARELACWVWEIGRRAEGTLG

SEQ ID NO: 76299 - protein, 431 aa, unidentified
MTATDSTARAHVLVAIDIAKAKHDVLVELPTGKRKKMIVRNQLSDFRQLAAYLKRLDGALEIALEPTADYHRNLAYFLKTQGFDVKLVSSIAVARTREALHNSWDKNDPKDAQVILHLLRNGNTQYFYDPVIEQTNDLQELSKTHFQVSLRKTRVQHSLLNHYLPLYFPEAERFLSNSRSSWFARLLIEFPTPQAITQLSENEFIERASQLLSSKHSKAAILRALYAKAQESVALPVSLESHAIATFRLLLAQHLELCRIRAELEETAHELLQSRLDYQILRSVPGIGPIIALTVLAEAGDLRRFHHERQFLKFCGLDLATSQSGAYRGRSQLSKRGNSRLRSALWMAARCATHMNENTFRRKFSRYMQSDPGNGDLRRKAYTACTAKMARTIYGLIKHQQFYRAYNEDAIPEPGGKTRSHGPLRQAAAVA

SEQ ID NO: 76300 - protein, 311 aa, unidentified
MENYIGIDVAKQNFDLCCLNQKEIMQFENNTKGIRKALGLIKKFQPKLVVMEATGGYEALLAAELHAARLPVAVVNPRRIRDFARANGQLAKTDKLDAMVIALFAARMKPPAQEQIDHNSRRIKALITRRNQLIRMRTAENNRQEHVLDGVISRSLNRTIRTIEREIGNVEKLIQEQLDSMPELRAKAGILGSAPGIGQTTAAMLITEVPELGRLNRRQIAMLVGVAPINRDSGTFRGKRMTGAGRRDVRSRLFMPTLVAIRFNPVISRFYKHLLAKGKVKMTAIIACMRKLLTILNFMVAKNEAWNSEFV

SEQ ID NO: 76301 - protein, 378 aa, unidentified
MGAVVRTQLRETPVKQNRTCVGLDVHARSVWACTVDDDSGEMCTARISPKTAEIVKWAKALPGVVEVAYEAGPTGFGLARALIAAGLQCHVLAPSKMERPSGDRVKTDKRDSEWIARLVRLGELPVVVIPSEGQEAARDLVRAREDVRGDLMRSRHRLSKLLLRQGIVYDDTAWTTAHGKWLRSQSFDKPGVQFAFDEAYDTVLTTLARRDRLDKAILAMAAEPAWAPVVARLGCLRGVGTLTGFGLAVEIGDWHRFTGNSIGSFLGLTPSEHSSGGSRAVGSITKTGNGHARRLLVESSWHHRKPYRLSAEMIRRRDGQSPLVRARADQANRRLNQRWRTFDARKKRPTIAAVGVARELAGWCWSLAVIDGEKTTAP

SEQ ID NO: 76302 - protein, 348 aa, unidentified
MVHFVGLDVSVKETSVCVVDDAGKVIFEQKVLTEPADIIALLTSLGVTYGRIGIEAGPLSQWLVNALTAADLPVICVETRHMKALLTAQQINKTDRNDARGIAQMMRVGLFKPVHVKTLVAQEQRMLLTSRKLLQRKLLDVESDLRGTLRNFGLRVGVVSSFRYEGRVRELVAGFPRLAAIVEPLLSVRRVMRQQLAVLHKMLLDTVRGDPVCRRLMTAPGVGAVVALTYRATVDQPQRFVHSRAVGAHVGLTPKRYQSGETDYEGGVSKCGDALLRTMLYEAAHVLLTRSGKWSWLKAWGVRVAQRRGMRRAIVAVARRLAVVLHRMWVDGSEFRWSKDSTAVPAVA

SEQ ID NO: 76303 - protein, 353 aa, unidentified
MNAPGIAVIGGVDTHTDIHQAAVIDSVGRHLDTQSFETTAAGYEQLLAWLRAQGDVLAVGMEGTGAYGAELARFLTANGITVVEVDRPDRRARRAHGKSDPIDAYAAATAVLSGRASGTPKSRNGIVEAIRALRVVRKSAVKARTQTINQIRSLMVTAPSALREKLRGLPTAVLIDTLARTRPTGELTDPDLAARTALRRLARRYQALQQEIKEADADLAPLVTRAAPSLVALPGVGIETAGQLLITAGDNPDRLRSEASFAHLCAAAPIPASSGRTNRHRINRGGDRHANSALYTIVLVRMQHDPRTRDYVARRTAEGMSTKDVMRCLKRFVAREVYRHIKATRVTVLAPAT

SEQ ID NO: 76304 - protein, 341 aa, unidentified
MTSYVGLDVSLAETSVCVLADDGAVRFEGRVKSSPEALIRCLAEHAPDAERIGLETGQTAGVLVRGLRAAGLPVICMETRHAHKVLSARTHKTDRNDARGLAELMRVGWYREAWVRGASATYIRSLLQARKLLMQTKRTLENTLRGAVKRFGVITTKTAGRGFAQRASLAMAQDPAYASYARPMLEVLAGVVAQIRTYDRQLRAIAREHQVSRRLMTVPGVGHLTALAFLSTIEDPGRFKRSADVGPYLGLTPKIYQSGEVDRSGRITKTGDAMTRSYLVEAANVLLVKIDRPVPLRLWGLRIMERAGLKKAQVAVARKLAVLMHAMWSDGTEFEWAQAGA

SEQ ID NO: 76305 - protein, 464 aa, unidentified
MARKGKRTKGIEEAHPFAGMSHVNPDAAGVDIGAVEIVVCVAGENNTQIVKAFGNYTVDLQAIGNWLKEHDIKTVAMESTGVYWIPLFEVLESMGFKCLLISSRSLRRVPGRKSDIEDAQWIQTLHSYGLLESSFRPQADLVALRTMLRHRAQLLEHRAPHIQHMQKALLQMNVQLSQALSDVMGETGQAIIRAIVAGERSPQLLAAFREPNCKKSEEEIGKALTGTWREEHLFVLKQSLELYDFYTQQMEACDEEVDRMYALIRPDWETGELPPIPKKKQKTHSKNAPKSAKDIRSHLKRINGVDLSLVEGFGVSLAQTVTMEVGSNVSEKFPTEKNFCSWLGLAPKHEISGGKVLKNKTLKTKNRAGQAFRMAAQSVKKSDGIFGVMYKRFRSRQGPAQATVSIAHALARVVYRMLKYQVEYETINVNEYEKKYEPSAASEVFEKESGEVGLPTRPCRACLK

SEQ ID NO: 76306 - protein, 410 aa, unidentified
MNNALFVGIDVSSKQNVAYIMKPDGDKHSSFSVPNNLPGAEALVDRIVEVLQKLFIPKVVIGMESTSVYGDNLMYFLRETGKLSGFEKKLHMLNPKQVKKFKDSYSDLPKNDFVDAFIIADHLRFGRINKEVYMSDYRFEALKALTRARHQTVQSLTREKQRFLNQLFMKFSGFTQENIFSNKFGAAASAILEEFESVDELAYMDPNELAAFIQKHGKGRFENVDEIVSVLQKAAKNSYRPPTVIADSVNQILAISMSTIRLLQGQIKEYDKAIEKQFSTIPNTLTSVKGIGPVYAAGIIAEVGDISRFPSQASLAKYAGLTWTQNQSGGFEAEDTKLIKSGNHHLRYYFCEAANSLRKCDPEFRRFYNLKFREVTKHQHRRALALTARKLVRLVYALLKTNRLYIPPEE

SEQ ID NO: 76307 - protein, 407 aa, unidentified
MIFVGVDWAEAHHDVHVADEEGRRLSKARLPEGVEGIARFHELVGAHVEEAQEVVIGIETDRGLFVSALVATGYQVYAVNPMSTSRYRDRHSTSGAKSDAGDAEVLCDMVRTDRHHHRLVAADSAEVEALKVLARAHQSMVWSKGRQSNMLRSTLREFHPAALLAFDDMSSADALEVLRIAPTPTLGASLSRSKIGAALRRGGRQRRVEERAVEIQAALRSEQLAAPPAIEAAMGISVAASVAVLAEMVAQIGHLAEELSSNFEAHPDAEVVRSLPGLGTILGARVLGEFGDEPNRYANAKSRKNYAGTSPITRASGTKKTVLARHVRNRRLADAIYLWAFASLGASPGARAYYDARREAGDGHHQALRALGNRLVGILHGCLTHHLAYDESIAWGYRPDNELAKAA

SEQ ID NO: 76308 - protein, 400 aa, unidentified
MLSIGIDVSKGKSTVCGMKPGGEIVYTPFEIQHTREGMSELVSLLRSSGEEVRAVLESTGSYHCPVVAALLENGIFVSVVNSLRMKRFCSQSIRKVKTDRIDAMQIALYGLAYWQELQPARLPEDTYRELQLLARQYYQMTSLLIKAKVDFNAICDQVLPGMQELMNDHAGRHKLSDFVLRYRHTTHILEMGETRFRKDYCKWAEKKGYRNCERMAALIFATAQNGIPVLPNAPSTQIVITEAIRVLHTVEASRDAILTQMQALAKTLPEYSLVREMPCIGDTLAPRLIAEIGDVRRFHSKRALIAYAGIDAPPYQSGKFCANNRHISKRGNRYLRKTGYEVMQSYVMHKPANDPIFTFIEKKRGEGKSGKLAMVAGLNKFLRVYYGKVTELYRSLPAIE

SEQ ID NO: 76309 - protein, 403 aa, unidentified
MIFVGDDWAEDHHDVYVMSADGARLASRRLPEGLAGIRSLHEVIADHAGEPGEVVIGIETDRGLWVQAMGVAGYQVFAINPLAVARYRDRHHVSGAKSDASDAKVLADLVRTDRHNHRALAGDSLEAEAIKVLARAHQNLIWTRTRHTNALRSALREYYPAALEAFEDLHDRDALAVLGRAPTPADAARLSLSKIRSALKHAGRQRNIDVRAQEIAAVLRTEQLAAPAPLTAAFAATTRAAVGIIIELNHQIAELETELTTHFEAHPDADIYRSLPGLGVILGARVLGEFGDDPNRYTSAKSRKNYAGTSPLTVASGKKHAVLARRVRNRRLYDAIDQWALGAINNSPGARAFYDQHRAVGDLHHQALRALGNRLVGILHGCLRHHTYYSEHTAWAHRTTTAA

SEQ ID NO: 76310 - protein, 367 aa, unidentified
MVKSIKYIGLDVHKNSIAIAIADTGRENEPRYWGQIENDLNQLNKVLQKIVCDGSELSCVYEAGPCGYIIYRYLTGNGIDCSVTAPSKIPRKSGDRIKNDRRDALTLARLHRSGELTSVYVPTPEDEALRDLVRAREDAQHALRKNKQQLGAFLLRHNLVFSGKTMWSLAFFNWLADICMQHLAQQFVLQEYADAVESCSQRVERYTSQIKELSKQTRLYPLIVGLQTMRGVSLIVAATMAAELGDLRRFETPSQMMAYLGLVPSESSSGPKIKRGSITKTGNGHVRKVLIEAAQTYRFQARISRAIRKRQEGIPEKIRAIAWKAQVRLCARYKQLSAKGKNSNLVKTAIAREIVGFSWAIAQEINI

SEQ ID NO: 76311 - protein, 407 aa, unidentified
MPLFVGDDWAEAHHDVHLMNQDGHKLAARHLPEGLQGIAELHAVIAEHCDDPSEVIIGIETDRGPWVQALLGAGYLVYAINPLMVARYRERHNVAGAKSDAGDAKALADLVRTDRHNHRPIAGDSSQVDGLKVLARAHQNLIWERTRHTNRLRNALREYYPAALVAFEDLAHHDALAVLAAFPSPTTGAAASITQIRAVLKRGGRQRNLDKRAGEIKTALRSPQLAASPGVAAAYAATAGSTLGIIAEIVDQITALETELASSFEQHPDTDVYRSLPGLGVVLGARVLAEFGDDPERYNDAKSRRNYAGTSPLTVASGKSRVIKARFVKNRRLYDAIDQWAFCATNASPGCRQFYDLRRAAGDLHHQALRALGNRLVGYLHGCLTSRTCYNEHTAWAHRQQEIPIAA

SEQ ID NO: 76312 - protein, 324 aa, unidentified
MLPTLGVDISKDSFQLELSLKDKLRHRKFANRQEGFGELCVWLAKHKAHQVHACLEATGPYSEALALYLHEQGHTVSIVNPVQIKAFGQSELRRNKDDRADAGLIRRFCEKQRPAPWTPPPPHLRELQALTRHLENLIETRQQQINRLETANNKQVAKSLRKLVAHLQAEIKRTEQQIDDQVDRYPDLKLQAELLDSIPGVGKRTAAKLLAEIPDITQYKSARQVAAQAGLTPRNNRSGTFCGKTRLSKTGNARVRKALFLPAIVAKRHNPIVRAFCERLARNGKNKMQIVGAAMRKLIHIVFGVLKSGRMFDPNHELRLHAPS

SEQ ID NO: 76313 - protein, 364 aa, unidentified
MEQNLLETLPPPAFESLPQPQPKQQIKEHIWQWFGLDVSKDSFTAAYYSGLPDTKNSEVVSFESSRKGVKKFLSWRKKHTFSDYPSAIVMESTGYYSRNLTDIFLKLDSSIHVSICNARSVSYYIKSHAENKTDQSDARFISRYGYDFQPLSVKIKSRDEKLLKEFVSERMKVVKMMTMLTNKSHSLEYAETKAINKGIIDFLNKKKQELDKKIVEVSKLSVEMDNEIALIDSVPGIGRVSASVIYAELGSLKQYTRLQLSGMSGLFPKISQSGTSMNKSKLAKSGSSNLRQILYMDSIKAIEIIPSLRELRKRLLARENSRKMTAMCACMRKLLLIAKGVVDSGIPYDPSFQQKKGEVSHKTA

SEQ ID NO: 76314 - protein, 365 aa, unidentified
MDNRHYTIIGMDVSDRKTQVCVMAREGGRTNIVTETAIPTTKDGLSRFLSAQDRSVPLAFETGTHCRWMYELATGLGFKVYLANPYRLKVITASKTKNDTNDARLLARIALADPELLHPVKLRGPEHQKMINLHEMRNLLVKQRSGIIVQLRAIAKSMGFRLAKGSAAQFHRLDARSWPKEFRDIAWPMVKNLAQLAITIRTYEKLIRELAATAAFKGMVDRLMEIHGVGIMVATGFVATIGGDVDRFAKPRDVGPWLGLVPKQSQSGDVDRQCHITKAGSPFMRRLLVESAQRIMCECMPDTDLKAKGMRMCVRGAKIAKRKAITAVARSLAVLMVAMLKRPDAPYVPLSERGKRDLLAARACA

SEQ ID NO: 76315 - protein, 300 aa, unidentified
MPKYSTAFGMDVHLRSTTVCALDADTGEAVTRRFPGNPWGEIAGWMDGFPGPSLAAYESGYLGFAPQRELAGLGVECVVAAVSKIPRSAADSASKNDRNDAARMAKAILAHDISPVWIPSPEVEGIRDLAGAYDGATARLATAKQRLVALLAKRGFVYGGTAPAGNPRKYWTYDFLRWLDKVRPEDDGGVRTLAALRNEVEAAAEARADLLSEYRAAVDASPIAAEVAALQSIKGCAFALAAAFSAEVGDFTRFRSGRQVTAYFGLAPSQRSSGDSVRLRGDTGAPPGGSEAAAARATRS

SEQ ID NO: 76316 - protein, 336 aa, unidentified
MVVGIDVHKHTHAAALIDDRGGQVAALSITNSPKGYRQLIDWLVDHDAASAVVGVESPGSYGRCLVTALCGAGFEVLQVPAWRTHRERHHRGPGKTDPGDALSIAHVVLRHRDELGPAQEPELVRALGMLELQRRRFVRDRTQAIQRLRSDWTQHDPVAEAAVLRCDRQRELRQLKRIRLGDSLTQRTAARCIRELANDIEELNHKIAALDAEIADLLAEHDNPFEDLLGAGTNLAATIIAQAGDVRRFRNASAFARFCGAAPIPCGSGQTSGATACTVAATANSTPRSTASRSSNNATTPKPRPTWTARSPKAKPPEKHDAPSSATSPTSSTAAS

SEQ ID NO: 76317 - protein, 349 aa, unidentified
MATYYIGADVHGNNTELAVEHKGVIVQRHSVATSVRSIREVLDALGGRKHLAMEEGPLAGWLYRHLVGQVDSLVVCDPRRNKWIASDGDKDDRIDAAKLASLLRGNYLRPVHHSGDEQKVRLKRWVRLYEDRVREATRTINKIRACAREYGERAPGRALREGSARKEWLAALACADLAEQLRVLFKGYDVIVQQVRIARRQLSRQGRTFEIVGHWQQVPGMGLIRSVTLLAYLDTPWRFKSKSKLWKYCGVGLQRATSGQDRYGRPHPAQLELAWPVNKRLKNVVVGAAISAIHGHDNMFRQDHERMLSHGTLASNARHTVARKLLVVLWGMWKNNRPFDASLWACAPA

SEQ ID NO: 76318 - protein, 395 aa, unidentified
MFIVGIDVAKRSHEVCMITSDGQTVQRPFSIRNNCTGYNLMLEKIRKHTNIKSQIVFAMESTAHYWLALFTRLRKDGYHVILLNPIQTSAMRDMFIRKIKTDAKDSFIIAELIRFGRYAESNVAQDRLLALKELCRNRFYLVDMAGDLKRKLIALIDRVFPEYEAQFDTIFCKSSVALLKKYPTPQKLSNAHLDKLTELLWNSSNGHFGEWKARELRELARNSFGVEDCDGAYSTLILLMLDQIQSLSGKADALEKEISRLFQSFDTTVTTIPGVGPIIGAVILSEVGDISRFSSADKLAAYIGVDPSVNQSGEFQAAHAHMSKRGSPYLRRCIWMASQVAVQRDPMFRAYYEKKAAEWLKYMTIIGHVTRKMTAVVFAILRDHKVYEPVLPTAA

SEQ ID NO: 76319 - protein, 355 aa, unidentified
MGLTEATVRTHHEKEGVHMTHITQMGIDLAKHVFQLHGVDEHGHTVLRRRISRTQLRPFVAQLQPCLIGMEACGSAHYWARELAMLGHDVRLIAPQFVAPYRKNDKNDGNDAEAICEAVGRPHMRFVPVKAVEQQAVLTVHRARQLLVAERTALVNQTRGLLAEYGLIVSTGVGVLRRALPELLEMPALPGLAREVFADLADRLRMLDERIATYDRRVAALARQTEPAQRLMQAPGVGPVTATALVATVGDARAFKNGRQFAAWLGLVPRQHSSGGTRRLGRITKRGDVYLRTLLIHGARAVMRQLTRRTDATSRWALALKVRRGFNKAVVALAAKQARVLWALLATGRPYAACP

SEQ ID NO: 76320 - protein, 348 aa, unidentified
MNNVHYIGFDVHKKTISFCVKTAAGEIVEEGSLPTRRAEVRQWAVARSQPWRGALEATLFSGWIYDTLQPYSAQLEMAHPAKMKAISAGKKKSDILDARTIADLVRCNLLPACYVAPPRIRELRRLLRYRSLVVSEAVRMKNKMAGLLMETGALYVKEKLHRKKYFASLLEELEEVPESVIDLLRLSRGALEMFESTQKRLIRELLADPELTQRVERLMTIPAVGEITALTWALEVGDPQRFHSNSDAMSYCGLTAALKSSAGKQQRGPISKQRNRWLQTTLIEAAKLAPRWNPQLAALHARELERGHRNRATLAVARKLVAYLLAVDKSGQPFQVRALSEEPTKKAA

SEQ ID NO: 76321 - protein, 359 aa, unidentified
MQTQRKELNFEGQSIYVGLDVHLKSWTVSIFTEKLHHKTFSQPPRAEVLSEYLKFNFPNASYFSTYEAGFCGFWAHFKLEELGIQNIVVNPVDVPTTQKDQKRKSDAIDSNKQGRSLRSNELKGIYIPRPETLEDRTIIRVRFTIVKDMTRQKQRIKSLLYLYGIEYPDEFQNTNTHWSKRFINWLKTVQLQYTTGTDALNLLIKEAEQQRLILLEATRKIRTLSKTERYAKNIELITSVPGIGLITGMMLLAEIEDIKRFDNSDKLAGLIGVVPDCHSSGPTEKKGEMTTRGQYFMRKGIIECSWVAASKDPALSLAYYEYCKRMEPNKAITRIARKLINRIFTVLKNEKKYEIRIVK

SEQ ID NO: 76322 - protein, 356 aa, unidentified
MEPIKTDCIGCDAHRRYSVFVVMDERGHTGKETRVEHSRELYRHFLSTLPPGSPIALESIGNWYWMIEEMERAGHRPILAHAKKAKLMMGLTNKTDKLDARGLALLLRNGTLPSVWIPPGELRDQRELPRMRMVFTRIRTMLKNRIQSTLAKYGIQIDQVSDLFGVTGRGLLQNRLNELPQETQRSIQEHLKLLDGVLEQIEGTEKRIKELIKETPQMQLLMSLPGVGPILAIVIILEIGDIERFPGAPQLASYAGTVPQVKSSGGKTYYGRVRPDVNRYLKWAFIEAANSIVVNQRRMPNRHVVELYHRIMKRKGHPKAIVAVARHLAEATYWMLTKNEAYREPTSSRWISPTQK

SEQ ID NO: 76323 - protein, 338 aa, unidentified
MTELKLISIDTSKHVFTLHGVGDRGEVVLRRELRRQQLEGLFAKLPRTEVVLEACGGSHHWGRVLMALGHRVRLIPPQYVKPFVKRNKNDRADAEAMCEAAVRPGINFVPVKSAEQQAAAMVLSVRELLVKQHTQLVNAVRGHAAEFGVIAAKGTGHVEPLLARIADDPAVPEPARAMFAELGGRIAALSVRLTALDRELARLHRSNPVSQLLAEIPGVGPISALSFALTVDVSQFSSGRHLAAWLGLTPKQKSTAGKPRLGGISRQGNERLRQLLVLGATAVVRTVKPGSRHASAWLLGLLQRRPRKLAAVALANKMARVVWAMMTSGEAYRPATVA

SEQ ID NO: 76324 - protein, 325 aa, unidentified
MEQRKTIIGIDVSKKTLDVFIKTIEVHIQISNDSEGFKKLLALLKVNKLKPEDCLFVLEFTGGYEYRLVQFCQAKMFSYVRISGLALKRSMGMVRGKSDKIDAKRIAEYGDEKQSKLEAETGSLANIVRLKRLLSQREDFVADRKAYDHRYKELQYMMDLPDSDSILKRFKKTVADFQKLIEKTEDEIVKLIKANDAFQLNFELLTSIKGIGQINAWTMIAYTENFTSFQNGRQFGAYIGVVPYDFTSGTSIKAKSRTSKMANQQIKALLQMAARAAVLHNKELNLYYERRIALGKHHMAVMNEIKFKLVNIMFAVVKKTKTLRG

SEQ ID NO: 76325 - protein, 345 aa, unidentified
MKLTTVGIDLAKSVFQIHGVDERGKIILKKQLKRSQMMAFFVNLPTCLIGMEACGSAHHWARELQKLGHTVRLMAPQFVKPYVKTNKNDMADAEAICEAVGRPNMRFVPIKTVEQQAILSLHRVRQGFVKARTAQSNQIRGLLAEFGLILPKGIGQIAQRIPELLEDADNGVPGMFRQLIDRLLAHFNDLHRQVLELEAQIKAWHRDNPASQRLAEVPGIGPITATALVASVGNARDFGNGRQLAAWLGLVPRQHSTGGKSVLLGISKRGDSYLRTLLIHGARAAILAAQRKTDMTDRWLTNLLQRRNPNIAAVALANRNARIVWALLAHDRNYQSAYASTIKSV

SEQ ID NO: 76326 - protein, 341 aa, unidentified
MMLYAQVESVDMLINVGIDVGKESLDLCVLLDKTTGKMKSKKFRNKKEGFDSAFEWITKTTCNAPGKTLITMEATGVYHEGVAYYLYSQGFQIFLSNPGKAKKFAQSLGFVHKTDKSDAAMLAKYGSIQLDSIAFWIPEDDDVRVIKTLIRRLNALEKDKLRESNRLEASTISDAAERVIQSTVYLISVLDGEITEIQHEIDRLISCNPEMNKNRELLLSVIGIGKVMARELVYLFSAKKFTSAKQVAAYVGLIPRLNESGVFKGRSSLSKSGPSRIRSKIFLAAVCAGTHNPDIKAQKIRLTHAGKTKMQALGAAMRKLIQICYGVIKNQTRYQPQIVLI

SEQ ID NO: 76327 - protein, 334 aa, unidentified
MKNIYVGIDISKEKLNLCYRHDLQIVHEEECRNDVNDIRRALRESFKRLGVTNEEVLICAEYTGRYIYPLTISCQDMGLYLWIDDPTRIKNSFGIIRGKNDTIDAARIAEYAFRYKDKAVRYTMADQSLSSIKNLLSDRNFLLEDRKRYQAQITDQKKYMAPLAFKCKSQRWNKIIKVIDQQIDAIDVEIDRLIAADPKLSRQKELLMSIDGIGKRIAINMIAITGGFTRFKDARHFCSFAGLTPYRYDSGTSIRSKARISKRANQNIKALLHLSAVNVATRMKDGEYKEYYNRKINEGKHVMSVLNVLRAKLVHRMFAVIARDDFYHKEYNIQ

SEQ ID NO: 76328 - protein, 386 aa, unidentified
MELKVTNKAFAIDISQSKLTAAKGELVVEQEKSAVYVKEVKEFNYDNEGIEELIKFLGEYKEGIIEATGIYYFYLHEKLTEKGYKVTVINPLHLTEILGKKTDKLDAQRLLVAHMTGVIKGSYIPTGEIMELRELTRYRESLVEKTTQVKNEIRKILEFAGYKIQPFDKKGRKLLEKLVKGEGLSKEEKEELKEKLGRNLNDAEKLALKQLVELLKNLEKMIKEVEDMIISKIPKPVIELSKIPGIGLISAATIYAEFGDVSRFSSSKAARAYASFAPKTKQSGDSESHSGMIRGNKYLRRALYLVAKVARGLEPFKGYYERLIARGKSVTQATCALAGKLASICYHVIKDGVYKGVVKKSFRIPRGKEVNVKDFDVGDALDSLSP

SEQ ID NO: 76329 - protein, 413 aa, unidentified
MGHKTAEVELHYERCCGLDVHKELIVACFRNGSKNTVKVFGATSKELQKLAEWLISNDCEMAVMESTGSYWKPVYNILELLGLDIMVSNAREVKNLPGRKTDVNDAEWMARLLAQGLLRPSFIPDRPQRELREVTRYRKSLTEERAREINRLGKMLEGANIKLTSVVDNVLGKNSRVLLEAAIAGEPITGITIEGMLNGKIKGKAALLVDAMDGVLSKTQRLLIKAVIDHIDDMARRISDLDDIIRGEMEKYDEAIRRLDTVPGIGFDSAQTILAEIGLDMSQFPTAGHLAVWAGVCPGNNVSAGKSKGGSTRKGNQTLKTTLVQCAQSATNAKGTFFRAQYDRLVVRRGKNRAKMAVAHSIIIAVWHMLKYESDFIELGGDYYTKFNPEKKINMYLKKLAELGWTPSVPAVA

SEQ ID NO: 76330 - protein, 353 aa, unidentified
MPSKADTAVARTIGIDTGKNTLHMIGLDEKGAIVLREKVSRTRIAARFVNVPPCLVGIEAGMASHHIARELVALGHEVKQVPPGYSKPFRQGHKNDFRDAHAVAEAVERPSTRCVPIKTDEQLDLQALHRVRSRLISNRTAVTNQIRGFLLEHGIPVRQGHHFLRRQLPQLLGTRTDVLSPRMIRVIGDLMSDWNYLDERIERVTDEIESLARADEGCQQLITVPGIGPIISSAMVAAIGTGAAFCKGRDFAAWLGLVPKQMSTGDRTILGRITRRGNRYLRTLFIQGARAILLRPTGWAKHSFGSWLAAAARRMHRNVLAVALANKLARIAWTVLAQARCYEARVEPRVEPA

SEQ ID NO: 76331 - protein, 349 aa, unidentified
MRYFTGCDAHKKYSVFTSIDEECKVQFTKRVEHERECFRDFLRTLPTDSPVAVESTGNWYWIIDEIERSGHQPLLVHAAKAKLMMGQINKTDKLDSTGLAKLLRNGTLPSIWIPPSEIRDQRELPRMRLAMVHMRTMLKNRIHATFAKYGINFEDVSDLFGKRGRKYMDQYMEELPTETRRSVEQELILLDQIAEQLNLAEQRIGRVIEITPSIKLLMTIPGIGKILSITVALEIGDVDRFPDAEHFASYSGTVPRVSSSGGKTYFGRVRPDANRYLKTAFIEAANVIALQQGRLANRHVGRLYLRLRDRKGHAKAVMAVARHLAEAAYTMLKKNEPYKEVAPVSRRQG

SEQ ID NO: 76332 - protein, 421 aa, unidentified
MDVLLERCAGVDIGKDEVVACVRTPAPDGKGRHKETRTFRSFTGDVESMAEWFIAEGVTVVVMEATGSYWKPIWYVLEERDFELKLVNAQHVKILPGRKSDVLDAEWLAELLEHGLLRGSFVPPPAIRELRDLTRYRKRLVQAHTAECQRIQKTLEDAGIKLDSVASDVLGVSGRLMLNALVAGERDPEVLAELSKGRLRKKIPELRRALRGRFRDHHALLIGLCLEHTAHLEAAIATLDGRVDALFAANESEEGVPFERARDHLDTITGVGKRAAECISAEIGVDMSRFPTAGHLASWAGMAPGNNITGGKRRSGKTTKGDVWLRDILTQCAWAAGRSRDTYLSAQFWRLARRIGKKKAAVAVGHSILVICWHLLTDDADYDDLGGDYFSRRANPDRHRDRLIEQLQHLGYHVALRKAAA

SEQ ID NO: 76333 - protein, 321 aa, unidentified
MSVSNQRCAGIDVSKGTLDIAISNNASQFTVPNGSDGFTQVIGELKRNETRLILMEATGGLESSVACHLQSEGFDVVVINPRQARDFARAMGYLAKTDRIDARVLLQMSEVINQHPEREKYIRPLPDAHRQILTAMVVRRRQLTIMLTAERNRLHPSHPQSYESIKSIISALKGELARIEGEMAIHIKDHFSELSDLLSAVKGVGAATVAVLPAEVPELGSLSRREISALIGVAPVNRDSGTMRGRRTVFGGRASVRTALYMSALVGTRHNPVIKEFYTRLVAAGKPKKVALTAWSDHAPVDSFCPHCEAFSKASGLTPPR

SEQ ID NO: 76334 - protein, 387 aa, unidentified
MCASAPASAQAAIHINLAAIFVSLELSRSAWLVTSLSPGGGEKMSKHSVRGGDIAGLLDQLARLRTTAQARTGKIFPIIVIQEAGLDGFWIHRVLERERIESHVVDAASILTSRRRRRAKTDRIDGEALLRTLLAYKRGEPRVCSMVRAPSAEEEDRRRLCRERKTLVAEQVEHVSRIKGLLFAQGIHDYEPLHRDRRQRLKELTTGDGRPLPVHLEAQIGRELDRLELLLQQIKAVEAERDDLLAPVSSAAPAAVAALARLKGIGPEFAAVLWLECFFRSFGNRRQVAAYAGLAPTPWQSGSVQHEQGLSKAGNPRLRTMMVQLAWLWLRNQPPSELSVWFRERVKRAGGRGKKTAIVALARKLLVALWKLVSDGVIIKGAVMKAA

SEQ ID NO: 76335 - protein, 358 aa, unidentified
MKYIGCDFHPSFQQIAMLDKETGELVERRLLHTEEARSFYQGLQGSVVVGVEASGNMDWFESLLAGLGQEMWIGDAAAIARQEGRKQKHDRRSAALILRLMMENRFPRIWVPTVAERDLRQLLIHRHHLVRMRARIKNQLQHMALNQGWQKKSKLWSKAGLELLRSLKLEPWTGQRRDTLLAMLEDLEEKIKPLDQAVAREAERNQMARLLATHPGVGPVTSLATVLTMGDVNRFADSRSWVSYVGLNPSEESSGQRRRLGAISKQGNPFLRQLLVEAALTAARGDKDLGRMNARLKARKHHGVAKVAVARKLAVRLYWIARTKRSYPDVVRMQGSQSHPVAEVKAETLNRPPASHQS

SEQ ID NO: 76336 - protein, 361 aa, unidentified
MNEGKDIIVVADYHAENVEFRWFNGTTGEERTGRYPTTRAGILRQVEQAAGELERGGRIVWIMESTTGWSRVKDLLGERATFVLANVLQMPLPPKAKRRKTDKIDTARMLREYLHGDLPQSFQPPAWWREVRRVVDCRQDLVERQTAIKNWIGSLLHHETWEDRENLWSAKGLRRLRAMKLSPSDTALVELKVQQLEQLAKQLEQVEARMRTIYAGWEEAQWVDQVRGIGMVTAVSVLAHIGPIERFATAEDLISYAGLAPGMRQSDGTCRHGRIGGGGTDSHLRYLLIEATTWLCQIPRYRPTYDRVMKKRGKKIARIVVARLLLRSVHKMLTDKVRFNPTPRLAPRTTTKTTATTGCSR

SEQ ID NO: 76337 - protein, 508 aa, unidentified
MPRSPKIKHFYQTLPSSDCDGIEIMIRNEFDEGVEVQTLRSYGVGIDCHSKFIAVCVHVRRDNHVYIYRHDFDTDWNSLVEAKEWVIAVIESKSNPVPDMSKPLHYVIEATSTYHMPILMAWEGVPSVINPMLAGATKKKTDELDAQRLSFHALTGVWEESYVASTDIQELRVLIAERNHFQKLATQCSNRINNIIVRFGITIGRGKSVTKDPEIRAIVEDLASDNPHEHDNICPKPLPNDVKSLIRIEYQNYDINRTKAEEYLDLVRQKVYSTDWETMDGTLSGKEMVKILCTAPGVGEITTFTWLAFVGTPRRFPNAKALSAYCGLDPSNMISAGKVTSTKKRKGCRALHAILVSSADKIIRAHSEAFGRWGYLMANSSGKWGKATNAVGRKLAIALYYMMLTGQEFSYEKYSIVKDAVIFNIPIDELPALNRDFKRYIRILHDNGIHTTADMITAYLSCSIGGIKGLGRKFYVTLKDFISHQKKYQETYKELHNAATATQEATAS

SEQ ID NO: 76338 - protein, 373 aa, unidentified
MEEFIKYIGMDVHGKTIAVAVADSRSSEVRFIGQIVNTPEAITKLVDQLKARDARLSFCYEAGPCGYGIHRQLLLLKHDCQVVAPSLIPKKAGDRVKTDRRDALMLARLHRAGELTAVWVPDGEHEALRDLTRARGDIKDLERRARQRLLAFLLRHGRRHEGKSHWTQAHFRWLETVKFEHPVQQIVMQEYIDTVVSCGKRVLALDKQIEQAAAKSVVWPVIEALMALRGVQLLTATITVAEIGDLKRFAKAAQLMAYLGLVPSEHSSGERQRRGGITKTGNSHVRRVLVEAAWTYRFPARKTRTLQKRAERCDEKVQAIAWDAQKRLCHRYRHLTDGGKLKVQATTAVARELAGFIWAIGQAVPTPVAKTGH

SEQ ID NO: 76339 - protein, 354 aa, unidentified
MQSQIIATPKLFIGMDIHKKSWSVHLRTDLFDHKGFSMPPQPEKLSDYVASHFADHEVSLSYEAGCCGFSAARYFLNMGWTVKVVNPNDVPRSDKQLYQKTDKLDCRNLCKQLQQEQLHGIYIPTEPEEQLKSLLRQRNQVVKQLRKAKSHIKAMLLFHGIAIPDQFDNPNWSRSFLTWLNTIQWSHSTGTACMSSKLRILTMLKNEYLQTSNELRAYCRKHHKKDYYLLKSIPGIGGLLAAAILAELGDIRRFNNEKEFRSCIGLVPGIHQSSETAIKMGLTPRCKALLRSYLIESSWVAIRTDPEIQAYYRKHAGKNSKNVIVKVAHKICCRILSVIKNETPYQINYKSTKK

SEQ ID NO: 76340 - protein, 425 aa, unidentified
MNYKQNEKINQVKESTLVVGIDIGSTTQYARAFDWRGIELGKVFPFSNSREGFESFKAWMQHLQDKYKKLDAIVGIEPTGHYWFDLGAYLEDEGILLVMVNPYAVKQTKELDDNSQSKNDRKDPKVIAKLVTEGRYSAPYTPDGVYADLRIMVANRKRLIREMTQIKNRFARWFAIYFPEYTDVFGDYEAQSSMLLLKKVCTPEAIVELGAEKINQIWRDAKLRAEGMKSATTLCETAKRSIGLKKGSLAARYEMKLLLEDYEYKKAQLDAVMEEIEKLCRKIPESEQMLAIKGIGVITVAGFLAEVGDVRRFESPRQIQKLAGLSLRENSSGKHKGQTTISKRGRSKLRAVLFNAAIPLIAKNPEFKSLHEYYTTRANNPLKKKQSVIAISCKLIRVFYAILANGVTYDAQKMLSDIHRQPQAA

SEQ ID NO: 76341 - protein, 412 aa, unidentified
MKDLLEISCGLDVHKEKIVACILTGPLGKPTRSEIREFSTLIPDMIALRNWIVSKNCHHVSMESTGIYWMPIYEILEDAFSGDITLLVVNARHMKNVPGKKTDMRDSEWISTLLRAGLLNGSFIPEKRIREFRDLNRYRKSVIRDITSQKNRIEKFLQSSGFRLSSFISDIFGASGRNIILHLIEHGQIDKTALDSCLKTKTRNRIDEILMSVNGTLSEHQKAFLRILMTHYDSLKKHLAEIETSLEEDMAPFALQVEQLNSIYGISTTASCAIIAEIGIDMKPFKTAEHICSWAGLCPGNNESAGKRKSTSVTKGNPYIKSMLCEIAWVIAGKRNTYLSAWYWRIKQKKGAKKAIVALARKLLVIIYTMLKQGTLFDESCFETRRKHCEQKQLSRYIRELEKHGYHVEAQS

SEQ ID NO: 76342 - protein, 425 aa, unidentified
MLPDVTRRDGRIKLLFIGDDWAEGHHDVVAQDDAGKTLARRRLPEGTDGIARFHELVASCLGEDAEPDPARVIVVIETDRGPWVKALAAAGYRVYPANPKQAARHKETIANSGKKDDFFDAGALADMGRTRRHQLRELAADSDIAEAVKIAARAHQKLVWERTRHLLRMRSALREYFPAALEAYADLTLTGPDALELLGRAPDPDSAARLTVTQITAALKRAGRRGDLPQRARDIQAALRAPHLPQPAVIAEAYAASVQAGAAVIRALNEQCKILEAKVSELFRRHPDAGLYLSQPGIGDITGARILGEFGDAPGRYATAKARKNYAGTSPLTIQSGKKKTVHARYIRNRHLIDALHAQALSALTASRGARAYYDELRAHDAGHDDALRRVASRLVGILHGCVKTGCEYDETTAWSHRAESPQAA

SEQ ID NO: 76343 - protein, 343 aa, unidentified
MQTVTTVGLDIAKSVFQVHCVDATEQVVIRRQLKRRYVLAFFQKLPPCLIGIEACASSHYWSRELQALGHTVRLMPAAYVKPYVKRQKNDATDAEAICEAVTRANMRFVETKTPEQQSCLVLHRTRHLLIRQQTAVINAIRAHLAEFGIVAPLGRLGVEELLGVVADPQDRRVPEIARACLVALGAQLRVLKKQILEFDRMINACHRSSETSKRLDEIPGIGPALATALVASVPNPRAFRSGRDFSAWIGLVPRQHSSGGKDKLGSISKQGDRYLRGLFTAGALAVIRYAKIHGTKHRPWLAALLARRPTKVAAIALANKLARMAWAMMAKGESYREPVALAA

SEQ ID NO: 76344 - protein, 402 aa, unidentified
MNFFVGLDWASQAHAVCVLDATGQVCLQGSVEHSADGLAELLRRLARFGPPASLPVALERPSGLIVDTLMDAGYRVVPIHPNALKASRPRYSAAGGKSDPGDAFILGDLLRTDGHRFRPLQPLSDETRALRALVRGRDDLVAERVALANQLRALLDRFWPGAAAIFADVDSPIALAFLSRYPTPHSAERLGEKRLARFLVQHAYCGRRPAAELLARLRSAPITQTSELEAEASGEIVRALVTVLLPLVTQIQQLSTAIAAALPQHPDGPLLQSFPRSGSVNAAQILAELGDDRSRFATDEQLAAEGGVAPVTRESGKHRGVAFRRACNKRLRQALTSFADHSRHASPWAAAIYAAARRRGCHHPHAIRVLARAWVRVLWRCWQDRRPYDLTLHRAAQRVAAA

SEQ ID NO: 76345 - protein, 487 aa, unidentified
MFPERILRCRLVFRLYYKAFAETRSCLLTALFQLEMKETLSSINDAKAESQRQPYAAWIGLDWADQKHFWSMRTADGRLQRGQLENTPEAIKIWAAELGKHFAGRPVAVAVEQARGAVINMLSMYAHLVLFPVHSTTVANYRKSFSPSGAKSDPQDGDLILDLLTKHPEQFKCLRPDTVETRTLQLLTEERRKLVNQHTSQVQYLTNWLKQIFPQILFWFDDPSTKLVEDLLLCWPTLPHLQKVSPKKLLKFLHQHNCRSEVRNQQRLAEIRQAVPATTDPALVSGGTLCIQNAVRLLAQLRDSIAAFDRHIQEVFQSHPDRFIVESFPGAGAALEPRLLAAVGTFRDRFKSAANLASFAGIAPVTESSGKSRWIHWRWACPKFIRQTFHEWAGCSIQHCEWARAYYDKKRASGKGHHAAIRALAFKWIRIFFRCWRDRVPYDEKRYLQASQARLPKRTQDVPHTPVKPTIVLKTCGDFKKLLEVSC

SEQ ID NO: 76346 - protein, 342 aa, unidentified
MNLPVRIGMDTSKSVFQLHGVDENEGVVVRRQFRRAEMIRYFERLPPVLVAIESCGSSHHWARLLQSFGHEVKLIPPQYVKAYVKRGKNDAADAEALCEAVTRPSMRFVPVKSKEQQAACMLMTVRERLVSVKSQLSNAFRSYAAEFGIVGPAGRQNVTALIKRVLEDDNLPEMARDLFRLQAEEYAAVQARLAKIEAKLMKWHREDDVSRRIATIPGVGPIGSSMLSMKAPPPETFRSGRDFAAWLGLTPKDHSTGGRQRHGGITKAGDSVLRSTLIVGATALLRHIRKGRHKPTPWLASLLERKPPKLVAVALANKFARIAWRLMISGGVYNRPAAAMPI

SEQ ID NO: 76347 - protein, 344 aa, unidentified
MEELREDHDDGTVARVAAIDIAKASGMACPRVPHDTIEGRRVQKVWTVAPTTNTIPELGDRLVCQGVERVVREATGSYRRPFFHLLEARGPDCRLVIARDVKNVPGRPKTGKLDAVRLAKLAEHGMVRASFVPPKPVRQLRDCTRTRTVFVQERTRHKHRVDKALRDAQIKLSGVVSDLFGMSGRAMLDALVAGERNPRALAGLAKGNLVKRKPALIEALTGQFEDHHARLPRVLLGTVDHLTAQIGELDRLIARTLEEITTPPDRSGTGSEPATTVSARDPAEKLDAVPGIGPATAQIILAEIGADMSRFPTPEHLIPWAKLCPRTIQSGAKNSTGPAGQGNP

SEQ ID NO: 76348 - protein, 367 aa, unidentified
MTSLAHRGYIHLGMDVSRDSIALAILGPDSDVAITEKIPSDPESVRRLIKRVGRPSGIWACYEAGPTGYELYRLLRSMKVRCDVIAPSLVPKGRGDRVKTDKRDSRRLAGLHRAGQLTPVAVPSPAQEAVRDLCRTRGQMVSDLTRARNRLTHFLLRHGLVHRDGSKWTQRHHAWLAAQHFDDAALVATYRHYRATVALRDNALDDVEADLRAYFGTAPFADAAVRLGGYRGMTHMGGLCIGAEVFDWRRFPKARSFMAFTGLTCWEDSTGLSEHRGSITRAGNSRIRAQLVEAAWAYQHQPAIGETLRQRLALVGPATSARSWSAQTRLCRRFHALAQRKNLKSKVATAVARELAGFLWAEMTAAA

SEQ ID NO: 76349 - protein, 345 aa, unidentified
MKITTVGIDLAKNVFQVHAVDERGKAVLRKQLRREQVAAFFVNLPPCLIGIEACASAHHWGRTLQHFGHTVRLMAPQFVKPYVKTNKNDTADAEAICEAVGRPNMRYVPIKSIEQQAILSVHRVRQGFVKARTAQANQIRGLVGEFGLIIPQGIGHIGKRVPQLLEDASNELPGSFRQLIDRLTRHLKELDVQVKEFERQIIDWHRGSELSRRLEKIPGIGPLAASALVASIADANSFKNGRQVSAWLGLVPRQHSSGGKATLLGISKRGDAYLRTLLIHGARSAIRVAQLKPGNTNIWLAKLLNRRHQNIAAVALANKNARTVWAMMAHGREFKADYISRVATV

SEQ ID NO: 76350 - protein, 422 aa, unidentified
MQNTAARKLKQVPEGYLIVGIDPHKKKHAAVAITQDFTIRDRFKLDNTREGLEFMVRRVRTEMVKSDCRGVMFAIETGGHYWRNVAYFLDEQGIPFRFINQYTLKRRREGKDLNHRKNDYRDSEVAAQLLCTGEFVESTIPQGVYAELRTAHNAYRRLVKERTRITNLMKGLLDGLFPEFVQVFKDPCALTALCVLSFCAVPRVIAGMTQDEFVATVEAHYHGRRLMRRKLGALHQVAQVSIGIAAGAGPVASELSFLIEKMELIRGHIGTIERTLVRMVDETEEGKFMLSITGLNYIAVAGLLAELGSFKHYRTAKQMIKMAGSNPTESKSAGKRGAHTPMSKQGRPVLRYCAWTSVIPMLRFNADFRAWAKQRRERPAYANPLGGREVVGAALNKLLRLAFAMVKNQTFYRSLQLVPVLG

SEQ ID NO: 76351 - protein, 310 aa, unidentified
MNIQPGFVGCDISKNHLDIFDEALGRPERIANEAAALAPLIERWKDKEVLVLFEATGPYDACLRRALTAAAIPFARVNPARARDFARATGRLAKTDAIDARMLAAMARALRPDCAPAPSPEREALARLHKRRDQLVLMRKQERTRLAAIDDPVIVEDVEAHIAWLSTRIDRIERQTRALIENNAHLTEDQRLLRSVPGIGPVVAATLIALMPELGTRSPKTIAALAGLAPFNVDSGQFRGKRVIKGGRRRVREALYMAAITTIRSKHRFARIYKAMIDAGKPPKVALIAIARRILITANAILRERKPFQP

SEQ ID NO: 76352 - protein, 340 aa, unidentified
MEHIAAVDLHSDNGYYGIIEPDGKRVYQKRLPNDLSIVLRELAPYRETIRCIVIESTYNWYWLGDGLMEQGYRVKLANPAKFEKYNDLKYSDDKSDTFFLTEMERLNILPTGHLYPREERGIRDLLRRRMLLVQQKTSHILSFQSLISRQTGGSISSNELRGLETEDVEKLLAGQERHVVFAGQNTIAVIGFLQERIRLLEKMVLASARLRSEYEKLQSIPGIGKILALVIMYETGAIGRFEAPGNYVSYCRCVKSNHLSNGKKKGSGNRKNGNKYLSWAYVEAANYSRRFCEEAKRYYQRKLAKGNSVIATTALAAKLCRAAYFIMREQVEFDVKRLFG

SEQ ID NO: 76353 - protein, 363 aa, unidentified
METTEKTTKNYVGIDVHKKMLEVARLRDSAGKIERQTFTTGGEGITHLLEWLTPEDVIALETGNQSFRLAKTLILKGFDAIVLNAGDLAVIYKSLKKTDREDALKLARLISRIPREELPLVEIPSDEMEDARRLSTEQATWTKQRTALINRLHSIFTQAGRTEITKKDLSSINNREKVVCLLSTRYISEAKRLCQMINHFETMLAAVHFEINQLLDKELSFTTLAMSMPGVGPVTALVLFSYLGDCRRFSNGKQVAYYAGFVPRVDSSGDTIRYGGIIKHGAQGIRRVMVQSAWSLVHSKNGNELTLFYERLKATKGKGKAIVAVARKMLCVFYAMMTSGELYRGVELEDIFKKIKNYGIHNF

SEQ ID NO: 76354 - protein, 458 aa, unidentified
MNNFYLGCDVSKGYADFIIINEDKQIVLDSFQLDDTALGHQQLCSILGMFSGEHSGSVIYSAVESTGGYENNWYTSLWNLQSKMCIYVARVNPLGTNHNSKASMSRIITDKNAAKNIAEYLINHKKKIIFNKDDKFSSLRKQWTFVRMLTKQRTQLYNQLESILYIANPEMLIYCKHGYPNWLLTVILNYPTAKRLSKARVATLSSIPYLNEQKAISLINKARVSVAASDDDVTANLIISLVKQIIELSKTIDRQSKFIADNCKLPEIEILKSFPGIGDYSAIGLLLNICSTEYYQSTKNLASYFGIHPIWKQSGDGTWGMHMSKQGKKEVRNILYMVAKTAIVHNERIREIYARHLKKGMNKTAAIGVCMHKILRIVFGMLKHNEKFNPEKDSANSQKMLKDNKQVKAVTNKLRRYQKLDLAAPISRRQTKKRKEQEKSQNEITSFSTGSIPHSFSD

SEQ ID NO: 76355 - protein, 344 aa, unidentified
MSTLAVFVGLDYHQDSVQVSVLDEQGKQLLNRGCRNDWKEIVRATEPLGRVKRAAIEACCGAADLAEELVNQAGWQVDMAHPQYVARMKKSPDKTDFSDGRMLADLTRVGYLPTVWLPSAAERDLRQLVNHRQNLVDQRRAVKLRIGAVLREHRAKPPQVRGSPMRYSRWSKTWISWVRTAEQLSSHAQWIVGDLLDEVEHLDEKALAADKRLREAAGDDPRVKQLLSEPGIGHVTAWTLRAFVGRFDRFASGKQLSRYCGLSPCNASSGTRQSDSGLVRGCNRLLRATLIQAAHRLVRTEDRWIKMSDQMSRRGKPAGVIAAAVANRWMRGLWHRMKEQAMTN

SEQ ID NO: 76356 - protein, 342 aa, unidentified
MGTITTIGLDIAKSVFQVHGIDATGEVVVRRRLSRGRVLAFFEKLPRCLVGMEACNTSHYWARELIALGHDVRLMPAQYVKPYVKRGKNDAADAEAICEAVARPTMRFVAVKTPEQQSTMMLHRVRLMLNRQRTQLSNAMRAHMAEFGVVGPVGRMGLERLMAVIADREDLRIPPDARVCLEMLAAQLAVVKEQILENDRRIRARARETEVGRRLMEIPGVGPLLASAFVASIADPTAFKSGRDVAAWIGLVPKQNSSGGKERLGSISRAGNRYLRQMLVVGAMAVIRHVERHGTKRRWLIQLLARRAKKVAAVALANKTARTIWALMTNGERYREPTVALP

SEQ ID NO: 76357 - protein, 346 aa, unidentified
MRILALDLGKYKSVACDYEAETGGHRFTTIPTNPKAVHDLMVDREPERVVIEICSIAGWVSDLVRALGIEIQVANPNDERWQWRKVKTKNDRADALKLAQLSAMNQLRLVHVPQSEIRQWRALIAYRQHLVQRRTKIKNHIRDLLLREGQHLPRYRSAWTQEGIANLEAMSKPFSELSLDELWRGELGVELAQFRAVQKQLAEVVTKLDELGAANHSVQLLRTIGGVGPRLAEAVVTMFDDPHRFRTAGQVSSYIGMVPKQFDSGETQRAGRITRHGNRLVRSLLVEVAWCALRHNPWARETYKRISGGKKSRKKIAVVAVGRKLLVRCWAMLRKQTEWRTELSVA

SEQ ID NO: 76358 - protein, 422 aa, unidentified
MSYCPVAGIDVSKRFSDMCILSPDNKIFAQEKIYHDETSINRANALLQKAERLFFSKPVIVMESTSHYHLILFQFFSEHGYDVIVVNPLQSNSMKDFSIRKRKTDRVDAFKLAMMYRTKTLRPSQIPQTATRALRQLCRHRAELLNDVSSYKNRLTALLDQTFPGYDKVFSDVGGVTSCAVLVRFPTPTILLVEEESELVEVIAAASKSGYSFAKKKAGLLISAAQKAQTLGIHSCADETLIVCTIQMLRTLSESVLQIETAIDNLLAQIKEMRNNVSLLQSIPGIGSHSAALLLGEIGDISLFKKPKQLAAYFGLDPTERQSGSFRGTKNKLSKRGSPYARAALHMGVVNSICKRGKDSAANPVLLSYYEKKCKNKPAKVAQAASMHKLVFIVFAVLRDQKPFELKTPEQHAVEQGFVKAA

SEQ ID NO: 76359 - protein, 368 aa, unidentified
MAKRSTFVGLDVHKESIAVATAESGRFGEVRPYGTVGGELEALDKVVRALRAPNRTLHFVYEAGPCGFTIFRHLKQLGEDCAVVSPSMTPKRAGDRVKTDRRDAVMLARLHRAGELRAIYVPNENDEALRDLVRAREDAVEVTREAKQRLKAFVLRHGLRYRGRAGWTIPYRRWLAGLTMAEPAPQMALQEYLSTVDEAEQRVTRLTEQLRQLVPAWRWAPVVEALQALRGVSFITATGLVAEIGDIRRFARAPELMAYLGLVPSERSSGPLTRRGRITKAGNPHARRLLAEAAWAYRSIPRIGRVMQQRQDQVSAPVRALAWKAQVRLCGRFRRLSARGKPRVVIATAIARELTGFVWAVAREVPAP

SEQ ID NO: 76360 - protein, 344 aa, unidentified
MNKLSRVGIDLAKNVFQLHGVDRQAKVAWRRRLMRDQWLKVLLGKVEPGCEIGMEACAGAHHWARQLQAKGFTVKLIAPQFVKPYVKSNKNDANDAEAICEAMSRPSMRFVAVKTVEQQDIQAAHRIRAELIGHRTAKANQVRGLVAEYGLVAPQQLSRLRAALPDWLEDAENGLTSRFRGLLSGLWNDLMTLDHRVAELDHEIDLIAKSDPVAKRLQQLRGVGPMIATALVATVGNAEQFANGRQMAASLGLTPKQHSSGGKDRLLGISKRGDAHLRSILIHGARSVIRTAKVKDDRLSQWVTSLAERRHPNVAAVALANKTARIAWAMLRHGTDYEPDYIAA

SEQ ID NO: 76361 - protein, 482 aa, unidentified
MKAKPPEKIQKTTNPSTRGHWNEMNRKQRREMMRKIQSEDISLEVVHPDAAGIDIGNEFHYVAVAPSRDKQPVRSFGCTTGELKAMADWLKQCGIRTVAMQSTGVYWIAVYDILEQAGLEVYLVNARETKNLPGRKSDVQESQWLMKLHTYGLLRNSFRPSQEIRTMRTYWRQRNDLVQSAGRHVQRMQKALTQMNIQLANVLSDVSGVTGQAIIKAILGGQRDPQKLAEFRNPRVQASEEEIARSLEGHWEEDLLFVLQQEQDGYEFCQKQMAECDRQLNHYLEQREDRSQGAPLPEEKRKGRRKKKSGNKPQFDLRTGLFRMSGTDLTRIDSIDVMTATTILSEAGWDMSKWETEDHFVSWLRLCPDNRISGNRVIGKGRLPTNNRVTIALKMAASSLRLSDTYLGAQFRRFRTRLGAPVAIKAMAAKLARLVYRMLRYGMQYVDKGAVTYQEQHRQLQIKQLKWKAATLGYQLIGVPAA

SEQ ID NO: 76362 - protein, 432 aa, unidentified
MNESIPAASLEGVAAYIGIDWADQKHDVVLRSAAEPNNVEHRVIEQKPGALMEWIGQLQRRFGGQGQILVCLEQSRGALIYHLMGYEFLELYPVNPLQLARYRETFSPGGAKDDQPDAGLLCELLYCHRDRLRAWKADSELTRKLAFFNEGRREAVDQRTRLSNAIKSQLKVYFPLALELLNQDTSTALAADLLLRWPSLETLQKQIPHQLRKFFYAHHCRGESRMLERLQLVQQARALTQDSGVIEPAAFRVQMLARQLKNLLPDIARYDQKIAELFAAHPDRFLFENLPGAGRVLAPRLLSALGSDLNRWESAQEIATLYGVAPVRRASGKKSGKKGEKKASVHFRQACPKFLRQSFHEFAGCSILYCCWARALYEAQRAQGKGHHAALRAVAFKWIRILFACWKQRIPYDPQRYLQALQQRASPYANAC

SEQ ID NO: 76363 - protein, 365 aa, unidentified
MKKDSIRMKNGKGDWEGKKLTIGMDLGDRTSRYCVLGEGGEVLLEGSVATTQKGLIEVFGALPHSRVAIETGQHSPWVSRHLSGLGHEVIVAHARNVRLIGESTRKDDRLDAKTLARLARIDPALLSPVRHRSAEAQAHMTRIRARAVLVGARTALVNAIRGLTKAYGERLRKCHPEQIRKELAAELSPELRTALEPLFQEVQSLTERIKHYDREIEKIAQKHYPEVAQLQQVKGVGTLIALTYVLTVDDPHRFGRSRDLGCYLGLRPGRRNSGNSQPQLHISKEGNRYLRTMLVQGAHSILGPFGEDSDLRRWGLKLAERGGKRGKKRAIIAVARKLAVLLHHLWISCEAYEPLHNARKHRLAA

SEQ ID NO: 76364 - protein, 407 aa, unidentified
MYAVGIDVSSRYSTVAVLSSQTTVVLKPFDVPHTPEGIGRLAEKLNALDGEKRIVMEHTGRYYEPVALSLHTLGFYVCAVNPLLIKEHSENTLRKVKTDKADAVKIARYTLSNWETLRRYSPEDETRYLLKMMNTQFQLVTKTLTAHTNNLIALMEETYPGVRSLFDSPARADGSQKWVDYAAAFWHLDCVRSMSETAFTDRYRKWCKRNNYCFSASKAEMLYADAKNRIAVLPKSEISKKLIKETIALVKSVSCTVESLRREMDELAATLPEYDEVMSMFGAGKSTGPQLMAEIGDPRRFANKNALVAFGGLDPGKNDSGDKCTKSVKASKRGSPNMRKTLFVIMTVLLQKQPVDDPVYQFLVKKRSQGKPYHCCMTAGSAKFLRVYYGRVRDSLKEQGLWDRAPE

SEQ ID NO: 76365 - protein, 415 aa, unidentified
MAKVRSWAGLDVHARSVLAVTLDAQSGELRSRRLPGETAKVVEFLATLPGPTRAAYEAGPTGYGLARALQAAGIGCLVAAPGKIERPAQDKVKTDQLDAERVLRLLMIDALHPVRVPTVEEEALRDLVRAREDVRGDLMRARQRLSKLLLRHDILYEDTSSTWTQRHRAWLRAQDLGGGAQATLLDYLGAIDTLELRRGALEKTIAELVPASPCAQTVARLRCLRGVDTLSAVGLCAEIGDFGRFQRPGKLMSYIGLVPRRTAQARPAGKVPSPRPARGTPAGCRGQLALPQDPRPRHHPPTPPRRAARPHHRDQLASPTTAAPRLAPPGRGPRQAPHDRRGRRRPRTRRVLLGTRPRRLTPRRLNATSVEKGGGNPPTRESISDLSMSSPAATPDLRQHWLSRRNPVLRQLNRV

SEQ ID NO: 76366 - protein, 413 aa, unidentified
MDVLHPRCCGLDVHKSSISACILVQVAGREQKHQHRFGAMTRDLQELANWLKQFEVTQVAMESSGVYWKPVWNILEGQFTVVLVNAQHIKNVPGRKTDQKDAEWIAQLLQHGLLRPSYVPCEIIRDLRDLTRMRASLSQEASRISSRVQKVLEDANVKLASVATNTLGKSGRAMLEEIIAGQNDPEYLASLALGHLRAKTSQLRLALEGKIRPHHRFLLRRLLDQLRFVEHEILLLDERLEDIGRERQELSEAVARWDTIPGIDRVAGWTLLAEVGNNMAQFPTAEQLASWASLCPGNHESAGKRLGGTTRKGSPWLRRIACQCAWAAARTKNTYLSAQFRRLAARRGSKRAIMAVAHSLVIIGYYLQKNQRNYVDLGGDYFDRIDSDGLKRYFIRRLEKLGHKVTLEPIKAA

SEQ ID NO: 76367 - protein, 343 aa, unidentified
MEEVITIGIDLAKSVFQIHGVDAEGSVIIRRQLRRRQMLPFFEKQPPCLIGIEACATSHHWARQLVELGHQVKLMPPRYVKPYVKRNKNDMADAEAICEAVTRPSMRFVTIKTEEQQSVLMLHKTRQMFVRQRTMLINALRAHLAEYGIVAGVGRNGLETLLDVIADGDDDRVPPAAWDCLLALRAQLTLVKQQILQSDRRILACHRASEVSLRLEDIPGVGPLIASALVASIPDPHAFKTGRDLSAWIGLVPRQNSTGGKERLGHISKAGNRYLRSLLVVGAMSVICRAKKLGCTRRPWLAKIMERRSTKVAAVALANKIARTAWAMMAHGTYYEEPALQAV

SEQ ID NO: 76368 - protein, 452 aa, unidentified
MSKSKKSSKSKNSTSSFSTMIHPDTAGIDVGARELYVAIAQDRSDCCVRTFGSFTADLMEMAQWLKSCGIKTVAMESTGVYWIPAFEILQENGLEVCLVNARHAKNVPGRKTDVQDCQWLQQLHSFGLLRGSFHPDPLIRQIRSLYRFRRHWIEQSSTAIQMMKKALTQMNFQIQHVLSDLTGVSGMALMDAILQGERDPQKLLSLTSPLIKADRKILIKSLEGSYDLALLFQLQQSLDLYRYLQRQILEMDEKIQSFVLLLEPKTQVEATKTWKPKKSDPKTMESFDWPRHLTQTFGVDLTQVPGISLTTAMTFLSEVGPDLKRFSNFKHFCSWLKLCPNRKVTGGRVLSSRTKPQKGILAIQLRLAAQTLHFSKSPLGDLYRRFRAKQGPVSAITTLAHKLARILYTMITQQKPYDASLIEKSIHHSQKQKIKSIQKIAKNLGYQLVPTI

SEQ ID NO: 76369 - protein, 342 aa, unidentified
MQKVSIIGLDLAKRVFQAHGAHADGSVSFRKKLSRERLLAFLKEQPRCVVAMEACGSAHHWGRAIRDLGHEARLIPPIYVKPFVKRQKNDAADAEAIAEAAIRPTMRFVAIKTEEQQARAMLFRTRDLLVRQRTQLINALRGHLAEHGIVAPQGPTNVKVLEQAIEDEAKSLPLLITELARVYLEQIDQLSERIGVLEKTVAYEAKCGATTRRLQTMPGVGPITAMAIETFAPPMNVFRRGRDFAAWLGLVPVQHSTGGKQVLGRTSKMGQRDIRRLLISGAMVIVRWACRKGTPEGSWLHRMLARKPRMLVAIAIANKMARSIWAMLTKGEDYRVPVAVAA

SEQ ID NO: 76370 - protein, 360 aa, unidentified
MRIIGCDLHSRQQTLAMVDTITGEVEKTTLKHADDIVREFYSNLPRPVRVGIEATGSMQWFVNLMEELGIECLVGHPAEIRAAERRKQKHDRRDADLLLSLLVEERFPTIWLPTKELLDIRALLRHRHQWVGLRVKIQNALQAIALANGLRRGPSLWTQAGQRAIASLPLPPHAAYRRNELQAMYVKFEAEIEKLNQRVEQQARERSGARLLMTHPGIGPITALATDVFLGDPSRFAGSKELASYVGMIPGEHSSGKRQRLGGLTKQGNPLLRFLWGEAAIHAVRRDPELKRFYNRKLIQKGLGKARAAVARKLGIRMWIMLRDRIEYHEFCRRGQMQQTSGDACAGMPGRVMVRKSPAD

SEQ ID NO: 76371 - protein, 459 aa, unidentified
MTLPPPVLAGLQTGNRGTRRRAPVSDRPGASLAAAGPSLPLPLQGAELSLALPEALFFTGIDWAEVTHAVCVTDAAGKITAEFTIEHSADGIAMLIRRLARHGDPADMPIGIERPNGRLVDLLLEAGHPVVPVSPNAIKTWREGEVLSGAKSDAGDAAVIAEYLRLRQHKLRVATPYSGETKALRTVVRTRDDLVAMRVAATNQLSALLGAYWPGAKAVFADVESPISLAFLTRYPAPALAARLGEKRMTAFLVKNGYSGRRTAAELLARLHAAPAGTADETLTEALRDAVLALVAVLTALNTGVKDLGRSAAAHLGEHPDGKIFTSLPRSGQVNAAQMLAEWGDCRQAYDGPDAVAALAGVTPVTKESGKHRAVHFRWACNKRFRKAMTTFADNSRHASPWAATIYNDARASGKDHPHAIRILARAWIRVIWPCWLHGTPYDPARHGAAVALTKPIAA

SEQ ID NO: 76372 - protein, 414 aa, unidentified
MKVVYERCAGLDVHKKTVVACVIVPNEQGGWHRETRTFGTGMAELLALSDWLQGLGCTHVAMESTGEYWKPVFNILEGNFEVLLVNAQHIKAVPGRKTDVKDAEWIAELLQHGLLRASFIPPAPQRELRDLTRYRATFIRERATLANRVQKVLEDANIKLSSVASNVLGVSGRAMLEALVAGQSDPETLANLAKGRLREKRELLVKALEGRVKPHHRFVLTELLWQIDSLDETLAHFDERIEQACAPFEEAVGLLDTIPGVARQAAETIVAEMGTDMNRFPSAAHLASWAGVAPGNHESAGKRYSGKTRKGNRPLRTLLTQVAHAAARTKGTYLAAQYRRLAARRGKKRAILAVAHSVLVIAYHLIQRKESYCEAGADYFDKHRPEAITKRLIRRLENLGYQVTLHKRLMEGAA

SEQ ID NO: 76373 - protein, 358 aa, unidentified
MSNVKSSRLDFTGQPIYIGLDVHKNSWSVSIFSKYGEYKTFNQPPEVDKLLHYLRHHFPGGDYRSVYEAGYCGFWIHDQLREKGIRCLVVNPADIPTKNKERTTKRDSIDCRKLARSLRNGEIEGIYVPCRSKLEDRTLIRTRQSMVRKQTRCKNQIKGMLLFYGVGIPEEREMGHWSRRFIQWIEGIRMERASGDIALRAPLEELSHLRQLIASLNRAILHLARTEEYRPFVRLLKTVPGISTLTAMILLTELGEITRFPSLGELSCYVGLVPDTQASAEKEYVGGLTQRRHAQLRWLLIEASWVAIRKDPALLMAFQEYCKRMRKTKAIVKIARKLLNRIRYVLKNQAEYVPCVIQ

SEQ ID NO: 76374 - protein, 417 aa, unidentified
MKSKTEKIQWINGKTLVVGVDIGKTLHYGYLRAPNGKHVAPFCFSNFTAGFKDFWEKILQFQKQEGLKDIVIGFESTGPYAEPLVHYLRNKPVKMVQVNPMHTKRVKELTGNSPNKTDKKDPRVITDVICLGHALTVVVPQGAAADLRRLTQARERALDSRRGMMNQLQHLVFVIFPELLSIVKPSTKTGMYFIRNYTTPETIFALGLESVTKVLKKVSRGKLGHERAKEIFEAARNSIGIHEGKESIILEIDHLVSKIEAEDQFIDNLQKQMANYLRQIPYSGSLLSIKGIGKVTVAGLIGEVGDFRNFKTIPEIMKLAGLDLYEVSSGKHKGQHHISKRGRSLMRKLLFFAAINAVKSHGIMHERYQEMLDRGMPRIKALIAISRKLLRIIFAIARDNVEYVKNYNQIHHYDLAA

SEQ ID NO: 76375 - protein, 375 aa, unidentified
MEHHSEAFVALDTAKLRNAVAIADAGRNGEIRYLGEFDNTEVGTRKLVAQLASKHARLTFCYEAGPTGYGLHRLIKSLGHDCMVVAPSLIPSKPGDRVKTNRRDAVNLAKLLRAGELTAVWVPDERHEAMRDLVRARDAAAKDYRIKRQNVSSLLLRVGRHYPGKKTWGQAHTNWLTSLKLEHREQRIAFEEMLLAVRQVRERIERLEQAMREAVADWSLAPVVEAVQALRGIDMVGAVAFLAELGDLSRFENPRQLMAYLGLTPSERSTGESVKRGGITKAGNTRARRLLIEAAWSYRFPPRVSKDMQTRIGAAPRTAREIAWKAQMRLCGRFRILTRKGKRPTIVVTAIARELSAFIWAIGREVVGSHATANQ

SEQ ID NO: 76376 - protein, 448 aa, unidentified
MSNGNGVSRGDRNRNARLSRLRVLVPVCNAIVGIDLADAKQMVVVTDHDSKVLARRTFRCRAWDLGLALDWAGQQASKAGFAGVTVACEPTGHRWRVLGQLAADRGMAFVCVQTLLTSWARRSEDLTFDKTDEKDAVLIARLTAQLRCYIPEPLDETWGRLRHLGARRERLLAETVGQVQQIRDLLECVWPASVDSAKQPFRSRTWLAGMSVILARTDGDPARLRRLGPARFETAVRREVVARQGKRPCLRIVRLLFAAAADPRGVTIHRPGALERVQLLLDDFRDTQQRLGESEARMVEVLDELQLTELVCSIVGLSALGGATIMAQTGDLTRFASARAVVKHSGLAPREKTSGTFTGRTKLTGQGRPGLRTAAWRAIWGAQKSNPVYAAKFTHLTSRTENKLNRGQAHAALAAALLRQLYAVVTTGQKWEAVIAAGGRCEVIEPAA

SEQ ID NO: 76377 - protein, 345 aa, unidentified
MIIGCDFHPSWQQVSWLDTETGETGEQKLVQAAGDAERFYRQVPAPALIGMEATGNCHGLVDLLAEIGHELWLGDAAQIRASYVRQQKTDRRDAAHILKLLVEGRFPRIWMPSSEVRDLRQSLLHRYKLEIIRARVKNELQHLALNKGVQKKHKLWSQTGQQWLRELPLKPWAGRRRDDLLRLMAMLDQQILPLDEAVKSEAQRDKMALLLQTQPGVGPITWLAYVLTMGAVSPFPRGKQVASYLGLIPREHSSGGRQKLGAITKQGNRMMRMLLVEAAQSAVRYDPKFRRQYQHLCHSKPKAVAKVAVARKLAIRLYWMLRSQKPYPAVVRIESSPRVALVGAS

SEQ ID NO: 76378 - protein, 346 aa, unidentified
MENTATKGSYNLFVGVDIAAATAMVVWLPAGGKSSRPVQIAQTPQGYADLHTQLQASGVPPAQTLVVMEATGSYWISLATALTAAGYAVSVINPSQAHDFAKALLKRAKTDAIDAHTLAQLAALLQPERWTPPPAIYAELQQRLAQRDTLLGLRQQVRNQLHALQKGAVVIAAVRQRMENLIATLSAQIAEVDAEIGPVLQQDAAWTTAAARLQSITGIGLLTAAWLLVTTLNFSVCSTPDAATAYAGLAPYVGDSGTSVRRHPRIGHTGNRRLRTALYMATLSAARTNPPIKTFYDRLRAAGKPKKVARCAAARKLLHLAWAVVTKDQDFDPDYQTHRSSSRTVA

SEQ ID NO: 76379 - protein, 351 aa, unidentified
MKKIFIGIDFAKEKFDAAIIEACGLKEFGERQFGTFINGKKGYSQFMKWVKAKAGSTTEQEWLFCGEDTGSCSLGLSKWLYGKGLDIWIENAYNIKHSSGIQRVKTDRADASMIAEYAWRHQDKAMLFEPLSESLTQLREVFLYRHKLVQQRVAMEVRKQDKETAQSSKAISFINRKSKHLITEIDKTIKECDTMIDRIIDADTELKENYSIITSVKGVARQNGACLLIFTNNFKRFDMDARKIACYYGVAPFGKDSGSSIHTPAKTSHFANKLIKSLLSQAAQIAKIFNPEIKDYYQSLIKRGKKHSVALNNVKNKLLRIIVALVKKKVKYDPETYKFYRNRLEKQFAPL

SEQ ID NO: 76380 - protein, 325 aa, unidentified
MNIIGIDVSKDELVGSLIDKSGNQRNHYKLENNQTEIDNFLIDFKEQYRRPVIACESTGDFHRQLAFACFKQNIPFKLINPITTKQFTKVTVRGHKTDLSDALIIAKLAMQGEGRYMNESDFNLTKSICRSASKLSEMERSLSQMEKRMIKLYQEDNDVANIIGLCREKLDDGIKKLRKNIHKQTNHNLEKLLISIPGIGITIADILIAEISDINRFTSGKSLVAFAGIDPRVKQSGVSLKRNTKITKRGSPHLRHVLYFATAVAQLHDQEFKDYFLKKKAEGKSYTEATLAGSRKMTYRIYAVWRRGTPYIKDKCLTMSNNIIN

SEQ ID NO: 76381 - protein, 422 aa, unidentified
MNTDWTQHSHFAALDWASDHHDVVIVDRSGALVAEFRFAHTAPGWAEFTAKMKPFGGCPLALETSSGPAVDQLLQRGWTLYPVNPKAAERYRERKAPSGTKTDRHDAWSLADALRTDGHGWRVLVAQDEATATLRALCRDEMSLIEQRTALVNQLLAALHEYYPAALEAFDDWTVPSAWALVQQFPTPLALQNAGQRKWEKFLHTHRLWRKDTAPQRLELFARANALPASAAVVTAKSLLATSLVKVLQALQSQLDEYRRRITAAFAQHPDHDVFGSLPGAGEKLAPRLLGELGAVRAVYPDADALCCQAGVSPVSFQSGKIDKARIRWACDVVLRHTVHLWADCSRKKSAWAQAYYARKREEGHDHASALRCLGKRWLKILWRLWTDRLIYDETRHQQNQQQHGSWVSALLAPPPIQPATL

SEQ ID NO: 76382 - protein, 311 aa, unidentified
MSSMFVGIDVAKDHLDVHVLPTGEAFCCPADSAGVTSLVVRLQAVRPALIVLEATGGYEGLIAAELAAADLPVAVVNPRQVRDFARALGRLAKTDRIDAEVLACFAEKVRPRFQTPPSEEEQQLKVLVARRQQLVAMRTAELNRRALAGGRVRRSIDAVLKMLGRQIENLEHDIDGAIRRSPVWREKDDLLRSVPGVGPGTSRTLLAALPELGTLSRRRIASLVGLAPFNRDSGLLRGRRTIWGGRADVRTALYMPTLTAIRINPVLRAFYQRLRAAGKTAKMALTACMRKLLVTLNAILRSQCPWQPQHA

SEQ ID NO: 76383 - protein, 344 aa, unidentified
MDYYAGIDVSLEYSSVCVVDASGKVVREARVVSEPEALVGWFGSLGLELARIGLEAGPLSQWLYAAMKQTGLAVELLETRHVSDAFKAMPVKSDRNDARKIAQLMRLGWFRPVHCKSITAQEIRAMLTARKLVQSKLLDLENSLRGILRGFGLKVGKTTRTKFAGRIEELVKGHPNLQTIGQALLRARAVLLAEFNGFEKRVRAMSRLHDKARLLMSTPAVGPIVSLTFACAIDDPSRFTSSKQAGPHFGLTPKKYQSGETDYTGRISKHGDASVREALYEAAHLMLTKPIKGCSELKSWAMRIARRAGTNKAKVALARKLAVIMLRMLKDNVPFNPAAKAATA

SEQ ID NO: 76384 - protein, 403 aa, unidentified
MNSVGIDISKGRSTIAVMRPFGEVVISPFEIRHTGSELSELARQLKSLNGETRVVMEATGNYHAPVAKLLHDAGLYVSVVNAKLVHSYGNNELRRVKTDRKDAVKLANYGLDRWLTLHRYVPEDDTRLLMKNCCRQYRQYSKVHTVLKNNLISLLDMVFPNVNRLFSSPIRDDGSEKWVDFVAEFWHCCCVSEKSEKAFANKYQRWCRKHGYNFNEEKAHTIYAEASRHIGVMPKSETTKLLVEQAVAQLRATSAALAALKHEMLALASQLPEYPVVMGMFGVGQTLGPQLIAEIGDVRRFYSKKALVAYAGLDAPPNDSGDVTGRHKSMSKIGASSLRRTLFLIMSAYLQNSPVDEPVYQFMDRKRAEGKPYRVYMMASANKFLRIYYATVKAYLEAAEHVT

SEQ ID NO: 76385 - protein, 411 aa, unidentified
MEVIVACCAGLDVHQASVVACVNSTGRGGRSHKEVRTFGTMRDDLIALRDWLKDAGVTLVAMESTGVYWKPVYDALEDHFETSVVNAQHIKNVPGRKTDVKDCEWTSDLLRHGLVRPGFVPPRDIRDLRELNRYRRKVAQVQAGERNRLIKVLETVGIKLAGVASDVFGVSGRAMIRALIDGEDTAEAMAELARGTLRGKRADLARALDVPLKPHQRFMLRTQLARIEQAEADLERIDTMLREMIAPYDNYMGLLMSIPGVEWINAVTIIAEIGVDMSAFASPAHLASWAGLCPGNNESAGKKRSGKSRKGNVFLKTALVSAAISGCRRRGSTYLAEKYRRLTARRGKMRAAVAIAHKILVSIWHMLTDGTFYQDLGAGFLDRLDRERTAKHLVRRLAAMGFDVQLQEKAA

SEQ ID NO: 76386 - protein, 424 aa, unidentified
MKRQSDTEFAALIGIDWADAKHDICLQPADSEEWECSVLPHRPEAIEEWARLLEQRFAGRPVAVCLEIDRGPLVYALQKYHFLVLFPVNPATLAKYRQAFTPSRAKDDPTDAELALELLRCHRDKLRCLTPQSAAMRTLQQLVEQRRDLVGDKVRISNRVTYALKQYFPQTLDWFQDIDTIMFCDFLQRWPTLKQAQRARKTTLSEFFVAHNVRYPKLIEQRLVAIRAATPLTQDSAVITPHRLLVEALVAQLRVTLQAIERFDTEIEAITHKLVDYPLFRTLPGAGPVFAPRLLAAFGEQRERYTCAAELQKFAGIAPVTERSGKKCWVHWRLQCPRFLRQTFVEWAAASIPRSFWAAAYYHRQRNQGCSHQAALRALAFKWIRILYRCWQTRTPYDETTYLNALKRRGSPLIHAIAGVEKNT

SEQ ID NO: 76387 - protein, 360 aa, unidentified
MSTTPLKTIGVDLHKASLTATVLDSTGVILERKDIPTKCRNQIAEYFASHGPAVQVAVESVGFYHWFWDTVRPKVQNLRLADPAGVRACAGRQTKTDRNDSLLLARLLREDRLPMAYVPDEPVRALRELCRHRHRLARQLALARRHLRWVALKNNLTGPTTFVSDRAQKWLLSQDSKLNPIHRLAGRQLLDQLITLERQLSDTEAALKAAVAAHSELAPTLALIQSVPGVGFIIAVTILCECGDIRRFDSIDELSSYAGLCPRVTQSGETAHHGHISKQGPPILRWVLQQAAWVAIRCDPNARRIYARIAKRAGSKKAATALARKLLSYAWSVCRQGHPFVWPTNRPTGPGPVPVWSYDI

SEQ ID NO: 76388 - protein, 421 aa, unidentified
MTNKRLIQRGRYVNPDILIVGIDIGKYKHAAVGTSLHSGFTKPFFIKNNRISYESFESEVKKWKRRFECKEVVIGFESTGHYWKTLAYYLKKRGKFLVEVSTSYTKKSKEMMDNSPLKCDPKDARVIADLVKQGKILTPVLPEGKILALRNVVHTRENLVKERTSIINRLQKIVDISFPERGEIIGKINGKTSLFLLEEAPFPENIIDKGLECLREEIRKKSMGHYKYEDARKLYQSAIDTIGLKEGRDGSTYELKILLSRLNKLGQEIEEIESNIKDRLRDIEEAKYILDIKGIKEVTAATIISETGGLGNYKNISSVLKVAGLNLFEISSGEHQGEKHITKRGRSLLRHKLYFAALQQTRKGMPFYSFYRRLVEENGVKKNKALIALARKLLRVSFALVRDKTEFISSCEEKTKIKKVA

SEQ ID NO: 76389 - protein, 397 aa, unidentified
MSEAYEIRVCMDIGSESHQVAIGLSTGQILEEFDITHTPTDIDLLFNKIETHEKHHQLPVVVAMESYNGHARPIDKYVLNKGYRLININNHKLAQFKKVFPGASKSDVIDTRKMFELFTLQDHLPLAKNALQQVIPTPEVNEKLKRITRRRRLLVNEKVRIVNRLQSDLHAISPGLLEITGSADNLWFLRFLTSREEIAQLSRMHYSSLTKIKGLGDKYALKIKAWQETAEFASDAEWVGEMIIHDAKRILELISEISDLEKKMDFLSSETEIATRLKSIKGFGTVCAAELAGEIGALERFESEASLALYLGMAILDNSSGKYIGTKGSKHINYHAKSAMMTGVAIHIRNSKQSKKYYDKKRNEGKKHNQAVRSLGRHLVRVIWTMLKNNRDYYLEE

SEQ ID NO: 76390 - protein, 454 aa, unidentified
MSILLIKISNFMDQKVESLSMEIVNPYAAGIDIGSRSHWVSIGQKEKDIREFGVFNEDLKAIAHWLAENKISTVAMESTGTYWQALYAVLLAHGFQVILCNGKFTKNIKGRKTDIQDCAWIQKLHSIGLLSGSFLPDEATEQLRTYCRHRANLLDMAASTQKKMQKYLRLLNLRLDVVVNDICGLTGLAIIEAICKGETKPEKLAELRHGNCRKSEAEIAKALETNGRMDYLFALQQELDMYKIIQTKITACDTEIEKMLSKIIDQDDNKRQHYIDKKSHKRINKNTPKNIDLNIVGYQYFEGVDLMEIEGFSHGTILHLISEVGLEGIKKFQTAKQFASWLRLAPNNKKTGGKIISSKVPKGSNRLKIALRNAANAIGNLKDSTPLRDFFQRINFKKGRVSAISATARKLAVIVWNMVTKGTRYINPEGYLFLDQKENLAWSKESKNKLINLD

SEQ ID NO: 76391 - protein, 412 aa, unidentified
MQYAPAVLPDEPANGLTCGIDWARDDHAVSILDRHGRQVHRSTVEHSAAGLRELVAVLARTGVSEVAIERPDGPVVNALLDAGITVVVISPNQLKNLRGRYGSAGNKDDRFDAFVLADTLRTDRARLRPLVPDSAATAALRATCRARKDLVIHRVAVANQLREHLNRVFPGAVGLFADLDSAISLKFLARFDRQERADWLTPIRLGAWLKSAHYTGRTDPAILHVRLITAPRGATGQEGTAHAHITGALVATLTSLVEQITVLSEQIEQQLAAHADAHIFISLPRSGTVRAARLLAEIGDCRARFPTPEALMGLAGVAPSTRQSGKMRSVGFRWACDKQLRDAVCDFANGSRHANPWAADVYDRARARKHDHPHAVRILARAWLYVIWHCWQTNTTYDPAKHGALQALQNHS

SEQ ID NO: 76392 - protein, 382 aa, unidentified
MEPNLTTGTLPKPIEPVLYLAFELSEKNWKLGFTVGFAQSARLRDIPVRDIKNLQKEIQLAKKRFHLPETTMVISCYEAGRDGFWLHRCLISQGIMNLVVDSSSIEVNRRSRRNKTDKLDARKLLNMLIRYHHGENKVWSVVKVPSVAVEDYRQLHRELSSLKKERTQHINRIKGLLASQGKTLSVTSSFEDHLVTLRLWDGRPLSPYMRARLEREYQRIQLIEKQVKQIDDLRYTLLRTSQDPAIEQVRHLMKLKGIGINSAWLFVMEFFAWRAFRNRREVGALAGLAPTHNQSGESSHDQGISKAGNRFVRGIVIEIAWGWLYHQPDAQNSQWYQERFAGKSKRIRRIGIVALARRLLIDLWRYLETGVIPDGAVLLNPS

SEQ ID NO: 76393 - protein, 397 aa, unidentified
MIAVGIDISKAKSTVAVIDSDGTVLASPFTMAHTQPEMEAFVTYLKGLGEPTTILMEYTGHYHYPVLKKLQDEGFPVCIVNPYQMKKYGDVEIHKAKTDKKDALRIAAYALEKSYKLVPYSSMEQKYEDLKFLSRQYSQRITYVAKLKVQLIALLDQTMPGITRILPLNSRNPEKCALLLFIKRFKSFDEIQRIGKARFLASYNVLAKKASERSASSKGLSIYELAVDSITTRGEGPYIWLSQNQCVDLLSATQNAADEIISQMRNIAETIPEYKVLRAMHGVGDRLGPIILAEIGDVHRFHSGKALNSYAGNDAPPYQSGQFESRNRHISKRGSSTLRKACYEVMQALKLTKPQDDPVYLFMLKKEQEGKPFNVAKMAGVNKFLRIYYARAMELYK

SEQ ID NO: 76394 - protein, 417 aa, unidentified
MDTLFSRVAGLDVHLKTVQCAVRCQQESGKLLKQDRCFGTMTRDLRALADYLATLGVTHVALEATGVLSKPVWNLLEGRFTLLLVNPRHRKKVPGRKTDVSDAEWIAQLLQHGLLRGSFVPPRAVRDLRDLTRHRAQLVAEHTRVANRIHKVLEDANVKLGAVASDVLGKSGRAMLRALLAGEQDLEKLADLACGVLRKKIPQLKLALEGHCTAHHRYVLGRLLSHVNYLESQIEDLSQHVAAGLDELLSADDRHRLDGIPGLNRRAIENVIAEIGVDMGVFPDEHHLASWCGICPGNEESAGRRLRSRTRKGNRWLRRALAEAAWAASHAKDSYLSAQYRRLAPRRGKKRALLALGHTLLVIIYHVLKNHKEYKDLGPTYFDRLEPERTRRYLVKRLQRLGYNVTLSPASSADRAA

SEQ ID NO: 76395 - protein, 495 aa, unidentified
MGKRTIYQAQSQDLRHLFEDAGHPSKVMCVPLDYAKANHTALLCNGTGEYLRKPFTVHNSQKGIDYLIERVRAGCRRHRIQTKHVFFGGEDVPSYAVNFIHALRSRGWIVAAVNAFDAKKQRENMQASSDILDLLGIAKTLLSRRGNTSPAQTGIYRNLRNLVRHRRQVIQMRTETSNRMHTLVDQLFPGFLDEKNSGIVSFSPASLWLMEDRFSARQIRRRRTDGLIRGLQRCGAPHADKAVAKLKGLADQVLGPASEYIDTLQVSLGQQVALYRCLSENAEQSEHEMAVLLAQTPAALLTSVRSIATVLAAGVVAELGDPHAQHPVNNLCSYAGIIPRTKQTGGPEKDAKTGRVGKRANRILKDYLVQSGTLIGRQGPPELMADHHRRQSSGQHADFGLARRYLRLGMCLMRTGQIYLPPELRSEEATPEERGAYYLKLWPNLEAKWRRVKADHIAFDPKNPLGQWRNMVEELYGIKLTLKRPLSTGGGKRNR

SEQ ID NO: 76396 - protein, 480 aa, unidentified
MAEKPSKPRKHGPAQTGDRRRKQRRKGMCLEDRPVLESNAGGIDIGAREIFVAVPPDRDQDPVRVFETFTEDLERMAEWLLRCGVTTVAMESTGVYWIPLYDVLEAKGVTPCLVDASHMRNVPGRRTDWHECQWLQYLHSVGLLRPAFRPAAEICAVRVLMRHRGELVAMASQHVQHMQKALTQMNFQIQHVISDITGVTGLSILDAILSGQRDPVELAKLRDCRIKASEEVIRKSLVGNCRAEHLFTLRQSRDLYRTYQQQILDCDQEIEKFLSYFEPRVDPKKQPLPPDRKRYRKKTRKKTSHHCGTGFDLRTEAYKLYGVDVTQIPGLEATALSLFTEVGRDLSKWPTSAHFASWLSLCPDNDISGGRVLWKGMRLVKNRAGQMFRMAAYALHNSQTPLGAYLRRMKAKLGPAAATTATAHKLAVIFYTLVKNQVEYDETVWTRLDVLRQARLAARLKRQAQQLGYKLIPIESNAAA

SEQ ID NO: 76397 - protein, 340 aa, unidentified
MTITTVGLDLAKSVFQAHGIDETGTAVLVKKLHRKQMLPFFSKLPPCLIGVEACGTAHYWARTLAAMGHEVRLIPPSYVKAYVKRGKSDALDAEAICEAVQRPTMRFVPTKTVEQQAILMAHRARSLLVRQRTMAANALRAHLAEFGLVANPGLAHLATLAEQALSDRDGLPPYARTALETLVRQITALTGEIALLDQQIAKWHAESEASRRLAAIPGLGIITATAIAATVSDPDQFTSGRQFAAWLGLTPQQHSTGGKARLGGISKQGDRYLRRLLVVGATAVMRHVKDKPTPMANWIRKLSEKKPFRVVSVALANKLARIAWVVLTRKEAYQPYAHLA

SEQ ID NO: 76398 - protein, 357 aa, unidentified
MRDCIISNEQNKSNHYLEFDHYIAFDWSQQNVALARLTKKGNLLKVIEWAQSDIKLIKEYLNKLQGTTVLTFEETTNSQWLYVEFKDFVDRIIVCDPYRNHLLLEGPKTDKIDSVKLCQLLKAGFLKEVYHSNDQLYQYRCLLSAYTDLVKAGVRIQNQHSALYRARGLHYKKCDKGEAEHKISQHHLRQFVKNWQLQVIEQYHEDKKLFEGQIEKVVHSHKPINQLTQIPGIGIISAFKIFAIVIEPRRFRNRGCYLSYCGLVLHEKTSGGRSYGKRFPRFNRELKAIYLTAARVAIRSANNPLYEYFEKLIEKGLTPKQANLQLARYIARVSLSIMKSSQKYEPYRWRKDEVTAA

SEQ ID NO: 76399 - protein, 465 aa, unidentified
MTPHKDFFLDPRPPVPTLPPPSVLSEALQVCNPHAAGIDIGEAEHWVAVPPGCDPQPVRRFGTFTADLDALADWLIDCGVTTVAMASTGVYWIPLFELLEARGLQVLLIDPRQAKRAPGRPKTDRLDCQWLQRLHAYGLLAGAFRPADQVCVLRGYLRHRHMLLTYAAHHIQPMHKALQQMNLKLTQVVSDLTGVTGMAIIKAILAGERNPVTLAKLRNPHCQHDEDTLAKALQGNWRAEHLFALRQAVELYEVYHQQMAQCDQQIKTHLETFGDKSAGQPLPPKARRHKKINAPRFDARTPLSRMAGVDLTTIEGIEEGTALVILSEIGTDMTRWPSVKHFCSWLGLCPQHKISGGKVLSRRVRPGAHRVTVALRLAARSLHHSQSALGAFFRRMKARLGTPKAITATAHKLARLVSSLLQHGSAYVQQGLDAYEAHYHERKVKAMAKQAKALGYTLVSLAAQG

SEQ ID NO: 76400 - protein, 421 aa, unidentified
MKQIKPKTTKAVNQKVLIATVDGGKDTHYGYYRCPDGTEGKSLPFRNNGRGFQEFWERISSAARTHGLEEIIVGFESTGPYMEPLAQYLRFKKGVRLVQVNPMHTKRLKELSGNSPLKTDRKDPKVIADIIELGHALTVVIPEGPAAELRRLTQARERTIESRTRLFNQLQSLLVISFPEFLQVMTDVKTASAQHLLRHYPTAQDIVNLGESALAALLRKVSRGKFREDRARELFEAANESVGVREGRSSMLLEIGLMLDTIAIYDRFIEGIETDMVRHLEQIPYSRIILSLKGIGPVTAAGLIGEVGDFTKFNTISELMKLAGLDLYEVSSGKHRGKLRISKRGRPLMRKLLYFAALSAVRKGGTMHEWYRRALDRGMIKTKALVAVSRKLLGIIFALVRDHSVYVENYMKQEPILQEAA

SEQ ID NO: 76401 - protein, 410 aa, unidentified
MEVLYRHCAGLDVHKETVVACARHMVNGTVTCEVRTFGTTTKDLLALSEWLASRGCTHVALEATGVYWKPVWHILSDGDVTLVLANAGHVKNVPGRKTDVSDATWLADLMAHGLIRGSFVPDIQTQELRSLLRTRKQFVRERSSHVQRLQKTLEDANIKLDGVISDIVGLSGRRMIEALIAGESDPEALAGLAHRRIKAPPAALREALRGRVTNHHRFLLQLHVQHIDALDAALNAIDREVDSHVEPFREAVLLLTTIPGVSDLSAQVIRAEIGGDMSRFPTVGHLISWAGLCPRNDESAGKRRSNRMRKGAPWMKTTLIQCAWAAARKNGSYLQAQFHRLRARRGAKKAIGAVAASILTAAYHMLKDGTLYYDLGPDHFDRRAKTVQTRRLLTRLQRLGYAVQITPLAA

SEQ ID NO: 76402 - protein, 338 aa, unidentified
MLYTGIDLHKRTVVIATVDEKGKVHSEASLPTSRSAVARYFHGLPEPTTATVEATSSWYWLRDLLEQQDVPLTLAHAKFVKAIAYAKVKTDAVDALTLAQLHRADLIPRAHMVSPELRPLRALLRTRLHLVEKRTSAKNSVQRLLEQYNVPEPLRLPDEATLQASLYAEQIELLGDQIHRIEKRLEPELIPNPDIQRLLWIPGVGKIVAFTLYLEIDGIERFPTVRQFFSYCRVVPGADNSAGKRRHGRRKDGNRYLKLALSHAAIRAVQYFPDIKRFYQRKARQKNPAIARTLVQKELARSAYIVLKEQVDFNHTFKGQPLSKRKASKWPRQASPDA

SEQ ID NO: 76403 - protein, 392 aa, unidentified
MLYVGIDVAKRKHDCFIMDEHGETLEDVFTIQNSREGFEELRNRIESHVPCPSPGNTIVGLEATGHYSDNIVGFLRKIGLPPIVLNPLRVSLCQKSQSLRKTRTDKIAARFIAKMVMAEGLEPHLGQSYHRDELKSLTRYRQRMVKARSTLKVSYDRLLTICFPELEGFVGDTLGATMKKLLLEFPSARAIAGCHATRLANLAAGHSRGRYKKEWAVRLKELAKGSIGTHSPAKAFELQQTIRQIMYLDRDIEMVEKDIEAYVMMSGTTLTTIRGISYTFAAIIIAEIGDIFRFGSPGKLQAFAGLEPTRYQSGQYASNKDVMVKRGSKYLRWALVMAARSVSQHDSAFREYLGSKLAEGKHYNCAMGHVAKKLIRLVYHLMATGEDYQAKA

SEQ ID NO: 76404 - protein, 391 aa, unidentified
MTSVGIDIAKDIHWASAIDAAGKVLLDRKVLNTPQELMRLADELRTLPAPLKVGVDVLGGIATLTQAVVLEAGFELVHVSGLAVNRAREGTVGGESKSDPRDARVIADQVRTRRDLRAVTASSELDIELRLLVSRRRDLSEEQTRRLNRMHDLLAAIFPELERSIDVGTKIALALLGAFVTPKELREASETELNACLGARASRTYARALLDTARRCAERQTISLPGETLTARIIKDLAREALRTQEQFRALDAEIQARLARHPDAALIRSLPGMGALLTAEFIAQVGSIERFKSAHALAAAAGLAPVLRQSGKVRFLRRPSGGNKGLKRVFYQSAFASLRCPQSKTFYARKRQEGKHHHQAVIALARRRVNVLWAMLEQRRPFSPHPSTRS

SEQ ID NO: 76405 - protein, 377 aa, unidentified
MSRMVHVGLDVHAETIAVAVADRDGSVRDLGTILNRPEAVRKLVSKLGGPSALRICYEAGPTGYALYWQLAALGVHCDVIAPTLVPTKVGDRVKTDRKDATKLARCYRAGDLTPVFVPDAATEALRDLVRARESAKQDHLRARHRLGKFLLRHGCRRPDGMRAWTARHEVWLAQQRFDLEALQIVYDEHRVAMSVVADRVERLEVAILNAVKGLTPTQQALVGALAALRGVRAVTAATIVSEVTTFRRFPTARQLMGYAGLVPREHSSGSSTRRGAITKTGNAHLRRVLVESAWAYRHHATTTGVLRQRQIGQPASVIAIAQAAQTRLCSRYRRMAALGKSPLFIATTIGRELLGFMWAIGQDVERQVTTTEVPIAS

SEQ ID NO: 76406 - protein, 410 aa, unidentified
METLYERCAGLDVGKDEVVACIRTPDGVGGRRQEVRTFGTFTGHLETLADWLSAEGVTQVVMEATGQYWKAIWDVLEERGFELLLVNARHVKILPGRKTDVGDAAWLCELLEHGLLRGSFVPPAAIRELRDLTRYRKRLIQTHTSEGQRIAKTLEDAGIRLDSVASDLLGISGRAMLRALVAGERDPAVLAELARGRLRTKRPELREALRGRFSDHHAFLIRLALENLDQLERSISELDAQVERVMAPFARARDRLDTITGVGVRAAESIIAEIGVDMAVFPSASHLASWAGSCPGNNVTGGKRRSGRTRKGNVWLGEILTECAWAAARSRGTYLGAQFCRFARRIGKKRAAVAVGHSILVIAWHLLSHECDYADLGGNYFAKRDAERARSRAISQLEALGYHVTLEVAA

SEQ ID NO: 76407 - protein, 325 aa, unidentified
MHILGIDIAKGTFDTALTQDNQAYAQASFSNDSQGFKRVVKWLATHQVEALHVCLEATGRYGDALADYLHTQGHQVSLVNPAQIHAYGRSKLRRNKNDRLDAQLIADFCFTQQPLAWKPPLRIERESQELSRHIATLKEDRQRKRNQLAAGLTSPPLRRSIQKTLDFLNQEIELLEKELHELLSQDPDKAQQIELLCSIPGIGRLTACRFLAEVDVTRFRQASHLAAYAGLVPTEHTSGASVRKKPRLSKVGNRHLRTLFFMPALSAHRFNPIIADLHARLTERGKPKMAVVGAVMRKLLHLAYSVLKTRKPFDPQHLHSIPVGG

SEQ ID NO: 76408 - protein, 404 aa, unidentified
MYNAVGIDVSKGKSTIAVLQPGGTVIRKPFDVSHTSQNLNELADYLSSLDGTTKIVMECTGRYHEPMVKALSEAGLFVSIVNPHLIKNFGNNSLRKVKSDPADARKIARYTLDNWTELRQYSGMDNTRTQLKTLNSQFGFFMKQKVAAKANLIALLDNTYPGVNKLFDSPTREDGSEKWVDYAYSFWHADCVRKIGLKAFTERYKSFCKKHHYIFQQDKPEKLFNASKELVAVFPKEKTYKLLIQQSIQQLNLASEHVERLRREMNELASTLPEYSTVMGIYGVGKTYGPQLIAEIGDVSRFTHREALTAFAGVDPGVDESGQHKSKSNRASKVGSVRLRKTLFQIMTTLLQNAPEADPVYRFLDKKRSQGKPYYVSMTAGANKFLRIYYGKVKECLRNLEQTE

SEQ ID NO: 76409 - protein, 465 aa, unidentified
MKKSTSKLKKQSKKITLEAHWEPVNPHAAGVDIGSREHWACVPEPAIKQNVRPFGTFTADLEAMAQWFQDCGVTSVAMEATGVYWIPLFQILERRGFQVLLANARQTKNVAGRKTDVQDCQWIQRLHTYGLLQGSFRPADPYCVLRTYLRYRDELVGARSTQCQHLQKVLQQMNIQLAQVLSDVTGVSGLAIIQAILEGQRDPVRLAALVDRRVRATAATIQQALQGDYREEYLFVLRQAHELYHTYEEKISACDQQIAREIAKLPDLVDVARQPLPDRKAGRKPCQDKMAGLDMREQLYLKFGVDLTGIEGIGVLTGLVLLTEVGPKVDQFRTEKHFCSWLGLCPDNRISGGKVLSSRTRRVVNRATDALRMAACTLERSQSALGGFYRRMKARLGAAEAVTATAHKLARIIYRLIKHGENYVRQGLEEYEKKFHERKRCALQKAAKKLGFELVPTPTASSGVS

SEQ ID NO: 76410 - protein, 422 aa, unidentified
MTAHTSQTFHQQFHLFLGFDWAHDDHDVVAVDSTGRTVLDRAVPDTAEGWADLRQKLQDLAGPDLWHVAVVVETCNGPAVERLLDMGTAVYPISAKAAKAFRQCKNSSGSKSDRLDAWSFADALRTNGQQWKALVPDDPLTQELRLLCRDEVKLIEQRTALVLQLQEALHEYYPAALEAFDKWVCPSAWAFVAAFPTPRHLVAAGRRKWEKFLHSHRLYREATYDRRLEIFARADRFCGPPAVTNAKSRLALALVKQLQVLEAQLREYRTAIETLFDQHPDRDIFGSLPGGGDKVAPRLLSEIGTVRGRFKDAQSLQTYAGSAPVTWESGKSRIVQFRRACNKHLRAATNFLADLSRDRCVWAQTYYQQKREQGKSHATALRCLAQRWLKILWKMWQTRTPYDEAFHLQNQTRHGSWVLVMK

SEQ ID NO: 76411 - protein, 500 aa, unidentified
MSKHKSNPTKSVYRKQCIEIRTVFEKASSPRKVLCVALDYAKSKHVALCCDGLGDILKKPFSVENSTEGVEFLCKEIQATARRRKIKKDTIFLGGEDEPAYVANFVAALTRKGYLVLRVNAREAANQRENLLASTDNLDLLGISKCLLNRRASPASSADNQAPVYRDLRELSRQRHDYVRQRTAASNRIHAIADQLFPGFLIASKSGVTPFLTASLALMENRFSSTEFARRKQKSLSNTLRINRVRNPGETAFKLITLAKDALPPAPDRIATLQQSLRCLVELYRCLDASASLLRLQAAALLTTTPYVMLTSIPGISFVLASGIAGELGEPARLPSADSLSAYAGIVPAVTQTGGPDSSAVHLSTRARCNHLLKDWVVQGSQKIGLCGPPEHKERFLRRSANGQHAAYAGARTLLRLTRSLVTQETPYLPPTARRQGASTSDITEGCLTTWAKLVEKWRVIPGWQDMLTDENNPMGFWRRVVAEIHGIELSLQPVKPGKD

SEQ ID NO: 76412 - protein, 373 aa, unidentified
MKKTIKNVGLDVHKNSISIIIADDDRDGEVRYYGTINNDLRQLNKVIRNLISQGGELRFVYEAGPCGYGIYQHLIGNGIDCVVVAPSKIPQQSGNRLKNDRRDSLTLARLHRAGELTAVYVPTPEDEALRDLMRARIDATRALRVAKQQLSAFLLRHNVVYPGKTLWTKTYFNWLPTVAMPHPAQRIVLQEYIDTVTDTIHRVQRLTEQIRLQSQRSSRCELIKALQSMRGISLIVAATIAAELGDLTRFETPGKLMAFLGLIPSEHSSGAKVKKGPITKTGNRHVRNALVEAAHAYRFAAKKSRTIRQRQENLPKKIIEISWKAQCRLCDRYRHMIAKGKQVNVTKTAIARELVGFTWAIAQELAQTSPINA

SEQ ID NO: 76413 - protein, 456 aa, unidentified
MSKRRESRPKKAVPALSPTRPKVAGIDVGSRQHWVCGPDEGTGQANVRVFGTTTAELMALVDWLMELGVESVAMESTSVYWIPLYELLESHGIEAVLVNARQLHNVPGRKTDFHDCQWIQHLHSCGLLRGSFRPGEAIVATRALQRQLANFVEERTRCVQWMQKALDQMNVQVHHAVSDLSGTTGLAIVRAIVEGERDSVRLAAHRDYRCQKSAEEIAKYLVGTWRQEHLFNLESALRLHDAIGALVASYEARLLELIESMQPPERRNLPVPSHPTPAKERQIKSRGNQNTRTALWRYAGVDLTRIDGIGIGSARTVLSEIGPDLSAFKNEDHFVSWLRLCPRTPITGGKPLKKRRNGLGATRVATALRMAASSLRRSKTALGAAYRRYARNKSADLAVFAMARRLAQLVYRMLRYGQDYVDAGEQAYELKFRARRLAGLKEAARSLGYVLAPAAG

SEQ ID NO: 76414 - protein, 352 aa, unidentified
MEKIALDAHKRYSLISVESRPGEVVFEGRIEHRKGAIKGVLESFTAGSPVAVETIGNWYWIVDEIEEAGMEAKLVHARKAKVMLGCINKTDKLDARGLNRLQWTGTLPTVWIPEGNLRDKRSLTRTRMYLVRQRSGLKCRIQGLLAAYALSIEEVSDVFGKKGREILSGRLDELPEHAAFTLDIQLGQIDLLDEHIGRLDRKIKEVFKETPTVRLLRTEPGLGFVLSTVVELETGDIARFGSAEKFASYCGTTPRVHASGGKVRYGKLRPDVNRILKWAFMEAANSISRHRKHWPQRHAVKLYEKVRSSKGHAKAVGAVAHHLAESAYWIMTKGEPYRDPALRKILNSTVCQ

SEQ ID NO: 76415 - protein, 350 aa, unidentified
MEEVSVIGIDLAKNVFVLCAQAASGEIAWRKRLKRRAFKQFMAAKAPRCLVAFEACGGAHYWGRFLTALGFEIKMMAPRAVKAYRQGPHKNDWRDAEAAAEAGSRHPVRAVRVKSEAAQAVQVLVRLRALQIRQLVQTGNHLRGILNEFGIVLPKGHKRLREAIARLRQEDPASAALPASVRRTADRLCLQLAEQARRVTEATSELEAAIKDEEDCRQLRTVPGIGPINAAALSVALEAPQAFPNARAFAASLRLVPRQHQSADKQIMLGIGPLSANETRRHLVLAGQSLITMVRRFQQPPADKFLLWVYRLDRRKHRNVAAVAVAAKLARIAWALMAKDQIYQPRRATA

SEQ ID NO: 76416 - protein, 340 aa, unidentified
MKTCSKFFIGIDVSKPYFDASLLCVIDQQKQQIQTLRFENSIQGLKEFHKWLKKHKVTMNENTLLVIENTGIYHRLLWAFCCEKNLPIHIGNAAHIKWSFGIARGKSDRVDSIRLCQYAYRNAEELKSSSILDPVLLQIQDLMASRRRLVSQLKSNEVYLNELKNISNIDNRLILERLHRDAIKGISNSISKIETLLKKIVSENEKIKKNYDLLISVPGIGHLTAIYIICCTCNFACRRSGKQLASYAGVVPFEHSSGISIKGRNRVSNMANKELKKMLHLCALSAIQFYPEFKCYFERKTGEGKHKMSVINAIRNKIVLRAAAVVIKQMPYISKYNVLA

SEQ ID NO: 76417 - protein, 343 aa, unidentified
MTKISTIGLDLAKNVFQLHGVDASGAVVLKKQLRRGALEKFFAQLPPCLVGMEACGSAHHWARVIGRYGHEVRLMPPAYVKPYVKRNKNDGRDAEGICEAVGRPTMRFVPVKSVEQQATLAVHGTRALLVRQRTMAANALRAALSELGIVAAQGYEGLRELMAKLEEPGEEIPEAMRGALLVLAKHWQALDADERLLERQIAKAARSDQDARRLMEVPSVGPIIASTVLAKVPDAKVFRSGRDFAAWIGLTGKDHGTGGKHRPGRISKQGDRMLRAMLICGASAYLRHQKARGVSDPWLRELLARRPYKVVMVALAAKTARIIWAMLAKGEPYRDRASASAAA

SEQ ID NO: 76418 - protein, 463 aa, unidentified
MAKKTTTSRKGKSKAGKNVLERINLNAAGIDIGANFHLVAIPEDRAEENVRKFGPFTSDLHQLADWLTEHHIETVVMESTGVYWIPVFQILEQRGFEVKLVNATHVKNLPGRKSDVSDCQWLQQLHTYGLLNGSFRPKDEVCVLRSFLRLRDTLVKDCSSHVLRMQKALTEMNIQIHRVLSDITGYTGMAMIRAILAGERDALKLAQMKHPLVKASTQQIVKALEGDYRAEHLFALQTALELYDAYQLKITECENKIEQQLEQFDSKLDFEQVLEQSGALKTRSAQVRLQLQRQAHLSSVCGVDLTRLPGLSTLAVEVIISETGLDMSCWKSEKHFCSWLKLCPDNRISGGKVLSSRPRKTKNRAAAMFRLAAQGAMQSKTAIGAFIRRLKARLGAPTAINAGAHKLARLFYRMLKFGATYVEQGQAYYEQKYKDRLLRNLSKRAKEFGFQLTPLEPATDLVS

SEQ ID NO: 76419 - protein, 348 aa, unidentified
MPSISEQTIRVVGIDIGKNSFHIVGLDERGAIVLRQKWSRGQVSTRLANLPPCLIGMEACVGAHHLARRLQALGHHARLMPAKYVRPYSKGQKNDFRDAEAIAEAVQRPTMKFVAVKTADQLDLQALHRVRERLVSQRTGIINQIRAFLLERGIAVRQGQRFLRAELPHILAAPSDVLSPRIAHVIEGLCDDWRRLDARIDELSAEIKNLADADSACARLMSVPGIGPIISSAMVAAIGTGDAFTKGRDFAAWLGLVPRQMSTGDRTILGRISKRGNRYLRVLFVQAAWVVLIKPTTWQRHGLKAWIEAAKKRLHHNVLAVALANKLARIAWSVLARGRAFEVTSQAA

SEQ ID NO: 76420 - protein, 367 aa, unidentified
MEKSSKVFVGMDVHKESIDITLAEQGGEVRRLGAIGGDRGSLLKMVRKQQSKGRERVFVYEAGPCGFWIYREITALGERCMVVSPALVPRRAGDHVKTDRRDSERLGSLARAGELEAIHVPDIRDEAIRDLVRGRDDAVIAQRRVRQQLKALLLRNDIRYVGKTSWTGAHRRWLSELKLPEPAQQIVFEEYVDAIAVATGRIERLTRAIETEVITWRFAPVVAALQAMRGIQFVHAVTLVAELGDLARFGSARQLMAYLGLVPRENSSGEHRRQGSITKAGNSYARRALIEAAWAYRHPARVTRIIATRQTGLPKAACDIAWRAQLRLSAKYRRLNARHVNHNKIVVALARELSGFVWAIGQSVKPQ

SEQ ID NO: 76421 - protein, 387 aa, unidentified
MGAVLIGVDPAKRSNTIEVINASEKMLATGRFDNSTVGYREMRALARKWPDRVWVIEGATGVGLHLAQRLVSDGERVLDVPAKLSTRVRAMDTGHGRKNDPADAHAVAVVGLRSPGLREVSLDDETVALKLMSERRRDLVRSRTQAVNRLHQILMQLIASGAPKQLTVAQAKALVASVRPRDAVGKARRQLAVDLIDDVVVFDRKIKAMEARLSEAVAATGTHLTEIVGIAAVTAATIIGEVGNVSRFATSNHFATYTGTAPIEASSGEIVRHRLSRAGNRRLNSALHIAAMANKRHDPRGKAYYERKLAAQKGHMGALRSLKRRLSDVVFRVLLEDQARANPGGQMGATLTASAVDQIPKANTSDKPQPVFTAEATPTRRPTKAAS

SEQ ID NO: 76422 - protein, 434 aa, unidentified
MKDTIARRAAEVTPDTLIVGVDMARRAAHAAVFVTRDGQRVGRLSFHTMSAGFAALKDGAEAAAQRVGAERVLVGIEPAGSAWRLLAQFLDGAGIAYRLVNSFTLRRQREGDDLHHRKSDYRDAEMVTQLVRDGRYLRTQRHVGPYARLMVFQREYRRQQNVLYAETNTLLDLVDQLFPEFHVAFKDVLGVTARAVLRTGLTPAKIARLPLSALRARVRRAAQGRQAWLIRLSALQEVARGSVGLRDEAEQLARRVQQVLQRVDLLLAQCELSKGRLTAEVMALPEGRRLAALPGLGPVLAAGLLAEAGPLTRFSNIKQLPKLAGVIPVEHQSGMYRGRYTPMGKKGRPGLRWVCYRAALCLMRHNEVFREAYRRWTGRAERPLTPMQALGACMHKLLRVAYALARQSAGILPATNPILPGDPVPALGRRCQVA

SEQ ID NO: 76423 - protein, 393 aa, unidentified
MKASNNIINRIIGLDMHPDVFAAAALENKDAGSAKVILVHDRQATAHLEKWASKHLQIGDILVLEASGNSFEIASRLHALGYIAIVLESAQAAKVRENFCNDDRHSAIKLARVYLSGLAKVVWQPDEATRQLREVFFLHRSMVKECTRQRNRIRSFLNEYCVRLPKGTRLTTQEGLRGALRAKEWTSLQKELLSERFDCLQQSEKRRKHLEKIMIKELLDRPQWCKLWRMMGVRHIVAFGLMAIIGDVNRFPNAKKLVGYIGLSPSKVQSGNNVKGREKGTGNTGRGDVRALLVQSAQNALNYRESALHKWGWKLALKKHRNLAVAAVARKLVTAIWHLLKGHFTPLLEMTKQLQLKLSVIAGILGKETLKDMGFEKRNDFILKQFENMKINT

SEQ ID NO: 76424 - protein, 315 aa, unidentified
MSGAPLFVGIDVSKSELVVASRPEGNASIVGNDEGGIQDLLQQLRLRSPALVVVEATGGYERALVAALAATGIPLVVANPRQVRDFARSTGQLAKTDRIDAHILALFAERIRPEPRPLPDEAAQVLEALLARRRQLLEMLTAERNRLEHALPAVRRDLVQHIRWLERRLRDVDHDLDRTVQSSPVWRARDNLLRSTPGVGPVTSRTLIGNLPELGMLSRKKIAALVGVAPLARDSGTLKGKRLVWGGRAPVRAALYMAALVASRRNPKIAAFYQRLLLAGKPKKVALTACMRKLLTILNAMMKTQSSWHQISELA

SEQ ID NO: 76425 - protein, 369 aa, unidentified
MEKDTTYVALDDSKRKIVAGILRPGDAQPELREIANDPRLIRRLFERLKREGPVVACYEAGVSGYDLRRQIVALGVACDVIAPALTPRRPGQRIKTDRRDAAKLVRLFRASELTAIHVPDESEEAVRDLVRCRDDIRRDVLRWRHRVLKLLTRHGRAYLAGKNWSQAHWRWIREQRFDLPPLQRAFEATLFALEQALARQAELDKELEAIATAAPYCEPVGWLRCFRGIDTLSAIILLAEVVDFQRFRRPRELMAYLGLVPSEYSSGETQRRGALTKAGNSHARRVLVEAAWHYRHRPTIGRALASRSEGQPPEIVGQAWRAQQRLHRRYRHLVGHGKRTPVAVAAIARELVGFIWAAMTRRESRCQAA

SEQ ID NO: 76426 - protein, 392 aa, unidentified
MYIVGIDIGKNHHEASIVSPEGKQIGRSLRFATTHKGADSLMSFIFKNIGNSPCVFGMEATGHYWYPIYSFIKAKGYTIYVINPIQSDSLRKMYIRQTKNDSIDSFLIAEVIRFGQFGTTSMADENILAMRQLCRYRDSVISSRTEIKLRIGTIMEQIFPEYEKQFSSLWVSTSMGILEKYLTPENIENAPIDELFEIIKDKSHNRLTRAKAISIKEAAADTFGIKIAQDAFSFQLKQLIDRMNFLDKQIEALDCQILEYYEKFDCYLHTIPGIGIIGAATILAEIGDISRFKNSSSLIAFAGIDPTVRQSGEFNSTHNHMSKRGSPYLRHAIFLAATTCSFHNSPLNAYYKKKRDQGKHHLTATGAVARKLTTVIYAVLRDSKPYEPKKFC

SEQ ID NO: 76427 - protein, 347 aa, unidentified
MRFYNTQHPFYCGIDLHARAMYVCILNQAGETLLHRNMKTTPEAFLKVIAPYRPDIVVAVECMFTWYWLADLCADEEIPFVLGHALSMKAIHGGKAKNDKIDSQKIAVLLRGGMLPQAYVYPAEMRATRDLLRRRMHLAHKRGALLAHVQNTNSQYNLPALGKNIAYKANRDGVAERFADPAVQKSIEVDLSLVSYYAELLRDVELTILKTAKQHDANTLYLLQTVPGIGTILRLVLLYEIHHIDRFPRAQEFASYCRLVTCAKESNGKRSGTSGAKIGNAHLKWAFSEAAVLFLRENPVGQKFLARLEKKHDKGKALTILAHKLARAVYYMLKRKVAFDMQRFLND

SEQ ID NO: 76428 - protein, 357 aa, unidentified
MEQITRGQIVRVGVDLAKRVIQVHGVDGDGRTVVAKALGRDRFLAWCAQLGPQCVIAMETCSGAHHWARRLTALGLQPRLIAGHFVAPYRMQGRQGKNDANDAVAVCEAASRPSMRFVPVKTAEQQGQLAVHRLREGFKEERTACINRMRGLLAEFGLVFAQSPQALRQALPDLLEDASNELPAVARFALQRAQLQWSELDAHMAWCDERIAAHVRSDAQAQSAMQLCGVGPVTASALAASVGDLRQFKSGAQFGSWLGLVPSQNSSGGKASLGRITKRGDDYLRTLLIQGAKSAVMTAHRRRDKISQWLVQLLARVGWQKATVALANKNARVLWAVLSKGLAFNADHISTKASAAA

SEQ ID NO: 76429 - protein, 361 aa, unidentified
MKKPEHHLIAEVPCMDPRTGLTIGVDLGDVWSHYCTLNQDGGVVDRGRFRTTAKAIEKWFKDLPPTRVSMEAGVHSIWISEQLQQLGHEVIVANVRELRAISHSDGKSDQVDAEKLARYARLDPEILRPISHRTVEQQEALTLIRARELLVRLRTAAVNAVRGLTKACGYRMPASSTKCFAQRGQAAMPPGLKLALGPILAQIAEMTLKIKQYDREIQRMTQTEYAETQPLLTIHGVGHITALTFVLTLGDKERFGRSRDVGCYLGLRPKRSQSGERDPQLGITKTGNAYLRSLLIECANHILRSHGRDSALRQWGLHLAARGGKQAKNKSVVAVARKLAVLLHHLWTTQESYIAFHTAAA

SEQ ID NO: 76430 - protein, 311 aa, unidentified
MNDTIGIDISKDTLDTYWLSKRKHKQFANNKSGLKELIRWVRQAEASLAVFEATGVYHRMLEVSLAAHDFPFARVNPRQARRFAEGTGTLAKTDRVDAAMLARMGSVLELPADKPKSEMLHNLKGMTTARQALIKDRTAARARLATATYPLLRKQATLRLRQVERDIAQIDAAIETIITSDKTLCEKAAILISIPGIAKVTAFAMLIEMPELGSLSGKQAASLAGLAPISRQSGKWQGKERIQCGRACLRRAIYLPAVVAARFNPDMKAKYHELIAKGKCKKLAITAVMRKLVVMANALLRDDRKWTETRA

SEQ ID NO: 76431 - protein, 394 aa, unidentified
MFYLGIDVGKFSHSLCLLAEAGQESKIWQATNDRIGFEKLQERLLKEEIPWSDLTIGMEATGHYFLNLYGFLLELGIKAEQIALLNPLQVKSFRNTNLRGAKSDNVDAERIAVLLRFGGYKRCNVSVNEMMNLRELSRLRADLTASGGNLKRKLIAVLDRIFPEFAKIFKNQFGVTALTLLQDYSTPEELARLSLKELRLAIKKLSKRGLSPAKIKRLHEASKNSIGISFGQEAFKIELQIILQQLAHLEEQIDFLKDQIEMIVKKLHSPIFTIPGIGPTTGATILSEIGDINNFPSAEKLVAFAGLDPKLKESGTYQGRTPISKRGSKYLRAALWYAAMVACRVEPTFKKQYQARREKGKSHRYAVTLAANKLTKVVYHILKYDCIFDSKQLT

SEQ ID NO: 76432 - protein, 344 aa, unidentified
MITIGIDPHKRSVTAVALDAHSQPLGSLRVAMTDRAVAQLLAWAVPWSARRWAVEGATGLGHTVAQQLVGAGELVVDVPAKLAARARLLGAGSARKTDRSDAASVAAVALAHRRLRQVAVEDHTMTLRLLSDHRDDLVAERTRTLSRLHVLLCDLHPGGAERNLTAQRAAALLGRLRPVAGVDRERKRIARELLADVRRLDQRITAATKAIGEAVTSSGTTLTEVFGLGPVLAAKILGHAGDLTRFPDRDHFASSTGTAPIEASSGDVRRHRLNRGGNRQLNTALHLIAVCQIRDPSPGQVYYQRKLRQAKTPEEARRALKRKLSNVVYRHLAADHRRHHVPPS

SEQ ID NO: 76433 - protein, 367 aa, unidentified
MKKVSIAATRQSRNISQQKLTIGLDLGDRNSWYCVLDEAGQIQLEQRVRTSAKELREVFGAMPRSRMAVEIGTHSPWISRLLSELGHEVIVANARKVRLIGESRKKDDRLDAQTLARLARIDPELLCPVKHRSAQAQADLMMIRARAGLVRARTGLVNTARGLAKSYGERLRGCNVRNMNAEKAEGLSPELQRALEPLLSAIEELSQQICEYNEGIEALAQASYPQVALLKQIKGVGTLIALTYLLTLEDAHRFGKSRDVGCYLGLQPGRRNSGQSEPQMHISKEGDPYLRTLLVQGAQHILGPFGADCDLRRWGLKLAERGGKNGKKRAIVATARKLAVLLHHLWVGGEVYEPLHNSSRMTVAAAA

SEQ ID NO: 76434 - protein, 408 aa, unidentified
MAALDIGKAEVMCCVRVPDQERPGKRLQEVRPYSTMTRSLLVLADRLAGLGVTRVVMESTSDYWKPVFYLLEAHGFETWLVNARDVKHLPGRPKTDRLDAVWLCKVAERQMIRPSFVPPPPIRRLRDLTRYRRDLVEVCTAEKQRVEKLLEDAQIKLSVVVSDIFGVSGRAMLAALAAGERDPKVLAQLARTSMRRKISRLEEAFTGHFTDHHAFLLSTMLARVDAATTDIARVDAKIEELVAPFAPTVDRLDEITGVGRIAALVAIAEIGLDMARFPTAGHLCSWAKFAPGVSESAGKKKGRGATGHGNPYLARVLGEAAVAASRTNTFLGERYRRIARRSGAKKAIVAVGRSLLVIMWHLLSDPDARFRDLGADYFARHTNTQRKIRNHISQLAALGYRVTLEPVA

SEQ ID NO: 76435 - protein, 412 aa, unidentified
MDIVVERCAGLDVHKDTVVACVRTPGKGGGREQTTRTFKTMTIDLMALRDWLVAMGVTRVGMESTGVYWKPVFYVLEDATECWLLNARHLRNVPGRKTDVQDAEWICQLVEHGLVRPSFVPPKPIRELRDLTRYRKAQIDERGREAQRLDKVLQDAGIKLSSVATDILGKSGRDMLAALISGTVDPQVLAELARGRLRTKIPLLRQALEGRFVSRHRLIVEKILAKLDFLDETIADLSAEIDALIAPFAGEVDLLDTITGVDRRAAECIIAEIGVEMARFGSSARLASWAGRCPGHHESAGKHKSGRSRPGSKWLAATLAQCAEAAGRSKGTYLGAQFQRLRGRRGHPKARKAVEHSILVAAYHVLDRHVGYQDLGADWFLRRRPEAHARRLAHQIEALGFRVTIEPTEQAA

SEQ ID NO: 76436 - protein, 384 aa, unidentified
MAATVQQSFVPRDFEVFVGLDVDKKRIVGTFRDQGSLLKSLQLPYSAEQLLRYTEKHYPGRKVAFLYGAGPTGFGLYDSLTGGGHCCLVVAPSMVPRAPGQRVKTNRLDSRKLSENLRGGQLKSIHVPSGPYRQLRHLVQLRDSSVGQMKAAKYRIKALLLYEGIAFPDAAERWTRNVLKQLQELEANPAVTFKLASLRAALEFSRLQAANTQREIRRFCRQEPELRESIQFLMTIPGIGWIVGSHLVARLGDWRQLGNVRQIAAFLGLVASEHSTGDQVERGPITHLGDARLRCKLVQSSWTAIRKDAELREFYRRIYGRHPRHLAARKAIVAVARKLTTRIHAVLTQRRPFEVRPERSSTPLTSEETAGPRGRLVGAQNNGL

SEQ ID NO: 76437 - protein, 407 aa, unidentified
MIFVGVDWAEAHHDVCVLDAEGVVLGRKRVADNYVGLGELHALVAEHLGDEDDAEQVIVGIEKDRGLIVTALVAASYQVYAINPMASARYRDRHHTSGAKSDPGDAKVLADLVRTDRQNHRPVAGDSALVNALQVLARAHQNVIWSRQRQVNALRSSLKDYYPGALDAFGTDLSHMDAVAILAVAPTPALGRTLSRAKIVSALKRGGRKRKLDERAATIQEVLRREQLRQPPLLEDAYGKVTSSMVRTISQMTTEIAELEQALSEGFEQHPSAKVILSLPGMGTVLSARVLGEFGDDPNRYCDAQSRKNYAGTSPVTKASGKSRVVLARHSRNRRLADALDRMAFCSLIASPGARRYYDEMRAREKSHQKAVRQLANRWVGILHTCLERDCLYDEEIAWAIPKDIAA

SEQ ID NO: 76438 - protein, 314 aa, unidentified
MTGFVGIDVAKAELVVTSRPTLTRWSVANTASGIEALVAQLRELPPALIVLEATGGYEREVTAALVAAGLRAVVVNPRQVRAFAKATGQLAKTDRIDADVLALFAERMQPAWRPLAEEATTDLAAVLLRRRQLSDMLTAERNRLGVARRPVRASLKKHITYLERELRGTESELRTLIEDSPVWRVHDELLQSAPAIGTVTSQTLLAELPELGQLTHKQITALVGVAPMANDSGRLRGPRAICGGRARVRQVLYMAALVATRRNPVIRRFYQRLLAAGKAKKVALVACMRKLLLILNAMMRDQRPWAATIEASPA

SEQ ID NO: 76439 - protein, 379 aa, unidentified
MSKIRFVGLDVHADTIAVAVAEADGEVRSLGMIPNRLESIRKLVAKLGPAKQLKACYEAGPTGYVLYWQLAALSVGCEVVAPGLVPVKPGDRVKTDRRDATKLARSYRAGDLTPVWIPDAAHEALRDLVRTREDARQDQHRARHRLSKFLLRHGRRPPEDVKKAWTLKYMTWIQEHVHFDQPALEATLLDYVHEVEHMAERIVRLEKAINEAIQKAPPEIRAVVEALQALRGVAQLTAVTVVAELGSLSRFQSPRQLMGYSGLVSSEYSSGNRVQRGGITKTGNAHLRRVVIESAWAYQHRPWIGGFLLRRQCDLQLTPEVKEIAWKAQWRLHTRYKKLAAAGKKKPQVVTAVGRELLGFIWAIAVQTEASFRPDRKAA

SEQ ID NO: 76440 - protein, 337 aa, unidentified
MSNNRFAAADVHAATTTFAVLDDRGKFVMETVVETKAESLLSVVKSITGAVHLTFEEGTHAAWLYDLLRPHVAELVVCNPRKNRNDSGNKSDRIDARQLARWLRSGDLSPVYHGQDSTRVLKELVRGYENLVADSARTKNRLKAIYRSQGESTSGGDVYKLEQRQEWLSKLRSSGLRSRAEWLYSQMESLGDLREEAEKAVLCEVKKHRPCSLLKSVPGIGPIRSATIVAHVATPFRFRTKRQFWTYCGLAVVTWGSSDWEIDGEELKRSRRPVATRGLNRNHNRYLKNVFKGAVSDAVVFRRHLNALVESGMRESMARLTVAPKIAATALAIWKKG

SEQ ID NO: 76441 - protein, 337 aa, unidentified
MDYFAGLDISMDETHICVLDREGAVVYEGKSASMANAIADELSKAPSCRRIVFETGRMAPILFHGLSQLGLPVVCVESRQAYQALKSLATHKTDRNDARGLAHLARTGFFKPVHVKSLRAHAVRSLIIARKKLVGQRVTLENQIRGLAVVFGVRLPRALTAAFINEALKASEGIAGLSAAMRGLIAARTAVMAAVAAIDADMRRMTRASAACRRLMTIPGVGQLTALAFVAAIDDPSRIRRSRDIGAYLGLVPRRYQSGEVDYTGSISKCGDRRVRTLLYEAANVMLTRYKGQLKLKDWAFAIAKRSTMRKARVALARRLAIIMHAMLRDGTEFASA

SEQ ID NO: 76442 - protein, 353 aa, unidentified
MTYTGIDYHKRYSVACTLDEKGRRLLERRIEHNAPEAFAAYFAELGEPSEVVIEACWNWGTLYDLLEQVPGVTHVVLSHPAKNRIIADAQIKNDRVDAHALATLLRGDFVARVHVPNREVRQRRNTVRQRLWAAKVRTMVRNRIHTVLDRHPGLDRPVYKDVFCQRGVSWMRTAELPAPDRELLTEDLELHTLLERQMTGLERRIEADSATSDDARRLRTLPGVGKVLGPVIALEIDGIRRFRTSDRLCAYAGLVPTTRSSGGKTSHGRMLPFCNHWLKWAFIEAAWVAVGCSDYFGGFYRQHRARGKCANEAITITARRLAKIAWQMLTAQRDYRRVPTQPDPLSPAALATD

SEQ ID NO: 76443 - protein, 396 aa, unidentified
MISVGIDVSKGKSTVCIMKPCGEILESPFDIGHTADELDSLISLIKSFDEETRVVMEDTGHYHLPVATYLSSHNIFVCCVNALRMKKFCSQSIRRAKTDKIDSIKIASFGITYWNELVKAYPSNVIYDELKFLARQYYQVTGMLVKSKVNFSNLLDQVMPKINDVLSNQGENHKLTEFVSRYIHFQNILDMGEMKFTSDYCKWAKKKGYRLNERKAAEILALAQNGIPTLPNSQSVKIAVSEAVKLIHSIEESRNTILAQMQDLCNTLPEYSVVKEMDCIGDTPAPRIIAEIGDVRRFKNKHSLIAYAGIDAPPYQSGAFHASERHISKRGNSYLRKTGYEIMQSLIKHKPADNAVYDFIQKKRSEGKCGKEAMIAGLNKFLRVYYGKVMEFYSEH

SEQ ID NO: 76444 - protein, 370 aa, unidentified
MKKDSTCVALDDSKRTIVAGILRPGSDAPELRTLPNEPRHVRRFFARLKREGPVRVCYEAGPSGDDLVRQRTALDVPCQVMAPALTPRKPGDRIKTDRRDAAKLVRLFRAGELTPITIPNEAGEAARDLLRCREDVQEDLLRWRHRLGKFLARHGRVYREGRNWTQRHWTWIRRQRFDLPALARTCDEYRCAVEQLLARVADLTREIAALAETEPYHEQVGWLRCFRGIDTLAAMTLLAEIGDFQRFTHPRQLMADLGLVPSENSSGDRTQRGSITKAGNTHARRLLVEACWHYRHPPRLGAALAHRSQGQPQSILAQAWRAQLRLHRRYRHLVGHGKRAPVAVVACARELVGFLWAALTRVEASGAQAA

SEQ ID NO: 76445 - protein, 315 aa, unidentified
MPAKSVFVGIDVAKRKLDIAARPSGDYWTCDYDDAALCDLIKRLRRLRPQLVVMEATGGYEFALVLALADAGLPLYVANPRQVRDFGRGLGILEKTDKVDAKLLAHFAEVVRPQPRPMLSESMRKFRGLVLRRQQLVAMLTAEENRRATAIEELRGSIEAHIRWLAEELSTLEAQLRQLISTDPAWCEQDRILRSAKGVGPVLSWSLIAGLPELGQLDRREIAKLAGTAPLARDSGTFKGRRAIFGGRSAIRAVLYMGALSAARHNVPIRALYQRLIAPGKLKKVALVACMRKLLTILNAMVRDHKPWQPAPCPA

SEQ ID NO: 76446 - protein, 347 aa, unidentified
MEYHAGIDVSLEACSVCVVEASGKIIREAKVLSEPENLIGFFRDLGLEMARIGLEAGPLSQWLYAAMKNEGLAVELLETRHVHDAFKAMPVKSDRNDARGIAQLMRLGWFRPVHCKSMPAQEVRALLTARKLVQSKLFDIEMSLRGILRGFGLKVGRTTPNRFGLRVEELVAGHPTLEIIGKALLAAHEVLLRELNGFEKRVRQQARQDKRVRLVMSAPGVGPIVGLTYVAAIDDPARFKSSKQVGPHFGLTPKKYQSGETDYSGRISKIGDASVRTALYEAANAILTKPLKGAPALKSWGMKLAKRAGMAKAKVALARKLGVILHRMWVDGTKFADKGISPKPVTA

SEQ ID NO: 76447 - protein, 320 aa, unidentified
MNKFSNIANNRPCIGIDTGKDQLDIFADTSQELFTCDNRPKDLRRLAKQLEGMNPQLIVLEASGGYERAAVTAFSELSLPVAVVYPKRVRQFARGLGIIAKTDKIDARVIAYYARVADPAPTPPKTSELSALEALTSRRAQLIEMRLSEQNRIELAHPSIQKEIKHHVAWIERQIDKTEAEIERQIRESNTWRQTDELLRSVPGVGAVLSSTLITDMPELGSLTSKEVAALAGVAPFPRESGRWKGKRICQGGRYQVRRVLYMATIAATRFNPVIKNLYDRLCQRGKPKKLAIIACARKLLVILNAMTKNNSPWSPKPTF

SEQ ID NO: 76448 - protein, 341 aa, unidentified
MELFVGLDVSVRTTSVCVMDGEGKVLKEGKVASDPSAIDAMLAVFTSHLKRVGLEAGPLSQWLYSGLAAAGYPVICVETRHMKAALSAQINKTDRNDARGIAQMMRVGLYKPVHVKTVRSQEIRMLLTARKFLQMKIIDTENHLRGLLRNFGLKVGAVNRTQFEERIKDLLRQSPHLALTITPLLDVRHVLHEQYQLLHRAMKKLAADDGICRLLMTAPGVGPVVALTFRAGVDEPARFARSRAVSAHFGLTPARYQSGELDRSRGISKCGDAGVRWALVEAAGVILRHRTRRSHLKAWGMAIAKRRGPARAMVAVARRLGTILHRMWVDHTEYRWGAPAA

SEQ ID NO: 76449 - protein, 341 aa, unidentified
MTAIGIDTHKATLAACAVDGLGLALDERTFRNDPAGHRAVAAWATEVAAGGLIGIEGSSTYGAALARFLVAAGFAVREVPPQLTRRSRTESRRPGKSDPGDALTIARVTAREPVLPPVRLADRTRDLGLLLDTREALVHEATRRRNRLHAHLQVLVPGYGERVDRLVSGAALDRARRLLRGLTGLEPELARALVVDLHRLDRQINGLTDRIATVVGDDPLLRLPGIGVVTAARLLAETGDVSRFRSPDAFAALAGVAPIPASSGQIQRVRLSRGGNRQLNRAFYVIALTQVWHHPPAKAYVARKRAEGKTWREAIRCLKRQLVRPVFRLLQEGQLGLQAAA

SEQ ID NO: 76450 - protein, 360 aa, unidentified
MFCERTSVGLDVHARSVVAAAIDGRSGEVFRARLTPSHAEVIEWVGKLPGPCAVVYEAGPTGFGLARALSAVGLRCQVAASSKLLRPAGDRVKTDARDALNLARLLRLDEIVPVRIPSAAEEAARDLVRIREAARADLMRARHRLSKLLLRHGIVYYDGKAWTERHDRWLHHQRFDAAPTQSAFEDAYEAVVLATARRARLDEKITALAADSEFSPLTRRLACLRGISTLTGFALAVEIGDWDRFTGASIGAYLGLVPSEYSSGTSRTQGAITKTGNTHVRRLLVEAAWHHRSTYRPGPVLRHRWDQAPAAARARAHAGNQRLHARWVGLNLRRKPAVIANVAVARELAGWCWSLAVLPD

SEQ ID NO: 76451 - protein, 341 aa, unidentified
MEDNIIIGIDLAKNVFQLHGASQDGHVLFRKKLSRTQFQKFMSSHEPCLVAMEACASSHYWAREFSKYGHDVRLIPPIYVKPFVKRQKNDAADAEAIVEAVLRPNMSFVVAKSSETQALTMMVRTRDQLVSQRTDTINALRGHMAEFGLIAPNKVCNLERLEAMIDTTEEDLPVLALDMARLHFEHIARLSYQIDGITTRINAYGKSSKTVQLLRTMPGVGPISAMVIKAFAPDMSSFENGRSFAAWLGLIPRQQSSGGKVRLGRTTKMGQKDIRRLLIIGAMSRICSACRRGTSDPWLNGMLGRKPRMVVAIALANKMARQIWAMLIKGEVYRIPGINPV

SEQ ID NO: 76452 - protein, 356 aa, unidentified
MTNKPIVGIDISKEWIDVCTNRSGKGERVANNREAIGAWLDRVRPSLVGFEPTGGYERALTEALREREIVFFRIHPNSVIAFRASRGIKAKTDRIDAWLILEYLLDGVNRGQWRPSIAGDDTLRALTARRRQLINALQAERCRLQLAAVASVRTSIEQMIAVLSETLQAIEGALDAAIAANPDAAELHKLEQTIFGIGPRVSASLIAGLPELGLISGKEITALVGYAPFTKRSGKTQYRERTGHGRPDVRLALFNAARAAIRHPSPFRDFYDRLVEKNRRPGKVALTAVSRKILVTANAVARDRKPWNGAFDRTPPQNAVGTPGRPRGEPRAHRAGRVKAKAARSAVPRSDSLDAA

SEQ ID NO: 76453 - protein, 415 aa, unidentified
MKVVFPTCCGVDVHKTFLVATIITTPADSLQPHYQKKRFSTFNSDLNRFADWLLERDCLDVCMESTGKYWVPVFNILEKRGIRVVIANPKWVKAVKGNKDDTKDSKWIGDLFRIGLVKSSFIPNWDIRILREFTRYRYKLVSMKSSEKNRFQNAFTVCNVALDSVVSDMFGKSATAITDYLASDESFDADHCVSLLQRSLKKKAEQVLESIVGFSIADEQKARIKIIREHYDFIGMMIAKVDACVNEMVAKYEGEINLLCTIPGINRNSAITIISEIGIDMHQFGSSKRLCCWAGLTPGNNESAGKKKSVRISRAGVYLKPALVQVAHAAVKDKKNPYYALKYERIAKRRGKKRAIIAIARMILTAIYSMFCTGEVWNPVDIFKIDMPEHLKEQQLAKAIKQAKRFLEKQGLTVA

SEQ ID NO: 76454 - protein, 414 aa, unidentified
MLKIAYPICCGMDVHKSFVYACIASTNEQGVTTYKSKRFSTFTSDLRFCASWLAENNCKDVCMESTGKYWIPIYNILEPTCDIVLAHPKYVKAIKGKKTDKKDAKWIADIFKHDLVSGSFIPPADIRQLRDLMRYRWKLTNFKVGEKNRVQNCLTVSNIKLDDVFSDVFGKASTNIINRLLENPTEKITDVSSFRTKGMKATNEEILAAVDGEICPEQAEKLRIIRSHMDSLELCRLNTESLILSLAEKYTPQINLVSTVPGIQTFAAIGVISEIGVDMSVFSTSKHLCSWAGLTPQNNESAGKKKTTRISRAGAYLKPLLVQCALCAIRVKSNPEIRRRYLNIKKRRGHKKAIIAIARMLLTAIYNILKKNEPYNSELYAHCNNTPPEHRAVSVEAAIFILQRQGYLVTPCVT

SEQ ID NO: 76455 - protein, 423 aa, unidentified
MKLTYPICCGVDVHKTFLVATIITSEYVMPHYRQKRFSTFYSGLVAFKKWLLENNCKDVCMESTGKYWVPVWNVLEDSVHVVIANPKWVSTVKGNKDDKKDSKWIGDLFRMGLVPSSYIPSKDIRILREFTRYRSKLVSMRSSEKNRFQNAFTVCNLTLDAVVSDMFGKSATDIENYLLDTDIVDPAQCVSLLRGSLKKNSSDVVEAVSGFNMTPEQKERVRIVQGHFADIDRRIAQLDGVIGNLVAVYEGQISLLCTIPGVDRRIAITILSEIGTDMTKFGSSKRLCNWAGLTPASNQSAGKKKSVRISRAGVYLKPALVEAAHAAVKATEKHPYYRIKFERLMKRRGKKRAIIAIARMILTAIYAMLSTGEVFNPCDLDKFDMPEELKKKRTLASAKEAVRLLVSLGVVPAGSISLDALAG

SEQ ID NO: 76456 - protein, 423 aa, unidentified
MPYKVAGIDVHKRMLAVVVADVAIGGEYEFERRQFGSSPEQLRLLAEWLIEDKVQEAVMESTAQYWKPVWQTLERHWKTECQKWDDAGPKSGSLHLAQAQSNRGPGGRKKDFVDAELLVKRLVAQELILSFVPDTVQRLWRTVSRRKYQLTCARVRLQNQLEALLEEAHLKLSSLVSDLLGASARRMLKALAEGETNPAKLAALADRRLHATQQQLCDALGASKELNKVYRRLLKMALEELQLMEEQMDQLDHEIADLLSAHQDAVRRLAEVPGLGVDSAHQIIAEVGATAATFRSEKCLASWIGVCPGEEESAGVSASNRSPKGNRFMRRLLNQAANAAVKVKGSIFEIVFRRLLPRLGYQQAIWAIAHRLSRLIWKILHQGVRYDERGPAVSQRSKTARTAKMIRELRNLGYRVEPASSPA

SEQ ID NO: 76457 - protein, 463 aa, unidentified
MRTIGIDLAITGTHKAVVVDGQGNAIGSLIRFRTDPAELEALLRRAQEGTDEDEELRVVMEPTGLAWLPMASYFIQRGVTIYLVNTQQASDLRKFYSKYAHSDRISARVLARMPWVNPDGLHPLSLADADHLSGQRWCKQQEELAQQMTAIKNRVQAWERAFWPGLEEVVGDLFAPWVRRWREQWYDPWQLQSLETGQVAAFLAEAGADPEKAEGLAAGLQAVARQAVALFGTPQGGPSLYVDYATLQDQVLRELYLLACYEAEHWMVRRQVRQLYRQVHPDRQLETLYGVGENGAAVYVFFIGQIERFTSQKKFRGWSGLVPKSSQSGSGEKKGLRITHAGPDLIKKYAYIDAEVARRWDPQIAAIYHDQMVHKGKHHVQAVCCCATHLLDRVRAVLRDGRPYELRDVDGTPVTWQEARAIIAERYQVPEEVRKRNSKRARKTRRDEQAERKRKKRRSRPDR

SEQ ID NO: 76458 - protein, 338 aa, unidentified
MAIHTVGIDIAKTVFHLVALDEKGAVLTKKKFSRSQLLVYTANLKADVIGMEACSGAHFLARALVEQGHDVRMMPAEYVRPYVKSNKNDFIDAEAIAEAVLRPTMRFVPVKTDEQLDLQALHRVRERWIQRRVALVNQIRGFLLERGIPIRVGAEHLRNTLPAVLENAENGLSGRARTILCALREEWVELDTKIGTMTEEIGRISRSNEGCKRLMGVPGIGPIISTALVAAVGNATAFRKGRHLAAWLGLVPRQHSSGGKPKLLGISKRGNQYLRKLLVEGARAAFARLNRSQHSFGPWMDQLGDKKHSNVAVVALANKMARIAWAVLTTGQQYRAVM

SEQ ID NO: 76459 - protein, 469 aa, unidentified
MKRKSRRAKCQKVSPFSGDLQLIEPDAAAVDVGSRSHWVAVNPQRDPNPVREFGTFTADLISLADWLAQCEAKSVVMEATGVYWVSLYELLERRGFKVYVVDAHTVRHLPGRSKSDVKDCQWLRRLHSYGLLRGSFRPPAQIRQLRNYLRSRTKIVEAAAQQQLRMQKALTLMNIHLHHVISDLSGLTGLAIVRTIVGGERDPIRLARLRDPRIRASRETIQKSLEGNWQEELLFDLKIALESYDHFQGQIAAYDEQIRQELKEVESKVDLANEPLPATRLRACRKRPGMSQQNQLDLREELYRISGVDLTRIDGISLQTAQKVFFEIGTDVSPWSDEKKFSSWLGLSPNHRISGGKVLKRGSRKVVNPLSVALRLAARTLRNSHSALGANFRRLIAKIGMPKAITAMARKLAVLLYRMLKYGTQYVDKGMQYYESKYQETKLQYLRAQAAKFGMILLPKQAAATGVAS

SEQ ID NO: 76460 - protein, 345 aa, unidentified
MNTTQIAVDLAKSVFQVSVSHAPGRVDEQHRLSRRRFRTFFLHHPPAHVLMEACGSSHHWARELQNLGHHVSLLPPAHVARYRQGNKTDRADAKSLLEAARNEDIAPVPVKSLDQQAINALHRLRSGYLATRTARINAVRGLLREFGLPVPQGARTFLAKAHIVVEDDNLPAYLKAALTEALLEVQELEAKADNLKDQLERIAPLIPSVPLLMTVPGIGILSATSLVASIGDVHRFPSGRSFANYLGLTPRETSTGASRRLGPISKRGNRYLRMLLIHGARSALLAAHRTREPDSLQAWALRTAQARGHNIATVALANRIARIAWRIWQDQRPFQRRHAQPEEAA

SEQ ID NO: 76461 - protein, 474 aa, unidentified
MARRRSSRKPKTSDSKTRPRRGGFPIHNAPLPKGLKTDNQNAAGIDIGATQHYVAIPEGRDEACVRCFGTFTSDLHAIAEWLADCGITTVAMESTGVYWIPLFELLESSGFEVKRVEPGKLKRAPGRKTDVLDCQWIQELHTYGLLEGSFLPDQQIGVLRCYMRQRDTLVRHAGQHIQHMQKVLEQMNIKLTEVVTDITGATGMAIIDAILGGERDPQKLAALRDRRCKNDESTIALALEGNCSEHHLFVLRQVVESYRFYHRQIADVDEMIESHLKTFTDKSDGQKLTYRPRKRKLRNSEPRFDMRKYLHQMIGMDLTEIPGFGGAALLGIVAEVGLDMSPWPTEKHFASWLCLCPGNHKTGGRQNRGKTATRPTKSHAATLFRLGAQSILRSDCALGAFGRRLRTRLGAPKAITAVAHKLSIIYYNALKYGRQYVDQGAENYERQYRQWAIKGLRRRAEQLGFDLTPTSKAG

SEQ ID NO: 76462 - protein, 413 aa, unidentified
MALKIVYPICCGIDVHKTFVVACIASTNKGVTTYKSHRFSTYTKGLKELSQWLCENNCPDVCMESTGKYWIPVFNVLEDSCNITLAHPKYVKAIRGKKTDKKDAKWIADLFKHDLIVGSFMPPLAIRQLRDLMRYRFKLTNFMSSEKNRLQNSLTVSNIQLGNVVSDTFGKSSMNIINRLLLNPLDNSFDIEPLIHGSMKDKLPELELAIDGFITPEQAEKLKVIKQHYEDLKSRKADLEKIILSLSAPYSEEINLILTVPSFKSIFSAIAVISEIGVNMDVFPTAKHLCSWAGLTPTNNESAGKKKSVRISRAGCYIKPLLVQCATAVVKSEKHPEIRNRYLRIKKRRGHKRAIIAIARMILTAIYNILKKKEPYNADLYRKADVLPVNREITVEQAILLAKTQGYRIRAAS

SEQ ID NO: 76463 - protein, 369 aa, unidentified
MGEYSELFVAFDVAKKKHAVAIAEGGRRGEIRFVGDIENSPATIERMIKKLADRYKRLHVCFEAGPTGYELYRQILALGHDCMVVAPALIPKRAGERVKTNRRDAITLARLHRAGELTAVWVPDATHEAIRDLVRAREAAADDLRRKRQQLLSFLLRCGRIYSGGGHWTLAHRRWLARQAFEHAAQQIVFQEGIDAIEDAAQRLHRLEQQLTLIVPSWSMAPVVAAYQAMRGASFLVAVTFAAEIGDVRRFETPRQLMSFLGLVPAESSTGDTVRRKGLTLAGNRRARRALVEAAWTYRHPARVSETLRARIEGLPKPVRDIAWKAQLRLCARYRRLRAAGKKLPVVVATIAREMAAFLWAIGREVVPV

SEQ ID NO: 76464 - protein, 348 aa, unidentified
MRETVHMQITTIGLDIAKNVFQVHGIDATEKVVVRRRLRRSQMLAFFKALPPCLVGMEACATAHYWARELTKLGHRVRLMPAKDVKAYVKRNKNDAADAEAICEAVRRPTMRFVAAKSAEQQGQLMQHRTRDLLMRQRTQVINALRAHLAELGIVAAQGDKGVKELLTIVTDKKDERLPIDARASVIVLAAQLEAVQTLIGSIERRIKTQHRANEASKRLETIPGIGVIGATAIAATVADPTIFRSGRDFAAWIGLVPRQDSTGGKQKLGPISKQGDRYLRRILVVGAHSVLRRAMQNPEKYLWLTRLLARRPFKVVAVALANKMARMAWALLAHGGTYRAPEPAAAA

SEQ ID NO: 76465 - protein, 353 aa, unidentified
MRKIAYLAMDVHANHSVLGEMDSNGNFRGNQSFPTSEQNIIKALISITAKEKYLTLEESNLAYWAAQVSSPYVTDVIPCDPKENALIYKSSIKKDKIDTRKLCRLLRLGELKRVYHPENDDRAMFKASALHYIDLRDQQIALKQKIKAMYRHWGVIDVAGEAVYGVEKRHDYLSQVKQLPIRNQLNRLYTLMDETESMQKKALKTMIALGRKYPEIKAFKNIPGIGDISAHVFDAFIQTPDRFATRSKLWRYCRMGVTDRSSDGKPLGYKRLDRSGISEIKALIYQAWMSAMKGDNEVKHFYSNSLKQTHSRVHARLNTQRKIIAVMYGIWKKGVAYNPQRFLGSEDIVALYN

SEQ ID NO: 76466 - protein, 402 aa, unidentified
MDVSKTDAKVCVRVAGAGRRKTVETVTTWGAMTGQILDLREHLAAAQVTCVVMEATGDYWKPFYYLLQDLPGVEVMLVNARHVKNLPGRKTDVADATWLAQLGAHGLVRGSFVPPAPIRRLRDLTRTRTAITRERGREAQRLEKLLEDAGIKVSVVASDILGVSGRAMLEALIGGQRDPGVLADLAKRRLRSKIPELTQALQGRFEEHHAFMARVHLDLIDQHTAAIEALTARIEQVIEPFRGFRDLICTIPGISTLTAEVIVAEIGDDMSRFPTAAHLASWAGTTPGSNESAGKVKSAKTRPGNPYLQGALGAAAMSCAQHPGTYLNAKYRRIATRRGPQKANVAIQHAMLVAIWNMGTNGTLYDDPGADYFTRLNPERARTRAVRQLESLGFAVTLAHAS

SEQ ID NO: 76467 - protein, 320 aa, unidentified
MKITTVGIDLAKNVFQVHGVNERGKAVLRRQLKRSEVLKFFANLPPCLIGIEACGSAHHWARKLIELGHAVRLMAPQFVKPYVKTNKNDCNDAEAICEAVARPNMRFVPVKTPEQQAALALHRARAGMMKARNAQANQIRGLLGEFGIALPQGIGQLRRRLPEIVEDGKNGLPGLMRTLMRRLLAQLQQLDQQVSELEREIVLWHRQNDDSRRLERIGGFGPLTASAYVASLGNAKGFNNGRQVAAWLGIVPRQDSTGGKPRLLGISKHGDVYLRTLLVHGARSVLRHLEHRPDQVDSWLKRVMLRRGKNVAAVTAGQPA

SEQ ID NO: 76468 - protein, 349 aa, unidentified
MPKSSAALVTIGIDPGKNTLHLVGLDARGGIVLREKVARTRIVSRLANVPPCLIGIEAGMGTHYVTRELLALGHDVRQVPPVYAKPFRQTHKNDFRDALAIAEAVQRPTTRCVPPKTDEQLDLQALHRVRYRLVGQRTAIINQIRCFLLEHGITVRQRLHWLRHALPNILAQRTDVLSPRMVRILEDLAQDWRRLDDRIETVSGEIEALSKNTEPCRHLMTIPGIGPIISSAVVAAIGNGTAFTRGRDFAAWLGLVPKQISTGDRTILGRITKRGNRYLRMLFLQAARVVLLRPRNWMKHGFGPWLAAAAQRLHHNVLATALANKLARIAWSVLAQHRVYEARLSATAA

SEQ ID NO: 76469 - protein, 418 aa, unidentified
MAMKIVRFNCCGMDVHKNLVVATIGITDSKTNITEYFQRSFSTLNSDLYRLKDWLKSHHCSDVCMESTGKYWIPIFNILEDEINVRLTHPKYVKAIKGKKTDKKDSKWICDLFKHDLIKFSFIPPREIRELREIARYRYKLVCMRSSERNRYQNCMTVSNIGLASVISDPFGKTASNIMKEVMKANVIDDDKILKLVHRNCKNKDKILDSLHGYHIESDQRFKMEKSLDHMEYLDQLIDSCEVELIKRAYPFRRSFQHITQIKGISALSAILIISEIGIDMSQFESDKQLVSWAGLSPVNNESAGKKKSVRISKAGQYLKPLLVQCALSAIKDKTSYFGRKYSNIKKRRGHKKAIIAIARMMLVSIYHMILTGEEFQPCDYESFMDPKPNANPSLTVEKALNFLKQSGIDISSIPINL

SEQ ID NO: 76470 - protein, 444 aa, unidentified
MEVVYRRCCGLDVHKQTVVACLLLLDEAGRKTKKKREFGTFSNDLRRLMLWLFSNHVTHVAMESTGVYWKPVWNVLEDKFTILLVNPQHMKALPGRKTDQKDSEWIAELLQHGLLRASFIPAREIRELRDLTRLRVHLKQEVNRVRNRVHRILEDANIKVSCVVSDLFGVSGRAMLEAIVRGKTDPGWLADYARGTLRLKKDELTRAFQGHIGEHHRFVVGELLAELAFLEGRIVRLEAEIERRLQAHANVLERLCTIPGVERITAWTLIAELGLDMSAFADAAHLASWAGLCPGNCESAGKRKTGRTRKGNVYLRRGLCQAAWAASHCKDTYLTALFYRVASRGGVKKAVVAVAHRIAVIAYFLLAELVAYKELGGDYFDRLHPERTTRRLVRRLEQLGHQVALQPRAPLPPLTALSHIPKCGQRRGRPCKCAQRGITCIHKT

SEQ ID NO: 76471 - protein, 408 aa, unidentified
MLWGSGEDIASTGADVNRWSTPMQKLNDLSRCLTPLEPDSTLIAVIEMSLSSWLVAGIVPGVERQPLKKLAVDESVLLNLLHRWRGEAEKAGYMIKRIAVAFEAGRDGFWLARWLRARDIEVHVIHTSSVAVSREHRRAKTDRLDTELLKRAFLGWLRGERDHCKMVAIPTIMDEDGKRPNRERENLVGEQSRIINRIKATLVRLGIRGFNPKLKKAAERLQGLRTPEGEPIPPNTLSELRRNMERRRLVRDQIRQIESARRDRLEHAPGEGAHAMVRLLARVMGIGIETADMLVQEVLSRNLRDRRAIARYAGLTGSPDESGRKRREKGLARCGNPRVRRGMIQLAWRFLLFQKDSALAQWFQARTENARGTRKTMIVALARKLLIALWRLVRDGVVPDGVILRPAQ

SEQ ID NO: 76472 - protein, 381 aa, unidentified
MTTPATRNVQERPTEGTLFVAFELSEKTWKLGCTTGHGQKPRERTVPARQQERVLDEIAHAKRRLGLPDTAPVVSCYEAGREGFWLHRFLQGHGITNHVVDSSSIEVNRRRRRAKSDGLDVRKLLSMLLRYAHGERQVWQVVKVPSVEAEDQRHLHRDLETLKQERASTMTRIEGLLSSQGLRVTSLTKLPEQLEALRLWDGSPMPPGLRRRVMRVYAHYTFLSEQIAAVEVERRAQLQTSADASIDKIRQLMQLKGIGINGAWLLVMEFFGWRAFKNRREVGGLAGFTPTPYQSGESAREQGITKSGNRHVRWMTTELAWSWLRFQPDSALSVWFRERFGSGGKRLRRIGIVAVARKLLMALWRFLETGVLPAGAVLKEA

SEQ ID NO: 76473 - protein, 354 aa, unidentified
MRSQTITVPKLFIGMDIHKKSWSVHMRTDLFDHKGFSMPPDASKLVDYVTNHFGDHEVSLTYEAGCCGFTAARYFLNMGWTVKVVNPNDVPRSDKQLYQKTDKLDCRNLCRQLQQDQLHGIYIPTEPEEQLKSLLRQRNQVVKQLRKAKSQIKGLLLFHGIRVPEEFDNPNWSKGFTQWLQDIKWSYATGTACMTSKLRILTMLKSEYLQTSNELRAWCRKQHKTDYYLLKSIPGIGGLLSAAILAELGDIRRFNNEREFSNCIGLVPGIHQSSESDSKMGLTPRCKALLRSYLIESAWVAIRIDPEIQAYYRKHAGRNPKNVIVKVAHKMCRRILSVIKSGTPYQMNYSKLKN

SEQ ID NO: 76474 - protein, 369 aa, unidentified
MSEPTTRYLGLDVHKATIAVAVAEESGPPTLYGTVANDPGAVRKLVNQLGRQAKLVAAYEAGPTGYTLHRQLTSLGVECQVVAPSLVPRRAGDRVKTDSRDALALARLLRSADLTPVWVPDPEHEALRDLVRARYDAKVDLLRARHRLSKFLLRHGAYPPPGLKAWTVRHQAWLRQQTMPEAPAQAVLEDYLTTMWAAEERVRRLEASLHRCAQDSSQLALIAALQALRGIGFLSAVTIAAEVGDLRRFPNPRQLMAYTGLVASERSSGQSRHRGGITHTGNPYLRHVLVQAAHNSRYLPKTSWQLRQRQQGLPPDLVELAWKAQIRLHHRYRHLLGRLGRPKAVTAVARELAGFVWAVGQRMEAKATA

SEQ ID NO: 76475 - protein, 388 aa, unidentified
MQVKVDRPEAPSAIRSDLGAIFVSLELSRSTWLITSLSPGAGEKMSKHSVPAGDICGLLARFSEFKQKALARTGKSFPIIVIQEAGLDGFWIHRVLQNKGIESHVVDPASIATSRRRRQAKTDRLDGEALLRALLAYKRGEPRVCAMVKAPTPEEEDSRRLCRERKALIAERILHVNRVKGLLFSQGVSGYEPLRRDRRKRLEEVETGDGRALPNHLKALVLRELDRLELLLGQIKAVEAERDALLAAQQAAAPAPAAMLLDIKGVGPEFAAILWSEGLFRHFDNRRQVASYAGLAPTPWKSGTIDREQGVSKAGNPRLRTTLIQLAWLWLRHQPQSALALWFKERVTRNGGRFKKTTIVALARKLLVALWKYVSAGVVIEGAVMKSA

SEQ ID NO: 76476 - protein, 345 aa, unidentified
MKITTVGLDLAKSVFQIHGVDGRGKAVLRKQLKRSEVVQFFANLPPCLIGMEACGSAHYWARKLTALGHEIRLMAPRFVKPYVKTNKNDRNDAEAICEAVARPNMRFVPIKSAEQQALLALHCARSGWVKARTAQANQIRGLLSEFGIVLPQGITRLRNRLPEILEDGDNGLPGLMRALLSTLQTHLKELDQQIVALEREIVAWHRRNENSRRLERVPGIGPITASALVASIGNAHNFKNGRQLAAWLGLVPAQDSSGGKTKLLGISKHGDVYLRTLLIHGARAVLRHLEHRPAATNSWLARLVARRNRNVAAVALANKNARIAWALLAHQRDFASDYVSTATTH

SEQ ID NO: 76477 - protein, 433 aa, unidentified
MLRVVYERCAGLDVHKKTVVACVLVNKQDGQVCQEVRTFGTTTGEILALAEWLKSHQVSSVAMESTGVYWVPIYNLLEGDFELVVVNAQHMKAVPGRKTDVSDAEWIAQLHRHGLLKGSFVPPKPQRQLRELVRHRTNVVERRSQSVNELQKVLETGNIKLGSVVSEITGVSAMEMITGLIEGERTPAVLAELARGKLREKKVQLAAAMTGRLKPHHRFILSQLLADISFCEEQIQELDLEIQVQMKDYEEVLQRLDEIPGVNRRIAEVIVAELGTDMSRFGDAAHAVSWAGMCPGNNQSGNRRRTARVRDGNKSLKRVLVEAAHAAGRKKDSYFSAQYRRLGARRGKKRAKVAVGRSILETAFHMIQRKTTYKDLGVDYYDRRDPEKLARRLAKRMAGLGYKVSFEPTGCPPQGYQGCRIICEPLVSAAQPA

SEQ ID NO: 76478 - protein, 384 aa, unidentified
MSRLAERHVRDHLERPEWPPGAVIGGVDTHKHIHVAAVCDPLGRVLASDTFPTTTAGFKTLLRFLRSHGELAAVGIEGTGCWGGGLSRWLATRDVHVVEVDRPNRQARRRRGKSDTIDAEEAARAVVAGRARTVPKTGTGPVEMARQLRVARRSAIKQRTQALLQLQALADTAPDELRDTVKKLRYAQLIATAARFRPGELTTTSAAAKYAMSALARRIQHLDSEIDGLDAHLKAILTAAHPDLLAAHGVGPDTAGALLVAAGDNPERLVSEQAFAALCGASPVQASSGNTHRHRLNRGGDRQANSALWRIVLVRMRSHQPTRDYVTRRTAEGLAKRDIMRCLKRYVAREIYHHINPTPPALTTLRLVPPLPTADPEQVAADSA

SEQ ID NO: 76479 - protein, 386 aa, unidentified
MAHSTNIPQHSIDYDQTLILAIELSNKSWVLAAQVPGLSQTKAKRTIEPEKNHLLAAIEGYRIRAATAGRSVKRVITSYEAGWCGFWLARWLMAHGIEVHIVQPSSVPVDRRMRRGKSDGIDAELLLRTLLAWLRGEPRVCSMVPIPDEADEDARRCVRERSELVSERVGLVNRIGAVLATLGADGYNPLLQSRRRRLTELRTGLGDPIPPNALAKIARLLTRLELVLAQIAELELERDAVARTDAPDQAAKMIQQLVSLRGIGVQSATVLVREAFVRRFANDKALGSYAGLTSTPYSSGSIDREQGIGKAGNRRLRTVMVELAWLWQRYQPGTSQVVWFRQRVGSTGRRVRKVMVVALARKLLIALWRFVIDGVIPEGAITKPSI

SEQ ID NO: 76480 - protein, 451 aa, unidentified
MARAKPSRSKRDINLTHPGAAAIDIGATMHVAAVDPNDDSEPVRSFGTFTGDLQRLADWFKQCGVRTVAMESTGVYWIPAFELLDQRGFDVVLVNARDAKHVPGRKTDISDAQWLQRLHAYGLLRASFRPRGEIATLRAYLRLRERLLDNTASHIQHMQKALTQMNLQLHHVVTDITGVTGMAIIRAIIDGERDPATLAALRDPRCHSTVETIRQALIGNDREEHIFALTQAVELYDFYQTKVGDCDVRIQAVLERLREAAPAPAAPLPPARHKTKQPNSLAFDVRPLLHGLLGCDLTQIHGLGPSLSLKLVGECGTDLSAWPDAKHFTSWLCLAPSNKISGGRILSSRTRRSGSRAAALLRLAATTVGRTETALGAFYRRLSARVGKAKAVTATARKIAVLFYNTLRHGMAYADPGASYYEDRYKRRVLTNLERRAKSLGYVLQEAPVPS

SEQ ID NO: 76481 - protein, 358 aa, unidentified
MQTITSEQKLRQRRAPVQAGVTVKFGLDVHAAQITVCRQIDGQVPQPAQKMGWSECVEWFEAHVQAGAVVHSCYEAGPCGYGLHRRLTKLGITNHVVVPQRWDEQNKRVKTDARDARELCDRLDRYVRGNTTAFAVVRVPTPEQEQRRALGRQRDTLVRERQRCVVRGHGLMLTQGVRAPEDWWKPKVWEPFRQDLPEWLRPQILVWQEAALRLEAEVEQWTHKLVTQLADQPIPKGVGALTHALLAGEVLDWQRFKNRRQVASYTGLCPSEHSSDQKRHQGGITKHGNPRVRHHLVEAVWRLLQWQPDYPPLKKLRAATGKRTRKRLAVAAARHLAIDLWRINTNQCTAEKLGLKLA

SEQ ID NO: 76482 - protein, 355 aa, unidentified
MSGEKYIGLDVHQATISVAVVDSQGKVVMESILETKASTLLEFFAGVRGSLFVTFEEGTWAAWLYDLLRPHVTEVLVCNPRKIPLLKQGNKSDKIDARKLAERLRLHDLKPVYHGETGVRMLRELARSYLTIVKDLSRVMNRLKALYRSWAIPCAGRDVYYTRHRSQWLEKIPEAGTRRRAEQLYQQLDMLQHLRQQARRELLAESRKHAITAKLRQIPSLGPIRSALAVALIQTPHRFRSKRQLWTYSGLGLETRDSGEYHYVRGQVQRRKKQATIRGLNKDYNHDLKGLFKGAATRASVQPGPFQEFYQRSLAKGIKPTMVRLTLARKIAAITLTLWKKGEDFDIDKLKSQAA

SEQ ID NO: 76483 - protein, 492 aa, unidentified
MKKPPRKIQSVYRNQNALVRAVFERAGDARKVLCIALDYAKRKHVALICDGHGDVLKSSFPVENNAAGIDHLIKEVTATARRRKIPKDQIFLGGEDEAAYIANFTEALRAKGYLVVRVNAYEAKENRENLLASTDTLDLLGIAKTLLSRRARITGDTSSSAAYHHLREITRCRRTLVRQQTAASNRIHALADQLFPGFLNGSKSAITPFCDASLELMKERFSAPEIARRKPASLANLLRRHRVQHPDETSSQIIQLAREALPPTAHRVATLQRTLAATVDLYQCLQRNALELRADAALTLATTPYVMLTSIPGIGFVLAAGLAGELGDPKHLGRLDSLCAYAGIVPRTLQSGGPDSPAVQGHASPRCNRILKDWTVQSAQKIHLYGPPELKDRITRWNAEGKHGIFAAARHHLRLVSTLVKNEHPYLAPQARTRQATHDQIAGAAQATWTILQRKWRTVSGGLDLILDEAHPLGFWRKVMLELHGIDLPERQ

SEQ ID NO: 76484 - protein, 358 aa, unidentified
MVQKHTILDWLGQHVFIGLDVHKRSWIVAIVTEQADFKSFTQPPSVKVLVSYLHRHFPHATYHCVYEAGYCGYWICDELQACGIDCIVINPADVPTSDKEKKHKTNKVDAHKLARSLRNGELVPLYVPSRTALEDRTLVRSRHMVVSKRTRCKNQIKALLSFYGIKVPDDIADRYWSAQYITWLESLSLQSPSGTYALKTLLGELTHLRDSILQITRAIRQLARTEPYAVNVAYLTTISGISTLVAMILLTEIITLERFHSLDHLASFVGLVPGERSSGDDRTMTGMTERKNSYLRWILTEAAWVAIRNDETLALAFNTLSRRMPKNQAIVRIARKLLNRVRFVLKHRQPCVGLHQAA

SEQ ID NO: 76485 - protein, 341 aa, unidentified
MDHFAGLDVSVKETSVCMVDDTGRLVREVKVASEPAALLAVLKNPAYRFKRIGLEAGPLSQWLFSALAEAGLPVICVETRHMRAVLKAQINKTDRNDARGIAQMMRVGLYRPVHVKTLRSQKQRMLLTHRKLMQSKAIAIENDLRATLRNFGLKVGVVGTVKFEARIKELVENLSDLAVLVEPLLIVRRVLREQIGILHRRLLAIVRDDDVCRRLMTVPGVGPVVALTYRATVDVPSRFRNSKAVGAVFGLTPSKHQSGESNRTGGISRCGDEMMRMMLYEAAHIMLVRSAKWSWLKAWAMKIARHRGLKKAIVALARRLAVIMHRIWVDGTEFRWTREVA

SEQ ID NO: 76486 - protein, 386 aa, unidentified
MAHSTNILQHSIDYDQTLILAIELSNKSWVLAAQVPGLSQTKAKRTIEPDKKDLLAAIDGYRIRAAAAGRSVKRVITSYEAGWCGFWLARWLMAHGIEVHIVQPSSVPVDRRMRRGKSDGIDAELLLRTLLAWLRGEPRVCSMVPIPNEADEDARRCVRERGELVSERVGLVNRIGAVLATLGADDYNPLLQSRRRRLTELSTGLGDPIPPNALAKIARLLTRLELVLAQITELELERDAVARTDAPDHAAKMIQQLVSLRGIGVQSATVLVREAFVRRFANGKALGSYAGLTSTPYSSGGIDREQGIGKAGNRRLRTVMVELAWLWQRYQPGASQVVWFRERVGSTSRRVRKVMVVALARKLLIALWRFVIDGVIPEGAVTKPSI

SEQ ID NO: 76487 - protein, 436 aa, unidentified
MTLINFVAANQKYYAFNLLSVFIMVFWSVQYLLQHLLVQTQVSHQLLQPLILILQLPQTPQFRHARPGKFFLPVDGMDYFLPLRLTVRNVLTRRITMNIVFLGIDLAKNVFQLCGLNQAGKPVYTKRTGRKELLQTLANIPACLIGIEASTGAFYWQREFEKLGHKVKVISPQYVRPFVRGQKNDGNDAQAIAVALMQPTMQFVPPKSPEQQDIQALHRARQRIVNHRTATVCQIRGLLLDRGIPIGSAVSRARRAIPLILEDAENGLSSRMRRTIAELYDLFNDLGRRIHFFDKEIETVFRQSEACPRIAKVKGIGPKTATAVVAAIGKGTEFKNGRHFAAWLGLVPRQHSSGDRQVLMNMTKKGDKHLRTLFIHGARAVVRVATNNNDGHMNQWVNQLKERRGFNKTTVAVANKNARIIWSMLRNDTGYQVVCN

SEQ ID NO: 76488 - protein, 354 aa, unidentified
MTSNQSKETEPGARARVIKLGLDIHASLIVVVRQVDEQASQPPQRFSEEAFIGFVHRQLAAAEAVHSCYEAGPFGYVLHRRLTSLGVHNLVVRPRDWSTYGERVKTDARDAGALCSSLDRHLAGNRGALAVVRVPSEAEEAARGVSRQRQSLVRDRVRFTLRGKGIARLRGIALPPEWWRERAFARLDLPADLREQLSGLRRVILSIDAEAVALTTQIEAAAPAALPAYLGPLTWEILRREVGDWSRFANRRQVASYTGLCPSEHSSGASRLQGSINRHGNPRLRHILVEAAWRLLRYQPAYRPVAKWREAFMDQGRPGRRKKIVVAIARQLAVDLWRLATGRATAAQLGLVVP

SEQ ID NO: 76489 - protein, 356 aa, unidentified
MPMLAELVDGVIGVDTHRDTLTAAAVTNLGGVLAQTTTSADAAGYQQLLDFARLHLPGRRCWAVEGAGSFGAGLTAVLQQSGEQVVEVARPKRSASRSGAKSDALDAVRAAHQALGHDRPAIPRRRGEREALRALLTTSRSATLARVAAIGQLKALIVGAPEELRAELRGRCTSSQIDYCASLRARPTRSLEHRATVRALRLTAQRVQFLAAEADQLQAELTVLIQAVVPWLLEVPGVGPLSAAQVLVSWSHAGRFRSEAAFAALAGTHPIPASSGQVTRYRLNRGGDRQLNRALHTILLLRLRIDPDTRTYMARRTAQGKSRRDAKRCLRRVIARQLFRLLERYDQPGVEILQAA

SEQ ID NO: 76490 - protein, 426 aa, unidentified
MNSTNPGPFAALIGLDWGDKSHAIALQPQGQPTETSTLQHSPESVHQWLDQLEQRFQARPVAVAIETDQGALLHALLDRPWIVIYPIHPATSTRHRKMFRPSGAADDLPDALVLLSLLQHYLDRLRPLQLDNVPTRTLARLVEARRKAVDHRSLLLNQLTSTLKGYFPQALELASENLACDMALDFLTKWPRLTDLQATRTSSLKSFYHRHNIRRPELIQKRLDRVRSARLLTTDPAVTEVSVRIVQLLVDQLRVLLKHIGSFEAAIAQQFAQHPEQDLFAQLPGAGPTLAPRLLAAFGTLRHLYPEPACLQRYFGVAPVTEKSGSRAWVHWRWNAPTFIRQTLVEWAAQTVLFCPWAKAYYQRQRAKAMRHHAILRALAFKWLRILWRCWQNREAYNEERYLRQLEKRHSPIAAQARQIAQTMTA

SEQ ID NO: 76491 - protein, 354 aa, unidentified
MITIGVDFHKRTSSYCVLDESGKRIKCSKMENRPELIERFLENIPGPKKLAMEATRNWGLFYETVKPHVDEFLLGHPRKMKQITESETKHDRKDAESISQLAYGPFFPRAHAPSLDIRELRSLLRFRHSLVSQRKAIRNQVQILIDRNLWPCERPASFKDLFCLRGMKWLKALTLSPRERFILDQCLESHEAISQKIKALEGFIETQACELEYLKYLRQIPGFRKSRVNAYMVLLELDDIHRFRKARHFAHYAGLIPSEHSSGDKHRTGHLVRGANMFLRTALIESTFGALRVDRGLRVYYQSVKERRGSGSAIIACARKLSYAVYHVLKEKTHYQPFHPSATACPLASVPNRE

SEQ ID NO: 76492 - protein, 448 aa, unidentified
MIKKELRSYTWRDLETNGKFAKNDKLSFITDDMLIAGCDIGSEAHYIRAIDVRGRELSSGAFEFSNTSEGFANAKAWVLALAAKNDKKQIVLGLEPTGHYWFALAAWMISNGISVVQVNPYAVKQSKEIEDNSQLKDDRKDPKLIANLVKDGNYGMPYLPEKVYADMRRLSMFRDQLTEDRIRNINRLHRELKIYFPEYMDAFGKIDGAFTLEVLKVSAIPSDITALGAEGIKNIWHNVKLRGRGYSRANEIVSYAEKSVGLTDGTDAGREAVKWYAEQILKLDEQLAVVESTLHEKCREIPCAENILEIKGVGENILAGILAEMGDISRFDDVKEIQKLSGMGLVACSSGKHKGQTKISHRGRKRLRYWLFQAAKSAVSHADEFKQLHEYYTTRTNNPLKKMQSLVVIACKILRVIYTILKTGTTYDPQKLLKDIKRPTASQAPMAA

SEQ ID NO: 76493 - protein, 375 aa, unidentified
MEHHSEAFVALDTAKLRNAVAIADAGRAGEIRYLGEIDNTEAETRKLVAKLASKHARLTFCYEAGPTGYGLYRLIKSIGHDCIVVAPSLIPSKPGDRVKTNRRDAVNLVKLLRAGELTAVWVPDERHEAMRDLVRARDAAVKDYRIKRQNVSSLLLRLGRHYPGKKTWGRTHINWLTGLKLEHREQRIAFEEMLLAVRQVRERIERLEQAMREAVADWTLAPVIEAVQAMRGIDMIGAIAFLAELGDLSRFQNPRQLMAYLGLTPSERSTGESVKRGGITKAGNTRARRLLIEAAWSYRFPPRVSKDMQTRIGAAPRTAREIAWKAQMRLCGRFRTLTRKGKRPTIVVTAIARELSAFIWAINREVIGSHATANQ

SEQ ID NO: 76494 - protein, 336 aa, unidentified
MSYQWFIGIDVSKQTLDITVLNNNEKKMYEQIVNSDQSIKSFLKKLRDQKITLSDCLFCLEHTGIYNTHFLKVMEEKKLAVCLESSVHIKQSGGLLRGKNDKIDSFRIALYAFKNKEFLTLWQPERTVIRHLRRLSGIRERLLNARKQIAHTIKEDKKFISKDCSAQMTRCCKQSIKALGEDVKKTEIEIKKIIDSDERLKELFSIIESVPGVGKVTAAEIVINTNEFRKINDPRKYACYAGVAPFEHSSGTSVKGKTRTSKKANMKAKSLLHMTALSAARFSEDIREYYQRKVAEGKNKMNVLNAVKNKIIHRIFACVNQKRLYDKNYKIGLVES

SEQ ID NO: 76495 - protein, 375 aa, unidentified
MTNATARTEMLYVGIELSKKTWRLAFSNGATIRQRTLPAGHQAGLQEELARSKQKLGLSADCAVRSCYETGRDGFWVHRLLSSWGIENVVVDAASIETARRGRRAKTDRLDAEKLVRKLMAWVGGEKTVWRVARAPSVEAEAQRRPMRERQRLIGERTAHRTRIASLVALHGVRAKLNGRQEFAVAVEHLRDWQGQPLSAELVAELNRELQRLAMVHQQILLLDKQQQAALATPQTAAQEMAKKLMGLRGVGPISAMLLAVEFFAWRRFRNRREVGALAGLCGTPYNSGDSTREQGISKAGNKRVRWVTAELAWSWLRFQPHSELSKWFWRRFGLGSKRVRRIGIVALTRKLLVALWKYLEYDELPAGATLRVAR

SEQ ID NO: 76496 - protein, 399 aa, unidentified
MDRNRTVAGLDVHKDSIYLCIMGHDETIIFEKTYGVLTPDLRQMCQDMIERGVTEAAMESTAVYWVPVWNELCGSMELKLVNPYFIKQLPGRKSDVKDAQWIAECLLKNLIRGSFVPEPIVQDMRKLNRRIMDLNEDMTYNCNKLDAALQRCGFRLSNYVTTIKSRSYQSVLQAIINGITDPEELVKMVHGRTVNKHGRDTVKAAVSGLFSKTDITVFRQIKEVINTIERQIEECQKELTALCREHFPEQYRRIQTITGVKERAATAIIAETGVDLKMFATAACLVGWCGLKPRNDVSNGRYKSRKVTHRNRYLRQILIEIAWVASRTRNCFFSNFSYIQTTVKKKSKMKIQVAIARKILVALWHMLSKGEDFIDIYLRRLEEQKLMEEKLKSLEAKMA

SEQ ID NO: 76497 - protein, 343 aa, unidentified
MAQQMIIGIDLAKHVFQVCMVTPQGTLKTNTTVARGKLLTLIARQPPALIFMEACGGAHDWARRFRAMGHEVRLLAPQYVTPFRRGQKNDPNDALALTEAGQRPNIPTVPIKTIEQQDLQALHRVRERLVKNRTAVVNQVRGLLLEYGIVIPQGIARLRKRLPRVLEEADNGLSFQMRDLLQSLQSELSALDTRITDITGQLARLSHEMEACQRLQEMEGIGPLSATALVAALGNGHDFQTGRQVAAWLGLVPRQHSSGGTTRLGGITKGGNSYVRRLLIHGARSVISHVRDKPDAKSAWMRQLGTRIGVNKACVAVANKMARVAWALLHTGEQYRKPAVLSI

SEQ ID NO: 76498 - protein, 421 aa, unidentified
MRTVFGIDVSKASSEVAILVNGERVHSYTMPNDIIGFSHLLKDLKTVSNPEIIFEATDVYSRRLQASLEENSYDYTRLNPLEAKKQLDSLRVRKTDKIDAEKLASSQFVLNRKPTYVQEEVYQNLHDLSRFYQNLTEDIVRTKNRLHKVLQVAFPEIENLLSTPTGEQYWNLVSIFPTKHWVLELSEVELKETIRNSTSKRISENRVGNLAEKLVGLAKQSYSAISKTSPMIEEVKYNAQELIRLTNRREQVLQQLIALAEPLPEYKTLLSIPGIAETTATSIIGELGDIRRFKSANQINAFIGIDLKHYESGDFLGQEHITKRGNPYARKILYKCIHNIASASHTNPCHIADFYEKRKRQSTIASTKPHTIASIHRLIRTIYYLFLIFTKKIYFLLYIVYFKFPNTFFIVLSLSKRSKET

SEQ ID NO: 76499 - protein, 438 aa, unidentified
MSNKVIFNLDDLFISVGIDVGADFSWMSIALPNQQFVGKPYKILHNSIDSLTTAVSKIKEAEELYSLESRIFLESTGIYHYPLFCYLRDKGFNCSVINPIITKNSTNINIRKVHNDRFDSKKAALVGLKPDLKVSLMPSDLALNCRNLCREYYDLMNNRGAYVNKLQGELRMAFPQYLGIFSKVTINTSLTLLETYASPSAFLEADKQEIIDIIKSTARFGLTYAQNKYNAIIQAATDANQFGYIIDSNIKRIRLYISFIRKYDEEINNILESLHELVDANEDADFVKQIHLIETFKGAGFLSAVSIMGEIGDFSAFSKPKQLFAYFGLDPAVKQSGKFEGTKVQMSKRGSAIARRVIHTLTLQSISISRNGEAKNPVLREYYLKKCDSKPKLVAMGAVSHKVCNMIFAILRDNKPFKIIAPQEHIKQYNSAKCDIAA

SEQ ID NO: 76500 - protein, 372 aa, unidentified
MTSIIYVGMDVHTTNYTLCCYSMEDDRFFAEVQVEPDAKNILKYLARIEKQQSRDCRIVCGYEAGCLGYSLYHQLHAHGIDCVILAPTTMMTKPGKRIKTDRRDARLISKCLAFHTYSPVYIPTEMDDAVKEYIRMRDDANSALARVKQQIIAFCIRHGKIHDGKSYWTNKHLEWLSSLDLGNKILSEVLQEYLIRYYQLREQVDMYDMRINELAQAEPYRQKVEKLGCFRGIAAHTALSFCVEVGDFRRFATAQQFASYLGLVPGECSSGDKQQYTGITKAGNSHLRKLLVETAQVFGRSATKSGKSVALKERQAKCDSLTVAYADKANARLKKKYFKIAMRSKANIAKTAVAREMACFIWGMMTDNISCA

SEQ ID NO: 76501 - protein, 319 aa, unidentified
METPQVSFNQVVSRGCGLDVHKKVVVATIDGEGIKKQTREFGTVTSSFKELRDWLLEHGITHVVMESTGVFWKPVYNVLEPAGLTVWIVNAAHVKYVPGHKTDKKDSAWLCKLLLAGLLKPSYIPTKEQRELRDLTRYRTTLIQSNASNKNRIIRILEDANIKLSSVLSSTSGAVGTKLINKLCDGKEVTMQDVEEVYHKKLEATKEEIYEACQGFITAHHVYMLEIIQREIADTQRTIESLNNRIKEVLTPYENALELLKKVPGISSKSVEDLVAEIGLDMSVFPTEKHLASWAGMSPGNNESAGKKKVDEPLREINT

SEQ ID NO: 76502 - protein, 326 aa, unidentified
MIYYVGVDVSKNKLDCLWLRDPENNKVKTRVFDNTAKGHQQLGQWLLNNIKAKPEEVYVVLEATSVYHEALTYYLHNAGFLVNVANPARVRNFAKGLGVLQKTDKKDSAVLARFGYQNGLQLWQPEPDEIRKLKSMLSRLEALESDLLRELNRLEKAEISNSSDVVIASLHKMIGELKVEKNRVEQEINDHIDQFPHLKKDRRLMQTIQGVGPVVSRLMLSVIHSRDFKSASGVAAYLGLVPKLRESGLQKGRSHLSKVGPANIRAKLYMAAVVAIQHNPDIKAQYQRLLSNGKTKMQAIGAAMRKLVQICLGVVKHQSEYQPQST

SEQ ID NO: 76503 - protein, 314 aa, unidentified
MILALRCVGIDVSKYRLDIFDEAIGSAESIANAPQPITEQVARWRCGNVFVVFEATGIYDRELAAQLRQAGIHFARINPARARDFARASGRLAKTDAIDARMLAAFARTMLPPADPAPQPARSALALLAKRRDQLVLMRAQEKNRRSEAHDQAIIEDMKRLIDFLDGEIVMIEARIAALIEAEPAIAESARLLRSAPGVGPVACMQLIAQMPELGQVGPKQVAALAGLAPINVDSGTHRGTRTIGGGRKRVRDALYMAALNAVRRHGSFRTFYQRLRTAGKPAKLALIAVARKLLTTLNAMLRDHKPYLAVDPT

SEQ ID NO: 76504 - protein, 482 aa, unidentified
MKSRPPEKAKKATDHSTRGHWNEMNRKQRREMMRKIQSQDLSLEVVHPDAAGIDIGNEFHYVAVPPTRDNQPVQRFGCTTVELKAMAHWLKQCRIHTVAMQSTGVYWIAVFDILEQAGFEVYLVNARDTKNLPGRKSDVQESQWLMKLHTYGLLRNSFLPSQEIRTMRTYWRQRNDLVQAAASHIQRMQKVLTQMNIQLANVLSDISGVTGQAIIRAILAGQRDPHKLAELRDPRVRASEEQIARYLEGNWQEDLLFVLKQEQQGYEFCQEQMAACDRQLEQYLQQRADRSQGTSLPKEMRKGRLLKKKGNKPQFALRAELFRMTGTDLTQIDGLDVMTAMTILSEAGWDMSKWADENHFVSWLRLCPDNRISGNKIIGKGRLPTNNRASIALRMAASTLRMSNTYLGAQFRRFRTKLGSPIAIKAMAAKLARLVYRMLRYGMKYVDQGAQFYDAQHRKLQITQLKWKAAKLGFRVVEAPAA

SEQ ID NO: 76505 - protein, 358 aa, unidentified
MTDSMIRYVGLDVHKRVVEACIVDQAGKVVHRERFALNRQTLETFATEILRPSDHVALEATTNCWAVTDALRPHVAGVLVSNPMATKAIAQAKVKTDKVDATVLAQLLRCDFLPEVWQPDEATRKLRELTGRRSALVGQRTMMRNRIHSVLAMRLVEGPSRLFNAEGLDWLTTVPLDAQGRLLLDSDLRQLEFLQNEIHAMDDELARRGQVSAEVKLLMTLPGVDVATAQAMLAAWGDVKRFPDGDHAASYLGLTPSTKQSAEHCYHGPITKRGNSHARWMLVEAAQHLDTHPGPLGHFFRRLMKKKTRNVAVVAAARKLAVIGWRMLSSNEPYRYAIPKTTETKLSKLRVKATGSVE

SEQ ID NO: 76506 - protein, 424 aa, unidentified
MVQVVEDVEIIERVAALDIGKAEVVCCVRVPDESRSGRGAGRGQHVRTFATMTRSLTDLSDWLTGLRVTRVVMEATSDYWKPPFYLLEAAGFDVWLVNAHEVKHLPGRPKTDALDAVWPCKIAERQMIRASFVPPAPIRQLRDLTRYRIDLIGDRGREKNRVEKLPEDAGIKLSVVASDLFGVSGRAMMDALIAGERDPDILADLARTRLRARIPELREALTGHFTDHHGFLLSQMLRHVDHLDGRIAAVEAQIEDHIRPYADTVARLDQIPGIGPAAAGMTIAEIGIDMTRFPTAAHLASWAKFSPTVKESAGKTKGSAATGRGNRYLARALGEAAVGASRTNTFLGERYRRVARRRGKQRALVAIGRSILTVIWHLLSDPDATFNDLGADHYDNRGSTQRGLRRHVNALHALGFTVTITPTG

SEQ ID NO: 76507 - protein, 431 aa, unidentified
MNRSVGFLSVGIDVGADFSLMAFALPSQELLGKPYKIIHSSQHSLNGAVEKIKTLSQKYQLPARVFMESTGIYHYPLYHKMKDAGFDVFVLNPLVTHAGRDLNVRNIHNDKYDSQKIALLGLRPGLKTSLIPSDQVISMKVILREYYAVKKEISMYICRLKNQLRQAFPQFLPLFSKVNGVTAMAILCEYPNPESLLNAGEHAVADFMKSVSHNGPLKVQKKAAALIQAAQDARSFGHWNHGISILIRHYIEMIRLLDIRAKTLLAQAKALLAEQDSKTLAHQTELLQTIPGIGFLSALTLICELGDFSAFKRPKQLFSYFGLDPIVRQSGNYNGTNLKLSKRGSPFARRCIFVIALQSISLNIHKEPKNPVLRTFYEEKCMCKAKMTAIGAVMHKICNLIFAVLRNDAPFVLQTPEQHNAAYLSKTHSVA

SEQ ID NO: 76508 - protein, 347 aa, unidentified
MALTIVDTPITGGVDTHADVHVAAALDPVGGLLGVAEFPVTPAGYARLLSWLGGFGAVCLVGIEGTGSYGAGLARYVATAGIRVVEVDRSDRQDRRRQGKSDPLDAVSAARAAQSGRARGAPKGRDGSVEAIRALMVAKRSARAERTQTINQARSLIVTGPDDLRIRFARHTVAALVAETASLRPRPGRTVGYATRIALRELGRRAQFLDGQLERLDELIVPLVTARAPGLLALYGVGPDTAALLLIAAGDHPARLRSEAAWAHLCAAAPIPASSGKRTRHRLNPGGDRQANHALWRIVITRMSSHPPTRAYVERRTAEGLSKTEIIRCLKRYVAREIYPRLRAAAD

SEQ ID NO: 76509 - protein, 342 aa, unidentified
MTMIGIDPHKATHTAVAVDDNEVVLDEFKLRASTVQADRLCEWAAGFEKREWAVESANGLGYLVAQQLIAAGEIVFDVPPLLASRVRVLGSGRSQKNDPNDARSIAIAALRSDRLARVRPDDHTRVLRMLAKRHRDMARLRNKHCCRLHALLLELEPGGIGSELNVNKANLLLTTVKADDEVTRHRILIATELVGDIARLDTMLKTSKKRIKVAVAASATTLTNIVGVGPISAAIIIGFTRDVTRFPTKGHFATYNATAPIEASSGDRPHHRLNPRGNRKLNHAIHIAAICQLRHPGEGRTYYDKKIAEGKSPRDAIRSLKRRISDRVYQHLIADARRCSTT

SEQ ID NO: 76510 - protein, 378 aa, unidentified
MPHREDWSRNEGTTIRFIGLDTHRDSISIAVARMDGKPAESLGSVPSDVPGLIKRLLRLGPAESLRCCYEAGPTGFGLARRLAEVGIACEVIAPSLTPVQKGARVKTNRRDAQKLAQYLRAGLLTPVYVLDPATEAIRDLERARDDAKRAERAARHQLSKFLLRHGRWFEGRATWGPAHQAWLAKQQFDNEAQQDVLNDYREAVEMATARVGRLTQRVAERVAGWDKAPLVTALQALRGVELISAVTLVAEVGDFRRFAAPSELMSFVGLVPSEYSSGESRRQGRITRTGNGHVRRTLVESAWHYRRQPRMSKAIRARNDRVSGPVRAIAWKAQHRLHKRLHRLMGRGKPATQAATAVARELVGFVWAIAREEVLLAG

SEQ ID NO: 76511 - protein, 428 aa, unidentified
MSNQEIVRRKQYCQIIKEITGSDQYLVIGIDVGKDKHHAFLGSATGKSLFRKLIFENNLDGFSRLLQIADEIKSQNGLSKIVYGVEPTGNYHKPLARHLIRCACNVVLVSGVALKRNRELLNGRWDKNDTKDAANIADLVSRGRCLYYDCPSPGIIEIRSLLSLRRRLKREEHGIRMRIRNNLLAQYFPELDRFYSACESESLSIVRWFLNPDTIAAMEFGEFFHLVIKTHRGTAQKLRLRKIHRLAIDSVGCPVGAAAEYEADLLVEKLEQVRGQIQKTNDLIEDICLQFPEYSYLLTIPGFGPYISAKVLSSISDPFRFENRKQLIKMSGYDLCAQRSGKTSDKAVPSISKKGNAELRHALYQAAHVASTRVDLFKIYFNNLLRGRERERGIITKMRVKLAAKMLIIAWTLMKKREPFDPAHLSIE

SEQ ID NO: 76512 - protein, 375 aa, unidentified
MKHASLPLLGWMAPLRHLGAKVLVGENQPADREPSMSEITTVGLDLAKNVFQVHGVDAEGSTVLRKQLRRAQVLAFFSGLPRCLVGMEACATAHYWARELRALGHEVRLMPAQYVKAYIKRNKNDAADAEAICEAVARPTMRFVPAKTAEQQAAVLLHRGRERLVRQRTMLVNALRGHLAEFGVIAPQGLRNVGRLIAIIRDEKDARLPGLARQVLQVLAVQIEQLEAAIAALEKQLMGWHKSNPVSQRLATIPGIGPIIATAIAAMVAEPSGFRSGREFAAWLGLVPRQNSTGGKNRLGGISKRGNQYLRRLLINGASANLLRSKATNADPWVIGLRRRRPSLVVAVALANKTARIAWAVMHRQENYQRMATAA

SEQ ID NO: 76513 - protein, 452 aa, unidentified
MKKTKSYLRSLERKQWVSGKVIVGIDPAKEKHQAVVLDENRMQLGRSFSFNCTYEGYNETLWEKLDDLLGSYGPDKLVFAVETACDLWKTLVDYLFSNGYTVLLVNPLTTYHSRPLMNSDYSKTDPKDALLVATNAHNGNYTEYKKFSAGIINLHRLSIAYGKLQKDRQAVILRMMAFMEEVFPEYLKCLNVEIETSLYLLERYFLPKHFRNLDIDEHEWPIRRLSKGNHNAKTLKKIKEHAHSSIGGHVEGEEEILRLILDGWIAELRQLIKSVKTVKKAMIDLASETEYFEILVSLPGISELTASRFIAECRDLDLFTHYKQIEKMAGSNVRTCDSGKYSGTRRINGIGNKRLLNLIYIMTCNAARFTPEVRIKFIRRQLKKRSFRKNIFAASSVLLRLIMTLIKEKRTYEIREESLKELEKLELKYTPEKKDKKKSRKRNKKKPIKKAA

SEQ ID NO: 76514 - protein, 342 aa, unidentified
MQIATIGLDIAKNVFQVHGIDASENVVVRKQLRRSQVLAFFKALSPCLIGMEACATAHYWARELTTLGHEVRLMPAKDVKAYVKRNKNDAADAEAICEAVRRPTMRFVQAKSAEQQGRLMQHRTRDLLMRQRTQLINALRAHMAELGIVAAQGREGIKQLLTIVASERDARLPVDAHASLVVLAAGLQAVQTMIGSIERRIIIQHRSNEASKRLKSIPGIGIVGATAIAATVPDPRAFRSGRDFAAWIGLVPRQDSTGGEQKLEPISKQGDQYLRRILVVGAHAVLKRARQQPEKYPWLTRLLARKPFRVAAVALANKMARVAWALLAKGGTYRAPALAAPA

SEQ ID NO: 76515 - protein, 323 aa, unidentified
MPPSIGIDVSKKKFDVALITAQGKYRCKVFDNNASGFKAFLDWIQAHVPEGQAQACMEATGVYHEALANFLFDNQVTVFVVNPLRVKRFVESEGLRNKTDEGDAKALARFASKNELDAWEAPSKSVRELQALVVRLESLQTMRQAELNRLDIAHTSVRGSIEAVVAALDKEIEAVRSLIRKTIDDDPELRQRNDLLDTIPGLGDRTIPSLLAYIGRPERFKTVKALIAYAGLTPAIRQSGTSLDKKKGLHPAGHRDLRQALFYPAMAAGRFNPIVAAFWQRLKAQNKPGKVIVVACMHKLLAIAYGVLKSRQPFNPELALKGT

SEQ ID NO: 76516 - protein, 430 aa, unidentified
MKSNTQNKKIEAITEKTLVIGIDVGSETHYARAFDYRGIEYSKKPFKFSNTEAGFVTFKEWILDLKEKHEKDKVVPGMEPTGHYWFNLGKYLQDNEMKPVLVNPHHVKKSKELDDNNPTKNDRKDPKVIAGLVREGRYMIPYLPDGIYADLRTASNMRFQIQSELTRVQNRISRWFNIYFPEYKTVYGKPDAISGMMILKKAPLPEDILTLGVEGVNQIWRDAKIRAVGKKRAQTLVEAARHSVGTKEGATAARIEIRMLLEDYESRNSRLQEVMLLIEELVKEIPMAEKLMEIKGVGIKTVSGFLAEVGDITRFSSPKELQKLAGLALVENSSGKHKGQTTISRRGRKRLRYLLFEVAMSLVGKNPEFGTLHHYYTTRKINPLKKMQSLMAVAAKLIRVFYAMLTKGVEYDPAKMLGDIKRPEAYMQAA

SEQ ID NO: 76517 - protein, 453 aa, unidentified
MVNDREVAVGYIGGAEQGRFVERIRNAERERLPAAPIDVGKSSAAALVCDFWGEIITGPFEFDLNESGFTKLRAELARAEACRDVAFTRVGVEQAGHYHDTLVARLQHEGLDVVVLSPSQVKENRSQNLLRSVKTDARDLAAMAELMIRGLGRRPDLEDGPVARQAVLVAHRRRKVKARRALKNQVLATWDLVFPGLDGCFSDMLSTKLGKVLLAEAITPARVLQMGPERFRAFCANRGVVVDRCKAQQIVEAARQAFALPNVRAQALLEVLRVDSGLMQQLDSTIACAENCLAEVIGDTPAKVLTSIPHIGVVRASNYGGAVGDITRFGSAAQIYRLSGLVPKLYESAGKRRGGLAISRTGKVELREAIIELGKGLRLGHPDFGDYARRMKQRGKPGGIILCSLGHRANRLAFAMMRDQSEFDPRAWPNEGADGALSQRKAGKLVEVHRPLD

SEQ ID NO: 76518 - protein, 394 aa, unidentified
MHGPVPAGANDLGKAAGIITAGVDGPREDIDVLLSGSCKHQKEPSTMTIAMIGLDTAKTVFQVHGIDKSGRAVLRRKLHRSELVRFFEQQPQCTVFLEACGAGHYWGRLLSGLGYEVKLIAPEAVRPFVKRGRKNDAADAAALCVAGTRPETRFVPIKSVEQQAVLALHAARSLLVKQATMLANALRGLAAEFGLTVPKGLHKLEELMTLVSAEESIPAAGRQAMAELYAHGQAVAERLATLEAKIASHARQDATARRLATIPGIGPITASLIAATVGDNISAFRSARHFAAWLGLVPRQHSTGGKTRLGRITKAGNTEIRRLLVLGATSMVWRAAHWNSKAGLWVQGVLARRPARLVTVALANKMARIAWALMTRKQVYQAQGHAQAAAEAAA

SEQ ID NO: 76519 - protein, 430 aa, unidentified
MKSNTQNKKIEAVTENTLVVGIDVGSEFHYARAFDWRGIEYSRKPFKFSNTEPGFTEFKAWILHIQTEHDKDAVVPGMEPTGHYWFNLGKFLQDNGMKPVLVNPHHVKKSKELDDNNPTKNDRKDPKVIAGLIKDGRYSYPYLPDGVYADLRTASNLRFQMQSELTRIQNRISRWFSIYFPEYKDVYGNPDAKSGMMILKVAPLPEDIVTLGVEGVNRIWREAKLKGVGLKRAKTLYEAAEHSIGSREGSAAARLEIRMLLEDHESRAARLQEIMTLIESLVKQIPMAEKLMEIKGVGIKTVSGFLAEVGDISRFDNPKQLQKLAGLAIKENSSGKHKGETTITKRGRKRLRYLLFEVAMSLVAKNPEFAQLHLYYTTRRINPLKKMQSLMAVACKLIRIFYVMLTKQVDYDPQKMISDIRRPEIYLQAA

SEQ ID NO: 76520 - protein, 414 aa, unidentified
MEQIHERVAGLDVHRDSVVACFRQLGPRAGVVREKERFTTTTAGLRVLEAWLADRRVQLVAMEATGVYWKPVLYALEGRFTVWLCNARHVKKLPGRKTDLTDAEWLADVAAHGMVRPSFVPPLPIRELRELTRYRKTQIDARAAEKQRLEKVLQDAGIKLTSVASRVLTQSGRSMIEALADGERDPARLAELAKGKMRPKVPALTEALAGHFGSHHAVACRRILAHLDFLDDTIGALTEQIDARTASFEAVYKSLLPVPGFDRLTIDVIIAETGADMTRFPTAADLASWTGVCPGSYESAGKRRNVSTTAGNRWLRRALIESARAAARTKGSYFGAQYRQITRRRGPNKAAVAVAHSLIELVWHLLSTGEVFNDLGDDYFKTRQDPERQARRLLAQLEDLGYTVTVTAPPAITA

SEQ ID NO: 76521 - protein, 329 aa, unidentified
MVIAPSLPVVGLDVSKATLAVCYQIDDLVKHLEVSNNKAGFQQLVKACGAQCRFVMEATGTYNLALAYYLHEQGGQVAVLNPLVIKRFIQMHLSKGKSDRKDAQWLLRHGQQQPVKVWQPDEAVLVECRQLEQVSEQLLKQKTMVSNSLEALQRQPVISKLALKRLQQMLKTLTQQVALVETELLTLLEQRFAAQMTLLCSIPGIGRKTAGMLLLFAGGFTRFDNYRQVIALAGLSPREHTSGTSIRGKVRITKMGGGLIRGKLFMCSFSAKKTNAACAALFDRLVAKGKNKKLALIAVCNKLLKQAFAIVKSGVPYQADFSSKITLTP

SEQ ID NO: 76522 - protein, 389 aa, unidentified
MKIYVGIDIAKLNHFAAAISSDGEIILEPFKFTNDADGFQLLVSKLESFDKNSIIIGLESTAHYGDNLVRYLVAEFYQVCVLNPIKTCQMRKNNIRKTKTDKVDTFVIAKTLMMQDDLRFVSFYDLDMMDLKALGRFRQKTIKQRTRLKIQLTTYVDQVFPEIQYFFKSGLHQHAVYALLKEAPSPKEIASMHMTHLANLLKVNSHGHFTKEQAKELRVLAQKSVGANDSAISIQITQTIQQIELLDSQLQKIEAEITDIMKFNDSVIMTIPGIGYINGGMILGEIGDIHRFSNPNKLLAFAGLDPSVYQSGNFQAKTTRMSKRGSRVLRYALVNAAWNVVRNNATFKAYYDAKRAEGRSHYNALGHCAGKLVRVIWKMLTDEVEFNLE

SEQ ID NO: 76523 - protein, 411 aa, unidentified
METVVERPGALDVHKAQVTACVRVPAREGKGREQHVAEFQTTVAGLLTLRDWLAAHHVTQVTMEATGVFWKPVWAILEDEFELLLVNARHVKQVPGRKTDVSDAEWICQLAEAGLLKASFVPPKPIRALRNLTRYRKTQIQERAREANRLHKALEDTGIKLDCVASDILGASGRAMLDALVAGTTDPEVLAELAKGKLRRKLPQLREALEGRFERHHALVIGAILAHLDFLDEQIDQLSDAIEEQLGPFASGVRLASTIPGVKARTGEVMVAEIGTDMHRFPSPGHLASWAGRCPGNDQSAGKRRSGRSRKGSKWLGIALEEAALAAVATKDSYLQAQYQRLRPRIGHGRALGAVKHSILNAYWHMFTNGEVYRELGGDYYQRRDPERQIRRLITQLERLGQHVTVETATA

SEQ ID NO: 76524 - protein, 565 aa, unidentified
MAAGASGRINPIKLLAPTCVARSPSNSLWTGDGGGALGHELSGASLSTDAAWEYTFFPALRAVSASESKAEKQAMKASPRKRSHRKRNRAPRKATPREMPVICPDAAGIDIAATADHWVAVPPDREGVTVRSFSPMTCGQEMMVAWLKEMRITTVAMESTGVYWLSLYIVLREAGFDVILVNPRDVRRFKPKSDIADCQWLQYAASVGLLRPSFVPPPNILALRAISRQRERMIREAARSLQHVQGALDEMNLHLHHVIDDIGGESGQAIVSAIIEGERDPVKLAARCHKNVRTDRAIIANALTGKWGQEQLFVLRQAHESCLHAQKQIAECDQQLWTLAESLSVRLAEEQLPPVEGLRPRGRPRKAAADQSSAKEPQKKSKRITSRNAPMAPEGPNQWIRKFHALFGVDLLAVPGIGVLLVLALLVEIGTDWSAFKNAGAFASWLGLCPHNDKSAGKVLRRRTSPGHARLKATFRTAAQSLDRNQSHLGDHYRRLKARLGPAAANTAMAHKLARIVWHMVANQQEYDETIFASLDQNRQKQQQRRLRTQAEKFGFELVPIKKAA

SEQ ID NO: 76525 - protein, 355 aa, unidentified
MDSKKYIGMDVHQASISIAVMDATGKVVVESIIETKATTILEFIRGLKGTLWVAFEEGTSAAWLYDLLKPRVAKVIVCDPRKNALLNAGNKNDRVDARKLSHLLRAGLLTPVYHGENGIRTLRELGRSYLTVNKDLTRVMNRLKALYRSWAIPCAGEKVYSPRQRNAWLEKLSQVGVRRRAEQLYQQLDALVQIRREARRELLTESQRHPATPLLRQIPRLGPIRVALLIALIQTPHRFRTKRQLWAYCGLALQTRASGEYRFSGGELQHCKRLPALRGLNVNHNHDLKNLFKSAATHVSTSTDPLGDFYRSLLAKGMKPTMARLTLARKMAAIVLSIWKKGARFDPAELKRQAA

SEQ ID NO: 76526 - protein, 345 aa, unidentified
MNYVGIDLHKKTIVLCVMDQHRAVRHRGSFACGDTEAILAFVRRLGPFRAVVEATASYEWLVELIEPLAEKVVLANPKKLRVIAESTKKTDKLDAQVLAEFLARDMIPEAYRPSPRQREHRTLVRHRQYLRQRATALKVKMRRIVSDYNADRRDLFTAAGWQAALQGIKLRDGDRFVLDQLHAQWQGLEDQVRELKRRLQTFAAAAPPREAEARAKLETIPGVGPVTINVVLSELGSDVRRFASAKAVTAYAGLAPRVRQSAGKGKDLGITKEGSPLLRWALVEASWRVVHHSASWRRIYESIKKRAGGKKAIVAVARRLLCVIYAMLRDGTNYDLLRVGEPQPS

SEQ ID NO: 76527 - protein, 368 aa, unidentified
MGEGITSFVGLDVHKDTIAIAVAEAGREVPRFLGTTPAVSARVLKVLATLDQPEALQIVYEAGPSGYSLARELRARGYRCEVIAASKNLRPATDRIKTDRRDALTLARLARSGDLVAVVVPDERDEAMRDLSRAREDALCARLKARQQLKALLLRHGHRYTGRTFWTAAHERTLANISFAHSAQNMAFAEYRQAVREAQDRLDRITQALRDECDHWRMKAVVAALCTLRGIDFIAAVTLVAEIGDFRRFAHPRDLMGFLGLVPSEFSTGESRHRGAITKTGNGHARRVLIEAAWNYRFTAHLSRKMQIRQEGQPKAVRDIAWRAQLRLGQRYRRLSSRKLHQNKICVAIARELAGFVWAITGHITVTA

SEQ ID NO: 76528 - protein, 390 aa, unidentified
MEARVVNNLSPAAAHDGAVRCHLAIELSKKSWVVAVNTPLSDKISLYKLKPCDWKQLLQLIERIRKRVSEELKKPVEVISCYEAGYDGFWLHRLLEAQGVRNHVIDPASLQVDRRARRAKTDGIDVGKLLRSLMAYLRGEPKVWSVVRVPTVIEEDNRRLHRERSRLINERIQHVNRIKGLLAIHGIYDYEPMHPERMQRLERLRTADRHGLPTRLKAEILRELQRLELVLGMIKTIETERDAIASAKSKSQQTSAKKIKHLVKLKSIGPEFATVLVGEVLYRTFNNRKQIGSYVGLTPSPFQSGSTSRDQGISKAGNTKARTTMIELAWLWLRNQPDSRLSVWFRERVGNRKGRIKRIAIVAMARKLLIALWRYLETGVVPEGAVLKSK

SEQ ID NO: 76529 - protein, 368 aa, unidentified
MYENITAFVGLDVHKDSIAVAVAEPGRAAARFLGTTGPALAPLEKTLSHLGVPGQLWLVYEAGPCGYGLARQLNARGYHCEVVAPAKIPRRPGERIKTDRRDALSLASFARSAELTAVVIPDERDEAMRDLSRAREDAVRARLKARQQLKAMLLRHGHRYTGKSSWSAAHERYLAKVGFAHPAQHIAFTEYRNAAREAHERVERLSAALREQASSWRPQPMLNALMTLRGLQLLTAATVLAELGDLRRFAHPKQLMSFLGLVPSEYSSGQSRRLGAITKCGNAHIRRVLIEAAWTYRFPARISRDLQLRQEGQPKVVRDIAWKAQLRLCARYRRMHARSVHQNKACIAIARELTGFIWDIARHVPLTA

SEQ ID NO: 76530 - protein, 456 aa, unidentified
MRRASNARGRAGEGLKSVRPKVAGVDLGAREHWVCGPEGEDGSCEVRTFATTTAELERLVHWLLEQRVESVAMESTGVYWIPLYELLESNGIEAVLVNARHLSGVPGRKTDMIDCQWLQKLHSCGLLKGSFRPDESICRLRALQRERANLVGERTRIVQRMQKALDQMNVQVHHAVSDLTGTTGLAIVRAIVDGERDPAELAKLRDWRCKKSQAQIAAHLRGNWREEHLFNLKMGLRRYDQISLIIAEYDAQLGHWIAELEPPDRRGQSAPSHPNATKEKGIRRRGEGNKRDAIWRLAGVDLTRIDGVSASAAETVLTEVGLDLGKFPAERNFVSWLRLSPKLSVSAGKPLPKRKNGTGATRVATLLRMAALAVSRSQTALGAYYRRIARHKGAAVAIFATARKIAVLVFRMLRYGQDYVDEGVAVYESRFQQRRLRQLTETARQLGYRLAALEAA

SEQ ID NO: 76531 - protein, 360 aa, unidentified
MNSSKQSKASPSHEIIKLGIDAHAKYYWVSRQVDGATPQPVQKMTYDELLLFVVKQQRLANKVVTCYEAGAFGFHLHRRLEELGIRNYVVQPQDWDERGKGVKNDRLDAAALCQRLDRYERGNKKAFSVVRIPTVDEERERAITRQRQQLVRERQRLAAMGRSLLATHNIHVTGKWWKGKAWTAIKMKAPAWVIERLEVFIVILGPLEEQEMKLMRAIQEAAQEQKIPRGVGPLTFEILRREVGDWSRFNNRRQVSSYTGLCPREHSSGGRHRSGSVSKSGNPRVRAMLVEMVWRMIRWQPGYTALQKWAPVLNSPTPNPAAKKKAVVAIARQLAVDLWRVFTGQVEAEKFGLVYLPEAA

SEQ ID NO: 76532 - protein, 411 aa, unidentified
MDVLYPVCCGLDVHKKTITACLRFASARARAEEVRTFGTTTRELLRLADWLTAAECTHVAMESTGVYWRPVYHILEASFEVLLVNAQHVKAVPGRKTDVKDCQWLAQLLEHGLLRGSFVPPAPLRELRELTRYRRQLVQEHAREANRVQKVLETANIKLGDVATDVLGVSGRAMLHALIAGERDPERLADLARGALRQKAEALREALVGRFTLHHAFMLQGLLDHIEFLDQQIARFDERIEEQTRPFGPAIERLDTIPGVGRRSAEQILAELGDDMRRFPTAAQAASWSGICPGNHESAGKRRSGRPRKGNAWLRSTLVESARAAVRNRGCYLSAQYHALARRRGDKKAVVAVAHSILVAAWHILRDGVEYHDLGPDHFDRLNRERLVQYHTRRLAELGLTVQLPGAQATA

SEQ ID NO: 76533 - protein, 329 aa, unidentified
MQIYGIDLASEKFDVSFIDSGSRARHVVVRNTKSQIDKFLSKLPEDCRLVAEHTGVYGDLLLKLADMRNIPVSYVSGYEIRHSMGLSRGKSDPLDAARIREYGERYTDRLEDTHFPSETIYELRELYATRRLLVHQRKQLQAMLKGDDRRPSRSNTAREIKQQMMEQLDSRITSLEKKMTELIDNDENLAKNSAIVQSIPGIGPVTATELIIKTDNFKRVSTTKKCATLAGISPFPNSTGKSDKGNHVSHMGDKELKSLLFMCALSSVVHFEKMRVYKIKKHEIEHKHIFVVLNNVANRLLKILYALVKKGEYYNPMYMPTDPRLKLSN

SEQ ID NO: 76534 - protein, 354 aa, unidentified
MSRDKYIAFDVHQATTGTSVLNAAGRELDGTIIATQAQQIRSYLEGFSGPLHVTLEEGTYAAWLYDLLEGRVAELVVCDPCHNALLKEGSKTDRNDARKLADLLRTGMLRPVYHGSRSLRPLQELAHSYEALVEGTTRAMNRIKALYHSRGIDCAGRGVYAQKQRASWLEKTPAEATRLRGELLHEQLDHTRSLRRKARRALLKESRQHLISARLRQIPGLGPLRVALLMAGMQTPHHFRTRRNFWSYVGLGLVTFDSGEYRLVQGRIVRRAQAAKIRGLNRNHQPRLKEIFKSAALTAIRQPGPFKGYYDPRLQQGRDPEMLRLNVARKLAALVLSLWKKGGHYRAEGLPSPA

SEQ ID NO: 76535 - protein, 469 aa, unidentified
MKKTDYLSTLFVGIDIGSRTNVVSAIDFNQEFLIRMKPVPNAKEGAENLESLLVDVLSAHHEFNHVIIGLESTGFYGVHIANYLSASDLLAPFGTEVYCLNPKEVAKYKESFNALDKNDGIDSFVIADFARVGRISIKPWRGAQYLALQRLTRHRLHIAECIAREKTYVLNNIFLKFSEFAMLKKEDHPFSNKYGATAEAILEQYVTNDDIIEASIEELVELIESKSHGRITDPEETVKILKAAANGSYRLDRVVAEPITLSISSSFNCIRAFEKELKAIEKAIEHTVQGLNPVEYKILKSIPGIGHVYAAGILAEIGTIKAFTGNGALAKYCGIVWKENQSGNFRAEDTKMSKAGNRYLRYYVIEATGSIINNCPEYKDFYDKKFAETTTHQHKRALALTSRKFLRMLFGLLDKSQLYSLERSRKSIENIELMFSISMVYIGLLKLPFYLKIFSKCLLTYYQIAFVVD

SEQ ID NO: 76536 - protein, 395 aa, unidentified
MKANELQVAVDVGARMHRVAVGNGSGQLVAEFDLAHTAAGLAGFFTRIERLRGSRSAPVAVAMEGFNGWARPLDRQVLEHGWRLYNVNNLKLARYKEIFPAPAKTDAIDARCILELFRLRGDLAVARGVLQEIVATTQDTERLKRLTRRRRQLVNEKVRVLNRMQSDLQAVCPGLLAITAEADNLWFLSLLGAREDIRRLAGLRPTSLLALEGVGRAYCAKIQAWQCEALFSHEAEWAGPMSVADARRVLALKREITALDQLIEPLIDGCETARRLRTIPGFGPTCSGELAGEIGAIERFATEASLALYLGMAVLDHSSGTHTGTKRPRQVNARAKAAMMTAVARHMEQVPSSRAYYDKKRAQGKMHNQAVRALGRQLVRVIWSMLKHQRDYEVR

SEQ ID NO: 76537 - protein, 415 aa, unidentified
MALKIVYKICCGIDVHKTFVVACIASTDNKGITSYESHRFSTYTSGLKDLLQWLLTRNCKDVCMESTGKYWIPVYNILESDCSIVLAHPKYVKAIRGKKTDKKDAKWIADLFKHDLVAGSFMPPADIRQLRDLMRYRFKLTCFKSSEKNRLQNCLTVSNIQLGNVVSDTFGKSAQAILDKLLENPADTSFDLEPLVYKSLKKKLPELRDAIDGYISPEQAGKLKVIKAHYENLESRKAELEELILALAAPYQQELTILQTAPGISSPFTAIGIISEIGTNMEAFPSAKNLCSWAGLTPTNNESAGKKKSVRVSKAGCYIKPLLVQCANAVVTSKKHPEMRNRYLRLRKRRGHKKAIIAIARMLLTALYHMLKNGENYNAELYQKSDLPPVDREITVEQALIITRNQGYKIKSATI

SEQ ID NO: 76538 - protein, 348 aa, unidentified
MLADQLDYIIGVDPHRDSHALAVVHVVSGAVVFESTVVASSDGYAHALKLVDRHASGRRAFAVEGTGSFGAGLTRFLTRCGEQVLEVGRLRRERRSGGKTDALDAVRAARSVLAQERPATPRAGGERQALQALVAAREGAVNAKRAGLCQLRDLLITTPEPLRSELRPLTRARLLQRLAATRPDARRDPELRGSMLALRSIARRVLQLTAEERELAREIETITRKLAPQLLDQPGVGPHAAAQLVLSWSHQGRISSEAAFARLAGAAPIPASSGQTIRYRLDRSGDRKLNRALHMILVTRKRSHPATIAYIERRLQEGKTRREANRCLKRYLARNLYRLLEHGPPLAT

SEQ ID NO: 76539 - protein, 374 aa, unidentified
MENTITYVAMDTHKKQHKIALHYPCQEEIIEFTVNNTVRDIKKMVNKIKKHAPGKVEFCYEAGVCGFTLKRRIEQFDCRCCVIAPSLVPRKPGDRVKTDRRDARKLLMMFKAGLLTEVHAPNEHQEAARELTRLRETAKDNLKRIRHQLLKLLTRHGYVYTEGRHWTQKHIAWLRTIQFAESTLTGVFENYFNEMIYCIGRLENLDKEVGLLAGSQEYKEIVGLLCCFHGIDTLTAITIITEIFEFGRFESPRHLMSYLGLTPSEDSSGEKQRKGAITKAGNKRIRRLLNETSWHYRHRYVPSAALKKRRKGQPQWAIEIADAAGRRLSKRHRYLTNKGKMPCKANIAVARELAGFIWFTVTQYQARKNTNDAA

SEQ ID NO: 76540 - protein, 328 aa, unidentified
MQSILGIDVSKNTLDVALVTEGGVFHKLVNNDTQGYQQLEKWMRARQTGEVHACLEATGQYGDGVAEYLVECGHSVSVVNPARIKRYGESKLHRNKTDKADAALIAEFCQKEKPPLWQPPSSEIKHLRALVRRLTDQKTNLQQEINRLKSGEKDPWVRHDLQIHINYLRERIQATEKEIQDLIDQTPDLKSQQKLLTSIPGIGDLTANTLLAEIGDISVYEGAPQLAAYAGLNPQGHRSGSSVHKKTRISKQGRSELRRCLYMPAIVALRHNPVIQDLNNRMAERGSHKMEIIVASMRKLLHIAFGVLKNQIPFDPHYGEQLIFPLDF

SEQ ID NO: 76541 - protein, 466 aa, unidentified
MEVLYARCAGVDVHKKTVVVCRIIPGPDGKPIKEIRTFTTMTRDLLALSDWLAEGGVTHVAMESTGVYWKPVYNLLEGTFTLLLVNAAHIKQVPGRKSDVLDCAWIADLLRHGLLKGSFVPERGLRELRELTRYRTALVRERAAEQNRVHKTLEGANIKLSAVATDLMGVSARQMLAALCTGRSDTEAIAQLAKGRLREKLPLLEQALEGDFQPHQRFLVAQQLAHIDYLEGLIDQVSEEVAQRLEPLAPPPSGPAPAPGSDALDEAAAFAAAELEARREALHLRLALDGLQEQEAVEGPLSFAAAVALLVTITGISQRTAEVIVSEIGTDMSRFPSAGHLCSWAGLVPGLNVSAGKRHGNRTRRGSPWLRSALVESAHGASRSKGTSLSAQYQRLAARRGRKKAIVAVAHTILATAYYLLKNRTTYEELGDAYYDARDKEAIQRRLVRRLEEIGYTVTVELAQAA

SEQ ID NO: 76542 - protein, 357 aa, unidentified
MKKRLNADKVNVNGKTVNVGIDVHKVSWHVTALVEGIVVESATIQPSYRVLKKLLAPYKGARIRIAYEAGFSGFNLYDELSADGMECIVVSPSLIPVESGNRVKTDKRDSRKLAQYLENNLLKRVYVLSKQDRAHRQYVRTRRQLSNHRTDVMRQIKSLLLFHGLPTFDGTRGFWTRPVLRALRSITPDAYVSHSLNKLIDLYEYLTQQVQHMSREVRRLARTETYARRVELLTSIPGVGVLSAMEILTELQDVSRFATADQIAAFLGLTPAQYSSGQHVRMGKITHAGNHRLRTRMVECSWIAIKKDPGLNKTYQAIKMRRGGKRAIVAVSRKLIIRIRRILLDEVAYCKEYATAA

SEQ ID NO: 76543 - protein, 404 aa, unidentified
MKGPIVSIDVSKGKSDYQAFKDLNVKYTGSRSIKHTKEGFDEIVSLVREMEKKLETEVCVVYEATGVYHRVLKKVLEDNNIKQFIINPLLSAKTRKNDSLRSPKTDKLDPKSIAKTYYSHSLHNSHKQETIYHELRELSRYYEDILVHIRKDKVAFRAQLDIVFPGYDTLYDDLYGPVALAIIEKYPHPEILQKKKINTVSKVIQNKTCHRQAVSDTMADKAIEYSKTIYSGCDKDDIEVLILQRFIKKLNEDMAEAERTIGEMIKLAQELPDFNIIKSIPGIGDNLAARIIAELGDMTRFKKKNELVAFAGLDPRISESGQNDGDHMHITKKGNKRLRCLLYLAVTCSIRLKRDDNSIKDFYIKKKQQSNPMCSKAAKTACASKLVRIIYSMCKTGELYQYNK

SEQ ID NO: 76544 - protein, 344 aa, unidentified
MDHFAGLDVSVKDTSVCIVDDTGKIVREVKVASEPDALLTVLTNPAYRFKRIGLEAGPLSQWLFSGLAEVGLPVICVETRHMRAVLKAQINKTDRNDARGIAQMMRVGLYRPVHVKTFRSQKLRMLLTHRKLLQSKAIAVDNDLRGTLRNFGLKVGAVGAVRFEARIKELVENLPDLAMLIEPLLVVRRVLREQLGILHRRLLTIVRDDDVCRRLMTVPGVGPVVALTYRATVDVPARFQHSKSVGAVFGLTPSRDQSGERDRPGAISRCGDEMMRTALYEAAQSMLVHSTKWSWLKAWAMKIAKHRGMKRAIVALARRLAVIMHRIWVDGTEFRWTREVTAAA

SEQ ID NO: 76545 - protein, 334 aa, unidentified
MNTVLQLGIDTSKDSLVNCLVGKHPKPMEFAVGNTDEGVAQLLSELGEDVSRTRVCIEATSRYHCRVVRALVSAGANVTVVNPTRSHALAVALGLLDKDDKVDARMLAKAAKLLEAKDAEFRTKAHEDLRDLSRLIDTLTKQNAEHKKRAGALEVGTPAHGLLKETIKLLAGQIKAAKAQWKKLLKQDAEILRRFNIAMSVKDVGKETARVSACELPARLEDYRSDQLCAYAAVVPRRNQSGNQKVKASVGNGGNSHLRTGIYMAASHSVYLSKVNESFYLKLRAKGKTHHQAMVAVMHRLLRNIIAVLKRNEQWQEAPPRKNGNPAISAAGSS

SEQ ID NO: 76546 - protein, 419 aa, unidentified
MKQDERHLAPDDIFVGIDLATRQHQVVVLDLEGRRKTSFKIPHSRDGLRELVQQCNSPGLRQGVGRAHFGFEATGHIWEAVAAYLEERKIDYQVINPFATFCVREARQMGRDKRDLTDAEEIAHLLRTGVVTQCQLLPPKYMQLRRAWGEYYRLRHERARLKTLLAHQLYGVFPEIVGEWKEVAAPGCLAVLRTGLAPREIAKLTQPNFIRIVREHRRGRRVWRFKIEQVWEKACRTVALPHGQEASMREVTRIVHRMDFVSEQLDQVAIELRAQLETFNEAKYLSTLPGIGWTTVAALIAEIGPFDRYRHGRQLVKLAGLQPSRRESGESAGRTPITKRGRAQLRAIVYMATLSSIQHNPRIKAHYERLQQRPVRPLTKMHAFGACMTKLLHYAFAVVKNREAFDIDHIWKEEQQIAA

SEQ ID NO: 76547 - protein, 344 aa, unidentified
MQITTVGLDLAKNVFHLIGLNQAQKEVIRKRLRRAHVKRYFANLPPCRVAMKACGSAHYWGRELRQLGHEVKLIPAQAVKAYVQGNKNDYNDALAIAEAANRPKMRFVRIKTTEQQDTQALHRLRDGAVSHRNKVCNRIRGLLAEYGIVMARGVVTLRKAIPELLGDGDHGLSDNFRRLLQQAYRQLQELDAHIHTYDHAVKQQARENEAAKRLMSIPGYRLVVSSVYLSAAGDGSAFRRGREVSAYIGLVPRQHSTGDKSVLLGIRKRGHRQLRTLLIHGARAVVRYAPEKDDALSRWVTTLVVRRGKHKATVALANKLARIGWAVLTRGEVYQPTRGSASSA

SEQ ID NO: 76548 - protein, 400 aa, unidentified
MQQTEYAWAGIDAGKGHHHVVVIDGDGRRLLSRRVANDEPDLEAVIAAVLGCAVEVTWTIDLADGPAALVLALLLGRGQRVRYLPGVAVNRAADAYRGEGKTDAKDAAVIADQGRMRRDLRELELDDQVIAELRMLTAHRADLAADRTRAINRLRIQLLGVCPALERALDFTNRGPLVLISQFQSPQQLADAGQTEVEQWLRGHKVRHADRLAAAAVRAAATQHTRVVGEATAADLIARLARAVLDLDRQLADIDKRISTRFEVHRHHAIITSMVGIGNLLGAEFLAAAGGSLDGFASADHLAGYAGLAPTPRDSGRRTGNLHRPKRYNRQLQRVFYTSALISIQRSPASKAYYDRKRAEGKRHSQAVLALARRRVNVLWAMLRDQRTYQEQPPNIAAAA

SEQ ID NO: 76549 - protein, 354 aa, unidentified
MNPIIGCDAHRRYSMFAVFDTTTLSVEQTRVNHQPGAIKEFLSDFTEGTPVALETVGNYYWIVDEIEQAGCVPQLAHAAKAKVIMGNINKTDKLDAKGLATLIHLGSLPTVWLPPGEIRDERELHRTRMAFSKVRTALKNRIHATLAKYALNTTGHSDIFVGKGRAWLDRTLKKFPPETGRCVDQKLELLDATLEQISVLEERIIERIELTPDMQHLKTIPGVGNILAIVIEREIGTIDRFPTAGHLAAYAGVVPKVHSSGGKTRFGRMRKQANNYLKWAFVEAANVVVAHRHHPSWRQKKVTLVYERICRRKGHATAAGAVARHLAESAFWILKKGEDYQDPALRRQGSPKLA

SEQ ID NO: 76550 - protein, 406 aa, unidentified
MAAMMIGIDPHKGSHTAVAIDESEQPLSELRVRSSSTQVVELRSWAKRWPERIWAVEGAGGLGYLVAQQLLAAGERVVDIQPKLGARVRLLATGATNKNDPNDARSVAIAALRSTMLVEVVPEDHATVLKLWAKRARDLGRLRTQVVCRLHAVLAELTPGGFSGSISAAQATTLLEKIEPQGAIELARYELAHEFLADLTRIDEQMRQTKKRITVAVAASGTTVTEIYGVGPFVAAVVIGYVRDVSRFSDRDHFAAYNGTAPIEVSSGNRKVHRLSRRGNRRINHAIHIAAVTQIRHRDSEGRTYYDKKITEGKSGKEALRSLKRRISDALFTHLQADARAVTGRTTEAGPGGQMGNDSVASATGLHPNTPVLRPSHSRTQPKAMTRPAPPPSRRSPAVKKVRQAS

SEQ ID NO: 76551 - protein, 316 aa, unidentified
MKTEVFVGIDVSKQHLDVAVRPQSRHFIIPNDDRGLKQLLKRLTALKPQLIVLEASGGYELLATAALAEAQLPVALVNPLAVRQFAGATGKLAKTDKIDAQVLAHFAEAVRPELRPLPDQEQQLLKAALQRRVQMVKMIGQEKNRLEKTFIPALRQDIQAHLAWLQQRLAQLDRDLNDQIRRSPLWRDRDRLLQTIPGIGPAVSRAVMAQLPEAGRLPGKKAAALVGVAPYNRDSGRFRGKRMIRGGRSYLRRMLYMAAVVAARWNPVIRTFYQRLLAAGKPKKLALTACMRKLVLILNAMLKNNQPWNQFINQVP

SEQ ID NO: 76552 - protein, 333 aa, unidentified
MKASQPEVETLFAPRVRQTFVGIDVSKDKLDMRCLPGSVFRQFDNEPAGHAALVEWLSDKPACLLVVESTGGYERELVYAAQDAGLEIALCNPRQVRDFAKGTGQLAKTDRIDAGILAEFARQVQPRPLAKVPDKQREIEALVVRRRQLVELCTAEQNRLQQVSQKSVVKSLLKVLEVLKRELKAVEKRILALLQSDEDWRRKIEVLQSAAGVGPVTSAVLVAELSELGNLNRQAIAALVGVAPYPHESGTFRGKRIIWGGRAKLRSTLYMAALSARRCNPVIREFAHRLHKLGKPFKVVMVACMRKLLVILNAMLKTNMPWQDKSQPPKTAH

SEQ ID NO: 76553 - protein, 353 aa, unidentified
MNDQNISKLRQEGPWIGADVSKKTFDAALVRVGQKWPATPLADVPVQSFVRTSSGVKDFLQWMDALLGNNDAAPRVVMEATGRYSQELTAWMVGQRPALAPAIAPPHQTAAFIASLGLRNKTDKMEARALGFYGMERQPLPYEPLTAHEAELQDLCRYRDFLVRQRVAAANRTGETHSSKTVRALERKRLSLLAADIERVEQAMRRVVDETPELKRDVELLSTIYGVGFLTAVTVRVELGDLRRFHKARQLTAYAGLNPSLRQSGSSVNGRTHMGKTGNQRVRQSLYLVAMVAIRGQNDLQRFYLHLCEQGKSCMAALGAVMRKLLTLMRAILISGKPYDPLWKTRPHRSLLQ

SEQ ID NO: 76554 - protein, 395 aa, unidentified
MFIVGIDVAKRSHEVCMITSDGQTVQRPFSIRNNCTGYNLMLEKIRKHTNIKSQIVFAMESTAHYWLALFTRLRKDGYHVILLNPIQTSAMRDMFIRKIKTDAKDSFIIAELIRFGRYAESNVAQDRLLALKELCRNRFYLVDMAGDLKRKLIALIDRVFPEYEAQFDTIFCKSSVALLKKYPTPQKLSNAHLDKLTELLWNSSNGHFGEWKARELRELARNSFGVEDCDGAYSTLILLMLDQIQSLSGKADALEKEISRLFQSFDTTVTTIPGVGPIIGAVILSEVGDISRFPSADKLAAYIGVDPSVNQSGEFQAVHAHMSKRGSPYLRRCIWMASQVAVQRDPMFRAYYEKKAAEGLKYMTIIGHVTRKMTAVVFAILRDHKVYEPVLPTAA

SEQ ID NO: 76555 - protein, 342 aa, unidentified
MYYIGLDVHKKTISYCVKDASGRICQEGKVGATRWELDIWIKTLPQPWTAAMEATIFTGWIYDHLKPHAVDVRVAHPLMLRAIAAAKKKNDSIDAGKIADCLRCDFLPECYMAATEIRDRRRTLRYRHLLVRQMVQMKNRVSGLLMETGVSHNKQRLHKVGYFPELLANADAVSASIRPLLHLSRESITRLQRTEGAIIRSLQRDPLLAERVRRLQTIPAVGKVTALSWALEMGDISRFRSIRQAISYCGLCGDEKRSADKVARTPISKQRNKHIQRVLVEAAKLAPRRNPDLALVYENARQKGNANCATLAVARKLVAYLMAVDREQRDFEPVRGLAGIAA

SEQ ID NO: 76556 - protein, 378 aa, unidentified
MNRIIKIGMDVHTTNYTLCIFEPSFEHDGTVHCITQVKPEIKKIIHVIETFKKKHENEELNIVCGYEAGCLGYSLYHELKEKGVECVILAPTTMKTEKGGRKLKNDYRDAKMIAECLAYGGYSAVHVPTELDNSVKEFIRMRDDIKENLKSIKQQIIAFLTRNGKQFNGKSYWTRKHIDWINTISFSEPLLQDTLKEYMIEYNHLCDRVETLDKQIEEVSLKEEYVEKVQQLQCLIGIKTHTALSLIVETSDFNRFKKGNMYSAYLGLIPGDDSSGGHEKKLGITKAGNNHLRRLLVEAAQGYTRGRVGFKSKDLKSRQEKCNSEVVAYADKANERLRRKYYRMILRGKKYNVAKTAIARELACFIWGIMTDHIDLCS

SEQ ID NO: 76557 - protein, 314 aa, unidentified
MSLYNNFIGIDIGKINFVVAVYGSRKTKSYVNDVSGIKQFISEFKGLLKKSLCILETTGGHEMRLILTLCDKGYAVHRADTRKVKRFIQSYGNDAKTDNLDACSLALYGYERANRLSLFTPPSKQALELYELTQRRADLVKMLVAEKNRLKAPRADLIKESCDALIEVLLKQIQQVTENIDQLIEQDSLLKSKKEILKSIPGIGNIIANELLILLPELGKLSRRKIASLVGLAPKANDSGQYKGYRSVGYGRCGIKPKLYLGAMAARRSNSSLKSFYNHLISKGKLKKVALTALMRKMIVIANARIKEFELVQS

SEQ ID NO: 76558 - protein, 366 aa, unidentified
MKKISTVQVFGNEIFKEQKLTSGVDLGDRWSFYCVLDEAGKIILEQKVSTTPEAIKQTFGKIPRSLIAIETGTHSPWVSRLLTELGHEVIVAHAQKVELITRSNRKDDRHDARTLARLARIDPELLGPVRHRSAKAQIHLTVIRARAELVSARTALVNAARGLVKSFGERLPKCGTQQVNEKLAEGVNAELRDVLVPLLREVESLSKRIQEYDERMEKIAKEVYPEVSLLQQVKGVGTQIALTYVLTIEDPYRFPKSREVGCFLGLRPGRRNSGESEPQKKISKEGDRYLRTMMVQGAHYILGPFGEDSDLRRWGLKLAERGGKNAKKRAVVAVARKLAVLLHRLWVSGEVYEPLRNSQKAMRAVA

SEQ ID NO: 76559 - protein, 386 aa, unidentified
MPKPNDLSRSLVALSQDSTVIAVVEMSQSSWLVAGIVPGLERHPLKKLEVDEEALLRLLLRWRDEAIKTGRSIARIAVAFEAGRDGFWLARWLRAHDIEVYVMHAASVAVSREHRRAKTDRLDTELLKRAFVGWLRGESDHCSMVAIPTIEEEDAKRPNRERESLVGERTRIVNQMKGCLARLGIRTFKPTLRSAAKRLAALRTPEGAPLPPNTVAELQRDMTRLSFITDQVKEIEAARLEHLERAPKDSSHAMVRLLARVIGIGIETADMLVHEVLSRNLRDRRAVARYAGLTGSPDESGAKRREKGLARAGNARVRRGMIQLAWRFLIFQKESALAQWYRARTADARSATRKTMIVALARKLLVALWRLVTTGETPDGLILRPA

SEQ ID NO: 76560 - protein, 346 aa, unidentified
MDQIIRIGMDTSKHFFQLHGVDAAEQPVLRRKLRRNEVLGFFAKLPPTVIGMEACGAGHYWARELCKLGHGVKLIAPQHVKAYIKRNKNDGRDAEGLCEAMSRPTMQFVPVKTEEQQAALMLAGVRQQLITRRTQLSNAIRGYATEFGLITAKGLDKLEPLLVRIAQDESLPELAREMFAMQGRAYAQLQVELKAIEARLMAWHRANADSRRLAQIPGIGPIGATALVMKAPDPRLFPSGRHFAAWLGLTPKDHSTAGKTRLGKITRAGDEMLRSVLVAGATAVIQQARRGRGRASPWLLALLARKPPKLAAVALANKIARIAWKLMTTGESYDGARMPGASALAA

SEQ ID NO: 76561 - protein, 356 aa, unidentified
MVCNHSHRDQGIIVGVDTHKDQHVAAVVDRLGALIGQRSLPTTNTGYVDLEHWACGLGEIQAFGVEGTGSYGAGLARFLRSKGHRVVEVNRPDRSTRRRLGKSDPTDAEMAARAVLAGVARDQPKSGVAEVEMIRMLKSTKDSAMKGRTQAINQMKALIITSPVELRAQLRGLTTIKLVDICARRHQGHPATPTAAAKYALRSLARRYIQLTQEIEALNTELARLTAAFAPALLGTLGIGPDTAAALLVTAGSNPERLKSEAAFAALCGVSPIPASSGKTNRHRLNRGGDRQANAAIHRIVLVRLRYDERTNLYLQRRIEEGKTKTEAIRCLKRYVAREVFGILHDIGERLVTNNA

SEQ ID NO: 76562 - protein, 416 aa, unidentified
MKKNSKSAMKKEQRANRAKAQRPVQREPKEVLAELMEKLRGKLELKATSGSQGEAGPRGELSPNVDRLTVGVDLGDQWSHFCILGLQGETLSEGQLRTSEAEVAEFFQALPSARVVMEVGTHSPWMQETIAGEGHEVVVANPRLMEGSKRRKRKNDRIDAKKLARLGRVDPQSLHPIRHRSREVRQDLVVLRAREALVAARTELINATRGLVKSMGTRLPKCSSPSFGQKVRDAIPEKVREALLPLVQLADALSDCIQSYDQKIEELGSEKYGHTKLLRQVKGVGPITALAYVLTLENPEHFAKSRDVGPYLGLVPKQEDSGESQPQLGISKTGDTMVRKLWVGSAHYILGPFGPDTDLRRYGLRLCERGGKNAKKRAAVAVARKLAVLLHRLWVSGEVYEPLGYAASRAIVQQAA

SEQ ID NO: 76563 - protein, 332 aa, unidentified
MTEQLPTLGLDIAKAKIDACLMNGEPVTYTQIANTPDGFAALRAWLATQGVRQVHVCLEATGTYGEAVAADLHAAAHRVSLINPARLKAYAQVTMTRTKTDRTDARLLADFCRIQSLPLWTPPEPAFQALQALVRRLESLQAMRQQEVNRLKSGAVLPLVQASLERIIAVFDTEIAQVEALIKAQQDQHPDLKQQHALLDSITGIGDTTATRLQAEIQDWHAYPSARDLTAQAGLTPKQKLSGTSVHGKPRLSKMGSARLRKILYFPAGVALQWNPVIHALGERLKARGKPTMVIIAAAMRKLLVLAYGVLKSGCPFDPEYRPKSRKAPVGA

SEQ ID NO: 76564 - protein, 364 aa, unidentified
MAVSGLSPKELTKEAPNIMLHVGLDLSRRRLDFDLSCEDGSRIERGAAPPDADGLRGLVRRVDVYQEPVCAAIESMNGARFVHDRLEELGWQVELADAQKVKGLAPLACKTDRIDAWVLAELSRRDLVPAIWLPSPTVRQERERARWRLHLVRHRTALKNRVHATLIAFGKPCPVSDLFGSRGRQLLARLDLPDPWAQTVSASLSLIEDLDVQITDCERELRVLGADHEYVPLLMSAPGIAWVLGYTIAAEIGDINRFASPTKLCGYTGLCPRVNQSGEHDHRGSITKNGPKYLRWALIEAAVHAVCSPVYRERYQRTATRLGRQRGKKVARVDIARKLAEAIWYMLTRGQSFAPAGATTPLAA

SEQ ID NO: 76565 - protein, 335 aa, unidentified
MQIYGIDLAKEKFDVSFFDLTSKKVSNQPSHKVVTNNLKGIGKFLKGLPSDAVLVAEHTGVYGDTLLKCCMDSNVKIAFVGGYVIHRYRATPDRAKTDVLDCALLREFGERYPDKLKYKTFPEEALYELRQLARHREMLVEQRKQLITADKSEDCRPVRSLAVKRSMDRIKEMLDTEIAETEKEMLKVINGHDSIHHNYELVKSVDGVGLITAVELLVKTENFTKITTARQYSAYAGTAPYEKSSGKMDKGAHISKIGNRRSKTLLYICAESARLHNKEIKLYYERRTLIDKKPRHYVLNAIANKLLRIIFTLVEKGEYYDANFIRQDPRVVKYN

SEQ ID NO: 76566 - protein, 355 aa, unidentified
MDGDKYVAMDVHKASVVIGIRDAAGKYIMESIVETKAATLLDFVKGLSGTIHLTFEEGTHSRWLYDLLQPHVAELVVCNPRRNKLLEEGNKADVVDVQKLSQLFRAGLLQPVYHGNHGTRALKELAQNYESLVSDRVRVKNRLKAIYRGRGISCEGEAVYQRRQRRRWLNELTESGVRQRAESLYQQLENLETLVLAARKQLLRESRKQKATKLLREMPTLGSIWTALIVATVDTPHRFRTKRQFWAYCGLAVVTRSSADYCFDKRGELRKSRRPAATRGLNQNYNRRLKKIFKGAAIVGTLKEPFKPYYDQLLAKGLRPELARLTLARKIAAITLAIWKKGERFDPEKLTKLAT

SEQ ID NO: 76567 - protein, 333 aa, unidentified
MPSAHAQARELKIMSVSSVIAGVDVAKAHVDVDVVGAEFAPRRFDNEADGHSAVVSALKALDVGLVVMEATGGYETSLACALQGAGLAVAVVNPKQPRKFAEAMGYLAKTDRIDARVLAEFGQTLARRPDLSRFLRPMDDVDQQWLAALVTRRRQLVAMMTSERQRLQITPKKLHPSIEAIIKAIKAQLDDVEGQMVGHVKEHFSQLDAILQSVTGIGPVASATLIAELPELGKLNRRQIASLVGVAPFAKDSGMTKGRRRVQGGRFDIRRVLYMATLTAAFRNPVFKAYYQRLIAAGKLPKVALVACMRKLLTTLNAMVKAGSTWDPKHRGA

SEQ ID NO: 76568 - protein, 344 aa, unidentified
MTYYAALDVSLRSVAVCIIDDQGNYHFEAKIPSEVESIVECLEAFDGEIELIGFEAGMLTQYLHYGLTGAGYPVMCLEAHHVSDALKAMRNKTDKNDARGIAQLLRTGWYRPVHVKSVGSHQVRAMLSSRRVILKKCIDLENELRGLLRIFGTKLPPHLSHGTFEEVVRERIEADPTFKEALLPMLELRGLLYHAYVKLDTQVRRMAREDAVCQRLMTVPGVGPVTALTFKAGVDDPTRFKNSRTVAAHFGLTPKREQSGETDYDGRISRKGDTDVRCALYIAAHALITRQKEASSLKAWGVKLMKTKGHRKATVAVARKLAVILHRMWIDGNDFQRHSEKRAA

SEQ ID NO: 76569 - protein, 351 aa, unidentified
MKKIVKQVLGIDVAKNELVGCLGRMYDDWVPELYAHKTFVNNQKGFAALILWLKKNTDEVIPVRFVMEATGVYHEALAYFLNENGYAISIVLPNKISNYIRTLEVKTITDKTASEAITRFGLERELDVWKKPRDIFKKLRQLTRERDQIVTERTAVKNQLHAEEVEAVPNKRSIKRLLDRIKLLNKQEKEIKEEVAAIIKEDKEIAGIVLLICSLPGVGLLTAAIVLAETNGFELIRNKRQLASYAGFDVIEKQSGISVKGKTRISKRGNKYLRKAMHLPSLAAIKHDERYKAIFARIVAKHGIKMKAATAVQRKLLEMIFTLFKNQTTYDKDYLSRNNEEINTIPNTAAH

SEQ ID NO: 76570 - protein, 346 aa, unidentified
MMIIGCDFHPSWEQVAWLDMETGETGERKLVHADGDAERFYRQLPAPVLIGMEATGNSHWLVDLLSELGHELWVGDAAQIRASYVRQQKTDKRDAAHILKLLVEGRFPRIWLASSEVRDLRQLLVHRYKLVIIRARVKNELQHLCLNKGVQRKRKLWTKAGQQVLLELPLKLWAGRRRDDLLRLLAMLDQQIEPLDEAVKAEAQRDKMALLLQTQPGVGPITALAYVLTMGDVRRFPRGKQVASYLGLIPREHSSGGRQHLGAISKQGNRMLRMLLVEAAQTTVRLDPGFRQEYLHRCHQKPKAVAKVAAARKLAVRLYWMLRTNVAYPEVVRIESSPRVRLVGEN

SEQ ID NO: 76571 - protein, 358 aa, unidentified
MAEHRAETHVIGGVDTHKDLHVAAVVDHRDRVLGTESFPTTRHGYRLMLAWMRSFGELQRVGIECSGSYGAGLLRYMQTAGVEILEVTAPDKLDRRRRGKNDDFDAESAAHAAFARRHTVTPRSRDGMVESLRVLRVCRKTAIQARRIALQMIQMTIVCAPDKIRDPLRSMTRMQLIRTLAAGRPDLTAYRQVEEAYRISLKSLARRYLELHDEIADLDDMIEAIVKDLAPELLAQTAIGVNSAAQLLLTAGDNSDRLKSEASFAALCGVSPVPASSGKTVRHRLNRGGDRAANSAIHIIAIGRLRLEARTQDYVARRIAAGNSKLEAIRCLKRYIAREVFAIIMRRHREINQSQIAA

SEQ ID NO: 76572 - protein, 343 aa, unidentified
MQTITTIGLDIAKSVFQVHGVDAGGQVIVRRQLKRRYVLTFFQKLSPCLVGIEACGSAHHWSRELQALGHTVRLMPPAYVKPYVKRQKNDATDAEAICEAVARANMRFVPTKTPEQQSGLVLHRTRHLFIRQQTSVINAIRAHLAEFGIVAPVGRHGVEELLTVVADPGDKRVPEIARACLSALGAQLRRIKEQILEFDRLIRAWHRSNEMSMRLEEVPGVGPVLATALVAAVADPKSFRSGRNFSAWIGMVPKQHSSGGKNRLGNISKQGDRYLRGLFVAGALSVIRYAKIHGTNHRPWLAALLARRPTKVAAIALANKIARMVWAMMARGERYKEPVALAR

SEQ ID NO: 76573 - protein, 483 aa, unidentified
MVVKGGGDDVVTRAPEVILDEAHEQIVERVCAIDVAKDSGKVCVRVPAESGSGRRVSKVWDVPARTKAVIELGDHLACQGIQKVTVESTSDYWRIWFYLLEARGLDVQLVNARDVKNVPGRPKTDKLDSIWLAKLTEKGLLRPSFVPPRQIRVLRDYTRLRVDLTAERTRHWQRLEKLLEDALIKITAVASRIDLVSVREMIEALIAGQRNPRILAGMARGRMRLKHADLVEALTGQFDDHHAELARMLLDQIDALTVQIDTLTERIDVVLADIPVPAPQPEPDPDDHGPGTSDDAEVTAVIRPSHGGAPRPRTAARAVTALDLVDILDEIPGVGRHNAHEIIAEIGLEMTRFPTAGHLVSWAKLCPRTIQSGAKSSAGKTGKGNRYLRAVLGDAAAGAAKTQTFLGDRYRRLIKRRGKLKALVAVARSILVIIWNLLANPGMRYHDLGVDFHTKRMDTERRTRNHIRQLEALGYTVTLTAAA

SEQ ID NO: 76574 - protein, 385 aa, unidentified
MPQPKDDLSRSLVAFDQNSSLCAVIELSLDKWLVGAIVPGLARDPLKKLIPDPEALLKLLHRWRDEAVKAGRKIRRIIVAFEAGRDGFWLARWLCARGIEAYVIHPASVPVSREQRRAKTDRLDIGLLQRCLMGWLRGEKKHCSMAAIPSLEEEDAKRPHREHEQLVNKRTSSVNRMKATLVRLGIRGFNPKLRKAPQQLERLRTPEGCPIPPNNMAELQREMAHFCFISDQIKQIEEARLAQLKQEPQRGLNAKVWQLQQVKGLGLDTSDMLVNEVFWRDLRDQRAASRYVGLTGSPDESGRRRREKGLAKAGNRRARHGMIQLAWRFLTHQKDSALAVWFRTRVAQGKPRKTMIVALARKLLIALWRLVTTGEIPQGVVLYGA

SEQ ID NO: 76575 - protein, 478 aa, unidentified
MEQQGGQSGPRRLVGIDLGIASRHSVRVLEADGLVVCRTSCVPTTESLTLTERAALAGAPEGTRLAVVFEPTGPAWMPIAVFFARRGHDVYRVSSAKAADLRRFLRRHAKSNGIDAETLARIPLADPAGLHRLELPGADAAALDRRVRACDRLTSAASEHKVRIKDLVRQLLPMTPLTGDLGKADLAVLEQFADPRALLAAGAAELTRLITSASGHQQGTERALQWRAAAAAAIDLYGDHPAVPFEELAAEVATEVRLLRAIGAELAVHAAAREQHYRQVDPAQLARSLPGFAEISAPVLVAIMGRPGRFRNGTKFKSYAGLAPKASETGETDRKGQSMSKAGPSLLRATLFRAADTARRQDPQLARIYYLQMTERGATHLKACCVVAGHLAERAWTVLNRGTPYVICDNNGNPVTAQEAKRIIAERWTVPEEVRKRRRSRKQAGKAPQAATTRPDKRGDLPRPRSSRPHHKAVNPVT

SEQ ID NO: 76576 - protein, 437 aa, unidentified
MFIIPNYLNSTVIGIDVASAFSFASILCPDGSQFRKPFKINHTVEGFNYFLEQIKKAEEEYAMKPVFFMESTGVYHLTLFHFLKDNKFDAFIINPLVTNCNKNKDIRKVKNDKNDSLSIAKLGKYEDIKVSSDIDFNIFSLKLLIRDYYKLIDDRTSYKKKLSSSLTLSFSGYQDVFSNTCSNSSIGILKMYPTPQLVISAPKEDIINILLCSRKGVNWVEKKYAELVECANAAKYISLSAPRLSVSITTCIALYEAIDNEITKLLNEIKSFIDSDDLPATLNINIDLLMTLGGIGYITAITLLAEIGAVDNFLKPKQLVAFFGVDPAVNESGKFKGDRVKMSKRGTRFGRRALYAVALASIRRKRNGEPTNPILLKYYQENLKGKKAKVALVAIMHKLIKYIFSILKNQEAYQLRDPKLHQRMYLENHSREVDCLA

SEQ ID NO: 76577 - protein, 355 aa, unidentified
MDKIKYIGLDVHRDTISAAVLNESGRLLQQSVLMTRTAAILDFIGGVRGSLHVTFEEGTHSAWLYDLLSRRVDKLVVCNPRKNALLKSGNKGDAIDARKLADLLRAGLLSPVYHGETSALEVQQLARSYLMLTEDTTRAMGRLKAVFRGQAISCTGRKLYGPKHRGEYLETLGACALRRRAERLYQQLDALQQLRRDARHDLIVECRKHVEAKWLQTVPFLGPLRAAVLIGRVQTPHRFRTKRQFWTYCGLALETRDSAEYRVTDGQLERKKRPAQVRGLNWNYNHELKNVFKGAANAASTGQGVFREFYLGLLKKGMRPEMARLTLARKIAAIALKIWKKGESFDAEHLKSKAA

SEQ ID NO: 76578 - protein, 366 aa, unidentified
MKKNNTVGKSVRTKKEANGKLTVGIDLGDRSSRYCILDEQGEPVVEGSMATTKKGFAQVFGSKPRSRVALEVGTHSPWVSRYLADLGHEVIVANARRVRLITESSRKDDRLDAKTLARLARIDPQLLSPIRHRSEQAQADLIVIRARAALVEARTMLINSARGLTKSYGERLRSCGTGQVGEALAETLSEPLQKALKPMLTEIEALSERIREYDQQIEQIAKERYPETELLRQVHGVGTLTALTYVLTLEDPHRFRRSRDAGAYFGLRPRRRESGNSRPQLRINKEGDAYVRKLLVQCAHHILGPFGPDSDLRRWGLELAKGGKNAKKRALVAVARKLAVLLHKLWVSGEVYEPLRAGKNSKTVAA

SEQ ID NO: 76579 - protein, 453 aa, unidentified
MEILYTHCAGLDVHKKTVKVCLLIQGSNGQPHKEFRTYLTTTQELLKLSDWLHEQGCTHVAFEATGVYWKPIFNLLEGHFEVLVVNAQHIKAVPGRKTDVRDAEWIADLLRHGLLKASFIPSGPQRELRDLTRYRVKLTEEKAREINRVQKTLEDTNLKLGDVVSDIMGKASRMILHAIADGEKDPSRLAAFAVGRVRASQEQLEAALKGYVTDHHRFLLREHLTQIHHLEQAIDRVTAEIIRRFTPPSSPEETASVAEKEDETTPERTSDPSFASPEAPVPPKAALSWAQAVVLLSSIPGISERSAIGILAEIGTNMQQFPTAAHLASWAGVCPGNHESAGKRLSGKTRKGNLFLRCLLVQAAHSASHQKQCYLAEQYRRIAKRRGAKRAAVAVAHSILVIIYHLLSDQTTYLEKGETFFEERDREGTQKRLVRQLSRLGYQVELQPIAQAG

SEQ ID NO: 76580 - protein, 346 aa, unidentified
MKDCTVKGDIKVLGVDLSKSSIQLHGVNESGKPALKKKFSRNKVTAFIAKLPPCLIGLEACGGAHYWVRTFAKFGHEVRMIAPQFVKPYVKSNKNDAVDAEAICEAVQRPSMRFVPNKSIEQQDIQSMHRIRSLLVSRRTAQANQIRGLLMEYGIVISKGIACIRKAIPEILEDAENNLTSIFRELLSELYEEMVHLDERIDTLEKKLQSISLQNKDCQRLLTIPGVGLLTATAMVAAVSDINAFKNGRELAAWLGLVPRQHSTGGKPTLMGISKRGDNYLRALLIHGGRSVVRVADKYKDKRNRWVSELDQRRGKNISAVAVANKNARIAWALLSKNVNYDAAIR

SEQ ID NO: 76581 - protein, 423 aa, unidentified
MKKRIYRRMPVNDFQPDSISSADLGGKLVFAIDIAKVDMVAAIAAADRRVLRIISWKAPHQNRAVLDMLCHFRSQGISVEAVMEPSGTYGDVLRLQLERDGFPVFMVSGKRTFDGRELFDGVPSLHDAKAATIIAKLHADGLSTRLRDEGPDRRQLRAALAIMDLYQERYLQLVHRLESWLARHWPELPTLIELTSSSLMALLARIGGPADVAAAPDKATKVLLGISHRLLADDTVAAVIASAKASVGVPLVGLERDALMAIADDAYRAHRAFTTAKTQVDALAATTPAAALAPAIGHTTAAAVFAEVGDAKSYSCARAFVKAMGLNLKEKSSGKLQGQLKITKRGPSRVRQYLWLAVFRWIQTDAIANAWYQRKKKRDGGRSSRAAVALMRKLAKALFHVGRGAVFDSRRLFDIRRLQISEG

SEQ ID NO: 76582 - protein, 341 aa, unidentified
MAEYVGLDVSMKETAVSIRRDGKRIWRGKCGSDPRLIAEVIRRRAPNVARVVFETGPLSVWFYHALTAEGLPAICIDARHAKAALDMAPNKTDAHDADGLAQLAEVGFFREVRVKGFDSMLGRTLVAARTRLVQITTELSNQIRGLMKTFGLVVPAGKGSRFEAHVRALLADQEGLAPILLPLLEAWRAVRLRAAELGRQLVASARRSEACQILMSVPGVGAVTATSFATAVEDPENFRRSRSVGAWLGLTTRRYQSGEVDYDGHISRRGDTHLRGLLYEAATVILTRTSAESSLRTWGLKLKDRIGFKRAAVAVARKLAVVMHAMLRSGQLFDRTAGMAA

SEQ ID NO: 76583 - protein, 324 aa, unidentified
MIDGILGIDVSKNTLDASVSSRSKGRARSFANSPDGWRHLLDWLITQRVGRVHACLESTGRYSLGIACALNEAGHVVSIVNPAQIRDLARTKLGRNKTDGVDAAHIREYCELFKPQPWAPPSDAHRRLGELQTIRAGIIAGLTEWKNRRNSGMVDAVAQSLADVTISHFTCQLGAVDEAIAQTIDNDSVLRRKRDLLLSISGVGETLAGVVLAELPGPDILRSSAEVVAYAGLNPRQHQSGTSIDRVTRISKIGNAVLRAAFYMPAMSAMRYNPAIVALVTRLKSRGRLKPKQIVVAAMRKLLVLCFGVLKTGRPFDPAIAMGC

SEQ ID NO: 76584 - protein, 385 aa, unidentified
MQKAITYVGLDVHKGSIVVSVAEAGLRGRLQEVREYGKVPNTPAALKAMATKLAAAGNELRFCYEAGPCGYGVQRQLSAMGHHCAVVAPSLVPRKPGERIKTDRRDAAKLAKLHRAGELTAVWVPDPAHEAMRDLVRARLAAVRNVREARQQLSGFLLRNGYHYHRHPWTLLHRRWMADLKFDQPLHYIVLQDCIAAVEASEQRRDRLEARIIAALPEWSLAPLVESLQALRGIALVSAATLVAELGDIARFGNPRQLMAYLGLVPSEHSSGRSRRQGGITKAGNATARRMLIEAAWSYRFPARISRYQLLQQERLPKLIRDIAWKAQERLCRRHRKLMRAGKPKTVVCAAIARELAGFVWAIATEMRPAGKKGTGKLATVVAES

SEQ ID NO: 76585 - protein, 384 aa, unidentified
MTKNSIVFIGLDTHKEFFEVAHELEGRDEQVIHDGRISSAKASVIKMARDFQSKYPQATLHFVYEAGPCGYWIYRLLTSLGHCCYVVAPSLLPKKPGERVKTDRKDAMKLAHLLKMNDIPIIYVPEAEDEAVRDLSRARQTATKDLNHARLQLKGFLLRNNIRYEGTDSWSAKHIRWLNELILPHPAQHIVLQEMLHTIVERTKRLARLVNELEHQVKQWRYYPVVKAVQAMRGVRFLIAASLIAELGDLRRFDTPRKLMNYLGLTPKEDSSGDHRRLGKITKCGNGRARRLLIEGAHAYKHPAKVSTEMQKRQEMLSKEVIDIAWQAQLRLCRRYQRLIHRGKHRNLVVTAIAREMIAYIWAISREIAIAPIDVTKRKSRVPA

SEQ ID NO: 76586 - protein, 400 aa, unidentified
MRSIGMDVHRSFALVAVLDRGKVTEEFRVELDYDAVVAFGQKLRKDDEVILEATGNTSAIVRLLTPFVAKVVIANPLQVKAIAHARVKTDKVDARILAQLHAAGFLPEVWAADDDTLNLRRLVSERAALVRSVRRVKSRVQAVLHANLVPKYSGHLFGKGGRDWLSAAPLPKAERDLLARHLDELDWLKGKLEKLDSAMARIALDDTRTRKLMTIAGINSVVATAVIAAIGDISRFPTPDRLASYFGLTPRVRQSGDRGAIHGRISKQGNAIARTMLIEAAWSAASVPGPLRAFFLRIKDRKGLNVAAVATARKIANLIWQLLTKEAPYRWARPAFVAMKMRKLELRAGAAKAHGPAGPARDYWIKEIRHREMELVAQAEAAYAAMVEAWRDRPPKPQKG

SEQ ID NO: 76587 - protein, 410 aa, unidentified
MIAGIDVHKKMLAVVACDVAEEEWKFARRKFGTRAGDLKVLGAWLAEQGVQEVVMESTAQYWKPVWQQLEGQCHLELAQAQSNRGPRGRKSDFKDGERLVRRYVADELVLSFVPNPEQRLWRTQARTKARWTRDRSRIQNRLEALLEEMRIKLSSVVSDLLGVSARRMLRAIAEGEKDVEKLAAMADPTLRASKETLCDALQAVASLDQRYRTVLRQFLDQVELNEKHIEELDQQLAVSLQPHSDSVERLAAVPGLGVDSAQQIIAEVGPTAEKFPSAGQLSSWVGSCPGEEVSAEESSSDRSPKGNRYMRRILNQAANAAVKAKGTVFEAHYHRVKGSKPKRHNLAIWAVSNRICRLVWKILHHRVPYQEQGHRPNIRAVKKRAAKLLRELKALGYRVHVNAAPQPVPA

SEQ ID NO: 76588 - protein, 416 aa, unidentified
MTDFAAFLGIDWANDKHDLCLLDPATGTRDFFHLSHKAEVLEEFLTQLRRRYPHQPIAVGLEQARGPLLFALLKYDFLTLYPIHPTTLARYREAFSPSRAKDDPRDAEYLAELLHQHRDRLTAWSPDDAQTRTLQMLVEQRRRLVNDRTRLSNRLTAALKAYYPQTLDWLPDLCTEVACDFLSRWPTLTLLQRARSATIEQFFRHHHSHASLLARRLSAIKSATPLVTDQAVITSSTLLVKSLVLQLRATMQAIAAHEQEIEQLCAAHPDFQLFAALPGAGRVMAPRLLAALGTQRTRFKDAQSLACFSGIAPVIERSGHSCWTRWRYFCPKFLRQTFHEYAGESIKFCGWAKTFYHLQRSKGKRHAAALRSLAFKWIRIIWKCWQTRTPYDEARYLAQLKKTNSPLIPLLEAALN

SEQ ID NO: 76589 - protein, 347 aa, unidentified
MNRIPVGVDIAKSVFQVHHLDENTGAIVNKAIKRSAFLDYFANRSPCLIGMEACGGAQHWARRLMEMGHDVRLMPGRFVKAFNIGNKNDSADARAIWLAVQQPGKGVAVKTEGQQAVLAMHRMRQQLVKMRTMQINSLRGLLTEYGEVMGRSRKGLDSAIPDVLERLANRLPTMLIETLRDQWNNLVKLDEQIGVIERRLQTWMRADPSSGRLAEIPGVGVLTATAAVATIGDPRAFRSGREFAAYLGLVPRQSGSGGKVLLHGISKRGDSYLRTLLIHCARSVLVHAKDPGKWIDQLGVRRPPNVVVAAIANKIARVIWAVLAHGRPYERDFRSSGLHGHVESSAA

SEQ ID NO: 76590 - protein, 336 aa, unidentified
MNATTAAIDLAKNVFQVALADTNARVLEQHRLTRAQFERFFDNRKVARVIMEACGSAHYWARVFASRGIEVMLLPAHYVRAYVRRSKTDAADALALLEAARCADIVAVKIKSVEQQSLQALHRIRSLWMGTRTSRINALRGFCGELGLHVRAGARTGLEAMARALADDQSAIPGLLHPLMQQLFDEIRVLETRIAQLERQLVQVARESPACKLLMSIPGVGLLTATAMVAATSGSVAHFKSARYFAPWFGLTPKESSSGGSRRLGRISKMGDTYLRMLLTHGARSVIRAATVAKLKGHELLGVRHWVLQLQARSNHNKGRLRACQQDGPLLLRGVA

SEQ ID NO: 76591 - protein, 306 aa, unidentified
MERIYVGVDVSKDRLDVHVRPAGEAFAVARNGEGLEELNRRLGGLGVSLVAVEATGGFETVVSASLLGAKLPVVVVNPAQVRSYAQALGKRAKSDPIDAEVIARFAEATKPEIRVLPDEQTQALADLVARRRQIVQMIAAERQREKRTRLRRVLRSIKNVIAALEKALNDVDQQIDDSIRSSPAWREKENLLASVPGIGPVTARTLLAEMPELGRLDRREVASLAGLAPWTRQSGKWKGKSFIGGGRHEIRTALFMAALTAARHNPVLKVFHQRLIAAGKPKMVALIAVARKLITILNAILRDKRP

SEQ ID NO: 76592 - protein, 420 aa, unidentified
MSVGWVWRSQLPVSHASKLLFSFGWQSPNQGGILWVIQRSHTTIIGIDVSKNFADACAVSAQGEVVLETKIFYDSVGLQHFLKQLDQLTGEQRQCTIAVMESTAHYHRILEAYLRRSGIDVVVINPLQSGSMKNLEIRKIKSDRTDAKRIAQLYLFKMLRGNAVDSILVGALKDLTRQRSDIISERVKFSNKLTALLDQGFPGFRKVFSSLRTKSALAVLARFPGPEEICGANRVDIEETIALAAGRSTKSVYAVKKTNYLLDIAEQAMQLRVERGSFKTLITLFAEMLIQIQRAAGQIERQIFEIAQRDRTFWSQVKLLTSIPGIGQYAAVVILAEIGDFSRFKKAKQLVAFAGIDPAVKQSGTSTYKHNKISKRGSPYLRKILDTCTHVAAHRGKNQKPANPILLLLKNNLEKRCRKW

SEQ ID NO: 76593 - protein, 395 aa, unidentified
MILSMDLGKFNTVCCFYDTANHKYRFETIQTKRNHVDHVLGLEHVDLVVMEACGPSGWISDLCHEKELKTIVCSTNDEAWSWKNTKRKTDRDDALKLAKMAMMDSLTPVHVPNPEIREQRAIIKYRKTLDQRINRIKNTIRSLFVNHGIEIDTGKRAWCLGRQHIDGFRKSISDCDPNELWKAELDLELQQLDDLIEKMKAVEDRLEKFAKGNPHIQRVMTIPGVGRKTAEALVAAIDDPHRFKNARHLSSYLGMTPKQYQSGETDRSGKISKRGPRLLRTMLLECAWASTRYNQWSKLTFARIHGGSKTRRKKAGIALARRIGVVAWAMMRDEADWDSTKLLPEVAPEEVTLKVKRPEVRPAGELHAEKPKRPCTPRRKRKPRRGSARRAPVKT

SEQ ID NO: 76594 - protein, 422 aa, unidentified
MSKTGLYPLHNLILRSDKFINMNAVGIDVSKGKSMVAILRPYGEIISKPFEVKHTVSGIRSLIEQIQSIDGESRIVMEHTGRYYEPLVRELSKADLFVSAINPKLIKDFGDNSLRKVKSDKADAVKIARYTLDSWTELRQYSLMDEIRNQLKTMNRQFDFYMKHKTAMKNNLISILDQTYPGANTYFDSPAREDGSQKWVDFSATYWHVDCVRKLSLNAFIDHYQKWCKRRKYNFSRSKAVEIYEASKELVSILPKDDLTKLIIKQAVEQLNTASQTVEQLRTMMNEAASKLPEYPVVMAMKGVGKSLGPQLMAEIGDVSRFTHKGAITAFAGVDPGVNESGSYEQKSVPASKRGSSTLRKTLFQVMDVLIKTKPQDDPVYLFMDKKRAQGKPYYVYMTAGANKFLRIYYGRVKEYLSSLPE

SEQ ID NO: 76595 - protein, 382 aa, unidentified
MKYVGVDLHKHLIVLCVTVVVAGRPKVVKRARLRCDESEAIRAFFEELGPFQVVVEATAAYEWFFLLIENLADRLVLAHPKKLRVIAESTRKSDKIDAEVLAIFLALDMIPQAYRPTPRIRQHRVLVRHRCWLQRRITSLKCKVRNVLGHYNADIFGLFTRKGEEYLAKVALSPADRFVVQALREQLALFQRQLHDADEQLQQFAKTGPLAEREARAILDSVEQVGPVTIDVVLSELGDWRRFRSQKAVTAFGGLDPGFRRSADKCHELHISKEGSRLLRWAMIQAAWRLCVHSPRWRAMLERLDANTGSKKKAIVGVARHLLCMMFAMLQSSRPYEVIGVPNGNQRAAEPAKAKTSARARQKGGRPFAPSPSRRPRRCAVG

SEQ ID NO: 76596 - protein, 376 aa, unidentified
MLSFYGAILVPKPHRKESIMYINKISHNESKEQTKFYIGIDVHKKNWAVTIRTLGMELQTFSMVPSPKDLAKHMKRRYPDGLYVSAYEAGFCGFWIHHELVAHGIVNRVVHAADVPTTNKEKVHKQDKVDSRKLARELENGGLNAIYIPSSEHQQLRTLCRSRKSCTEQSTRIKNRIKGNLAYYGIALSDSETTRHWSAAFIHDLEGLCVEDTAQSASLRFLIEELKEHRFRLSRITRELKRFCKKSGYAKTLKHLLTVPGLGFITAATLITEIIDINRFKKIDDLCSYVGLVPSTHSSGDKQRINGLTPRKNKRLKHLIIEAAWVSIRKDPQLLETFSGLIKRMTKTDAIIRICRKLLNRIRYVWKNQTDYAMAF

SEQ ID NO: 76597 - protein, 337 aa, unidentified
MLYVGLDAHQKRSSLCILNQDGKVVKQEQVNGPWPMVVDRLGKLDQPFRLCFEASCGYGYLYDRIAKLPMASQVTVAHPGQLRLIFKSKRKFDRVDALKIGKLLYLDEVPRVHVPNLDVRGWRKLIEFRQTLLGRRTAVKNQIRAMLRGNAIPAARWQWSKKAIVALRQVELPTDAEKLAMDLAIEELSELTAKVKRVEKELAKIAAGHPGMTLLMTVPGIGIRTAEAFLAYVDDVRRFARGRQVGAYFGLVPCLDSSAGKGRYGHITGDGPPTVRKLLCEAAWIAVRRDPQVKARFERIAGDDPDRRKIAIVAIAHYLARVMAAMLRSGEVWRKPA

SEQ ID NO: 76598 - protein, 339 aa, unidentified
MDEYIGLDVSMKETAVSIRREGKRVWRGKCASDPQALAALIRKHAPAAKRVVFETGPLSVWFFHALTAEGLPAICIDARHAKAALDMAPNKTDANDADGLAQLAEVGFYREVRVKSYDSMLSRTLISSRTRLVRIGTELSNQIRGLMKTFGLLVPSTKGGRFDDQVRRLLADNEALARIILPVLEAWRSVRLRAAELGRQILANARQSTDCQLLMSIPGVGAITASSYVAAIEDPANFKKSRSVGAWFGLTTRRYQSGEVDYDGHISRRGDAHMRGLLYEAATVLLTRTRGESDLRTWGLKLREKLGFKRAATAVARKLAVIMHAMLKSGELFNKTAAG

SEQ ID NO: 76599 - protein, 360 aa, unidentified
MSQEVAVVFLGVDWAEEHHDACLLDERGQVLGRARVANSLEGVSRIHALVADHAEEPEAVVVGIETDRGLLVQALVAAGYQIYAINPLAVDRYRDRHSVSGAKSDAADAKVLADLVRTDRSNHRPVAGDSQQVEAVKLLARAHQALVHTRQRQVNQLRSALHEFYPAALEAFKDDLGGRDAVAILEYAPTPSRGRSVSQAKLISALRKAGRERNLKARAVELQGILKQPHLEQPATLVAAYELIVRSAVRMIRELNAQTTELEDELTKSFELHPDAELYLSLPGLGFVLGARVIGEFGDDPNRYLDAKGRRAYSGLAPITKASGTRHVVLARNARNRHLADACYLWAFASLNASTGAHRY

SEQ ID NO: 76600 - protein, 362 aa, unidentified
MTTANRNRSDDASAQGLRLDRGEVVHVGVDVHKATYHVAVYSTARGVLATWAQPARADVLLGRLRPIRRHVAAVVHEAGPTGFGLARRLRGDGFPAQVIATSLMLAPVSPEAKTDRLDCRRLALHSAKGLLKPVRVPTEQEEADRQVLRLRERLVRKARTARQQIKGFLLQHGVDEPDGLGHWAARAVEALRRLELPPELRFCLDVLLDELDHARRQVARATERLKALARSDRHRASAAVLRSVPGVGLVTSMTFHLELPEPGRFGRGGQVARMAGLAPQVRQSGPTRREGGLMRSGNARLRTALVESAWRWVARDEAAAAVYRRLVSNTGSGKKAIVGMARRLGVLLWRLSTRGEVYRTAA

SEQ ID NO: 76601 - protein, 345 aa, unidentified
MDEAYDGRQVVGMDLHRRRSVLVRMSMDGRKLETVRIGNSPGALRAVLARCGERPLVVLEATYGWYWAADVLAGAGAEVRLAHPLGVRAFSYRRVKNDERDAADLADLLRAGLLPQAWIAPPEVRALREVVRYRHKLVGQRTSCKDQVHAVLAKLGVPVTHSDVFGTGGGLWLDQLVLPEPYAAKVASLRALTGVLDGEIARLGQRAAGVLGADPGYAALRELPGIGPVLAAVIIAEIGDVTRFRRAGQLCSWAGLTPRHYESDTKVIRGHVSKQGSKMLRWALVEAIQHQPAGTRPRQARDAIIARRGKEARNIAKTAAARVLLTQVFYALRDGHVRSAGRPAA

SEQ ID NO: 76602 - protein, 346 aa, unidentified
MMIIGCDFHPSWQQIAWIDSETGETGEQKLVHASGDVQKFYGQLAAPALIGMEATGNSQWFIELVEDMGHEIWIGDAAQIRASYVRKQKTDKRDAAHILRLMMEGRFPRLWMPDREQRDLRQWVLHRHKLVEIRSRVKNELQHLALNKGMQRKAKLWSQAGQKMLRELPLKPWAACRREDLLGLLAMLDQQIGQLDTAVAQAAEENPQSKLLMTQPGVGPNTALAYVLTMGDVSRFGRGKQVASYLGLIPREESSGGRQKLGAITKQGNRMLRSLLVEAAQIAVRYDPQFRQQYLHRCHQKPKGVAKVAAARKLAVRLYWMLRTHVGYPEIVRIESSPRVALVGAS

SEQ ID NO: 76603 - protein, 426 aa, unidentified
MNRQEAIVAWVGIDWADESHQVCEYEVGTGNKQIYAVEQNAESLQEWINQLRIRHGSGKRIAVVLEQARGGLIYALMSTDFIEIYPVNPQSLAKFRKALYPSGAKSDPVDAELLEEMVRQNPGRFRAWVPGDAQTRSLQLLTEGRRKFVDDMTALTNQLTSALKTYYPQALDWAGELSREQACAFLEKWPTLSDLQKTRAFRIREFYQKYSRPEREALDQRVRQIEKAQPLTQDPAVVMAGVMMVRTLVGQIEPLRAAVEKYDVEIARIFQQHPDRAVFESFPGAGKVLAPRLTAAFGADRDRFEAALEIQEFSGIAPVTERSGKTIWVHRRWACPKFVLQTFHEFADQARKFCAWSKLYYQQQRAHGKEHHAAVRALAYKWIRIMFRCWKDHKPYDDSRYMKSLVQRGSPLAAGWSQQPVRSVEI

SEQ ID NO: 76604 - protein, 437 aa, unidentified
MGNYAGVDWASQKHDVVVQDEAGEELLAASFAHDEKGPRSLCRALVRMKVTLVAIERPDGLLVERLLDAGLRLLPLHPNQVAATRARFRAAGGKSDRFDAFVLCELARTDHHRFRVLEPDSDQTKALRTLTRAREDLVQTRVALTNQLRAELERFWPGPIGLFSDLDNLTSLAFLRRYPSPADAHGLGEQRLQTFLTRHRYSGHKPASELLAKLRRAPEGRAGELEGQAHRAIVLSLVAALEPIVTQIKQLEQQIATAIREHPDGEIFLSLFRSPRSVITAATMLAEIGDCRARYPTRDALAGDAGQGAVALESGKRKVACFRWACNKRLRDAFDTLADSSRHHNPWAADHYARAIGRGHDHPRATRTLGRAWCRVVWSCWQARTPYDPARHRALQQHAQVTVPTPSGPVPDTAATQRMLGVAVTQRADRKVRAQRA

SEQ ID NO: 76605 - protein, 319 aa, unidentified
MESTSHACVGIDVAKDSLDVCLLPTERHFTVANDDGGFRQLVDQLPPAGTCLVVLEATGGYQRRVMAALAVAGHTVAVVNPRQVRDFARGLGILAKTDRLDARVIARFGQQAQPRPSEISSEKQAAFRELVTRRRQLVEFRTAEKNRLETAAAKTVRKNIRHMLEQLDKQIRQLEEEIGQLIESDAALASKAALLGTMPGVGPVTTTSLLVELPELGHLNRQQIAALVGVAPFNRDSGKFHGRRAIWGGRAAVRSVLYMAALTARRSNPLIREFAQRLEAAGKPFKVVITACMRKILVILNSMIKSNLPWNPQLQPLCG

SEQ ID NO: 76606 - protein, 353 aa, unidentified
MRYIGVDLHTNSFTACYLEQEKPEYIKTFRLQDLGNFIKNLQETDEVALEATGNSCFFYDEVSPYVKRVVVVAPLQFEVIRRSVNKTDKHDARAIAFFLSKDMLPEAKCKSKQCQQLASLLKTRDQLVKSRVSLINKIHGLFNYHGIKIKKEVLTIKAGFECSLGKHDWSHLEKVEIEVISSNLEVIRESLKKLEKEIIAFAQQLPGFNNLISIKGIGAISAAVFVATIGDINDFSNPEKLTAYFGVVPRVSQSNQQCTIGRITKRGSKIGRTSLVQCTWIAIRYSPYLKSFYERVKKSVVLLRLLLLLLGSFSQLFSILLKTTGFSKILQNMKFLIDNNHRRNIYELYNQTK

SEQ ID NO: 76607 - protein, 321 aa, unidentified
MLSLPIVLRSEVMSIHVGIDTGKSMLDVGFYPGERCERFANTAEGHRALLHVLAPLDVPHIAIEATGGYERGILDALAHAGYCVTRLASHRATAYSRAMGRFAKSDTLDARILARMAANITPQPYEVPSSERAELAELVRCRLQMVSQRDDNGRRLKQARLDAARQALQGMIEAASTQIRELDRRIAKATKAVDPASRLREVPGVGPVVEATLIAYLPELGRLTRQQIAALVGVAPYVDQSGCRDGARRVRAGRWIVRRALYMAAWAAVRAKGSALGERYRALRARGKVAKVAIVACMRCLITAINAMVRDQAGWRHAAAA

SEQ ID NO: 76608 - protein, 333 aa, unidentified
MNQKYFIGIDLSKEKIDCAIILQDYSVFLEQVVKNQDAKIKSFIQAFIRKAKCNLSDVFICAENTGIYGQPLKRVCVDLGVDLWIETPSKIKRATLDIRGKSDRMDAQRIADYALRYYDRRVLFAESSADIEELAAIAKARETILAQKVGIENQLSEAKSHDPRLYKKLQSLYRAALRTFNRELQKMEKQLTVVLKKNKEMNKNAELLMSIPGVGKQVAVQFIIHTNNVKNFDNAKHLASYSGVVPFLNESGKLIKRPRVSKMANLKIKTMLHMAALSAVRTKSELKEYYIRKVSQGKNKMSVINAIRNKLVHRIWAVIERQTPYEWEVENNF

SEQ ID NO: 76609 - protein, 445 aa, unidentified
MSNAVAAAPSEPEWAAFAAIDWADQKNFWRLLPAGSRQSEAGQLDSTPEAVEVWAANLQQRFGGRPIAVILEQTRGPLVYMLTKYPHLVLFPVHPTTAARYRETFAPSGAKSDPSDTDSLLDLLLRHRERLRPLRPDTVETRLLHFLVEERRQTVDEKTRANLRLTDCLKLYFPQVLRWFDDVTSPLVGDLLERWPTLEQLQRVHPGTLRRFFQEHNCRGEEKNAERMAAIQQATSATQDQAVREACVLIAHSLVAMLATLRAQIDVFDKRIAELVANHPDGALFRSLPGAGDALVPRMIVAFGTQRDRYQSAYEMQCYSGIAPVTEASGNSQWVHFRFICPKFLRQTFHEFAGCSIQRSEWARAYYDHLHNDKNKSHQVAVRSLAFKWLRIIYRCWKDGKPYDEAIYMQSLRRRGSLLAGVLGTPTGVGWKSVAGFQKLSENNA

SEQ ID NO: 76610 - protein, 455 aa, unidentified
MMEGALATRNRSFSRQALELTHPNAAGIDIGSASHFVAVPPDRDDEPVREFASFTTDLHRLADWLRDCGVDTVAMESTGVYWIPLFELLDARGFTVLLVNARHVKNVSGRKSDVLDCQWLQQLMSYGLLRGAFRPDDQVCVLRALARQRATLLKTQARSVQHMQKALVQMNIQLANVIADVAGASGQAILRAIVAGERNPYVLASLKNCRVRATEEEIARSLQGTWRAEHLFALRQALDAFDFCGKQLAQCDEEIEAQLQRLHITAVEPDKGKKRSKARNAPKFDLRTRLFQMCGVDLTRIDGIDVTTALVVVSEIGTDMSRFPTDKHFASWLGLCPGTKITGGKVMSSKTKRCANRAAQALRLAAAALRTSQSALGAYFRRLCARMDKPKAVTAAAHKLARLIYSMLTKGEEYTDQGQAYYEERYRQRVLHNLNRRAQQLGMALVPTAPAVQTA

SEQ ID NO: 76611 - protein, 341 aa, unidentified
MNTTTYGLDIAKTVFQLYWVEPSGKCFNRRFSRAKLLEFLANRESGRIALEACGSAHWWARQLQALGHEPVLLHARYVRPFVQTNKTDAADAKAIWTAAQQPGMPIVAPKTESQQCVLGLHAMRQLRVKMRTMLVNQLRGTLFEFGIRIRPGLRAGLQEIVQRMDELEQNVPPLLFEFVREQLQSIERLDQEIARLDQRIDAWGRQNRACKTILAIPGIGMLTATAMIATIGDAHTFKSGRQLAAYLGLVPKQTGTGGKVWLSGISKRGDPYLRTLLIHGARVVLSHLCRKNQPGWSLMLAQRRPKNVAAVALANKTVRTIWALLAHDRAYDRDYVSVRPA

SEQ ID NO: 76612 - protein, 343 aa, unidentified
MKITRVGVDLAKHVFQLHGVDRSEQPVWCKRFRRERWIGELENAVEPGAEIGMEACGGAHHWARLLQGKGYIVKLIAPQFVKPYVKSNKTDATDAQAVCEAMSRPSMRYVAVKTIEQQDIQAVHRVRAALISERGAKANQLRGLAYEYGLAAPREISALRRVVPQWLEDAGNGLTVRFRTLLSGLYEDLQTLDERVHELDQEIRAVGRENEAVGRIEQLRGIGPLIASALVAMIGDARQFKNGRQVAVALGLTPRQHSSGSKERLLGISKRGDSYVRTLLIHGARSALRTAPGKNDRLSRWALELAQRSHPNVAATALANKMARVAWAMLRHGTAYEPHGLAA

SEQ ID NO: 76613 - protein, 538 aa, unidentified
MATFHHSEQAGSVQGRSGNGSRKRARARNRETVGTPHGVIHPRVQMVGPDHFGIVAVDCAKARSKWMLADFYGNVLVAPVEVEHNRLAFATAVARLREAIARHQIADLIVAVERTGRYHHVPQRAFRDAGFETRVVHPFTSKQYRQPADPDNKTDDTDLAAIVRAGAGGFALAEPEWDEAERELQLVVRQRRDLVGKCAALQCQMREHLDAALPGYAACFDKLWESPVALPLARRAGSAEAMRSLGHDAIVRWLRERKVRFFDRTIDRVLAWAARAAAPDQAAARHAAIAWTLDDDRVRKTLEIQALERDLAARVARTPYILLLSLPGVNIVSAADCAGEFGPIRFYTSGRAITGRAGLYPSRYQSDRVDRADGPLVKRGNRALRAVLLGVADNLLMCNRYFRTLAASWKAAQHDPRLIHTRVAMRFARIAYHIVAGRQVFAHPATRERGYILEKLIAFHQEHDTPMNQVLADLDAAVTQLPPTAHAAEAVPLARELDRIRSGRRRGPQPLAEILPAVLARLGAITVQSATSGGATPA

SEQ ID NO: 76614 - protein, 356 aa, unidentified
MNKRSKLNFSGQPIYIGLDVHKKSWSVSIFSEQGEYKTFSQTPKAETLVQYLQHHFPGAQYRSVYEAGYCGFWVHDQLGEQGIQNIVANPADIPTQDKERRNKRDRVDCRKLARGLRSGDIKGIYTPPRWKLEDRSLIRTRLSMGRKQGRCKNQIKSILLFYGVEIPEQREIGHWSRRFIRWIEGIQMERTSGNIALKIHLEELCHLRQIIAKLNRAIVALARTDQYRSWISLLKTIPGISTLGAMILLAELYEITRFRSIDELCSYVGLIPDTHGSGEKEHVGGITQRHHSYLRWLLIEASWVAVRKDPVLLESFQEYCKRMRKNKAIIKIARKLLNRIRYVLKNQAEYVAGVLE

SEQ ID NO: 76615 - protein, 326 aa, unidentified
MQGKEASEQETKAKCNVGIDVSKCWLDAHVLPAGEALRVANGCEGIRKLKRWLKRFEIALVVVEATGKWHRPLRRSLDASAIPVAVVDPYRVRMFAKAQGIFAKTDRLDARVLALFAALLAPPIRPPAPAALEELKELVVARASAVEQQTALKNQLSAAEGAFLRRHLTRRIARGAKDIAALEGEILKRITADKGLARRYAILTSIPSFGPVVAASLVAGLAELGACTSKEIGMLAGLAPIADESGQRQGVRVIWGGRASVRRILYLAAVTAARVNSDMRTFYQRRIADGKPVKVAIIAVARKLVVLANALIAQDRTWELQAPKHA

SEQ ID NO: 76616 - protein, 413 aa, unidentified
MALKIVYPICCGIDVHKSFVVACIASTSKGVTTYKRHRFSTYTKGLLELSQWLCENDCQDVCMESTGKYWIPVFNVLEDSCNITLAHPKYVKAIRGKKTDKKDAKWIADLFKHDLVAGSFMPPLEIRQLRDLMRYRFKLTNFMSSEKNRLQNSLTVSNIQLGNIVSDTFGKSSMNIIEKLLKDPLDTSFDLEPLIHGSMKHKLPELELAIDGYITSEQAEKLKVIKQHYEDLGARKADLEKIILSLAASYHDEINLILTVPSFKNIFSAIAVVSEIGVDMDVFPTAKHLCSWAGLTPTNNESAGKKKSVRISRAGCYIKPLLVQCATAVVKSEKHPEIRNRYLRLRKRRGHKRAIIAIARMLLTAIYNILKKKEAYNAELYLKSDVLPVNREITVEQAILLAKNHGYHVLEAS

SEQ ID NO: 76617 - protein, 346 aa, unidentified
MMIIGCDFHPSWQQIAWLESETGETGDAKLVHAAGEAKQFYAGLTKPALVGMEATGNSQWFVELLEDLGHGIWIGDAAQIRASYVRKQKTDKRDAAHLLKLLLEGRFPKLWTPDPEQRDLRQLVLHRHKLVEMRGRVKNELQHLSLNKGMQRKRTLWSQAGLQLLRELPLKPWASCRRADLLRLLALFDDQIGKLDEAVQQAAEQHPQAKLLMTQPGVGPNTALAFVLTIGDVARFPRGKQVASYLGLIPRERSSGGRQRLGAISKQGNRWLRCLLVEATHNVVRLDPGFGKQYLHHCHQKPKGVAKVAVARKLAVRLYWMLRTQVGYPEIVRIESSPRVPLASAS

SEQ ID NO: 76618 - protein, 337 aa, unidentified
MKFSGIDLHSNNAVVAVIDDQDRVLYCKRLTNDLGLIVAALAPYQAELEGVVVEATFNWYWLVDGLMAAGFAVHLANTAAIKQYEGLKYAGDERDAVFLAHIFRLGLLPEGYIYPPQERALRDLARKRLQLVQQRTLHILSIESLLARQINLRMNGEHIQRMDDAAVHALALPPHVERAMMANMAVLRTLRSEITALETILHQEAQLRPEFETLKSTPGIGNVLAATIMLETGTITRFADVGHFSSYCRCVDSKRISNGKKKGEGNVKNGNKYLAWAFIEAAAAALRCCPQARRFYERKKAKRLPVVAMKALAHKLARAAYYMMRDGKPFEVKRCFS

SEQ ID NO: 76619 - protein, 450 aa, unidentified
MSKLKPKSQSLPVINPNAAGIDIGGRFHVVAVPPDRSDKSVQTFKAFTGDIHNMARWLTKCRITTVAMESTGVYWVPVYEILEEHGFEVVLSNARDTRAVPGRKTDVGDAQWIQRLHACGLLKASFRPDATIAELRTYMRVRERMLDYAAAHIQHMQKALTFMNVQLHIVVSDITGVTGMKIVRAIVAGEHDPAILAKFRDPRCKADEQTICAALKGNYQPEHLFALRQAIILYDVYQRQVNECDVQIEAVLDRLCINSSEPDEPIPKPKHRAKQANAMTFDVREKLYRLIGADLTQIHGIGPFLALRLISECGTDMNKWPTEKHFTSWLTLCPGSKISGGKVMSSHSRKSNNRVVAHLRLAATTVGRSDTALGAFYRRLSSRIGKAKAVTATARKIAILFYNAMKYGTKYKDPGAEYYEERYKERVLKNLKRQAERMGMTLQAKEECVS

SEQ ID NO: 76620 - protein, 346 aa, unidentified
MRFYNRQHRHYCGIDLHVKTMYVCILDAAGQVLLHRNVPSTPEAFLEVVAPYREGLVVAAECMFTWYWVADLCAAEGLVFVLGHALAMKAIHGGKAKNDKIDSHKIASLLRGGLLPQACVYPAAMRSTRDLIRRRLHLVRKRGQLLAHIQNTRAQYNLPVFGRKLAYRTNRAGVVEHFPDPSVQKSIAVDLALIDQYDALVIDLDLTIVREAKRHNADAFHRLRSVPGIGKVLALTILYEIHDITRFDRVQEFASYARLVKCKKQSGGKTLGTGGAKMGNVHLKWAFSEAAVLFLRHTEGKKLIARIKKQHGKGKALSILAHKIGRAVFYMLSRGTVFSMEKFLAA

SEQ ID NO: 76621 - protein, 342 aa, unidentified
MQIAILGIDLGKNSCSVVGLDVAGRVVLRRRLRRDGVIKLAAGMPGCVIAMEACCGAHHLGRLLREHGHQVRLMSPEYVRPYVKAQKNDDRDAEAIAEAATRPTMRFVELKSEAQLDMQSLHRARDRLVGERTALINQLRAVLLERGIVVPQGRRKLERYVDALLAEEEIRFSPRTRLLVEDLRAEWRELDRRISAFDDEFAAQARTDETARLLTSIPGIGPLNATALTAAIGNAQTFGRGRDLAAWLGLVPKQVTTGGKPKLLGISKRGNEYLRKMLIHGARAALPTLSKGETPLGAWLRGLLARAHVNTVVVALAAKLARIAWAVIRSGKKFDMKAATAS

SEQ ID NO: 76622 - protein, 452 aa, unidentified
MAKKSKRRCDTLPVLHPDAAGIDVGASELYVAVSADRDPQPVRSFLTFTRDLHALADWLVQCGIRSVAMESTSVYWIPVYQILEARGLEVYLVNAQHVKNVPGRKTDVSDCQWLQYLHSVGLLRASFRPPGFICAMRSLWRHRASLIQMAAEHVLHMQKALDQMNLQIHRVLNDITGVSGLRILDAILAGERGPLTLARLCHGGVKSSEDVIAKSLEGDYRPEHLFALRQSLAAFRYYQQLVLEADREIQLQLAEMKTAATAQPTTPPPTKATAHYARHYEPRTFDLRGELYRVFGVDLTNVPGISALTAQTILREIGTDVSRFRNASAFASWLGLCPEKKISGGKVLFTKSRRVRSRVATALRMSAQSLHHAKDYLGEFFRRITRKLGRPQAITATAHKLARIVFHLLSTKEAYTESVFHKSEEETIRRAQYRLRRQAAQLGFLVIPAENG

SEQ ID NO: 76623 - protein, 324 aa, unidentified
MLYAGLDLSRQRLDVHVLDEDGRTIEVTAVRPDADALRTLAVHVLRQGQEVSAAIESMTGARFVHDTLEFAGWDVAIADAAKVKGIAPLAAKTDKIDAWVLAELARRDLVPEIWLPTPEVRAERERARFRLHLVHHRTALKNRIHATAAFALPEPWTTTLSTSLRMVDQLGAEIDACERDLRRLGADHASIPLLLTVPGVGWVLAYTIASEIGDIGRFSSPKKLTGYTGLCPLVRQSGNRDVRGPLAKNGPKYLRWALIEAATHAARDAHYRERYERTKQRLGRQRGAKVARVDIARKLAEAIWHILTRNEPFAPAGPTMLLVA

SEQ ID NO: 76624 - protein, 412 aa, unidentified
MRECAMIYAGVDTHKDFHVLVVLDGLGRPVSSGSFSADERGYRQLAEEIGDPSGSTAVGMEGTTSYGAGLCSYLMKTGYAVFEVLRPKREKRRVGEGKTDGIDAEHAARAVAAGKGIVPKSHNGWVEGLRALTVARSIHVNTMTSVSNAIGSLLVSAPERVRTKYRPLKGVGPDRKLGSCRPDAEDDVAGPLPASLKAPARTWLALDEEAGRLEGAKHRIIEAKAPTLLQVKGCGTVSAAELAIAAGDNPERIPSEARFASICGVSPIPASSGKTDRHRPNRGGNRQANKALHMIAVSRMSGDGRTPAYMAKRKSDGKTKREAMRCLKRFIAREVYSTLRHPMRLKYARGEELAAMRKSLGLTQRQIARELGVPNVRLSEIERDVCPREEIRREYDRYLNAKMSANKGLDSL

SEQ ID NO: 76625 - protein, 398 aa, unidentified
MTESSDYESVQVFIGVDVGKDTHHAVAVNRSGKRLFDKALPNDENKLRSLISDLKQHGQILLVVDQPATIGALPVAVARSEGILVGYLPGLAMRRIADLHAGEAKTDARDAAIIAEAARTLPHALRTLKLADEQIAELSMLCGFDDDLAAQTTQVSNRIRGLLTQIHPALERVLGPRLEHPAVLDLLQRYPSPDKLASLGEKKLATQLCKLAPRLGKRLAADITRALTEQTVVVPGTNAAVVVLPRLALQLITLRKQRDEVALEVEQRVLAHPLYPVLTSMPGVGVRTAARLLTEVACRAFASAAHLAAYAGLAPVTRRSGSSIRGEHPSRRGNKTLKRALFLSAFAALRDPISRAYYTRKMSQGKRHNQALIALARRRCDVLFAMMRDGTFYTPAAS

SEQ ID NO: 76626 - protein, 400 aa, unidentified
MTIIRIGLDTSKHVFQIHGVGENEKPVLRRQLRRSEVEKFFAKLPPTRIGIEACGASHHWARLLRGLGHEVVLMPPQYIKAYVKRGKSDAIDAAAICEAMSRPTMRFVPVKTAEQQAALAMLGVRDLLVKQRTMLINAIRGHAAEFGVTVAKGPQQMRELLRRLATGEGVPVLAREMLGVLAGQLEALNAKLKAIETRLMAWHRQDQTSQCLATAPGIGPIGGVSFTLKVPDAKAFRSGRHFAAWVGITPRENSTAGKHRPGKISREGDESLRRLLVLGATAVIQQAKSGRAAPWLLGLLARKPKKLVAVALANKMARIHLGHDGERRDLPASTGGLSPPATDTWREQGQRQQDGNRSIRGSGQPGEPIGAQTSRSCLGPDPRNPSGPAVKPTALQRPDI

SEQ ID NO: 76627 - protein, 343 aa, unidentified
MQTVTTIGFDIAKSVFQVHGVDTIGQVVIRRQLKRRHVLAFFEKLPPCLVGIEACASSHHWSRELQALGHTVRLMAPAYVKPYVKRQKNDMADAEAICEAVARANMRFVPTKNPEQQSCLMLHRTRHLFIRQQTALINSIRAHFAEFGIVAPVGRKGVTELLRVVADPNDKRLPEAARACLAALGTQLLALKEQILEFDRMILTWHRSNQTSKRLHYIPGVGPMLATALVASVADPRTFRSGRNFSAWIGLVPKQHSSGGKERLGSISKQGDRYLRSLFVAGALAVIRYAKIHGTGHRPWLTALLGRRPTKVAAIALANKIARMAWAMMAKGERYKQPAALAR

SEQ ID NO: 76628 - protein, 391 aa, unidentified
MICIGIDVGKFKHCAAVMDDKTGEVLIKSFFFTNDQKGLDLFYSKTKQFLHRKHAVGMEDTGHYMINLTKFLLEKKFTVKYINPRSTALRRKELGMSAKNDRKDALLIAEMLSEKKFWRSVSAVTMQTDKLRELTRLYHQLKEQQNQDMNRLQRALDIVFPEVNTLSWTRYSQSYMQFLSEYPSAASIASEDIRNLRKALEVNGRGRRSKVTAEEIKEAARNSVGDDNTAVALEVQSMIALINTRAEQIDTLDKKIEEFSRQLNSPITSIPGISYITGMTILAEIGDINDFPEAAKLISYAGMEPLVHQSGKYDAAHMPISKHGSRYLRKALYQAVFTVCKYCQVFNDYYTKKRDQGKTYRCAQGHCVRKLLRVIYKLLSTDTVYDSALVH

SEQ ID NO: 76629 - protein, 342 aa, unidentified
MAVVGGMDIHRAQLTFDYVDLDSGEMYRGRIAPADREQLRGWLQRFVGHSEVAFALEGCTGWRYVVEEMQRAGILTHLAEPAETAARRGPKRRAKTDRSDAALLRELLMEQRIPESWIPPQSVLEARALVRLYKDLLDERTGWLQRVHASLFHMGVPELQVTAMSTVGRQRLTEAVLSPATRTAVEVGMRQVDRLAEEMRAVREQIVVLSRRQPACRALRAAHYGVGPLTSVVIWAEMGDCRRFRSSDDAVRHAGLDVTVYSSNGRRSAGHLARQGPVMLRWALYEAAVYAGRPSSPDHAYFAQVKARLDGQLALLSVARKLARRCHHTLRNLGDQVLAPAA

SEQ ID NO: 76630 - protein, 421 aa, unidentified
MTPPNEVVWAGIDTHTDTHTIALLDERGRPLGAETFTADPDGYDRLIGMPPGPGRVAAVGVEGTNSFGAALARRLTAAGYEVREVLRPRRSVRRRDGKSDPLDAVAAARSVMAGDGTSLPKSSDGWVEALRHLNAQRSQLVSAMTAIPDSTNGLLAAAPEPIRERYRGLRSETRMNRLAECRPAGGLVERSVPAALKSAAKAWKALKRQAGLLEERMRLILEEHARPLLDMYCAGAVIAATLAIVAGDNPERIRSEAAFAKLCGVCPIPASSGRTNRHRLNKGGNRQGNMALHRIAIVRLRYHKPTRDYMAKKTREGKGRLEIIRCVKRFIAREAYRALISIRNGEVGRGTPAERGAKLRELRVSRNITQQQIGEALCVPSSRISEIERGARDLPELEQRAIQWIHSTTNPKQHTQTLDNV

SEQ ID NO: 76631 - protein, 357 aa, unidentified
MPSSDVKYIGLDVHKEAIAIAVLNGAGKLLMESIVETKASTVLHFLHGLRGELHVTLEEGTWAAWLYDVLKPHVREVVVCNPRRNALLKEGSKSDKVDARKLAELLRSGMVSAVYHGENGLRTLRELARSYQVVSKDLRRVMDRLKALYRSWGIPCTGTQVYSRRHREQWLKKIREVGVRRRAELFYQQLDGLQVLRRTVRGELLAESRKHQAVTVLRQIPFIGPLRAAQLVALMQTPHRFRNKRQLSTYSGLAVETHDSAQYRYVNGQLQRSKKPQQVRGLNQNHNHVMKEIFKSAALSATGRAGPFQDFYAGLLAKGMKPELARVTLARKIAAITLTLWKKGERFDPGSVKPQAA

SEQ ID NO: 76632 - protein, 314 aa, unidentified
MMKTEESFVGIDVSKDTLDVAIRPEGDRWTVQNDEKGIQALVARLLKRKPTLVVLEATGGLQMPVVVALASAKLPVVVVNPRQIRDFAKATGKLAKTDPIDSGVIAHFGEAVRPEVRPLRDAETQELTDLLARRRQLVDMATAEKNRLNTATKKVRKDIKAHIAWLEKRIKDVESDLSKRIKQSPVWQEKDEILQSVPGVGPVLSVTLLAGLPELGTLNRREVAALAGVAPLNRDSGRYRGTRCVWGGRGDVRSVLYMSTMAAIRWNPVIRSFYLRLMRAGKKHKVATTACARKLLTILNAMIKTNMAWRYDYS

SEQ ID NO: 76633 - protein, 402 aa, unidentified
MNAVGIDVSKGKSMVAIMRPFGEIVSAPFEIKHTASDINSLVELINSVEGESRIVMEHTGRYYEVLAHQLSEANLFVSAINPKLIKDFDNDSLRKVKSDKADAIKIARYALDKWQNLKQYNVMDELRNQLKTMNRQFGFYMKHKTAMKNNLIGILDQTYPGVNTYFDSPARSDGSQKWVDFASTYWHVDCVRKMSLNAFIDHYQNWCKRKKYNFSQSKAEEIYGKAKELVPVLPKDDITKLIIKQAVNQLNSASTTVESLRTLMNETASKLPEYPIVMAMKGVGASLGPQLMAEIGDVSRFTHKGAITAFAGVDPGVNESGSYEQKSVPTSKRGSSDLRKTLFQVMDVLIKTHPQDDPVYQFLDKKRAQGKPYYVYMTAGANKFLRIYYGRVKEYLSSLPES

SEQ ID NO: 76634 - protein, 496 aa, unidentified
MKILDRFLRALTLNIYYEERTGTGKDGRRSVTNLLKKRRMSLRSKIAIGVDIGAYNHSICVMDANARQVYDELFIEESRSGYSQLDNFLRGLLARFEGCEFHLGAEATGVYWRNLFHFLHKEFKQVKLSLINPLQTKRFFQMNLVKTKTDKVDSRLIANYVAINNPQESKLFEHEMEDLSEICRYRKIKLKEYSRYRNYLHKYLKESFPEVLPRLKRFSGKKELAVLTKYPTAKDIRQAEASDIANITYTQRNWKVGTAFAEEIKKQAASSIGCYQGPGVRFSIQSLAANCLRLQAEIEAFNQKIEEIYGKNPSSALVSLPGIGALSAAVIESEIKSIHRFDSPKKLVGYVGCYPEIRQSGTSNLKTPKMTHKGNRYLNTTIFMCVLNSIAPNSGDNIIKSTYYRMISSGKDKMVAMGSCMRKLTHLIFVMLKTQKRYDPDYEFKRSAFDVALIDRRTGLNWDLSKKLTGKSPVVPIRIKRLTLPQRLESPIKRST

SEQ ID NO: 76635 - protein, 362 aa, unidentified
MPTIAQLEPGQVVGGVDTHKHTHVAAVANHLGKVLDTEAFPATRAGYRRLLTWLKAHGDVVAVGVEGCGSWGAGLARHLTSEAVVVLEVNRPNRQNRRRRGKSDPVDAEAAARAVLSGEANVTPKAGDGPVEALRQLRVARTGAMKARTAAANQFHSLGDTAPEPVRATLRPFTFRQRVATAERWRPRPGASVEANARRALASVARRWRALDDEARRLDDDIKAILDELAPRLLARHGVGYETAGQLLVAAGDNPDRLANERSFAALCGASPVEASSGRTTRHRLNRGGDRQANSALWTIARVRMANHPPTKAYVERRTTDGLSKREIMRCLKRYIARELFRDIETIITPLAAGAEGPARAA

SEQ ID NO: 76636 - protein, 501 aa, unidentified
MSTMQSLKNQNSNRRRSVRRATKPSSTSTKRDPKVQHLGIGIDTGRYGHHVSFLRDDKQLAAPAITVMEKAADYDKLKSCLEKLHQRFPNAHLHLRIDAAGQYADNIEAFVRSLDQLPMTVSVGQPKVNKDYHSVVAPKSQTDKTESYAMARYAVVEQPQASYGTPPEFTTLKRIASRLQAQVKQTTRLTNALHEALTCVFTELATLAPNIAADWVLMMLMKYPTAKRIAAARLSSLTKIPYLLPEKALEIQNAAKRTVSKQSSELDEELIQDLVGELQHSLSEEKRRKQLLVKAFNALPKGPHQRIATIKGIGDQTAAAIVATAISIDRFETDRKLVGYYGIFPRELQSGVDKFGRPIPPGKKVMCKQGNDLVRGLLWQCAKCASAANGGNPEVRALYLRRLEAGDTAMCAWGYCMTKLLRQVYGVWTTDTDFDPEYEARRRAARQAAQQAAQQADSANRQDQRESRNRGVGPQGRIRLRRDWKCSHQHPCFDGTRFSFG

SEQ ID NO: 76637 - protein, 351 aa, unidentified
MIVLGADTHKRSHTIAGVGATTGELLGERTVQVGRAGFGALPAWARALGGERVWALEDCRHVSGSLERFLIERGERVLRIPTNLMAETRKSARQRGKSDAIDAVNVARAALREGLATFPAAHLDGPELDLRLLVDHRERLVIHRVELNNTLQWHLHDLWPELELPGGALFSKKWSTRIARRLSRAEQTMRVRIARDELRRLRELTETVKALAREITQLIEQIAPRLLAEPGFGPLIAAKLVGEIAGAQRFATDAKLARAAGAAPIPASSGNTRRQRLDRGGNRQINAALHRVIVTRARCHQPTRDYIERRRQEGKTTREAIRCLKRYLARQVWNLLRAPTPAMALTTPSIS

SEQ ID NO: 76638 - protein, 344 aa, unidentified
METAYDGRQVVGMDLHRRRSVLVRMTEDGTRLGMARIANSPAELCKAIAEAGEAPRVVLEATYGWYWAADVLAAVGAEVHLAHPLGVKAFSYRRVKNDERDAADLADLLRMGRLPEAWIAPREIRELRELTRYRHKLAGLRTSCKEQVHAVLAKLGIPVTASDIFGGGELWLEGLALPQPYAGKVASLRMLAGELAGEITLLDAVIASLLEQHDGYHAIQALPGIGPVLGAVIVAEIGDVRRFKKAGQLCSWAGLTPRHRESDVKVTRGHITKQGSPILRWAMIEAIQRLPADTPVRARRDAIIARRGTQARNIAKTAAARHLLACVFYALRDGHVRALDRQAA

SEQ ID NO: 76639 - protein, 366 aa, unidentified
MSSVTPAAGPIHLGMDTSKNTIVVGILMPGDEVPVIDRIWNEEGSVRHLVSRLGDPAALRACYEAGPCGFELHRLLASMGVACDVVAPSLIPRRAGDRVKTDRRDASRLARLHRAGELTPVRVPSAAEEAVRDLVRVRAALLADRKRAQQRLTAMLLRHGRVWRSGSSWTQAHEQWIAGQRFEEPALAAALAHYRAGLDTRRAELDAIEAELAPWAGREPLAGPVARLGCYRGIAELHSLALAAEVVDWHRFPSARAFMGFTGLVPGEYSSGDKTRRGSITKAGSEPVRTALVEAAWAYRFKPAIGVTLRRRQRGAEPGTLARSWKAQRHLHAKYKAMTARGKPQALAVTAVARELAGFVWAEMTS

SEQ ID NO: 76640 - protein, 512 aa, unidentified
MIHALQGVVEVSEIESIVEQLPAPLATPVQEASPVQANLDLVLRAEGKRWDDPIMAIDVHKEPLAWAVATPEGIEDEAMTENNTGGIGTVIAACRNHGVKMVAMESTSEYWLLPYWLLTEAGIPVLVANPLQVKAVMGVKTDKLDARRIAFALRDGRLRPSVACTREEYALRKDMRQLVEQVEYATQCEQRIQQIFHKADVPDLVGNAMNSQRGRSILVSVTGCRTRDELLGVVTAEYSMYKGRITDPVELEIVTDTYWDFSNRVRANGDMERLAMELDSFLAHEDKALVLERNGIMYAKQHPAFLQDLKYLLTFEGIGRRTALPILAELVNIRYFPTAAKLAKWTGLVPGVYQSGHRKRANGKIYKGGNKYLRRAVWLVAQRCFGMRENIIKQFIQHLIRDKHKSKMVAITEGAHKVLTIIHAMLTRQEPFTVIANEEVIKRQERNTKRKWSEVERMMMGLAEEEIVPRLVPRLKARLEACTNMERIVAELAASLLGNIDADQIVSEPGGG

SEQ ID NO: 76641 - protein, 423 aa, unidentified
MEITGLPTPVFCGVDWAEDHHDIALIDAGGKQLAKARISDDAAGFAQFIALLTEHGDSEDAPIPVAIETSRGLLVACLRATGRPVYSINPLAVARYRDRHSVARKKSDAVDAAALANILRTDMAAHRPLPKDSELVQAIAVLARAQQDAVWARGQAHNKLRSQLREFYPAILDAFAQHKHGLCSREARSILTAAPTPTMAAKLTRRRLQSLLKQAGRVRGIPAEAERLHEVFKRDYLHQLPRVEAALGHQTSALLRQLNTACDNADQLEEAVTQAFDEHPDAPVIRSFPGLAALTGARVLAEIGDDRARFANAGSLKAYAGSAPVTRASGKSCKVMSRKVKNQRLAAVGYVWAFVSLTKSPGARAHYDRRRAAGDRHVAAQRNLFNRFMGMLFHCLPCPPRPRPDGSVAFRGGGEHASGPSPR

SEQ ID NO: 76642 - protein, 352 aa, unidentified
MPRLKCVCIFNRNLEGEVMDNVTTVGIDLAKSVFSVHGVDAGGLVRVRKTVSRSKLMELVARLPPCVIGLEACSGAHEWARRFGAFGHEVKLMAPKFVAPYRRGGKNDGNDAEAICEAVSRPNMRFVPTKSQGQQAVLTLHRVRQGFIEERTATINRIRGLLSEFGVVLPQAPIQVRRGAEAKLEELPTLAAGALRDLLAHIRILDERVCRYEKQLEQHARSDERAQRITQLSGVGALSASAIVASVAEAREFDSGRQFAAWLGLVPRQYSTGGKTRLGRITAKGDPYLRTLLVMGARSVLQTASRRSDHLAKWALAVRERRGYHRACVAIAAKHARIIWALLAKEQPLKLA

SEQ ID NO: 76643 - protein, 347 aa, unidentified
MKDVTTIGLDLAKQVFQVHGADADGAPLFNRKLRRAEVLRFFEKLPPCLVGMEACASAHYWAREIAVFGHNVKLLPPQYVKPFVKRGKTDAADAEAISEAVTRKTMRFVPVKTAEQQAAVMVLKTRALLVRQRTQTINALRAHMGELGIIAPIGIANVKALAVIIRDEADSRLPPAARFALTEMVDQIELLASRIERLEREIVVQARRDADMRRLATIPGVGAIIAMAIKALVPDPGGFKSARHFAAWIGLTPKAHSSGGKDRLGRISKMGNSELRSLLVTGAASVLRHVRTDDKARPWLKDLLGRRPFKVVAVALANKTARIIWALLTRGGVYRNPMETRANEIPA

SEQ ID NO: 76644 - protein, 341 aa, unidentified
MYKLFIGGDTSKEKIDFAVFDGSNYLLIQEVKNTKENLRKFLEKIENLTCGSDDKVNKPDLVFAFEYTGIYNNLVLSILLGNGHKIALIHPGVLKAVVTIDRGKNDVFDSKRIAEYACRFEDKLHFVKVGNEDISLLKTLLNHRQKLVKQMSQLKADQDDNKKFLDKKVINYLNKNTFGVIKALQKAIEETEAEIEKIIKQNVELKANYDLIKSVPGIGKITSAALIVYTENFTKFDNAKQLGSYCGVVPFQRSSGVFKGKSKVSIKANKSLKTLLHLCALAAIRGKNHFSEYFERKVNEDKKNKMSVLNAVRNKILKTAFACVQNKQKFDKSFVYGEQAA

SEQ ID NO: 76645 - protein, 400 aa, unidentified
MMTPDDIDVWVGLDVGKSAHHAHALDHDGNTLYDKPLKQDEKAIRTMLGKLSKHGRVLLVVDQPNTIGSLPLTVARNMGIAVAYLPGTAMRRTAQLLPGDAKTDRRDAHVIAWAALKLPETLRDAGPDDETLAALKLLAGHDEDLAHESTRHVNRLRSLLLQTHPAFERALKGERITRDATLALLERYGGPMGVKRAGIEDVKDWAKSNGLRAGRIIDDMFKAIGEQTVTVPGTLMAETIIPSIAHDIKTIRDRRREVGRQVEKLLEDHPLLTALTSMPGIGVRTASNILLGIGGDIANFKSSAHLAAYAGISPVTGQSGTSIKGERPSRRGNKRLKNALWQTAFVASTKHPPSVAYYKRKREQGKHHNAAIICLARRRCDVIYSMLKNGTLYQEPALVA

SEQ ID NO: 76646 - protein, 409 aa, unidentified
MEQLIERVGGLDVHKPTVAACVRMPGVKGTREQHVRTFGTTAAELLALRDWLEALGVTQVAMESTGVYRKPIYYVREERVTCLLVNPAPMKQVPGRKTNVQDCAWIAQLLEHGLLRGSFVPPAPIRELRDLTRYRKVLIQDRTREATRLHKFLEDAGIKLASVATDVLGASGRAMLEALVHGTTDPDVLAELARGKLRAKLPALRQALAGRFRPHHAFLVSQLLAHVDYLDETIATVSERIEVTMAPFAEELARLDTIHGVARRTAEVLIAELGVDMRQFPSERHVASWVGLCPGNNDSAGKHKSGKTRRGNRWLRAALTEAALAAIRTSNSAFAARYRRVMRHRGHNKAVTAVAHAMLVTAYHLLARQPTYQELGADYFDPRHAERLTRRAVQALERQGYRVTLARAA

SEQ ID NO: 76647 - protein, 416 aa, unidentified
MRNETDVSPPAETGGGPAHSKVQINGTRKETPAMRSVALDLAVRKISYCEVEVGHVVARRTVTSLSSLKELLGPECLPARIAIEACREAWHVHAELTRWGNEVLLVDTTRVRQLGVGERGRKTDRIDAEILAKAVEKGSLPKAHLLSKPRQQLRLELSVRRTLVETRSQYVTTIRGLARTRGVRLPSCDTNAFVSHLRKARLDQDLQELIEPMSQVLEKVDADLARAEMRLQSIVEKDSKIQLLMTVPNVNVVVAAVFVSVIDDAHRFRNAHQVGAYLGLVPSEKSSGEHRRLGSITKEGNSYARATLMQASWGLIRLGRSDDPLQQWAKAVAHRRGKFIAAVALARRLAGILWAMWRDDTVYDAARVGFRSAAGLEQRAQETKFRATAMQSAAKKAQRRARPHERKLEHLKEMNL

SEQ ID NO: 76648 - protein, 303 aa, unidentified
MKQQTSAATETKIKGRNIIDFTGKTIYVGIDVHEKDYQVAKVFDGICLGNHRMAANHQMLIDHLNSRYPGATFKCVYESCAWGFTLQRALNSAGIECIVVHAADVSSSDKEKKRKTDKVDALKLARNLASGDLTGIHVPDEDLQKERNLIRFRKKLVGDLNRSKNRLKSLLKYQGIKIPEHLGKKNNWSYNFMNWVEQEANKDVLLKDTLLLMLEEIKFLRQLLLKTERALRKLMKERHNEKATLLMTAPGIGRTIAMQFVLEVGDIKRFHSFDALNDLIGFCPDTDSSGDMQRDRGITSQAA

SEQ ID NO: 76649 - protein, 418 aa, unidentified
MVEDVHWFVGIDWATQSHRVCLLDAEGRRVGEREFAHGGAGLTELRDWLLQKTGAAPGQIAVAIEMPHGPLVEMLIEHGFAVFAINPKQLDRFRDRFTVAGAKDDSRDAHVLGDSLRTDRKAFRRLAADNPVVIELREWSRIADELQQERTRLANRLRQQLWRYYPQIAKLTDDVGDDWFLALWQKVPTPAAATKASEKTIARILKDHRIRRLDAATVLQTLRETALFVAPGTTEAACAHIRSLAARMHLVNQQIKEAYNALDSLCAKLGMPDEESPSGQSREQCDVTILRSWPGIGRIVLATLLTEAAQPLQARDYHALRALAGVAPVTRQSGKQRFVLRRLACNKRLQTAVHHWSRVAIQYDAAARRRYDALRQRGHGHARALRGVGDRLLSALCSTLKHQTLYDADLRSMQPARP

SEQ ID NO: 76650 - protein, 370 aa, unidentified
MQFIGVDLHTNKFTCSYRDEHSPPDAKKGKRTETFELTSLGLADFYRTLTPDTYVLVEATITTFSFVRLIQPLVKEVTVANTYELKQISLARTNTDKIDANILSRVIKMQVLSGEQAISPVVVPPEEIQELRGLFTTYRLYRKQTTQIKNRIHSLLKEKLYGFTQEEIFDRKSREKIRGIESGTSLSFQLNELFDLLEFTEARIEPLKGQIMIQAEPYMREIDILTSMKGVSVFIAIAVIADIIKVDRFKNSKAFTSYLRSAPQVANSNTSVSIRGTNKKGRKMSAALLTQSLTHVLDASSKLRCWYDRLCEYKKPGLVRSGLRRKVFAEMYQMMKKGEYHYARDARNHEAKILQYKRFLKKRKILLESA

SEQ ID NO: 76651 - protein, 424 aa, unidentified
MSYRIVGIDVHKKMLAVVVSDVEVDGEYQFERIRYGSSPEHLRLLAEWLIAQQVEEVVMESTAQYWKPVWGALERYWKPICRERESAGPMSGTLHLAQAQSNRGRRGRKKDFPDAERLVKRLVANELTLSFVPDTEQRLWRTVTRRKYQLTRNHVRLQNQLEGLLEECHIKLSSLVSDLLGASARRMLQALAEGETNPAAVAALADKNLRATQAQLCDALGACTELKPIYRRLLKMFLEELQLIDQQISQLDQEMASLLSQHQDSVKRLAEVPGLGVDSAQQIIAEVGAKAATFPSAKQLSSWVGACPGDEESAEVSKSHRSPKGNRHMRRILNQAANAAAKSKGTIFEIVYRRLISRLGHNQTIGAIAHRLCRLIWIILHRGVRYEERGPSVSAKSRRHRTSRMIRELRSLGYQVEPVVTTTV

SEQ ID NO: 76652 - protein, 401 aa, unidentified
MHAVIGIDVSKATSQVAVAVDGKVVQNFKITHDVFGFNQLNTVIMQFDTFPDIVFEATGVYSRRLKTFLEAHNYPYTYLNPLTAKKQLDQLRPNKNDLNDAKHLAETQFILKRAKSYVQNPIYIELQDMSRFYQQLNHDIVSAKNRLHRLLQLTFPEIETLFSTTDSQQYWEIVSLIPHATMAKHSRQTLSDTIQSSVSRQIGVARLTRLVDKLVALGSLSAPAVAVASYNVTEVRYYAQRLIALSQSKANVLAIMVDQTKDLPEYDIYQSIPGFSDKTVVSLIAELGDLHRFATSNKLNAFVGIDLRFNDSGDYKSSGFITKRGNTIARKVLFKAISNIASTATYGHQNHINDWYQKKKQSSMSKGTKKIAIGAMSRLLRTMHYLILNNQLYDYDTASKR

SEQ ID NO: 76653 - protein, 387 aa, unidentified
MPQSNDLSRSLTALTQDNTIIAVVEMSLASWLVAGIVPGVERHPLKKLKADAEALLRLLQRWRDEATKAGRTITRIAVAFETGRDGFWLARWLKARDVEAYVIHATSVAVSREHRRAKTDRLDTDHLKRAFIGWLRGEPDHCHMAAIPTLEQEDARRPHRERENLVGERTRIINRIKSCLVRFGIRGFKSKLRKAAERLAALRTPEGVALPPNTLAELRRDIARLRFVMDQIKAIEVARLERLQKAPKEGPNALVCLLARVIGIGIETADMLVHEVLSRNLRDRRAVARYAGLTGSPDESGKRRREKGLTRAGNARVRRGMIQLAWRFLTFQKDSALAQWYRSQTANARGGTRKTMIVALARKLLIALWRLVTSGEIPNGVTLRPAA

SEQ ID NO: 76654 - protein, 429 aa, unidentified
MQNESTPGARGPVFCGVDTHADSHWLCVLDWRGRKVLSRQFPADAAGYEALAGAIAAAGEPACVAMEGTSSYGAGLTRHLASLGMPVREALSPARTQRRRPGQGKCDEADAERAARAAMSGSRLGTPKSQDGWVDGVRCMLAARSGAVKARTSAINTARSLLTTAPEGLRSRFRGMGGPRLMEELPSVRAEGALGAALGALADLWAAARDAALDMERAIEASLEENCPALLAMYGCGPVSAAKLAVAAGDNPGRLRSEASFAAICGACPIPASSGKTVRHRLNRGGDRQANSALHEIARQRVMRDPETAEYAERARARGKSDREVMRCLKRYVAREAYRALMRPHEVRRPEDASELVAARRAARVSQVRAASILGTSEKYISMLERGQRELKPIRRAYEAWVEAGLPLDWDRQAFEAERKMDSKKHLAK

SEQ ID NO: 76655 - protein, 343 aa, unidentified
MQTVTTIGFDIAKSVFQVHGIDGAGQVVIRRQLKRRYVLAFFQKLPSCLVGIEACASSHYWSRELQALGHNVRLMPPAYVKPYVKRQKNDMADAEAICEAVTRANMRFVPTKTPEQQSGLVLHRTRHLLICQQTSVINAIRAHLAEFGIVAPVGRRGVEELLGVIADPSDNRLPELVRSCLAALGSQLLGLKKQILAFDRMILAWHRCNQTSKRLNCIPGVGPLLATALVASVGDPKSFPSARNFSAWIGLVPKQHSSGGRERLGSISKQGDRYLRKLFVAGALAVIRHAKLHGSKHRPWVTALLARRPTKVAAIALANKLARMAWALVARGGRYNYPVALRP

SEQ ID NO: 76656 - protein, 412 aa, unidentified
MLFVGDDWAEDHHDVEIVDEAGRLLARRRLPEGLQGVTRLHALIAEQMPDDWADLEPGAATGRVKVGIETDRGPWVGALVAAGYEVFGINPLSVARYRERHSTSGAKSDAADAHLLAEIVRLDRAHHRPVAADSAEAEAIKLTARTHQSLIWDRTRHVLRLRSTLREYFPVALQAFPDLDAPDALELLGRAPDPDQAARLSHTTITAALRKARRRHLEDRAHELQRLLRTQGLRQPPVLQDAYAAVVASEVAVIATLNVQIERLGAVVGEYFGRHRDAEIYTSLPGLGVILAARILGEFGDDPDRYADAKARKNYAGTSPITKASGTKKVVLARYARNRRLGDALQQWAFCSLRGSPGAAAYYQQLRARNIGHQAALRQLANRLVGILHGCLKTHTSYDENTAWAHIQTSAA

SEQ ID NO: 76657 - protein, 342 aa, unidentified
MQVTTIGLDIAKNVFQVHGIDANEKVVVRKQLRRSQVLAFFAALAPCLIGMEACATAHYWARELTKLGHKVRLMPAKDVKAYLKRNKNDAADAAAICEAVRRPTMRFVRIKTAEQQGQLTQHRTRDLLMRQRTQVINALRAHLAEFGIVAAQGNQGVKELLAIVADQQDARLPVDARASVIVLAAQLEAVQTMLRSLDQRIMKQHRANEASQRVETIPGIGVIGASAIAATVSDPMVFRSGRDFAAWIGLVPRQDSTEGKQKLGPISKQGDRYLRRILIVGAHSVLRCAKENPLKYPWLTQLLARRPFKVVAVALANKMARTAWALLAHGGTYRAPQLAAAA

SEQ ID NO: 76658 - protein, 335 aa, unidentified
MQIKHFVGIDVSRDTLDLSVVVDGISLQHYCITNRSIEIGSTINKIMKSLGATVDDTIFCMEHTGIYNLPMVKWLKNHQGKIWMESGVHIRKTLGLVRGKNDKVDSIRIAMYAYINRHQIKLWKAPRKLIERVAALLSQRLRLNKAKKQLNTANQEQRLFMDKDIMRNLNRYTQKTVVVINKQIEAIENEILGLIKEDEKLNRMYQIITSVHGVGFVTATYILITTNEFININNPKKYACYSGVVPFEHSSGSSVRGKTRVSQMANKNIKTLLHLAALSTIRKQGELQEYYYRKVAEGKNKMSVLNAIRNKLILRVFACVNQNREYEKIYSYKFV

SEQ ID NO: 76659 - protein, 416 aa, unidentified
MSLALPEALVFTGIDWAAAEHAVCVLDAAGKIAAQFTIAHSAEGIASLVRRLARYGDPADLPVAIERPSGRLVDLLLEAGHPVVPVSPNAIKTWREGEVLSGAKSDAGDAAVIAEYLRLRYHRLAPAAPYCDETRALRTVVRTRDDLVEMRVAATNQLAALLDAHWPGAKAVFADVESPISLEFLTRYPTPAAARHLGEKRLAAFLVKHGYCGRRPAAQLLARLRDAPPGTTGEALTEALRDAVLAVVAVLRALNGAVKDLDRSVAAHLGEHPDGAIFTSLPRSGQINAAQMLAEWGDCRQAYAGPGSVAALAGVSPVTRQSGKHRSVGFRWACNKRFRRAITTFADNSRHASPWAAQVYADARAAGKDHPHAIRILARAWIRVIWPCWVNGVPYDPARHGAAAALAERTPSQSAT

SEQ ID NO: 76660 - protein, 375 aa, unidentified
MNQFIKYVGLDTHKDTIAVAIADAAGGKPRYYGEIANTPTALTKLMKDVSPNGEVVSYCYEAGPCGYGIYRQISDSGHDCAVVAPSLIPTKPGDRVKTDRRDSENLARLHRAGELTPVWVPDQEQEAMRDLTRAREDMKHLERQARQRLCAFLLRHGQRYDSGKSKWTLTYWRWLERIKFGHRVQQTVFQEYIDSVKQQQQRVADLEQAMHEALADWALAPVVEGLMALRGCRLITAMTVVAEIGDITRFDSPRQLMSYLGLVPSESSSGPKTRRGGITKTGNGHVRRVLVEAAWCYRFPARKTAPLQRRAEQTSEEVQAIAWKAQKRLCGRYQALSKRGLLPQKISIAIARELAGFIWAIACEVTPKNAAKASA

SEQ ID NO: 76661 - protein, 394 aa, unidentified
MKLIGIDIGKNKHFFCVMDQQTGEIISQPVSFSNDKEGFDFLVQKIKSYPKDSILIGMEDTGHYHFALLKYLLDLQYTVALINPKTTDFNRKMQGGITKNDKLDTINICDVLDTPERKKQYRITKVNSFDLYEQKQLTRHHHNLKEEENVYKNRLQKCIDIVFPEFNNLFNSKYGTVYMNILKMFGSAENIANTDIRTIRKCFEIEGRGNRISLTPERLKECAGSSIGISSSAEVIQIKHLTAQIELIEEQLTEIDKKIEEFSIQNNSPILSIPGISHFSGTSILAELGDISNYSKPSQIIKFAGVAPLHYESSQFNAQHTAITKKGSKYLRKTLYQIILPVIRHNPVFNKYYQLKISQGKGHRCAQGHCVRKLLRIIYHLLKTNQQFDPQLLR

SEQ ID NO: 76662 - protein, 348 aa, unidentified
MLYVGLDLSRKRLDWYALGADGGLIGRGASPPDRDGLAQLVRQVDRQRGGPVLAAIESMTGARFVHDQLELAGWDVRIADAQRAKGIAPLACKTDRIDAWVLAELARRDLVPEIWLPGPEVRGEREQARFRIHLVHKRTSLKNRVHAILFQHGLRAPIDDLFGAGGRRFLERCELPEPWRSSVAASLYLIDVLEEQIDVIEREFRRLAPDHRYLPLLMSAPGIGWVLGYTIAAEIGDVGRFPTPAKLISYTGLCPRVRQSGEVDRRGALSKHGPPYLRWALIEAAHNAIRCYPPYRELADRQRARLGRHRGGSVAAITIARKLAEASWWMLTRNRPFAPAGATVPLTA

SEQ ID NO: 76663 - protein, 328 aa, unidentified
MTKVKEYCGIDVSKDTLDVMMEEKGHQIFKNNKTGFASLLKWSGKDVHFVMEATGIYHEQLAHFLASKGRSVSVVNALIIKRYSQMLLRSTKTDKADAQMILKYAMSNAHELSFWEPLPAYVESCKDISGIVSLLLKQRTALKNKRHSLKAKGIAKSGLLRAVEGSIKALDEQIKELETMMEELIIEHEGVLFDQLKSIPGIGTKTAMFLIVVTNGFKTFENSKQVSSYLGMSTSIRTSGSSIRGQSRITKTGNIHMRNLLFLSSFTAYKYNPSCKALYDRITDKGKSKKLALIAVANKLIKQAFALAKSGEYFDLEYMSVNPALKVK

SEQ ID NO: 76664 - protein, 366 aa, unidentified
MGRIVLVDREGQRVQQAVVKPPAGTPAFIAIDVSRSKWAFNVRWEGQERRHFTSPYGINHIEALVAQYQGCDLTLAYEACGFGYEIAWWCQERSIPVVVVPPSTVERAPGMHVKTDRLDARILCRKLEKGELKNAYIPTRREHEQRQLSRSYNQVLKDRKRQQARVRSLMQEQGRIGPAPAQGWKAYESWLASQDLPKPVTISVSRLLGLREVAAQYTTDLGRALVDVAEQPEHKSVVQALCAQRGVGLFTAIRLVLEIGDIRRFASADSFVHYLGLTPSEYSSGEGVKRGHVLKCGPGIVRAWLIECAWASIRGQKPDPKLHICFERVAARAGRKRAIVAVARRLARRLRAVWLKALESQESSAA

SEQ ID NO: 76665 - protein, 482 aa, unidentified
MKKRNIFQNQSQEILTLFETAQDRSKVMCIPIDYAKKDHVVMFCNGNGKIIRKPFSIKNSPEGKDYLIDQVKKSCRHHGISPQHIFYGGEDCGAYADNFITALRIENCLVAGVNALDAKKHRENIQASTDRLDLLGISKVLLNCRGNCSPAQSGIYWNLRALVRERRKLVHIATGVRNRIHNIVDRIFPGFLNEKKSGICPFSKGSLALMENRFSVNQIRRRRRSTLAKFLARQLVHHSDHCAEKLQQYASQVLQPPIDRIATLQISLKQQVKLFNCLQESILYLNKEIAEHLAQTPGAFLTSIRGIGITLAAGVSAEIGDPNKQGSLSNLVSYAGIIPRIKQTGGIQGKTHVRKVGKRCNRILKDYVVQSASHIGLYGPDDLKMDYKRRDAQGQHADFGMARRYLRMAVCLMRTDQTYLPKSLRSAKNDMKERAEYYITSWPTLHAKWKRSGALDIAFDKNMRLGQWRNMIQELYGIELTL

SEQ ID NO: 76666 - protein, 304 aa, unidentified
MFGIGIDVSKATLDVAVHGEQFRQFSNDKRGFVRLIRWLKTWPIKQVVLETSGGYERAALDVLHAAGLPMVRINPARARRFAQSTGRAAKTDRLDATVLAQMAHLLPLTRYVPPAPWQQRLAEFAQCRRQLVQMRVSEMQRLRRLVDPDLIAMKQRHIAQLSDDLKQLDKAIAEQLEGQPGWKNIGALKGVGPILISTLACELPELGSLGSKAIASLVGLAPMNRESGTWQGQRRISGGRAVVREALYMAALTAIRYEPRLRAFYAGLKAKGKASKVALVAVMRKMLVILNARKRDAEVALGCP

SEQ ID NO: 76667 - protein, 355 aa, unidentified
MSQEKYIGMDVHQATISVAVMDASGKLIMECLLETKAATIVEFIQGLHGTLSLTFEEGTSAAWLHDLLKPHVNRLVVCDPRKAALLKDGNKSDRVDARKLAEMLRTNQLKPVYHGEHGIRTLKELGRSYLTITKDVTRSMNRIKALYRSWAIPCAGTSVYAPRHRAAWLAKIVEPGVRIRAERLYQQLDGLQPVRLQARRELLRESHQHAAVQLLRQIPSIGPIRSALLVALLQTPHRFRTKRQLWAYSGFAVETHDSGEYRSVRGKLQRNRERITVRGLNDNHNKDLKNLFKGAAISASTRPGPLQDFYVALVGKGIRPTMARLTLARKIAAITLTMWKKGVSFDPKQLPRQAA

SEQ ID NO: 76668 - protein, 397 aa, unidentified
MVFSKGKSLVSVLRPFGEVVAKPFSIGHTGSELKELADYLKSLDGETRVVMEHTGRYYEPVARFLHEEGVFVSAVNPKLIKDYGNNTLRKVKTDKADARKIARYGLDNWAELRQHTPMDTIRMQLKTLNRQQSLYAKTKTMMKNNLIALLDQTYPGVNALFDSPVREDGSQKWVDFATAFWHVDCVRNMSLTAFAERYRKWCKRHGYNFSQSKAVEVHTGAQDLIAMLPKDALTKTMVRQAIDALNAVSASLERLKAEMQALAAQLPEYPVVMAMHGVGDSLGPQLMAELGDVARFTHRNAITAFAGVDPGADQSGTHEAKSTRVSKSGPPELRRALFLVMDCLLKTQPQDDPVYRFMDKKRAEGKPYLVYMTAGANKFLRIYYGRVKEYLASLEEN

SEQ ID NO: 76669 - protein, 372 aa, unidentified
MKKNNTQQNHKEAKGDSSWQAIEGLTIGIDLGDKRSCYCVLDAAGNKIEEGSLSNTSAAIAKHFGSCRRARIAMETGAQAGWISRELTALGHEVLVANARELRAISGSGRKSDRRDAEKLARYARVDPTILRPVRVRGAQAQLDLGRIRARDALVRARVLLVNAARGLAKTRGQRLVRSVTASFGKRSQALLDAELGTVLEPLLEQIDALGKQIQRYDEEIEQQAAERYPETAALDAVPGIGALTALSFVLTLEDAGRFCHSRDVGPYLGLCSRRRQSSGSDPKLRISKEGDEYLRRLLVQCAHWILGPFGADSALRRWGLRLAAGGGKDAAKRARVAVARKLAVLLHHLWVTQQPYRAFPQSEAAAEPASS

SEQ ID NO: 76670 - protein, 422 aa, unidentified
MKKVTEFTKKVKGQVNNPVLTKASWVVGIDIGKKKISCVLMKKDQTVLCRFNTEASINGYKKMLDRIKEKTKGRGKVVYAMESTGHYWMVLGQFFEDHNRQYVLMHPLAVARSREVVRLNRGKTDPMDARLIGELACRGIATRTQIPEDYWATLRFLAREYMDREKDIVREKLRINSYVETTLPDFLGIFPNPLCLAGRACLRTLANFKEAIKGDSPSFEKQVRKHYIGKRLLVSRVRQVYDTLRQGETMGLRAGRHAMLCRIINSLERLEVAEKQQEDTRQSLLSYYNQSEYKKYLNSVQGTTSTTNALVLGFMGNPISYDNPKALIKLAGCDPVLNESGKYRGKTSISHRGRSLLRKAADRTAFSIEKRNVVFRNFFHHLVTRQKNKLTKRQARIACINKYFRIIWVLCNHRVTFNPSLA

SEQ ID NO: 76671 - protein, 327 aa, unidentified
MTESSDYESVQVFIGVDVGKDTHHAVAINRSGKRLFDKALPNDENKLRSLISDLKQHGQILLVVDQPATIGALPVAVARSEGVLVGYLPGLAMRRIADLHAGEAKTDARDAAIIAEAARTLPHALRTLKLADEQIAELSMLCGFDDDLAAQTTQALAEQTVVVPGTNAAAVVLPRLALQLITLRKQRDEVALEVEQRVLAHPLYPVLTSMPGVGVRTAARLLTEVACRAFASAAHLAAYAGLAPVTRRSGSSIRGEHPSRRGNKALKRALFLSAFAALRDPLSRAYYTRKMSQGKRHNQALIALARRRCDVLFAMMRDGTFYTPQGS

SEQ ID NO: 76672 - protein, 348 aa, unidentified
MKKVVAGMDLHSNNVVIGVMDLDGKRVASGKVLCDLKEVVKFLAPYKQRLEQVAVESTYNWYWLVDGLQARKYPVVLANPAGMAQYSGIKHADDTNDAFFLAELVRLKILPTGHIYDAKLRPVRDLLRRRLMLVHHRTALMLSFKSLYTRTTGQEMTLSELKAMETKEAQNLYEHPANQMIAGMQIKHIEQLSESIEKIEKAVLASARELPCYAKLATLPGVGRILGMTITMEVGDIKRFAEPGNFASYCRTVAAHRVSNSKKKGENNSKCGNKYLAWAFVEAANFARRYDEQCRKWHDRKTAKTSSVIATKALACKLAKAAWHLMSQGVDYDSRRVFGEPGKAKAKQ

SEQ ID NO: 76673 - protein, 392 aa, unidentified
MQISVGIDIAKELHWVTAIDAVGIVRLDRKLENTPAATAGLIAELTALGGTARIGLDVVGGIAGLLEAMLAEAGFALVHVPGLAVNRARQGTVGGEHKSDPRDARVIADQVRIRRDLRPIEPATELDLELRLLVGRRRDLVDAQTQRLGRMHDLLVGIFPGLERILDLTTKGPLVLLSKFVTPAELRAAGAKRLVRHLQAAGGLPKVEALAARALAAACEQTIAVPAERMTARLVKELAAEALATRARLAALDRELEALLARHPDAALIRSLPGMGAVLTAELLVEAGSFARFRSADALAAAAGIAPVLRQSGKVRFLRRPLGGNKALKRVFYQSAFCSLSHPDSRAFYDRKRREGKRHHQAVLALARRRINVLWAMLNSRQAFQPGFKMAA

SEQ ID NO: 76674 - protein, 351 aa, unidentified
MTRKTDAVVARTIGIDTGKNTLHLIGLDDKGAIVLREKLARGRIAARLANVPKCLIGIEAGMATHCVARELIALGHEVKQVPPVYARPFRQGHKNDFRDAHAVAEAVQRPSTRCVPVKTDDQLDLQALHGVRSRLISERTAVINQIRGFLLEHGIPVRQGLRFLRQQLPDILAKRIDVLSSRIIRIIEDLSGDWRRLDERIENVTEEIEELAHGTEGCRQLMTVPGIGPIIASAMVAAIGSGTAFARGRDFAAWLGLVPKQMSTGDRTILGRISKRGNRYLRTLFMQGARVILLRPANWAKHSFGPWLAAAAKRLHHNVLATAVANKLARIAWTVLVQARSYETRVTSEMA

SEQ ID NO: 76675 - protein, 411 aa, unidentified
MPNHFQFFLGLDWGSEQHRACLLNRVGDLVAERWIEHSGNGLAELLAWLADHTAVPPAEVAVAIEVPRGALVETLVEQQFAVFSLNPKQLDRFRDRYTPAGAKDDRRDAFVLADSLRTDLPCFHAVRLDDPVVIRLRELSRLEDDLRQEQNRLSNQLREQWHRFFPQLLALAPAADEPWVWELFQSAPSPQKAARLSARKLAGLLQKHRIRRLDALQVHAVLSCKPLTLAPGAAEAAAEHALLLLPRMHLLHRQHREVAQRVQTLLDQLVGPAPSPEERLEHRDAAVLLSLPGVGRQVAATMLSEASQAIAERDYHALRCYAGAAPITRQSGKKRVVVMRRACNERLQNALYHWARVSVACDPRSKLTYAHMRSQGHSHGRALHGMADRWLTVLIAMLRHHTLYDAKRRAI

SEQ ID NO: 76676 - protein, 360 aa, unidentified
MAKARTLVGLDVHATKVVAAVLDAETGELAFFSMTADIARVAGFCAGLPGPVRAAYEAGPTGYGLARELARREVGCVVAAPSKIPRGSGERVKTDRRDAELLARLLFAGKLHPVRVPGREEEALRDLIRAREAVRVDLMRCRHRLGNLLLRHGIRYEDGDAWTTRHQQWLSTITLAQPAAQATFLDARGAVDALIHRREQLEQEIIALLPGSPWSEQTGRLRCMRGLDTLSAVGLCAEVGDFASFRKPAQLMSYVGLVPSETSSGQQRRLGSITKTGSKHARRLLVEAAWHYRKRPRIGTTLTERQAGQPPEAIAIAWSAQCRLHRTWTRLQQRNKRRTLIAAAAARELAGFCWAICQIE

SEQ ID NO: 76677 - protein, 339 aa, unidentified
MPQPNDLSRSLSALDQDSTLIAVVEMSQSSWLVGAIIPGVERRAAKKLEASETLLLALLHRWRDEAVRAGRTVARITVAFEAGRDGFWLARWLEARGIEAHVIHATSIAVSREHRRAKTDRLDAALLQRAFLGWLRGERGHCTMVAVPSLADEDAKRPSREREALVSERTRISNRMKSALARLGIRGFKPGLRKAAERLDLLRTPEGMPLPPNSLAELHRDLARLRLINDQIGEIEAVRVDRLRQQPNEARHPMILLLARVVGVGIETADMLVQEVLSRKLRDRRAVARYGGLTGSPEESGARRREKGLARAGNARVRRGMLQLAWRFLMFQKDSALAQ

SEQ ID NO: 76678 - protein, 392 aa, unidentified
MYIVGIDIGKNHHEASIVSPEGKQIGRSLRFATTHKGADSLMSFIFKNIGNSPCVFGMEATGHYWYPIYSFLKAKGYTICVINPIQSDSLRKMYIRQTKNDSIDSFLIAEVIRFGQFGTTSMADENILAMRQLCRYRDSVISSRTEIKLRIGTIMEQIFPEYEKQFSSLWVSTSMGILEKYLTPENIENAPIDELFEIIKDKSHNRLTRTKAISIKEAAADTFGIKIAQDAFSFQLKQLIDRMNFLDKQIEALDIEIMKYYEQFDCYLHTIPGIGMIATATILAEIGDIHRFKSSSALVAFAGIDPTVRQSGEFNSTHNHMSKRGSPYLRHAIFLAATTCSFHNSPLNAYYKKKRDQGKHHLTATGAVARKLTTVIYAVLRDSKPYEPKKFC

SEQ ID NO: 76679 - protein, 385 aa, unidentified
MLAHPTQTQAAARCEANTLFASLELSKARWLVTVSAPGSDKLSRHDVPGGDGKALLKLLWRLQAAAGRRTGAPVAIVVIQEAGLDGFWIHRLLVQNGITSHVVDAASIAVNRRHRRAKTDKIDGVKLLRTLMAWMRGERQVCTMVQPPSPEDEDRRRLARERARLLKERIQHTNRIKGLLSGQGIPDYDPLHRDRRRCLAALTTGDGRPLPERLKAEIGRELDRLEMVVSQLTVVERERDALVARTAEADACAAPAALARLRGGGPELAALLWLEALFRRFDNRRQIAAYAGLTPSPWQSGGIDREQGIAKSGNPRLRRAMIELAWFWVRHQPGSALSRWFVERVGTARGRVRRIAIVALARKLLVALWRYVTQGVVPQGAVLKA

SEQ ID NO: 76680 - protein, 347 aa, unidentified
MIIIGCDLHTRFQQIAMLDTGTGEVVEKRLEHENGEAKRFYQGLEPPVLVGIESTGYSLWFAQMLSELGHELAVGDAAKIRASETRKQKHDRRDAGHILELLSEGKFPRLWLPSVEEREVRVLLEHRHQLVQIRTRAKNGLQAIALNYGLRRRRRLWTEAGLKQLEGLPVGEGTKWRRGDLLRLLQQLDGWVGELDKRLQAEVERRPEAQRLMTHPGVGPLTALATVLILGEVERFAETRQVTSYVGLIPAEASSAGKQRFGHLTKQGSRLLRFLLVEAAQSASRGDAGLSRLYKRLTFRKGKSIAKVAIARKLIIRLYIMLRDQINYQEFCRRGSHAGMLGDVALA

SEQ ID NO: 76681 - protein, 400 aa, unidentified
MDKRKRYIRFCGIDVAKSKHVFCVIDREAQTILRPRSFTNDKEGYQHLLQSLKDVDPSHSLLVGMEATAHYWYSLHDFLVRHGYPVAVLNPIQTAQQAKKGIRKCKTDKFDAFHIATLLKNGEYKAALVPGELGMICRQLTRLRCRLVQQTASLKQLIWSRLHPVWPEYENLFKDPFCATSRKLLYTAPTPKDVLSMRQEELSELIRKASRGKYAQAQAKKVWDAAANSAGMHRSLDGARIGIRTLLTQIEAVRPIREKLEEEIAHLAKGLPAYIFSLPGIDPIRAVSLFGETDPITTFERPAQLVAFAGLDVSVFQTGQYEGSYRHISKRGSPFLRETIWNMAFQAIYQEGEIRDYWLRKMADGLKHKAAITATSIKLCHIAWRILTDKRDYLPEGRPN

SEQ ID NO: 76682 - protein, 344 aa, unidentified
MRIAVLGVDLGKNVCSLVGLNASGAVVLRRRAKRETVIALAAKLSPCIVGMEACCGAHHLGRVFAAYGHDVRLMSPEYVRPYVKAQKNDDRDAEGIAEAATRPTMRFVELKSQEQLDMQTLHRSRDRLVGERTALINQLRAILLERGIVAPQGKRKLEQFLFNLMDEQGGPGLSPRMITLVTGARAQWAELDRRIAAFDAEFVRWTKENEDARRLATIPGVGATIASALIAAIGKGETFERGRDLAAWLGLVPRQFTTGGKPKLLGISKRGNSYLRKLLIHGARAALPYVAERDVPLGRWAKSLLSRAHPNVVVVAFANKLARIAWAVLRRGEPFAAKGLPVAA

SEQ ID NO: 76683 - protein, 346 aa, unidentified
MSYSTTVGVDLAKNVIQISVVSSRGKELSNRSLTRKKFAEFLGKQKPSRVAFESCASAHYWARAAQRHGHEARIIPAKAVAPFRQGHKTDSNDALAVAEAARRPNIKEAPMKTVEQQGLQAIHRSRELLNQESTALSNHLRGLLMEFGIVIPKGFASLLKAVPEILEDGENELPDLYRPTLHRMYTRLLELREDIAVMTREVERLVKAHPTCSKLMALEGIGPIGALLLYATMGSGSAFSGSREFAAYLGLAPKQYSSGGKTNIVGLNKKIGNSRLRSVLILGARAYTYKLKEPKSLKDKWLKANIERNGECRAAIALANKNVRTAWAMVTQGTEYQRRVQLEMAA

SEQ ID NO: 76684 - protein, 352 aa, unidentified
MLIIGCDFHPGFQQVAIFDNLTGEIQEKRLQHRAEAEQFYGSLAGQEVRVGMEACGHYPWFERLLEELGFELWMGDAAQVRASVVRKQKTDRRDAEHLLQLLMENRFPKIWVPSLEVRDVRQLLVHRHKQVQARTRTRNQLQAMALSQGVQKKWKLWTKAGRAELEQLPLLPYAAERRKQLLQALDQLAAEIAELNGRVEEEVRKRPEAVRLRTHPGVGPVTALAMVLTLGPAERFASGKDVGSYFGLIPSEDSSGGKQRLGRISKQGSSFLRFLLVEAGQSAARYDPQLKRFYRRLATRKNRGVAKVAVARKLATRLYLMLREQWTYPQLCQAVMQASPSHSVVEHQKPTA

SEQ ID NO: 76685 - protein, 412 aa, unidentified
MELVYARCAGLDVHKVTVVASVRVPGLQPGERRTETKTFATTLRGLRELLAWLIAHGVTQVAMESTGVYWRPVFAVLEGSVQVRLVNARHAKMLPGRKTDVQDAEWLAQLLECGLLRGSFVPPAAVRDLRDLTRLRKTVIRERGHHVNRIAKILELANIKLGSVVTDIMGKTGRAILQALSAGLDDPEQLAACAQGSIRQKQDALREAVEGRLTPHYAFLLQQHLALIDTLEVHITTLDARIEAAIAPFVEIVTLVQTMPGVAARAAPAILAEIGMDMAPFPTAAHLASWARLCPGTHESAGKRRPTTTGKGATWLRATLQEAAWAAVRTKKSYYRALYHRLKARRGPKKAIVAVQHAMLVALWQMLKYRVPHQDLGADYFDRRNTARLRRHHVRRLEKLGYNVVLVEKAAA

SEQ ID NO: 76686 - protein, 344 aa, unidentified
MNAIKVIGIDLAKNVFQVCVWMADGSVASNRKISRQKLLDTVRTFSPGTLIAMEACATSHYWGRTLQAMGFIIRLVPTQHVKAFSHHQKNDANDALAICETACRPGIHFVPVKTVEQQDIKALRSARQLMVEQRTALANPIRAFLAEEGVIVPAGIQKLQQYLPEILEEESHELSSVLRRLLHTLGEDRRNLNIRIHEMDNEIAVLSRQQSGYHHLLTIPGVGPLIAAAFVSEVSAPQFANGRQLSAWCGLVPRQHSSGGKNRLSSLSKNGNRHLRTLIIHGARAVMRCVQKRDDCLGEWLRKLIARCGFMKATIALANKLTRIIWRVLRDEVDFNMQKAFTIN

SEQ ID NO: 76687 - protein, 347 aa, unidentified
MDHIGIDVHKRESQICLLAEGGELMERRIRTEPERFAAVLGGRPRARIVIEASTDSEWVARCLEALGHEVVVADPNFAPMYATRTRKVKTDRRDARALADACVLGAYRRAHRLSDPQRHVRGRLLVRDALVRTRTRYISLIRALLRQQGYRVPSGSAEAFATRVRALALPGPLLSLIAPLLAVMRPLNRQLAYSDATIEHVAAHDERVQRLRTVPSIGPVTAAAFVATIDDVRRFSHAHQVEAYLGLVPRELSSGDSQRRGSITKAGPPRPRWLLIQAAVSILRRRPPEAEALRAWALRIAARRGKQIAVVALARRLAGILYALLRDGTVFTPRRSPQPVAAATLLV

SEQ ID NO: 76688 - protein, 390 aa, unidentified
MRGAAAQPLETGGNDMTSMPTSKVSVQPTPEIISSRAVFGGVDTHKDLHVAAVVDAGETVLGTASFSTTRAGYRALLRWMTEFGELARVGIEGTGSYGAGLTRHLAAAEVVLLEVDRPDRSDRRRKGKDDDLDAINAARAALHQRRTTVPKSRNGAVEALRVLRVTRAHAVRERRSCLQLLRMTIVACPEEVRDQVRNLTRMQLIRTLAAWRPDVSNATDPVTANRVALKSLACRYLELSDTIAELDELINPIVEALAPQLLARVGVGIEVAGQLLVTAGDNPERMTSEASFAMLCGVAPLPASSGMTTRHRLSRGGDRQANRALHLAVVSRLRLDPRTQAYVAKKTAEGHSKMEIIRCLKRYLAREVYYLLNPGQPAASITRRKPRAAA

SEQ ID NO: 76689 - protein, 384 aa, unidentified
MDQTTSTLSANTLHCAWELSKNSWLLAIQFRDREQPSLYPIEGGNTDKLMAKLAAARDCWAKVNGALPAITLCYEVGYDAFWLARFLRARGIECLVIDPGSLQVNRRARRVKTDRVDVKMLLRTLIAWCRGERHVWSLVRIPSVDEEDLRRSHRERSRLVRERTAHINRIKGLLFAQGVRGINIKSQYKTLAVDQLVTGDGHRLPPRLVCEVAREIQRLAMVQEQIAKIERERDTAPTPCEATERKRRLLLRLKSIGPAISALLSREVYYRQFANRRQVGSFLGLTPSPYSSGEEERCQGISRAGSGHVRAIMIEAAWLWIRHQPKSALTRWFLERTAGQSTRMRKTMIVAVARKLAIALWRYVEHGLVPQGAILNPPTTGNAR

SEQ ID NO: 76690 - protein, 403 aa, unidentified
MNNVAGIDVSKGKSMVSVLRPFGEVVAKPFSIGHTGSELKELADYLKSLDGETRVVMEHTGRYYEPVARFLHEEGVFVSAVNPKLIKDYGNNTLRKVKTDKADARKIARYGLDNWVELRQHTPMDTIRMQLKTLNRQQSLYAKTKTMMKNNLIALLDQTYPGVNALFDSPVREDGSQKWVDFATAFWHVDCVRNMSLTAFAERYRKWCKRHGYNFSQSKAVEVHTGAQDLIAMLPKDALTKTMVRQAIDALNAVSASLERLKAEMQALAAQLPEYPVVMAMHGVGDSLGPQLMAELGDVARFTHRNAITAFAGVDPGADQSGTHEAKSTRVSKSGPPELRRALFLVMDCLLKTQPQDDPVYRFMDKKRAEGKPYLVYMTAGANKFLRIYYGRVKEYLASLEEN

SEQ ID NO: 76691 - protein, 349 aa, unidentified
MRFYHHSHRFYCGIDLHARLLAICVLDHEGAIVLQTQIPASRQLLLDTLAPYLPDVVVAVECLFAWYWVADLCQAHNIPFVLGHALYMKAIHGGKSKNDDIDAEKIARLLRGGNIPVAYVYPKGLRETRDLLRRRMHLVHKRAELVTHIQIVNAQNNLPEFGKKLIYAKNRAELKIAERFQNPHVRKSVEVNLTLIDALDGQIGDLELYLERTAKVEDPQTYHLLKTIGGVGKILGLVLLYEIHDIRRFPEVGEFLSYARLVRCVHESAGKKLGYGGKKIGNAHLKWAFSEAVCLLLRSYPVVKIWQARQQKKHGKKKTLGILAAKLGRAVYHMLRKKEAFDVRRFLGQ

SEQ ID NO: 76692 - protein, 344 aa, unidentified
MKHYAGLDVSVKETSVCVIDETGKTIREVKVASEPEAILSVLVDEALTIGRIGLEAGPLSQWLYSGLAETGLPVICVETRHMKAALSAQLNKSDRNDARGIAHMMRVGLYRPVHVKTLASQKRRMLLTSRQLLQAKALDIENDLRGTLRNFGLKVGVVGTAKFEARIHELVADHPDLAAITEPLLIARRTLREQLGVLHRRLLAVVRQDEVCRRLMTVPGVGPVVALTFRATVDVPARFKNSKAVGAVFGLTPRRHQSGEIDRMGSISKCGDAMVRTMLFESAQVMLTRTIKWSWLKAWGMKIARHRGMRRAIVAVARRMAVIMHRMWADGTEFRWSNTNAATA

SEQ ID NO: 76693 - protein, 360 aa, unidentified
MTDGSKQRPPMTAGLDIGDKYSYLCLIDSEDGQVIEEGRLRTTPETFRRRFASEQPLRIAIEAGTHSPWVSRLLEECGHEVLVANARKLRLIYSNKRKTDQIDAENLARLARVDPKLLYPLKHRGEASQAHMALIRSRQALVDCRTQLVNHVRGAVKSFGHRLPKCPARSFHKRASEHIPEALWPALEPILEQIASLTERIRQYDRKLETICKERYPETELLRQVEGIGTLTALTFVLTVEDPHRFEKSRSVGAYLGLVPATDRSGDSDPQKRISKEGDQMLRKLLVGSAHYILGPFGSDSDLRRHGQKIASRGAKNAKKRAAVAVARKLSVLLHSLWMSGEIYEPLRNAHRCGGREEAA

SEQ ID NO: 76694 - protein, 334 aa, unidentified
MKVFYLGVDVSKKKLDLCLRSNGKDILYDVIPNDLSSIKSWLTRTFEKFFLSEDSLVVCAEHTGQYTYPLVCATKSIGVYLCLEDAAKIKYCHGIPRGKNDKIDACRIAMYAERYNDCLQPYTASELIIQKLKNLSTERSMLVADRAKYQSQLKDQVDYMEHSIYIAKCNRVEGIINTFTDYIAQIDLEIKELINQAPVIAHQMDLLMSVDGVGERVALKMIMETDAFTSFTDPRKFCCHAGVVPFVYVSGSSQRSKNRVSNRADKSIKHLLHMAALSVSQVKNSPLKKYYDRKVEEGKNKMSVLNAVRAKLVTIMFAVIRTDAFFSRNYESVK

SEQ ID NO: 76695 - protein, 473 aa, unidentified
MPRRKPASPRPDPATAALLQTLNPPAAGIDIGATELGVGGPPDPGTSPPSSSTGAPAPLPSNVRRFGAFTADLHAMAAWVRQCQVTTVAMASTGVYWIPLYDLLESVGFQGLLVDPRQGQRAPNRPQTDVHDGQWSQRLHSLGLLTAACRPEEPIRVWRASQRHRASLIEDAGRHLQRMEQALEQMHVKLPAVVSDLTGLTGMRILRAIVQGERDPHALARFRDHRCKESAETIARALQGTWQPEHLCALQQSLALDDDDHQQIRDGDRVIEVHLQGLAFPEVPALEPKRRVRRRKDNEVTFDARQRLHQVAGVDLTAIEGSEESTALVVLSEVGTDRSCWPSEKHCGSWLGLAPHPKKSGGKVKSSATRPGSHRAAQALRLAAQNLQRSQSALGAFFRRIAARRGVAKAITATAYKLARMVYAMLKQGMAYVAQGLEAYETAYRERVVRQVKRKAASLGLLVGERDAGAQPS

SEQ ID NO: 76696 - protein, 324 aa, unidentified
MTTLSPSFVGVDIASKHLDIALHPQGIHFRVTNNEAGLDACMERLREHAIAAVAMEATGGMERLAASRFQAAGYVVHVLNPRRIYNWRQVVARQAKTDRIDALLIAEFAATIPLQQAHVTTAQQRTLRDLAARREQIVIAVTNSKKQLARAVVPAIRQSIERQIAFCKQETAAIEREMDAIFRQDAILMRQCELLESIPGIGNISAMLILAELPEIAFLPPKKLASLVGVAPHPLHSGTKTTKARITGGRSRIRSKCYMMAHGSIVHNPWMRTYAHRLLARGKSRREVNIACINKLLHVAHAVLTRNTTWLTEPPDKKILTQTA

SEQ ID NO: 76697 - protein, 429 aa, unidentified
MNSTQNKKIEQVKETTMIVGIDVGSEKHYFRAFNWRGIELTRKPVAFSNPMEGFNSFYNTIVELMQKSELEEALVGIEPTGHYWFDLGQFMGEKSIKFVMVNPHHVHKTKELDDNSPSKNDRKDPRVIAGLVRDGRYFYSYMPTGVYAELRNASNRRFVLVEEQTRAKNRLQKWIAVYFPEYKGIYTHIDAKGGLLVLKQAPTPEEIVKLGEEGIIKIWKDAKLRRNGNKKALKILNAAMRSIGLRTGLTEARMEIQDLIEDYELQTKRLERVNDLIKELCQQIRYADKLLEIKGIGITTVAGFIAEVGDITRFDSTKELQKLAGLELVADSSGKHNGRTKISKRGRKRLRYLLFEVAISVVGKNEEFKEIHRYYTTREKNPLKKMQSLIAVACKLIRVFHVILTKGVSYDASKMLEGIRHPGEQLKAA

SEQ ID NO: 76698 - protein, 391 aa, unidentified
MFLLGIDIAKLNHVASCIDSSTNEVIFSNFKFKNDFKGFSVLLDKIKSLDVKNLIIGLESTSHYGENLINFLFKQHFKVALINPLQTSHLRKANIRDAKNDRLDSLNIARSLIFGKLNFVSEKNIDCFSLKKLTRFRSNLIKQRSKAKIQLTSLLDLLFPELQYLFKSKIHSKTIYTLLKKYPSADEIAALKDDEISNLLYASSKGHFKREKSIELKSLAKTTVGIKDTSVSLHVIQLIELIELFDRQIKDIVTKITDTVNKLDTKLLSVPGINIIACAIILGETNNFDNFSNATKLLAFAGLDPKIRQSGNFSATSCRMSKKGSPYLRYALIFTAWNAVRHSEKFNKYYCLKRSQSKSHYNALGHVAHKLVRVIFTLIKKDISYQEEKLE

SEQ ID NO: 76699 - protein, 410 aa, unidentified
MTMITITQNTPVLVAIDIAKARHEVLIAVPGKKRRRRLTVLNELADFTRLITALKDYGRPVRAAFEATGNYHRALGYHLATAGFEVKLVSSVALARTREALHNSWDKNDPKDAQVILHMMEIGNEQFYHDPLVRGTNDIQELSKTHDIVSKSKTELWHRILTHYLPLYFPEADRFHRSSRSDWFFAFLERYPSPHFISAMSKDAFTADAWDVVGRKVAKERLLADIYETSKVSVGLPVALDSDAISMFRLVLGEGRSLIAQRNQIEARAVALLKDLPDYQLLTSIPGIGPINALTILAEAGDLRRFGHHRQFLKFCGMDLATIQSGTFRGQTKLSKYGNARLRRTLWMAGQVAILQRTNSFRDKFERYISKDRQNTHLRRKAYTAIAAKMARTVHGIIKNGEPYRPFFEG

SEQ ID NO: 76700 - protein, 427 aa, unidentified
MNNTQPPPAFAATIGLDWADKKHDLWIQAAAGGTPEHRVIEQTPEALHEWVAQVRGRFAGQRIAIAVETSRGAVISALGAYDFIVLFPINPGSLCNYRKAFCVSGAKDDRTDAMLLEEYLRLHWAKLRPLEPDTELTRKLAGLVENRRGLVDERTRLVNQLHSLLKTFYPLMEALFDDLTLPVAAQFLLKWPDLAAVQQATPATLRKFFYGHNCRSDKTLAERLLAIQQARPLTKDPALIEPAVLKVRALAGMLGVLHQAIGQLEARIEQTTDAHPDAAIFRSFPAAGPVMAPRLLVAFGTNRARFASALEAQQFYGIAPVQKQSGQSKVIHMRHRCPKFARQTFHENAGHAVRTPGWAKAFYDQQRTRKKGHHAAVRSVAFKLMRIYFSCWQHRKCYAAGTYEEALKKHGSPLAKLLEKETAAGGE

SEQ ID NO: 76701 - protein, 360 aa, unidentified
MPMKTVQRKGLNFEGQNVYIGIDVHKKSWQVAIQTETGYEESFRMSSNHVEELRKHLTTNFPQANYHSVYESGFSGFSTHRELISAGINNIIVNAADVPTMQKEQVTKTDVIDARKLVRALRKKSIEGIYVMTKQEESFRELERHRDSLTEDIGRLKSRIKHLLHRNGIRFEEKFGGSGHWTKAFVKWMKEEIELPQMTKRALDDELDLYLILRKKKLEISLEIRHLMKDEFASEHELLTSVPGIGLITAATLLAEIGNFDRFRNEKTLASYAGLSPTCHSSGEKETKGEITFRCNRRLRRCLIESSWVAIRTDSALSSSFLELRKRMPACNAIIRIARKLLNRVLYVMKNGAIYEKGIN

SEQ ID NO: 76702 - protein, 399 aa, unidentified
MLNPQSLQLRVGVDVGSRCHSVAVGLTDGSLLEEFEIPHTAAGFGDFFARVERHAKRHPYPIAVAMEGYNGHVRPLDSLVKARGWRLFNVNNLKLARFKEIFPAAAKSDRIDSAKTLELFQLRDHLPMASDVLQEVMATPEENDILKRLSRRRRRLVNERGRVINSLHADLQAVAPGLLQITRDVGNLWFLNFLTCRKGLLKLARLRRASLLKVPGIGASYADAVQAWQGRAFFGHDANLVGDMIQQDAARILELKQQIKALEAQMAQVAESSSIAGQLASIPGYGSVCSAELAGEIGTIERFRSEASLALYLGMATLDNSSGKYRGSKTPKHVNTRAKAAMMIAIDHHRKRVPQSQRYYEKKRADGKRHNQAIRALGRHLCRVIFKMLTQDRPYWIDP

SEQ ID NO: 76703 - protein, 359 aa, unidentified
MASIASDPADVIVGVDTHKDQHVAVALDGLGRRLGERFVSAAPAGYADLLAWAASLGRVAAFGVEGTGSYGLGLARFLRRHGIVVLEVARPPRKGQRRRQGKSDPVDAEHAARELLAGASAVTPKTAEGAVEAIRLLKVARDTAVTAHSQAMITLKATLVTASDTLRAELEPRTDFALVTACAELEVAGDLADPDVAARHALRALARRWLALHEEIKVHTRQLKRLTSQTAPALVATFGIGFDCAAELLCAAGDNAGRVRSEAAYAKLCGACPIPASSGKTTRHRLNRGGNRQANAALFRIVVVRMRWHPATIAYVQRRTTEGLSKREIIRCLKRYVAREVYRLLPVPATASAEPLQAA

SEQ ID NO: 76704 - protein, 337 aa, unidentified
MDVTLIGIDLAKSVFQVCGVNQAGASVFNRQVRRSRLVQTVMQHPGATIAMEACSGSNYWGRVFQGHGFAVRLIPPQHVKPFVKGNKNDRNDAFAICEAARRPDLRTVTPRTLVQTDIMIIHRILQRRMACRTQLILQIRGLLNEYGIVLPTGKQRLRAALPLLLEDASNELTNAARHWLLALLHEWQRLDEDVVALERELAQQIRTQPAMQRLMTVRGVGERTASAVFAFLGDGSAYRNGRQFAASLGLVPREYSSGGKQRLGGITKRGNGYLRYLLIQGGWSVIQHARGRDDRLSRWASELVKRRGKHKAVVAVANKLARILWAISYRQDVYQAA

SEQ ID NO: 76705 - protein, 392 aa, unidentified
MFFVGIDIGKNNHVASMMDESGKVVFKAFSFPNTSDGGHALFSKLTSYSSSTDDFEIGMEATGHYWLSVYSFLFEKKFLLHVVNPIQTDGWRRGTEIRKRKNDVIDSVLIADLIRYGQFVETRLADEDLFSLRTLTRFRTYLVESISDLKRKVVCVLDQVFPEYQSIFSDIFGKTSKEILLQFSSPIDFESVSSETLAQLLAQLSRQKVGAAKAEQLKAAASSSFGVTFAKDSFTFQLRALIEQTSFIEKQVKETETEIAGIMEKLESPITTITGIGNVTGAAIISEIGDISKFDSPRKLVAFAGLDATVTQSGEFEAAHNVMSKRGSPYLRKAVFQSALIASFKDPVLSVYYQKKKAEGKHHLTCVGAVARKMCNIIYAVLKNNQPYVPKA

SEQ ID NO: 76706 - protein, 343 aa, unidentified
MQTIKTIGLDIAKSVFQVHGVDAAGQVVVRRKLKRRYVLAFFEKLPPCLVGIEACASSHHWSRELQTLGHTVRLMPPAYVKPYVKRQKNDAADAEAICEAVTRANMRFVATKTPEQQSGLVLHRTRHLFIRQQTAVINAIRTHLAEFGIVAPVGRNGVEQLLNVVANPNDKRVPEIARACLLALGAQLQRLKGQILEFDRMIRAWHRSSETSRRLDDCPGVGPALATALVATVADPKSFRSGRNFSAWIGLVPKQHSSGGNNRLGSISKQGDRYLRGLFVAGALAVIRYAKIHGSGHRPWLAALLARRPTKVAAIALANKIARMAWAMMAKGERYREPVALAA

SEQ ID NO: 76707 - protein, 345 aa, unidentified
MKEVYAGMDIGSKECAVVAIESGGSQIDSVVFKTSERNMVAFFSRHPNSKVLIEECEMAAWVRATIKPHVASVIVCDPKRNAWVAKGTNKNDRVDAAKLAELNRLGSFSEVWHPDDEDVAGFKVLVKHYDDTSKRLAEVKCQIKARLRKQGVVTRGEAVYGPRRDEALSRVDNTFARIAIEQDYELLDYLEGAKKAARSSVVAASGRFPVIALLKEIPGVGPILAARFVAYVADPHRFNKRTLASYSCLAVVKRSSDGSPLGREHLSRAGNSALKDLSRTAFERAMATRSPNGIKEFYAGSLTRTGDKTKARLNTQRKILALMLAIWRDKTEDRDELVTRAFTGA

SEQ ID NO: 76708 - protein, 344 aa, unidentified
MNMYYIGLDVHKKTISYCVKEASGQIHKEGKVGATRRELDEWMKTLPRPWTVAMEATIFTGWIYDHLLPHAAQVKVAHPVMLRAIAAAKKKNDRIDAGKIADCLRCDFLPECHMVSTEIRDRRRTLRYRQLLVHQIVQMKNRISGLLLETGVSHNKEKLHKVGYFRELLSSKGEVHESIRPLLRLSRETIVRLQKTEYALVSSLQRDPLLAERIKRLRTVPGVGPITALTWALEIGDVTRFRSIKQAISYCGLCGDEKSSADKVMRTPLSKQRNKHIQRVLVEAAKLAPRQDHELALVYEKEKEKGHANRATLAVARKMVAYLVSVDRAKRDFVAKENLNKAVA

SEQ ID NO: 76709 - protein, 342 aa, unidentified
MDEYDGRQFVGIDLHRRRSVIVRQSESGEQLSAVRIVNDPVALGLQLEQAGSDPEVVLEATYGWYWAVDVLQACGAHVHLAHPLGVKGFRYRRVKNDVRDAADLADLLRMGRLPEAWIAPPQTRELRELVRYRAKLVAIRSGLKAQIHAVLAKAGVLIAASDLFGVTGRQRLAKVPLGAAYAQRIGSLLQLIDIFDSHEARFAAMIAEQLDTHTGYHAIQQVPGIGPVLAAVFVAEIGDVDRFTDPAHLCSWAGLTPTHRESDTVVHRGHITKQGSKAVRWAAIEAVQRHPTTAKMAADKQRIEARRGKNIAKVAAARKLLTLVYYGLRDGHIRALDRTRAA

SEQ ID NO: 76710 - protein, 393 aa, unidentified
MFIVGVDIAKRSHEAIVIDDSGALVHKAFNFKNDADGFRKFTAILNAISSNPSDFTIGMESTSHYWLALYSNLKKHGYTVHVLNPIQSNALRGMYIRQIKNDEHDSFIIAEVIRFGRYTEGGMPPSDLYELRELCRARLFIVDMTADLKHKVIALLDQSFPEYERLFTDIFGLTSSEILRNYSTPEEILSLDTEKLTQLIAQTSRNRFGEEKAKQIRNLAESSFGIVLEYNTMGLLIKHHMEHIRFAEQQIAELEARIAKLFSKFDVCITTIPGIGPALGATIFSEIGDIHRFGSAAKLAAFAGLDPTVKQSGEFTGTRNHMSKRGSPYLRRAIWMASVSAVIHDPYMKAFLQKKLAEGKPYMNVIGHVTRKMTNIIYAVLRDNKPYYVQPFD

SEQ ID NO: 76711 - protein, 344 aa, unidentified
MITIGIDPHKSSITAVALDPAGHELGTIRLPVTGTLTGRLLEWAAPWPERAWAVEGAHGLGHGVSQLLAAAGEHVQDVPAKLAARARLLGGGSARKTDRTDAASVAAVAQHNGRLQTVEAEGAEALLRLLSDRRDDLANERTRHLNRLHVLLRDLHPGGAKRDLSTLQASKLLTTIRPVTPADIQRKALCRDILSDIRRIDDKIKTSTQELATAVNNHGSTLTEIHGLGTVLAAKILAHSGDVTRFPSKHHFASYCGTAPIEASSGDHRRHRLSRAGNRQLNTAIHVIAVCQARDPGPGQTHYRRKLAEAKTPAEARRSLKRQLSNVIYKRLLLDTERRLTPTP

SEQ ID NO: 76712 - protein, 322 aa, unidentified
MTKHITICAGIDTGKGKLDVAIEGRREQLQVENAPEGHKVLLAWLRQHRVKRVGIEASGGYEQPVVAELRRKRFVVVVFQPAQVRAYAKFHLQRAKNDKIDAALIATCTAAVRKIHAAPDPRLLPFAEQLTMIDQIGEDIARLKNRIESCRNAQINELWQEDIARLEQREKTELKTLVASIRKHSDLAKRLDLIQSVDGIGLRTAVAILVRMPEIGRITREQAVALAGLAPYDDDSGDHVGARHIEGGRKRLRHALYAASLAASFRWNQQLIQLYRRLIAAGKDHKRALVACARKMLIFANTVVARGTPWCDEPPVRSSSVS

SEQ ID NO: 76713 - protein, 402 aa, unidentified
MSNYFAGLDWASKTHALCVIDERGGVVERFDIDHDAGGLTELRRRLRRFGSPPVAIERPSGLLVDTLVDADFTVVPIHPNAVKASRPRYRSHGGKSDASDAYVLADLLRTDGHRFKALTPQSDEIRALRALVRGRDDLVATRVHLANQLRTLLESFWPGAAAVFADIDSPIALAFIERYPTPQSASRLGPKRMAAFCAQHAYCGRRSPDELLARLQEAPSAVSAETEMEAKGELARCVARTLTRLVEQLRLLSSRIEHLVASLDDGRILMSFPRAGRICAAQILAELGSVRERFATDAQLAAEAGVAPVTYESGKSKAVTFRWACNHRLRAAITCLADNSRHVNAWAAHVYANARARGDHPHSIRILARAWLRVIWRAWTDRKTHDPMQHRAAQLLLKAAGG

SEQ ID NO: 76714 - protein, 432 aa, unidentified
MNASIPASIPPLPPGAVAAYIGIDWADEKHAVALRSATEPAKIQHQLVDQRPEALTEWIGQLEQRFGSQGKILVCLEQSRGALIYHLMAYELFELYPVNPLQLARYRETFSPGGAKDDLPDADLLSELLYCHRDRLKVWKPDTELNRKLAFFNEGRREAVDQCTRLSNAIKSQLKVYFPLALELLDDDTSTALAADLLLKWPSLEALQKQNSHSLRKFFYAHNCRGESKMLQRLQRVQQAKPLTQDQAVIEPAVLRIQMLARQLKALLPDIARYEQNIAELFAAHPNHFLFDNLPGAGRALAPRLCSALGSDPERWESAQEISTLYGIAPVRRASGKKTGKRASIHFRQACPKFLRQSFHEFAACSIRYCTWAQALYDSQRARGKGHHAAVRAVAFKWIRILFACWKHRIPYDPQRYLQALQHRGSPLANAC

SEQ ID NO: 76715 - protein, 347 aa, unidentified
MGIVVALDVHRNQITYKLLDRDTGEVRRGRVAPAARVDVRAWLEQFAGCEAEFALEGTTGWRFVVEEIERAGHRAHLADPAETAAKRGRKRRAKTDNADCDLQLRLLLAGELPESWIPPAHILELRARVRMRKTLIDQRTAWLQRVQAQLFQQGVPAGLRLRSEVGRQALAAAELSPAGRDLVGLGLRMIDALDRELAPLTRELGAFARRQPGCRALIARLYGVGPVSATAILAELGDARRFSSSDDAVRHAGLDVTVHQSDSKRAPGHLSHQGPEVLRWALFEAALSAARVGSPDHGYYLQVAERIDHNRACISLARKLCRRAYHILRELGDEALAPVEEAIAAAA

SEQ ID NO: 76716 - protein, 318 aa, unidentified
MYVGLDVHKKYCYYAMVDGRGTVVKKDRFRTTVEELEEFASALPQGDQVAIEASASGCFVYEQLDEQGIAVHLAHPTMVRPFAKKHVKTDKVDAIVLAQLLRMDYLPESYVPDEAMRDLRTLVRHRAGLVRIRTSLKNRVHALLTMEGVQPPAVSDLFGKKGREFLETVKIRESRRLALDNYLKVLDELNERITGVEQFLEEKAESTEEVAWLRTIPGIGLHNAVLILSELGEVSRFSRPQGLVCYAGLAPKVAQSGDQVRYGHINRQSNGFLRWAFVQSAWSAVLSSTPNRFQRIYQKVKARRGAKIAIVATARHLA

SEQ ID NO: 76717 - protein, 461 aa, unidentified
MPVQPQSKPKKSRRPANPLAGLPPLNLNAAGIDVGGASHFVAVPADRDPRPVRQFDSFTADLHALADWLAQCGIDTVAMESTGVYWIPLYQILQARGFEVNLVNARHAKNVPGRKTDVADCQWLQQLHTFGLLKNSFRPPDQICALRSLLRQRENLIAAASKCVQHMQKALVEMNIQLTNVISDISGETGLAIINAILAGERDPERLAQLKNPRVKASTATIAKSLQGNWRDELLFILAQSVWLYQGYQTKIAECDGYIEAQLRLFDAKATPAQTPPLAKRGRRKGGNRPNFDLGSHLLRIAGVDLTRIDGLDVLTVQTIISEVGLDMSPWKTEKHFASWLGLCPDNRISGGKVLKRKTRKVLNRAATAFRLGAWNLRRSQSALGANYRRLRTRLGAPKAITAMAHKLARLFYRMLKFGQEYVDQGMAHYESRYREQQLKWLHKQAASLNMQVLPAQRAAT

SEQ ID NO: 76718 - protein, 435 aa, unidentified
MPESKTQKPKKQKAKKLVEPIEIDNDALYENCAGLDVHQETVVICVLFGSIDKRPKKVVETFKTTTSGLLDLADFLLSYNVTHVAMESTSVYWKPVWNVLENTFSLILANARTIKNVPGRKTDVKDASWIAKLLRNGLIEGSFVPPLPIRDLRDLTRYKRKLLNDLVAEKNRIHKTLQDANIKLTTYISDIFGVSRRNLLEAIICGQVIKPADLDVLIKGKLRKKIPEIVDALNGRLRLHHREMLLYSWDHILYIEKVIANIEVKIQQELVIYQEAIELIKSLSLIKDTTAAVIIVEIGVDMTVFHSDKHISSWAGLSPGNNESAGKRKSSRTTQGNTALKSILCQCAWAASRQRDSRLNALFWRITKNQGKKKAVIATAHEILVIVYHMLSRGVPYNELGRDYLGKHINNQESKAVKYLTQKGYIIQPPEGECA

SEQ ID NO: 76719 - protein, 317 aa, unidentified
MNCQHNHTFIGIDISKNAFDYADSIAMKPKRCTYDEDGVNHAVEQFTLLAPKLIVMEATGGLERRLAHRLMKEGFDVVVANPRYIRSFAVGMKQLAKTDKLDAKIITKYAKTAELEPDTLPTPYEIRLQALVTRRLQLVEMRTAESNRMARTEDVEMCQSVQDMLDMIDKQISGIEASMKKIMEKAEGVRERVALLKSMKGVGPVTSGVLVTMLPELGRVNGKEIAKLVGVAPINNESGESWKKMRTLGGRKRVRTALYMAALSAIRWNSAIRIFYERLRAAGKSKMTALVASMRKMLTILNAMIKHNQPWRDTVNP

SEQ ID NO: 76720 - protein, 355 aa, unidentified
MLNTKYIGMDIHKETISIAVRNAEGKIVMESVIETKANTVLQFIHGLRGDLHVTFEEGTWAAWLYDLLKPHVTEVLVCDPRKNALLKQGSKSDKIDARKLAELLRLNHLKPVYHGEHGVRTLKELARSYLTITQDLTRVRNRLKALYRSWAIPCSGTQVYAPRHRSEWLGKITEAGVRRRAEHFYQQFDALRPLRQEVRRDLLTEGQKHKAWKLLRQIPGIGAIRAALLIALIQTPHRFRTKRQLWTYSGLGLETYDSAQYCVVEGQLQRSKRPVTLRGLNQNHNHDLKALFKGAALEASSGAGPFHDFYEALLAKGRKPSMARLTLARKIAAIALIVWKKEVSFDANYLKQQAA

SEQ ID NO: 76721 - protein, 334 aa, unidentified
MMYVGLDVHKKVCYGTVMDENGVVVRQGKFNNDFEALYDFMDGLEGASVVMESGYCWQPLYEALEESGHTVKLAHPKEVKALAKKKTDKIDSETLAHLLRTDLLPESYVPPRDIRELRDRVRRRAFLVGMRTKVRNRIRAELIKRRIQMRLDLRTVKGRMLLKGLELGSLGVVQPVLEVLERQITIISRDLRKMCGENQNAELLTTIPGVGYYVALLLVAEIGDVNRFPDSESLCSYAGLVPVVWSSGGSTHHGGITREGSKWIRWALTQAVHVHIRYDTNLTRFYKRLAAKKPSQVAVMATARKMLKVVYWMLRNNEPYHPEPGVVDPVHRAM

SEQ ID NO: 76722 - protein, 411 aa, unidentified
MNTLFVGIDASMNTNQVLAMLPDGSEVDAFRVANDLPGADALAERLVKVLTAHECDHGVLGVEATGVYAWHLVQYLRQCPALQPYKPLVYTFNPKVVKGFKKAYPELPKTDQVDAWVIADRLRFGRLPAPGGLEDRYEALRRLTRTRYHLVQDLVRAKQRFLNALFLKFSSFAQDKPAGKAFGATALAFTVETECTEALAATSIEELTDRVTRYSRNRIADPAEVAAAVQKAARSSYRLPKAMADSVNLELATHLTLIRSLEQQITALAGPIGQLVATIPNTLGSVKGLGPVYVAGILAEIGDIWRFPNHDAVAKYAGLAWSRHQSGKFEAEDTRLIRTGNRYLRYYLIEAACSLTVHDAEFKRYYQRKKAEAKTHAHKRALALTARKLVRLVDHLLRSNRLYNPLGAPRR

SEQ ID NO: 76723 - protein, 354 aa, unidentified
MKRTTKYVALDVHQATTSASVREESGRVIARSVLPTDGGAITEFVRGMRGAVHVALEEGTQAQWLRDLLAPLVDRVVVCDRRGAPRQGNKADQVDADQLSEQLRRGGLRAVYHGSADRATLKELTRTYRNLVEDATRVMLRLKALFRARGIPAAGKRVYHPRARAQWLAQLQDPGARLRAETLYAELDVLRHLRPRAKAAMVTEARRDPAWPVLRAIPFFGSVRVAPLLATMQTPWRFRTKRNLWAYAGLAVVTRSSADYAVVAGETVRRRRPPMTRGLNRNHNRVLKHVFKGAATAATARPGPLQDFYHSVIARGTREELARLTLTRKLAALTLRLWKKGERYDPTKLTTPAR

SEQ ID NO: 76724 - protein, 307 aa, unidentified
MYVGIDVAKDRLDVHVRPSAEAFAVARDGEGLAQLTARLDALAPRLVVLEATGGFEVTVAAALAAARLPLAVVNPRQIRDFARATGKLAKTDALDAAAIAHFAEAVRPEPRPVADRQAWALGELVARRRQVVEMIIAENHRRRQLTQRRLLRRLDRHLTVLQQELTEIERDLDDSIRGTPAWRESDDLLKSVPGIGNATARTLLAELPELGTLDRKRIAALVGVAPLNRDSGTMRGRRSTWGGRANVRTALYMATLVASRHNPVIARFYARLRQAGKPAKVALIACMRKLLVILNAILRDRRPWQNA

SEQ ID NO: 76725 - protein, 340 aa, unidentified
MGKRYIGIDLHRNRFTCCIRLENERTYVTEWELEDLGKFVKKLRPSDEVAVEITSNTRLFYDAVAPHVARVVVVNTSQFKVIRQSVKKTDAHDARALALYLSKDMLPEVRMKDKERGQLASLTQTRDTLVKLRTALKNKINNILSARGLNLAKEALGSEKKLGEVLELPFDEMVRIELRVIVEQIRSLNKSIAELEKTIGEEGSKLEGHKGLSSIKGIGKITGAILLSVIGDVNDFADEGRLASYFGIVPRVSNSNETEHSGRIHKRGTKLGRAALVQSALIAAKYSPYLKRFYERVKARRGAGKAIIALARKFLGIIYRTLKNKWVFEDFPNFVLAEAS

SEQ ID NO: 76726 - protein, 351 aa, unidentified
MIIIGCDFHTRYQEIAWLDTDTGEIQERRLEHAGDEVRMFYGALSGPVRVGIEATGYSQWFERMLQQMGHEVWIGDAAAIRASVVRKQKTDRRDAAQVLDLLRTNRFPRIWVPTPAERDLRQLVLHRVKLVQMRTKVQNQLQAMAMGQGVCRKKKLWSVRGRAELERLPLDRWAQRRRQELLQLLDHLDGSIGELHAAVEQQARQHPEALRLMTHPGVGPVTSLAFVLTLGPASRFARGKKVASYLGLNPSEHSSGGGQRLGSISKQGNATMRWLLVEAGQTAARLDPELRRGYQRLKFRKGSAIAKVAIARKLAVRLYWMLRSQSDYATLVRMSGSSSGAVVPEAQESGR

SEQ ID NO: 76727 - protein, 336 aa, unidentified
MSQQYVGIDLHRRRSVIVRTDAAGTVLGEARIENDPLALAAEIAKAGPAPEVALEATYGWYWAADLLAECGARVHLAHPLAIKAFEHRRVKNDRIDATLLAELLRMGRLPEAWIAPVPVRELRELVRYRHKLVDIRSGLKSQVHAVLAKEGVRVPMSDVFGVAGTQLLDDLELGDAYLVRVESLRDLIIGLDAEVTMLDRRIHERLATNPSYRAVQQIPGVGPVIGAVFVAELGDVTRFRHANQVASWAGLTPRHRESDTKIRRGQITKQGSRLVRWAAIEAARAPRAHSWLKTHYHHLAQRRGKNIAAVAIARKIVTLAFYALRDGELRCLTRTA

SEQ ID NO: 76728 - protein, 324 aa, unidentified
MITKENPPVFIGIDVSKANLDVAVRPTGESWQVSNDPEGIGQLVEKLRQYSPMVIVMEATGGYEAASAIALGVAGLPIAVINPRQGRDFAKSLGRLAKTDRIDATILARFGEAIRPEPRKLADEQTLQLQAVITRRRQLLEMLVAEKNRVMLAHTIVRPRLIEHIQWLENELDQVDKDLRDQLQKSPLWRENDENLRSVPGVGPVTSTTLLAELPELGHLDRKKIAALVGVAPYNCDSGQMHGKRAIWGGRAAVRSVLYMATLSATRWNPVIRSHYQHLRDEGKPFKVALVACMRKLLTILNAIIRSKSSWNPDLAVPKSLATA

SEQ ID NO: 76729 - protein, 339 aa, unidentified
MMIIGCDFHPRFQQIAFVDLETGECGERRLSHPEEAERFYRSLASRKVEIGLEATGNFRWFRRLIHELGYEFLLGDPSQIRALNPRRQKTDKRDARHILNLLLEERFPAVWQPPEEDLRQLLLHRCRLVRMRVRIKNQLDSMAKNEGLLDGRGWSAKRRRQIEALPLSGWEHRRRADLLYLHDQLDEQIEPLEKAVREAAENNPQSCLLMTHPGVGPVVSLTYVLTIGDWKRFQRSRELASYLGLIPSEDSSGDKRRMGQISKQGNRLLRWLLVQAAIKAQRHDARWHRQYLRLSLNKHHGVAKVAIAHKLAVRLYWMLRSGQNYKQVMERGSHAGQPV

SEQ ID NO: 76730 - protein, 411 aa, unidentified
MEAVIERAAGLDVHQGSVVTCVIIGAAGRRSSRETRTFGTMKRDLVALRDWLLEVGVTHVGMEATGIYWHPVHAVLESAFTVIVGNASHMRNVPGRKTDVKDAEWIADLVRHGLVRASFVPVPEVRALRELIRHRKAVVGTMASERNRTLQLLESANVKLASVMSDVFGVSGMLMLQALAEGRAAPVEMADLAKRRLRRKIDQLALALDGHLAEHQRLLLGLHIRRLTEIDRDLAEIEAAIGAAMRPFATQQACLATIPGVDQLTAASIIAEIGIDMSVFGTAQRLAAWAGVCPANHESAGKQKRRGTRKGNTFLKATLVTTAVSASQAKGTYLRDKFHRLKARMGTKKAAMAMAHKILVAVFHMLQRGVTFADLGGDYLDRINKHSTAKRLVRRLDALGYNVMLQPKAAS

SEQ ID NO: 76731 - protein, 355 aa, unidentified
MDNCTIIGIDLGDKKHAVVGLDDKANVVLKRWIPNTKADLEALFRRNRRAVFGMETGTHCRWVSALCGQCGCEVYVGNAHHLRSIFGNSHKNDMRDAEEIARLLHGDKRHFHPVQLRDAEHQNLVQLVKMREIVVSQRTKSANAIRGMAKANGVRLPDSDADSLHKKLAAVVDTLPESLQTLLGPQVGLLEKLCAAIEEYDRAIRDYRNAHFRKECNLLETIPGVGPVNAAAFVAFTGDVTRFRHARDVGPYYGLTAGRDQSSSKDEPKKITKEGNGFVRHLLVNAANLIMQGRGRNTELRQFGLRVWGNRGKVAKRKAKVALARKLAVTMAAMLRSGAPYNGIMEENENGQSNA

SEQ ID NO: 76732 - protein, 343 aa, unidentified
MDHFAGLDVSVKETSLCIVDDAGRIVREVKVASEPEALLAVLTNPACHFKRIGLEAGPLSQWLFKALAEAGLPVICVETRHMRAALKAQINKTDRNDARGIAQMMRAGLYRPVHVKTLRSQKLRMLLTHRKLLQSKAIAIENDLRATLRNFGLKVGVVGTVKFEARIKELVESTTDLVVLVEPLLIVRRVLREQIGILHRRLLAIVRNDAVCRRLMTVPGVGPVVALTYRATVDVPYRFRNSKAVGAVFGLTPSKHQSGESNRTGGISRCGDEMMRMMLYEAAHIMLVRSAKWSWLKAWAMKIARHRGLKKAIVALARRLAVIMHRIWVDGTEFRWTREVAAA

SEQ ID NO: 76733 - protein, 348 aa, unidentified
MSTVTIAVDLAKHVFELAVAGRAGTIRERKRLSRPQFEQFWSQRGPCRVVMEACASSHFWARFLVSRGFEVVLLPPHYVRPYRRRNKTDRSDCEAILEADRCAGIHPVGVKSEDQQALIGLHRVRSQWMESRTARINAMRGLLHEFGICGLPGSKRFMNELHPFLASKQLPPRVRRTIGMLWDEVRDLEQRIQAVETELEGVAGTNPVIQKLLAIPGIGLLTATALFATVADIHAFQNGRQLACWLGLTPRESSSGGRRRLGPISKQGDPYLRMLLVHGARSALNAASRLAKADKPLTQLQAWSLKRAHESHRNKATVALANKLTRIAWAVWHHERAFDGNHVVRVAA

SEQ ID NO: 76734 - protein, 405 aa, unidentified
MPYFGGLDWGGTGHAVCVVDGVGTVVLSLEITHDAAGLAELRKRLAKLAPPGELPIAIERPSGLIVDALVEAGHPVVPIHPNVVKACRPRYRAAGGKSDPGDAYMLADILRTDGHRFQPLTPCSDEIKALRALVRGRDDLVAERVCLANRLRSLLESFWPGAAAIFAAIDSPIALAFLQRYPTPDSAARLGEKRLKAFLAGHSYCGRRSPADLLDRLRTAPTGLAGETEAEAKGEMVRALAAVLERLVAEIAKISARIEHTVAELPDGKIIMSFPRAGRICAAQILAELGDQRQRFQTPDQLAAEAGVCPVTHASGKSRGVVFRWACNHRLRAAITCFADNSRHASPWAADIYKRARDRGCDHPHAVRILARAWSRVLWRAWINSAAYNPEAHAAAVVHNQPRAA

SEQ ID NO: 76735 - protein, 345 aa, unidentified
MGQVCQIGLDIAKEYFQVHGVDKNGKDVFNKKLKRKNVLSFFANLPPCLVGLEACGGAHYWARKIAKLDAGHTVKLISPRHVKPFVLNNKTDAADARAICEVVGRPSTRFVTVKTVEQQDLAAWHRIRERKIKERTALANQAKALLLEQGIVVAKGITRIRKFLPIAVENLENRLSMTARDYLSELYAELVTCDELVEKYESRIISFAKNDEACKRLQKIPGVGPITATAIVVHAADATEYKNGRGFAASLGLTPKEHSSGGKQKLLGISKRGNNTIRKLLIQGARIITRYALAGEDKGYPVQKWIQGVATRRGRQIAAVALANKTARIIWNLLAKKEEYRPVMA

SEQ ID NO: 76736 - protein, 345 aa, unidentified
MITIGIDPHKSSLTTVALDPTGRQLGARRFPVNAGTLRAVLAWAAGWPQRQFAVEGAHGLGRGIAQQLTAAGAHVLDVPATLAARVRLLTTGGGRKTDTHDAHAVAQIALHQHGRLRIITAEDQTVILRLLSERRDDLTAERTRLLNRLHQLLRELIPGGAELHLSGDKAAALLRGVRPATATDACRRDLARELLGDLRRLDRRLTDNQAQLRDAVAVTRSGLPEIHGLGTISAAKIIGIVGDIDRFPSSGHFASYTGTAPLDASSGQRVRHRLNTGGNRQLNATLHTIAVCQARDPGPGRDYYLRKLGENKTPNEARRALKRRLANVIYRQLLKDQRRPVSPAT

SEQ ID NO: 76737 - protein, 369 aa, unidentified
MTDNTLFVGLDVHKKTISVAMVEATAGAEVRFYGTIPNTPDTIRSLYKKLAKDGQQLHICYEAGPCGYGVQRQASKLGHRCDVVAPALIPRKVGDKVKTDRRDAMMLAQTLRAGQLTAVWVPDEAHEAMRDLVRLRAQAMRDLRKTRQHLLSFLLRHGLTSLHGHWTLAHRRWLAGLTFAHPAQHLAHEEMLMRIERAEALCDRLKKAITDLVPQWTLAPVVQAIQALRGVSLIVAAVIVAEVGCFSRFDSPRQLMAYLGLNPSEHSSGATIRRGGITKTGNALARTCLVEAAWTYRFPARVTQIIRARQKELPEPIRNVAWKAQVRLSARYRKLTAAGKPAPKVVVAIARELVGFIWAIARMVEPKFA

SEQ ID NO: 76738 - protein, 328 aa, unidentified
MKQAGKQQEVTPARVWVGVDIGKDSVTIARSDAAGVLAVANTPAALATWLASVPAGSAIAMESTNTYHEVLASLAHALGLRVHVLSPRRTYHYARARGQRGKTDRVDASLILQLLIREDEQLPRWQPAAPGNVRLRRLLSRRAQLVRANAALRQTLAGISELGAIRRQTQTAFKALIARMDALILKTLAADPVLAALHARFKTIVGVGDIVAAQLVQALTRVAFANADAFVAFTGLDPRPHDSGQHCGRRRLTKQGPPLLRHLLYVAAMSAARTKLWHPTYARLRARGLASTEAIIVLARRIARIAFALFKSGAAFDPDKFAPHPDRP

SEQ ID NO: 76739 - protein, 344 aa, unidentified
MEYYVGLDVSLRSCALCIVDGKGTVLFEREVPCEVGDIAECLVEFPHPIERVGFEAGAMSQHLFFGLTAEGFDVACMEARQVNAALSAMRNKTDKTDARGIAQILRTGWFSPVYMKSREAHGLRALLSTRKALLKKTMDLANEVRGLLKIFGIRLPQTVKHGSFDGVVRPMIEIDDVLAHALVPLLDARVVLYQHYLELDRRVKRAASQDDVCMRLMTIPGVGPIAALSFKSAVDDPTRFKRSRTVGAHFGLTPRRYQSGEHDNPGRISKAGDRDVRAVLYAAANALLMRTMASSQIKSWGMRLMRTKGRRRAVVAVARKLAVLMHRMWIDGSEFRQDQVGGMA

SEQ ID NO: 76740 - protein, 375 aa, unidentified
MKDKVRFLGLDVHAETIAVAVAEPDGEVRSLGTIANREESIRKLVKKLGPPEHLRACYEAGPTGYVLYWQLTQLGVECAVVAPTLVPTKAGDRVKTDRRDALKLARSHRSDDLTAVWVPDGDSEALRDLVRAREAAKQDQLRARHRLSKFLLRMGRRPVAGMKAWTEPYMAWVRQVRFERPAQQATLLDYLHEVDHMAARVKRLEQAITEAVKLASPKVQEVVKGLQALRGIAEISAVTIVAELGQISRFDTARQLMGYSGAVPSEDSSGKRKQRGSITKTGNAHLRRIVVEAAWSYRHRPTIGPRLRKRQEGVAEPIKEIAWKAQVRLSKRYARLAAAGKDQRKIITAVGRELLGFIWAIGVNVEADSKLRMAA

SEQ ID NO: 76741 - protein, 407 aa, unidentified
MICVGIDVSKRKSTVCFMAPGDKIIRRPFDVKHTKEELQPLVDEIRVQAKYDEIKVVMESTGVYHLSIAYFLQQNGIFVSVVNALKVANFNKAENFRHTKTDSIDSTNIARYGIAYWAKLPQFDLNGDKYFLLKRLCDAYLNFSEERSRILLQLQSQLEQTMPGIFDLFGGFDINSGKDKLLDFLKRYCHIEDIIAKSEAEFVASYREWAKEKGYRSNESKAATIYAQAKNGIPSIPNNPIVRETIMWYVGLLRRADEALMASLTRMEDIAKDLPEYELVGEMGGVGRVTRVALIAQIGDVRRFKNKHSLICFAGLTPSIHESGKFRASQNHIVKKGPARLRKVLYQVMMSLVMHKIPKDDAVYRFIKKKEAEGKYKKVAKVAGMAKFLRIYYGRVMHLYRDLGLAA

SEQ ID NO: 76742 - protein, 363 aa, unidentified
MENVRFVGLDVHANSIAIAVAEPGRGEPGLLATIPNDTVLLLKRLRRMGTVRCCYEAGPTGFGLQRELTEAGIDCIVVAPSLVPMKAGDRVKTDRRDAVKLARFLRSGDLTAVYVPDEATEAMRDLERARDDAKKAERVALHQLSKFLLRHGRRPPMKGKKHEYVEWVRRQHFEHAAQEVVLVDYLKTYEDLRERVARLTKRMEELVESWSQKPLVRALQALRGVSAISATIIVAELGDLARFQTAPQLMGYLGLVPSESSSGETRRQGRITRTGNGHVRRILTEAAWAYRFRPAVTQPIRARSQGISDEVRRIAWRAQERLCGRYRKLTARGKNKNRTVIAIARELAGFIWAIGREPKLLAT

SEQ ID NO: 76743 - protein, 409 aa, unidentified
MDIVRPRCPGIDIGKRSLTACVITTDARGTPAKEIRTFGTLTSELLALADWLEAAGVTAVAMESTGSYWKPIWNLLEDRFELLLANAAHLKAVPGRKTDVRDAEWIADLFRHGLLRASFIPPRPERELRELVRYRTTLVRERASEINRLAKVLEGANIKLGSVSTNIGGVSGRAILAALASGTTDPAVLAELARGRLRRKHDTLVEALAGSVGPHQRFLLATQLHHLADLDALVESLDAEIAGRLRGADELIERLVTVPGIGRRTAETVLVEIGTDMARFGSSRRLASWAGMCPGNYESAGTRHGGRTRRGSPWLRSALVGSARSASRTDTYLGAQYHRLAARRGAKRASVAVGHTILGIIYAVLVTGQPFHDLGPRYFDDRDHERVRRRLTRRLEQLGYAVTLRPDAA

SEQ ID NO: 76744 - protein, 358 aa, unidentified
MEQRRFVGIDLGKRTYEIKIIGSNGRVTGTNGLTSPKGRKELYKRLLSTDRIAIEVCSLSMVMAKEIHKEVGCEVVLLNPSQIALIYRSVKKNDKEDALKLARLVQKFTDEELPKVELPSEHEENIRHILTEFRQLRHDRTKEINRLHALFLEGGITEIKKKDLAGDSSRKESVKMLKGLFLMQAERIIKRLEIIDGQTEEIEKLLDREIDGDKNIERLTEIPGVGKQLASAYVAFIGDGSRYSNVSAIGAATGLVPRLDMSSTVCRLGHITKCGNRHLRSLLILAAWSHIRYSGESALKEKYLYMTKVLSKGKKIAIVATARKLAELMYTILKNDTPYEKRISPAFSTRKLADEALA

SEQ ID NO: 76745 - protein, 347 aa, unidentified
MRFYTRQHRHYCGVDLHARTMYVCVLDAEGNVLVSKDIASAPEPFLELIAPYREDLAVAAECMFTWYWLADLCAREGLVFVLGHALYMRAIHGGKAKNDRIDAHKIAALLRGGMMPQAYVYPQAMRATRDLMRRRNYLMRQRAELLAHITNTNHQYNLSALGVRPARPAERAGIAEHFTDVPVRKSVEVDLSLIAHYDRELPTLERYIETSAQAHDPLGLAIVRTIHGMGKVLGLSILYEIHDVGRFSRVQQFLSYCRLVKPTKASGGKILGHSGRKIGNAHLKWAFSEAAVCFLRANKPAQALRARLMAKHGKGKSLGIIAAKIARAVYFMLRRSEAFDAERFFAQ

SEQ ID NO: 76746 - protein, 342 aa, unidentified
MKDMMIGVDLAKNVFQVHGALRTGEVQFRKKLTRTQFPVFMAQQEPCLVIFEACGGANYWAHEMRTIGHEVKLIAPQYVRPFVKRQKNDAADAEAIIIAARQPEMRFVAPKSVEQQSRAAVFRGRERLVHQRTADVNALRALLHEHGHVFPQGTRSLNRMKALVEDETTDLHALIRQECADLLVQISEKTARITERTVKLKTLAADSDRSRRLQTMPGVGPLTAVAVEAFGPDMAQFKTGRDFAAWLGLVPKQHSSGGKERLGRMTKAGQADIRRLLIIGAMSRLNWLGQRSIIEGSWLSRMLARKPKMLVAIALANKMARQMWAMMIKNEDYRNPALATAA

SEQ ID NO: 76747 - protein, 462 aa, unidentified
MADGVHDGEPDGEPEEILARVAAIDVGKDSGMVCTRLPHDTRAGRKVQKVWEIPARHDDILALGDHLRAHGVERVVIESTSDYWRIFYYLLEAAGLVVWLVNAREVRNVPGRPKTDKLDAVWLCKLNERGMLRPSFVPPAEIRDLRQLTRLRTKLGQDAARHMNRIEKVLEDALLKISVVLSDLFGTSGRRILNALVAGQRDPARLAELADYRVRASPARLRAALTGRFRDVHAVEIGMLLELIGLLEAKVADLDDQIAAMVADLPGAAPACGICALVGGEHAPGCADAGVRLLGLAERLDEITGVGMSCAQVIIAELGTHVTTQFPTAGHAAAWAKLVPVVRQSGKTSRSGPTGKGNRWLRGALGTAAMATAKSKGTFLGERYQRIRRRRGKQKAMVAVGRSILEIAYLLIANPTLRFHDLGADYYDRLNSPEQQARRKIREIERLTGKKVHLVDGEAVAS

SEQ ID NO: 76748 - protein, 335 aa, unidentified
MHYLYYVGLDVSKETFDASLVAFEDANEMAHRKFANSRKGICSCLHWVEKRHGIRLDDVIFCAEDMGSYISEMAVCASDRTLTFNFSLISPLVIKYSMGIARGKTDRVDARRIAEYAITHYRKIALYLPAEKELCQLRTWLILRAHLAKQRVAKLVLLEKLDYKEKFADVSIQRSMLQEEIAYAEIHMKTIEREMKELIAADSNICRNYKLLTSIKGVGPITAIVMLCSTLNFTKITDHRKFACYCGLAPFEHSSGTSVRGGCHTSSMANRDIKVQLNRSALIAIRCDPQLKAYYERKAAEGKHKFSVLNAVRAKIAARCFAVVRRVTPYVALQI

SEQ ID NO: 76749 - protein, 340 aa, unidentified
MKSYVGIDLHSNNSYVAITDESDKVIYKKRLANDAELILKELEPYGESIVGIVVESTYNWYWLVDRLQETGYAVHLANTTAIQQYSGLKYTDDHTDAVWLSQLLRLNILAEGHIYPKEKRGMRELLRRRMILVRQQTSSVLGIQAMLTRYENVRLTGQKIKSCHKKEDEILKHAKDDSVRLAVQAQLKVLNCIIEQIDSLEKNILQEIKDDEFFKLLKSIPGIGSILAMTILLETGNISRFKSPGNFSSYCRCVESKRISNAKKKGQNNKKNGNAYLGWAFVEAANYAIRYSEPVKKYYQRKLSKTNRIVAIKTIANKLSKACYFILRDKVEFDVKKLFA

SEQ ID NO: 76750 - protein, 344 aa, unidentified
MTNIQPKETAQEAKPDLFAGIDVGAEELILVIRKNGKPFDPQKFANTPADRDRLVKKLVKLPGIIVCLEATGIYHFDLSLALHDAGVLLMVVNPKASHNFAKVLMKNSKTDAVDANTLAEYAARMDFVAWTRPSDETIALRSFARRISALTGQKAAAKNHLHALTATSETPKAVLKDAKLAITQLEKRIDRLTAEALALIGKHPELERILALLIGIKGIGNTSAIALMGELLLLPPDLTHREWVKFAGLDPRAFDSGKSVHKKTRISKAGNRHIRAALYFPALSAKQHDKHVKAYFQHLMDNGKTPLQGVCAVMRKLLHAIHGMLKKNEPFDNTRFYAIPESTG

SEQ ID NO: 76751 - protein, 373 aa, unidentified
MAGNSQKLNEGELSLYSMFISQGYVPVGVDLAARVFQVCYLTEKQKIKNKALSREAFLDFLKSPPFSQPLMVGFEACGGCNYWARFIESLGHKYRIMPAASIRAFLGLQKTDKIDALAIFKGTICPSVRTIRARDEENQTLMNLLAAREQLLKQQIQSLNAQRAMLYELGEICGEGAAKIDAATDKLKESLEKSQSEAISNFRMIAEPIKANRDSLEAQIKQIDLYLKQYAKNNRTVQNLMTIPGIGVLSAVTLYAVLGNPDDFPNSRHFASFAGFAPTVKGSGGEIQVGKIPHTGNRQLKKILYMCAIARFSQQSRKASAETQASKLTQLIDNPEISNKKIVCSIANRLARVAWTIAKSGEPFNAKKCRLLG

SEQ ID NO: 76752 - protein, 318 aa, unidentified
MPHVTSIGLDVHARSVAAAAFNPFTGEVVHRDFGTDAAEIAEWALGFEEPRACYESGPTGFHMARELRALGLDCAVAAVSKMQRPAADARRKNDRRDAEFIARMLATHNIVEVPLPDAAVEAARDLDRALDDATVEYRRARQRLNMFLIRLGHVWDERNADGTRKGSWTRAHWRWISGIRLEGPQRDVLEYYVTAARCAESDRRQLEKKALALARTDRWRPAVEALSCIKGIDTLTAFRLAAEAGSFTRFRTAPAFASWCGLTPSEHSSGESERRGGITKAGNALARTALIESAWHYSMCSPRPKAPAPGTDVPPAIR

SEQ ID NO: 76753 - protein, 344 aa, unidentified
MKKVLIGIDFSKEKFDVAIIVKSTSTQEHALFDNKVSGYRKMIKWINSVVEDIPCSSWLFCGETTGGYSRMMSDWLYAQGYDVWIENALVIKRTFPLKRLKNDTVDAFMIAEYALRFEDRAQLYEPLSQALTELREIFLYRHHLVRHRCSFEVRRIEQRFTQQKSANKNVISQSARHIITEINKEIAKCDEKIKEYIESDDQLSSIFAIVTSMPGVGTINAVSLMVYTNNFTKFAYNPRKIACYYGIAPFGRDSGTSVHTDPRVGFIANKTLKSLLTQAALASVRTCPQIAKYYQRLIERGKKPMVALNNVKNKMIAIITAMVRTGCMYQPDNICLATQSVIVK

SEQ ID NO: 76754 - protein, 344 aa, unidentified
MQQYVGLDVSQKETAICVIDEAGRIVFEGKARSEPGVLAKVIAKRAPHAVRIGFETGAMSSWLWHELKRIDLPVVCIDARHAHAALSVRINKSDPNDARGIAELMRVGWYREVKVKSEASALIRSLLVARARLVGIRRDLENQVRSLLKEHGLLFPRAIGAQFRARVRELAGEGELRAIIECLLAVHEQVTDEQIKLDGRVREMAKADQTTRRLMTVPGVGVVTALTFRHTIDDPSRFKSATSVGAYLGLTPRRRQSGELDLTGRISRWGDRLLRTYLFEAASVLIHRTKRTSPLQIWGQRLVKRVGLKKAKVAIARKLAIILHCIWTDGTEFDWGTPTKVRII

SEQ ID NO: 76755 - protein, 343 aa, unidentified
MEYYAGIDVSLERSSLCVVDATGRIVREAKVASEPEALVAWFRGLGFEIVRVGLEAGPLSQWLYAAMRDAGLAVELLETRHVRDAFKAMPVKTDRSDARGIAQLMRLGWFRAVHCKSVPAQETRALLTARKLLQTKHHDVEMSLRGVLRGFGLKVGPTTARSFAGRIRELVGGHPTLTAVAEALLAARDVLGEQLRGLDKRLCNQAREDNRARLLMTTPGVGVIVALSFSAAVDDPCRFRSSKMVGAHFGLTPRKYQSGETDVTGRISKIGDASVRTALYEAANVILTRPVKGSELKSWAARLAKRAGMRKAKVALARKLAVVLHRMLKDGTPFAANRAAAGA

SEQ ID NO: 76756 - protein, 414 aa, unidentified
MESVYRSIAGIDVHKKMLAVVIRRQCGERVEYEKRRFGTTRAEIQHLAAWLAARSVSEVVMESTAQYWRPVWYGLEPHFRLHLTHPLKTQAPRGRKSDFRDAQRLADRWSSGDLEDSFIPGAEQRSWRWLTRTRVQLKKKVGVIRSQVEGLLEQGGIKLSAVVSDLFGVSGWAMLEQIAGGVTDVEVLAKEARGGLRKKDKQLKEALEGQLEPVYRLLLKQDMDQVRLLRRQVEEINQAVAEAMKEHIPALHRLSKIPGVDLYAAQELLAEIGPKAAAFASAEQFASWAGVCPGSKESAGVNYSHRSAKGNRYLRRLLCQIAWAAIHTKQTFFAGLFARLKPRVDGKGAAWAVAHRIAKVIWLLLHQEVEYQEKGTAPPNERTLLRKLKRIIKEFGHLGLDVRALLDQQLPAPA

SEQ ID NO: 76757 - protein, 347 aa, unidentified
MSISMIGLDTAKTVFQIHGVDETGRAEIRRKLRRNDLIAFFEKQAACTVVMEACGAAHHWARMLTGLGHSVKLIAPEAVKPFVKKGKKNDAADAAAICEAASRPDVKFVPAKSVEQQGILALHAARSLLVKQQTMLANAMRGLATEFGITVPKGIHKLDELMVVVDADEIMPKQAKQAITGLHDYCNNLSEGIETFEAEIVAHARRDETARRLATIPGIGPITASLIAATVGDITLFKTARQFAAWLGLVPRQSSTGGKTRLGRITKTGNREIRKLLVLGATSMVYRADGWNSAVGAWLRSVLERRPVRLVTVALANKMARIAWAVMTRKEVYRPKGGVAAVAQATA

SEQ ID NO: 76758 - protein, 340 aa, unidentified
MFHVGLDVHLKYTTVCILDDNGKVFKRHTARCIGDVVDLLKALPAACQVCYEASTGYGFVFEALQPVAKHIAVAHPGLLRLIYRSKKKNDRADALKLAKLLYIGEVPTVHVPSADTRAWRELITFRRKLVEKRTRAKNGIRGLLRSLGIKAPPAAKLWTKKGVRWLSDLALDNTMHALKRDLLIEEVQSLSEKLRRVEKELKLYAEKSVAVQLLRTIPGVGIRTAEAVAAFIDDPNRFASSKRLGSYFGLVPMQDQSGNKNRLGHITREGSATVRHLLTEAVWQSVRRSPTVKAYLERVMRDDPDRRKIAIVATAHYMVRVMWSMLKNNTMWRESVTLAA

SEQ ID NO: 76759 - protein, 387 aa, unidentified
MYFIGIDISKFKHDCAIIDEAGDTVTASWSFANNCEGFSLLKQLLDALDGQKKIGFESTGHYGHNLKLFLETNNFSFMEFNPLLVSKFVRSKSLRNTKTDSLDAVSIAQYLMTVEYKPYPPSFYHMDQLKSLTRFRDSLVRQHSRQLVELTNILDKVFPEFKPFFDGRFSATALYILTHYQSSEKIANMNAKSYEALRKKSRGKFSMVKFAQLKTLAKNTVGRSDAFLLKQMEITIDIENQLDAKIDEIESQILECIRALNPPILTIPGIGELTAAIILSEYGNINKFENPAQLLSFAGLEPGYYQSGLAEHQGHMVKHGSSHLRYTLMNACLPLITYEPVFAEYYAKKRAEGKPHRVALTHVAKKLLRVIFTLQTKNISYDPTLIR

SEQ ID NO: 76760 - protein, 410 aa, unidentified
MAERFVGIDVALHEHRVAVLDRDGEAVGPSFTIAASQDGVATLLRTLDARAATAAQTLIGLEASGHLWENLEAALVGAGYRVLVLNPLQTRRYRDVVRRKAKTDDIDAHVIAGLLRSGAAQASYVPDEPIQSLRELARLRARLMADRQDYLRRLVAQLDVVLPEHHAVLGDLLTARARGILAQFPTAQHLATATPRAIRRAAADAGARGFALDDATGVRDRARRSLYRGKAAAARAHVVRTLVGQLERLTTAIDEIDRAATTLLPPSEPGTGPSDTELLQTIPGIGPQTAATLLGELGPLTRFTDARALVAYVGFYPVIHQSGDRAATPRLSRVGSRIARHSLYLAAVNAVRRSGEWRTIYLRKKAQGKTGKQALVVVAVKLLHAVYAMLKHRQPYNPSRLLVAPATIGS

SEQ ID NO: 76761 - protein, 358 aa, unidentified
MNYVGIDVHKQSFQAAIIDETGKLLDEFRARNNREGIQRFIDMAKCHDNFKAVVESSANYWTKLFDVLEENHILVKLSNPYKTKAIAEAKVKTDRIDSKTLAQLMRADLVAECYVPNKENREKRALIRERSSLTKIRTEHRNKIHDLLAKYEYSHGFSDLFGKEGMAWLKTLKLSQYDQVILDTNLRLLESFDTEIETLSIEIAKLAINHTDEHQQNQVRLLLGLKGIDYYGAMILLSEIGDIKRFPSPEKLVSWAGLAPRTHQSGETSYNGHITKKGSSRVRWILGQAAQTARLYDLKFKTFYDRIAAKKGHSKALVATMRKMLVVIWTILTRNEPYSGEDQELTERKIKRLIRISS

SEQ ID NO: 76762 - protein, 411 aa, unidentified
MSKLLVGVDVSLKSHHVHFMKEDGLSVADFSVSNDQSGADTLIKRMLEAAEKSQVSELKVGMEATDQYSWHLAHYLKDQLKGYEPRFQSFIYTLNARKVARFKKGYDSLPKNDRIDAWVIADHLRFGRLPNEMKDAVQYEALQRLTRTRFHFMKEIGRNKTYFLNQLFLKFSGLRQDNPFSNTFGTTSLAVIEELEPETIAEMSIEELVEFLQDKGKNRFENPEELAKYLQKLARSSYRLDKAMQDPVNLSLSVTLSTIQHMESQVKRLDKEIAKLMKGIPQTLTSVKGIGDVFAAGLIAEIGDVSRFNSHHSLAKYAGLVWSQYQSGEYESDDTSRMRTGNKYLRYYLIQAAESIRRHDSEYRSFYNKKYQEVPKHKHKRALVLTARKLVRLVYSLLRTNQLYTPPERRD

SEQ ID NO: 76763 - protein, 356 aa, unidentified
MERTIGLDAHAASCTLAVISQAGRRLKDFPVETNGEALVEAIRMIPGRKHLVFEEGLQSAWLYETLRPHVDEVAVAGVTESRGQKSDQRDAYGLAEKLRTGSLDKRIFKAPREFTLLRELSRAHITATRDLVRVQSRLKSLYRSRGIQTPGSSVYSLAQRDAWEKRLAASARGRARRLYEQLDFFREQKKQAEADLLRESRKHKIVRILETAPGIGPIRAARLVPIVVTPHRFRTKRQFWSYCGFGIVTRSSSDWVQTADGGWIRARVPQTRGLSRQYNHVLKDIFKGAATLVITQRNKGPLYPRYERMLAGGTKPSLAKLTLARIIAATVLRMWKDEEEYRPERDRRAMESDRSA

SEQ ID NO: 76764 - protein, 350 aa, unidentified
MYFAGLDAHLKYVTVAVLDRLGTIVLETTVSTREPERLLAVLAPFRPLEVVVETCPFWPWLYDLLVPAGIGFHLAHAKRLRAIATAPQKNDRVDARLLARMLLSGLIPEAYPRPGDQRELLRLLRHRTTLVRFRTRLAGRIHSQLHQQRLLLPREQLLRQATRTWLRETAWPHLTTEQQAIVTTHLELIDHLTPLIQALERRIDTAAGANPTAALLATIPGIASYRSLLLAAELSPVSRFPRVEQLASYAGLAPVTRSSGGHTRHGSIPQGANRWVRGALVSAIPSHVRWAPTSPVTRAYAQLTARLGWRVARVAAARKLLRIVYIMLRRGEPWRGAGRVEADVRDEVHA

SEQ ID NO: 76765 - protein, 342 aa, unidentified
MEQSIRCGIDIAKLVFQIHGVNAKSGETVMVKKLARHDMLRFFANKPPMLIGIEACGGAHYWARELTKLGHTVKLMTPQYVAPYRRGGKNDANDAEAICEAVARPNMRFVAVKSESQQAVLVMHRMRDQLVHERTALMNQIRSYLHEFGIVIAQGRAPLAKIFPIIAEDMQLPLLLRQSIAELADRLADLERRIQTLDQRISAWSKQDNAAKALLTLCGVGPVTASAAVATAGNVSVFKNGREFAAWLGLVPKQNSSGGKSKLGAITKRGDRYLRTLLVQGARVVMIAAQKAKLTQKDNPMFDWIYKLLERRPSNVVAVAIAAKQARMLWAIMKKQQNMVMA

SEQ ID NO: 76766 - protein, 357 aa, unidentified
MRKVTCFVGLDYHQHSVQVCVLDRQGRQLLNRACPNDWQSIAQTVAPLGRVKGAAIEACCGAADLGEELATHAHWPLELAHPGYVAKQKRSPDKTNFSDGQLLADLTRVGYLPKVYLPPAYERDLRQLVNHRQHLANDRRAVKLRIGAILRQQRVKFPQQISRWSKAWIAWAATAPEHSQQTRWILEDLLDQLQHLNYKVAVADARLREATAQDPLVDRLMEEPGIGEVTAWVLRAYVGSFKRFQTGKQLSRYCGLSPCNASTGEKQADAGLINGCNKLLRATLIQAAHRLVRTNPRWSRLHDSLRRRDKPACVAVAAVANRWMRGLYHRMMEWTTSGTGKKKQKTTLSKEGSQELP

SEQ ID NO: 76767 - protein, 411 aa, unidentified
MAVDFQNCLFVGVDTHKYQHTAVVINDHHQLLGYTETLNDPAQYNEFIKSLKSIGDNNKTLVFGLEDTQGLGNSLAQWLQDREYTVKEVNPTITKRERKHSPNPDKSDKEDAKAIANALLSHWDDLPNATYNSNFQAIRHLNNHRQNLVDQKTEVKNRLHNILKKQYPNYKKFFSDPFGKTALAFWEKFPHPSKLKNYGEKRLNKFLKEQAKSIPNDKAKTILSLVDKNSKQDKVSETRNTLIPMIIENYRMIKKQIEEIDEKIVTTVDNSEYKLTTMPGINYVLAAKIISNIKNIDRFDSADELARYAGIAPSEYSSGKRNNTIGKKYGNRDLNHAFYMLAIQQIGANGSNPNPVAYQYYQKKLKEGKSHETAITCLQRRLVDIIYAMMRDRSAYEIPEIPEYEVLNKTG

SEQ ID NO: 76768 - protein, 409 aa, unidentified
MAGIDVHKKVLMVVVIETTRPEEKPERQRFTTLRGDLSRLSSWLRAQDVQEAVMESTAQYWRSVWLELEPHMLLHLAHAFSNRAPRGRKHDFRDAERLVRRLFADELILSFVPDGEQRIWRNLTRMKMQLTRDRVRLQSQMECLLEEMRIKLSSVVSDLLGASGLRILRALAAGETEAKRLAALGDDRLKCTEEQLLDALTGSSQPMHREMLALQLERLQLIDTQIDKLNHLIAQAMKPHQEAVMRLAEVPGLGVDSAQQIIAEVGAQAGTFSSAAELTSWVGTCPGKDESAEQNHSSRSAKGNKYLRRVLSQAAHAAVKKRGSYFQALFRRLLPRLGYQSAIWAIAHRLCRVVWKILHEGVRFIEKGREPDAQAKKKRARILVQALRRLGYDVAITATHLGTQNATQA

SEQ ID NO: 76769 - protein, 360 aa, unidentified
MVMLAEHYDYVIGGDPDRDSVDLAVVDTTTGGVRAHLADQADGPGYARMLTWARQQAPGRRMWALEGTGSFASGLVTTLAEAGEDVVEITGGKRGRGAKSDRLDAVQAARTALSREQQATPRARGLREALRMVLVTRQAVLVSRTKAINELKSLIVVAPEQLRARLRGCPLAKQLDRIEELTNSTDVSVEHRVSVLTLRSIAARIRFLVTQTAELDPELLRLVKAHPAGPALLAEPGVGPVVAAQLLVSWSHRGRVRSEAAFAALAGAAPLEASSGQKVRHRLNRGGDRNLNRALHTVAITRMRCHPETREYEARRTAQGKTHRDIRRSLKRALARRLYRRIQTATRPAATQPVQLPSAA

SEQ ID NO: 76770 - protein, 416 aa, unidentified
MSQKLNAAIAVIGIDIGKNSFHVVGHDHRGAIVLRQKWSRGQVETRLANLPPCLIGMEACVGAHHLSRKLQMLGHDARLMPAKYVRPYSKGQKNDFRDAEAIAEAVQRPTMKFVATKTADQLDLQALHRVRDRLVGQRTGAINQIRAFLLERGIAVRQGLHSLRFELPGILATRTDVLSPRMLRIIEGLAEDWRRLDERIEGLSSEIETLARQDQACQRLMTVPGIGPIISSAMVAAIGTGDVFSKGRNFGAWLGLVPKQISTGDRTILGSISRRGNRYLRALFVQAAWVVLVKVKCWGRYGLDSWIEAAKKRLHHNVLAIALANKLARIAWAVLNKGRPFACVNTEETASDLLDPRAVRGAVKAQPGSGSARRQDSTTAGLDGPLRAARLARAGRDEGTTRQARTNEQREMRNNR

SEQ ID NO: 76771 - protein, 335 aa, unidentified
MKKIYVGIDISKEKCNLCYRSGLDIVCEEECPNDVKALKKTFKAALKVLGASLEDVLVCAEYTGRYIYPLTVACQELEIFLWMDDPTRIKNSMGLTRGKNDVIDAARIAEYAYRYSDKAVRYCIPDAALVSMKNLLADREFLIIDRKRYQSQLTDQKKYMAPGDFKQKNSRWKKVIKSIDEQIAAIDAEIEALIAADPVLTRQKELLVSIDGIGPRIAINMIAITGGFTRFQNARQFCSFAGLTPYKYDSGTSVRSKAKISKRANQTMKALLHLSAVNVATRMKSGEYRAYYERKLKEGKHVMCILNVLRAKFVHRMFSVIKRDTEYTKEYKPTC

SEQ ID NO: 76772 - protein, 398 aa, unidentified
MTESSDYESVQVFIGVDVGKDTHHAVAINRSGKRLFDKALPNDENKLRSLISDLKQHGQILLVVDQPATIGALPVAVARSEGVLVGYLPGLAMRRIADLHAGEAKTDARDAAIIAEAARTLPHALRTLKLADEQIAELSMLCGFDDDLAAQTTQASNRIRGLLTQIHPALERVLGPRLEHPAVLDLLQRYPSPEKLASLGEKKLAAQLCKLAPRLGKRLAADIAQALAEQTVVVPGTNAAAVVLPRLALQLITLRKQRDEVALEVEQRVLAHPLYPVLTSMPGVGVRTAARLLTEVACRAFASAAHLAAYAGLAPVTRRSGSSIRGEHPSRRGNKALKRALFLSAFAALRDPLSRAYYTRKMSQGKRHNQALIALARRRCDVLFAMMRDRTFYTPQGS

SEQ ID NO: 76773 - protein, 340 aa, unidentified
MSTQFFCGVDLAKHHFSLHAVDDHGKVILHKSVSRAKLLATLANMPTMCIGIETCSGAHYWAREFNKLGHDTRIMAAKYVGPYRTKVKNDLNDAVAICDAVQRPNSRFIPVKSPERQAILAIHRVREHWVNERTALINRIRALLAEFGIIIPTGRAAVHRQVPLILEAAENGLPDIARAVVADCFDHLQTLNQRIDDTEQCFDMVTKASPNAQRILNVRGIGPQTATAIIATIGKGEQFDSGRDFSAWLGLVPKQYSTGGKPRLGRISKRGDKYLRTLLVHGARAVITNLGDKQDRLSVWGRNILERRGMNRAIVALAAKNARIVWALLHHQTDYQDYAA

SEQ ID NO: 76774 - protein, 327 aa, unidentified
MVNALGIDVAKDKLDVVLLNEAQQTHSGVFANNPQGFVQLQRWLNKRLDGDMHACLEATGRYSQAVAEYLHQIGYTISVVNPARIKAFAASRLSRQKTDQTDAKLIALFCQSQPPEAWTPPAPEQRALQAMLRHLHDLKAMRQQEHNRLTSGVSAQAVIHALQQPITFLDQQITDLERQIHNHLNQFPHLKQQRDLLDTIPGLGELSIATLLAEVPNILAFETAAQLAAYVGATPRQFRSGSSVHRPTHISKCGNARLRAALYFPAMVALRHNPVVRAFGERLKATGHTGKSIVVAAMRKLLHLIYGVLKSGLPFDPSYSAKSRLIS

SEQ ID NO: 76775 - protein, 421 aa, unidentified
MKPQPSEAFAAFVGLDWADAKHDICVQASSSAHREFLRLDHRPEAIDAWVQSLRTRFNGQPMAVCLELNKGPIVSALRPYEFLVLFPVNPLTVAKYREAFTPSRAKDDPTDAELQVELLLKHRDKLTPLVPQSPTMRALAQLVEHRRRLVGDKVRLTNRLTSALKNYFPHVLQWFQEKDTAIFCDFLSRWPTLKAVQLARRATLESFFRAHHVRTADVITTRIEAIKNAVALTTDEGVIAPHTLLVQALVAQLRVTLQAIADFDTAMAQRAQAHPDFPLFDALPGAGAVFAPRLLVAFGEQRERFPSAEELQKYAGIAPVTERRGKKSWVHWRWQCPTFLRQTFVEWAAESLRHSFWAQVYDQQQRDKGKSHQAAVRALAFKWIRILFRCWQDRTPYDESTYLQALHRRGSSLIQNLAKSS

SEQ ID NO: 76776 - protein, 377 aa, unidentified
MSKVRFVGLDVHAETIAVAVAEPDGEVRSLGVIPNRPESVRKLAKKLGPAEQLRVCYEAGPTGYVVYWQLTGLGVRCEVVAPTLVPVKAGDRVKTDRRDAIKLARGYRAGDLTPVWVPDAAHEALRDLVRAREAAKKDHLRARHRLGKFLLRHGRRPSARMTPWTQRHLTWINQVVQFEQPAQEATLLDYLHEVEHAATRLERLERAIEDASVRAPPRMRAVSDALQALRGIAKISAVTVVAEVGELSRFARAPHLMGYCGMGPREDSSGERHRRGAITKTGNAHLRRIVREAAWAYRHRPTVSGALRKRQATLSPEVTAIAWKAQHRLHTRYRRLIGRQKCQQKVVTAVGRELLGFIWAIGVTVERQQPQAQPAAA

SEQ ID NO: 76777 - protein, 339 aa, unidentified
MKLTPVGIDIAKNVLQVHHVDEETGEIVNKPIKRAKFLAYFANRAPCLIGMEASGGAQHWARQLIKMGHQVKLMPGQYVKAFNIRNKSDPADARAIWLAVQQPGKPVAVKTEMQQAMLALHRMREQLVKFRTMQINSLRGLLTEYGEVMGKGRLALDRAIPDVLARVADRLPAVLIDTLREQWNGLSVLDGQIAAIERRMREWKKEDKDVKAIAEIPGVGLLTATAAVATIGDPKMFRSGREFAACIGLVPKQVGSGGKLMLLGISKRGDTYLRTLLIHGARSVISSPKQHDPWIEQMKKRRPLNVVIVALANKMARTIWAVLAHSRSYQGGYVSAKPA

SEQ ID NO: 76778 - protein, 401 aa, unidentified
MNAVGIDVSKGKSMVCAMRPFGEVVLEPFEVLHTAQNLNDLAGKLKALDGETRVVMEATGNYHKSVAFVLHDAGLFVSVVNPVLIHDYDNNSLRRVKTDRKDAVKIANYTLDKWTRLRQYLPEDDTRLALKNCYRQYQQAVAIRTMLKNNLISSLDMTFPDANKLFTSPAKSNGCEKWVDFIGDFWHSECVSILSVDNFAKKYLKWCQKNRYQFTRSKSDEIYACAVNAASLPKSPTSKLLIQQQVAQLKAVSQSVAAFQQEMLRLSQQLPEFDTVMEMYGVGPSLGPQLMAEIGDVSRFTHKGAITAFAGVDPGVNESGSYEQKSVPTSKRGSSDLRKTLFQVMDVLIKTHPQDDPVYQFLDKKRAQKKPYYVYMTAGANKFLRIYYGRVKEYLASLPES

SEQ ID NO: 76779 - protein, 345 aa, unidentified
MKLTTVSIDLAKTLFQLHAIDKNGKTVLRKQLKREHVVPFFATLEPCLVGMEACGGSHYWARKLQALGHTVKLMAPQFVKPYVKSNKSDVADAEAICEAVTRPNMRFVPIKTVEQQAILAVHRARQGFVKARTAQANSIRGLLGEFGVVLPQGIRHILERLPGILEDRDNALPGSLRQLMQRLVEHFKELDRQVVELEREIQQWHRNNEDSCRLAEIPGVGPLTATALVASVGDAKNFTNGRQMAAWLGLVPRQHSSGGKPTLLGISKRGDGYLRTLLVHGARSMVRVVESKKDPSADWLRGLLARRHTNVAVVAQANKTARIAWALLAHGSKFRADYTPDVTGA

SEQ ID NO: 76780 - protein, 323 aa, unidentified
MFYLGVDVSKAKLDCLLLDSTTGKVKSKSIQNTNAGFKLLIEWLAEKKAPNAHVIMEPTGVYHEPAALALTDAGLTLSLVNPAQLRQFAQGLGVKSKTDKADSSVLARYGETLKPEAWQPPSKSARDLKALLARRDAVADDLQREQNRQEAIEFAISPDEVKQSIIQSISFLKAELKRLEESIKEHIDSDPDLRGKKTLLETIPGVGERVSSNLTALFAAKTFNSAEQLAAYLGLVPTHWESGTSVRGRPRLSKAGPAHLRKLLYLPAVVARKHNPHLKAFGDRLLAKGKTKMAVIGACMRKLAHLCFGVVHTGRPYNPNYAA

SEQ ID NO: 76781 - protein, 400 aa, unidentified
MRVVLGIDVSKASSEVAILVNGEKVHGYTMANDAIGFSRLLGDLKTVHKPEIIFEATGVYSRRLQAFLDEHGYAYTRLNPLEAKKQLDSLRVRKTDQIDAEKLAQSQFVLNRKPTYVQEEVYQNLRDLSRFYQNLTEDIVRAKNRLHKVLQVTFPELETILSTPTGEQYWNLVTAFPCKDLVLELSKDELSKSIRLSTSKRISDKRVAYLAEKLTALANQSYCAVKKTSPIMEEVRYYAKELLRLSEQRQAVLDEMVELAQPLPEYDILLSIPGIAETTATSIIGELGNIRRFQSANQINAFIGIDLRHYESGNFIAKEHITKRGNPYARKILFKCIHNIASASHTNPCHIADFYEKRKRQSQTTSTKPHTIASIHRLIRTMYYLITHNKLYDYTLTQNQ

SEQ ID NO: 76782 - protein, 423 aa, unidentified
MKKRIYRSVNVKKVDEERLADAVRGERVVFGLDVAKEAMVGSVVVNRGDVKVNVKWSHPAETIELVELVVGLPAASIEVAMEPSGTYGDALKHQFAIRGVPVYRVSPKRSHDAAEVYDGVPSWHDVKSAGLIARLHFDGASEPWRDRTDEERELAASIRTMEMYDCQENNNTNRLEALLARHWPEVTQELRLKSATLVALIKHFRSPQGVARQASQAKALMWRVGRGGIREETIEAIVRSARTTVGVPMIEAEARMLQTLAEEILRCRKAASKARADVERLSEAHEAAGRMGQTIGKATAAVLVAKAGDPRDYASASSLVKSLGLNLKERSSGKYKGQLKITKRGPSVCRYYLYLAALRLIQDDPVVRAWYGKKVVRDGGRMKNKAVIAVTRKLVKGLWHVARDEPFDSRLLFDVNKLDQVQA

SEQ ID NO: 76783 - protein, 352 aa, unidentified
MKVYHVGLDLHKDFSQATVMNGRGKILDKRRLENDVDVLEKYFSKVPKGSPVVMEATRDWYWMSDLVEEMGLKPVLAHPKKVRIIAEATVKTDKIDSEVLAHLERTNFLPRAYIPTKKIRDMRELLRYRISLVRVRTSLKNKAHSVLAKMGVRHKFSDVFHGAGLQFLKELKLPEVYRHELDGYIKLIEGIKEPIGEVEKRVKNYVKEESEDARLLMTIPGISYFSALLLASEIGDIGRFRSYRKLCAYGGLVPSTDQSSDKVYQGHIMKDANQYIKWCLIEAVDHAIRKDPKLASLYQKVSRNKGKTKARVAVARKLLISIYYMLKNRTEYEIRHRGKYGKTICRLKSFRG

SEQ ID NO: 76784 - protein, 319 aa, unidentified
MQTTKTVGFDIAKSVFQVHGVDADGNVVNAMTLKRRYVLTFFQKLPPCLVGIEACASWHYWSRELQALGHTVRLMPPAYVKPYVKRHKNDAADAEAICEAVTRPNMRFVPTKTAEQQSCLTLHRTRHLFIRQQTAIINSIRAHLAEFGIVAPVGRRGVEQLLKVVADSSDTRLPEIARACVAALGTQLLALKAQILAFDRCIMAWHRSNETSKRLDAIPGVGPALATALVASIGDPKAFRSGRDFSAWIGLVPKQNSSGGKDKLGNISKQGDRLSAQLIHRRCSRRDPLCEAPWYEASAMAYSIVGTAADQGRCHRTRQ

SEQ ID NO: 76785 - protein, 429 aa, unidentified
MVEEIEDEPLHVERVAALDIGKGMLEVCIRVPSERNRRRRAQEVRTFGTTKSQIIELADWLRCWGVTKVVMESTGDYWKAPFFRLEAEGFDCDLLDAKQVKALPGRPKTDRCDAVWLAKVAEKGMGVGACFVPPEEIRKLRTLTRYRRHLIEERSREKQRAEKLLEDAQVKLSVVVSDLHGVSARDMMEALISGERDPKALAELARGRLRSKIKLLEEALDGADTFTEHHAFVLRMMLDHVDSLTAQTDRLTAQIEELIAPFDRQATQLDGIPGVGRIAAQDLLAEIGIDMSVFPTAGHLVSWCKFCPQVKSSAGKRKGRNARGRGNRYVAGALGEITVSAGRTHTRVGARYRRIARRRGKGKAQVATGNTILSIAYTLLSDPTLEYEELGVDYYDTRMHHRRQVGSHIRGLQRLGYRVTLEPIEGEVA

SEQ ID NO: 76786 - protein, 341 aa, unidentified
MTFYCGIDLHSKKSHVCVIDKDGKKVKEENLNNDLALILQFLKPFGKDVHIAIESTINWYWIVDGLQEAGYDVKLAHTLGLYMITGAKVKTDRRDAFKLAKLLRMGEIPEAYIYPKEKRPLRDLLRRRAGLVQQRAECYSSLRVQFMKYNLNTMSGNEVKQLLPSDFDIMPIPQELKDYCVMILQRIELLSNQISELNTYLQKVTLEDPRFKILLTLPGVLYVLGLTIYYEIGDIGRFHSVRQFASYCRLVPGISQSSDKVKRGKGSNQGNHYLKWAFTQAASLAVRYYPALRKFRDKHANRRKGNAATMVANCILAHKIAIATFHMMKEGVPFDEVKLFG

SEQ ID NO: 76787 - protein, 342 aa, unidentified
MQKTIGLDIHKKFIYAVVLDSSGDLLLEKKVRNDPYELDKFLKSIDKDSKIALESCSCWEYVYDYLTDKGFTNLVLANPSRVRLIATSRKKTDAHDAMVLADLLRTNMLPTSYAPSTVIREQRQITRHRASLGRLKGIVKNKIHAILIRNGINQEFSDVFGQEGTRYLMSLDLSVVDRYQMDQYLELIRHYDIQIRKTEARIEEYVEYTPQVRLLMSIPGISFYSGLAITGEIGDIRRFSSAKKLTCFAGLNPSVSQSGDRCYTGHIAKQGNSHLRWMLNQCANIAIMHDSTLAKIYQRIKKRRGHNIAITAVSRKILCFIYVMLKHNIKYQALQVHKAKAS

SEQ ID NO: 76788 - protein, 362 aa, unidentified
MSLDPSRPWESKSAAPFPTDKPEQLTGPRARMPQGRVSFDNPRHAMNTEQLFVGIDIAKDRLDLDTCPQAEPWHTTNDAQGINQVIKHLRERQPALIVLEATGGYERVLAAALASDGLPVAVVNPRQVRDFARATGQLAKTDAIDAQVLALFAERIRPEVRPVPDAQQQALAALVARRRQLLEMLQAEKNRLHLAHKAVVAEVRSHIRFLEKRLDKADRALQTAIEASPIWRAKENLLRSTPGVGPVVSATLLAELPELGRLSGREISALVGLAPFNRDSGKFRGQRCIWGGRVSVRCALYMATLVAVRHNPVLRRHYGQLLGRGKAKKVALVACMRKLLVMLNAMMKTQTHWNADFGCEST

SEQ ID NO: 76789 - protein, 361 aa, unidentified
MAGTVTWVGLDVHARSTQAAAVNISTGQLIRARFGPGIDEPVAWLGALEGPARACYEAGPTGFGLYRAARAAGVDVRVIAPSKTPRGPGDKVKTDRRDAELLARLLLAGSLTEVVVPPPEVEAAREVTRTHDAVRQDLMRARHRVSKQLLRHGRVYPEPSTWTQKHRAWLARQQFDQPGSELAFADAVAAVDGLTARKAALAERLSRLALDEQWWPIVQRLRAFRGIDTLTALSLHLEVGGNWHRFQRPGQLAAWLGLTPSLHQSGESSRQGAITKTGSGLARRLLVESAWHYIKRPAIGVTLRNRQAGQPDHILLIANRCQHRLHHVHTRLRARGKPGNVAAVAAGRELACFLWAAATAD

SEQ ID NO: 76790 - protein, 408 aa, unidentified
MLFIGDDWAEAHHDLEIQDDTGRTLARRRLPEGVAGMAALHALVADHLGDGEPADVVVGIETDRGGWVQALLAAGYQVYAINPLSVARYRERHVVSGAKSDAGDAKVLSDLVRTDRHQHRPIAGDSDLAEAVKVLARTHQNLIWSRQRQANALRSTLREFYPAALAAFDELAGRDALAVLDLAPTPTRGRALSKSKIASALRRAGRQRNVDARAEAIQAALRGDQLAAPPTVEVAFGHTVTALVRVLAELSRQIDTLEGELSAHFDRHPDAEILRSQPGLGPVLAARVLAEFGDDPGRFADAKARRNYAATSPITKASGTRRIVLARFVANKRLRDALQLQAFAALTASPGARAYYDVHRARGATHNQALRALANRLVGILHGCLRHRQPYVEATAWAASSSGLPVAA

SEQ ID NO: 76791 - protein, 348 aa, unidentified
MSSTFTSTIATIGIDLGKNTFHLVGLDRRGAVVSQLKLSRGQIERRLANVPPCLIGMEACSGSHHIGRQLTALGHDVRLIPAQYVKPFLKGHKNDYRDAEAIAEAVQRPTMRFVAIKTPDQMDLLALHRVRSRLVGQRTGLINQIRGFLIERGIIVRQGVMPLRKALPDILSSSTALSPRVVRLIADLMQDWRCLDERIETVSTEIEALARQDDSCQRLMSVPGVGPIISSAMVAAIGNGAGFKQGRDFGAWLGLVPKQESTGDRTILGKISKRGNKYLRTLFVQAAHVVLVRRPATARRGLWPWIEQASRRLHRNMLAIALANKLARIAWAVLARGRTYEPRVSAHA

SEQ ID NO: 76792 - protein, 455 aa, unidentified
MTSSTMKTTQQDATVQDPPPTPSRALAPEPRPEPAFAAFVAIDWGDEKHAVALRVAGQAQTERTTLEQKPEALTQWIADLRQRFGEAKIAVILEQKRGALLWALQPHDHLVLYPVNPQMSAKFRQAFYPSGTKNDPLDADLQLDILLHHRDRLAPWQPEDATTRQLSLLVEGRRRFVADQVRMTNRLREALKSYFPQALLLAGEDLTSPMACAFLQKWPTLAAVQKVKPAVLRKFYYAHHSRSEELIAQRLEIQAQAHPLTSDEAIIQAQSLLVEGLAQELALLHLLLARYEVKIARLFAAHPDFVLWDSFPGAGPALGPRLAAAWGTQRDRFADSQAMPCYSGIAPVKEASGKQSWTHVRWACPKFLRQTFHEMAKCSLKLCAWALCYYQMQVQRGKGHHAAIRALAFKWQRIMWRCWQDHTVYDDTKYVASLKRTASDLYARLAAASLNNICE

SEQ ID NO: 76793 - protein, 395 aa, unidentified
MYNLLVGVDVSKDFFSAAGLDEEGKEHFSGTYEMNSHGFSEFLKILSSQGERLDQMLVAMESTGCYHINLFSFLSSQGIHTVVVNPLLISNFAKLSLRKTKTDKKDALTIARFVLDHHKEISQFSISQDHQDLRDLSRERESLCHLIAATKVEIKRVLRTTFPELESIGNLYTGVMLRFLQQYPSARWVRAAKPRAVAKALKGPYVGDKLTFTAEDIVKAAQSSVAVVSPAKEIIVQGKIATLLHLQERLEELTKLLTDLCKATRVEDLKILQSIKGVGPNTAVPFLAKVGEVKNYSSHKKLIAFAGIDPSVCESGKFIGMSRISKRGNRHLRRAIYLMTTSVVSQNAFFKAYFLRRKKEGLPPQKALFAVAHKLIRVIFAMLSHRTYFKAEEAI

SEQ ID NO: 76794 - protein, 351 aa, unidentified
MSHKTAATVAHTIGIDTGKNTLHLIGLDDKGAIVLREKISRGRITARLANVPRCLIGVEAGMATHYVARELSALGHDVRQVPPAYAKPFRQGHKNDFRDAHAIAEAVQRPSTRCVPVKTDDQLDLQALHRVRSRLVGQRTAVINQIRGFLLEHGIAVRQGLRFLRQQLPDILAQRSDVLSPRMIRIMEDLSGDWRRLDERIEHITKEIEVLASTDVNCGQLMTVPGIGPIIASATVAAIGNGAAFARGRDFAAWLGLVPKQMSTGDRTILGRITKRGNRYLRMLFVQGARAILLRSKSWVKHSFGPWLTTAVRRLHRNILTIALANKLARIALSVLIQGRSYETRIVPAAA

SEQ ID NO: 76795 - protein, 310 aa, unidentified
MDCYIGIDVSKATLDVASLPDGERWTVTNDDQGLATLTPRLVALTPTLIVMEATGGFEMRAALTLAKVGLPIAVVNPRQVRDFAKAMGRLAKTDALDASVLADFAQRVRPEPRPLPDEAALLLESLLTRRRQIVEMLTAEKNRLGFARSPVKRDISQHIRWLEKRLRDVDGDLQDAVTASPLSHAKATLLRSVPGVGQVTTLTLLATLPELGQLSRHQIAALVGVAPMNRDSGTRRGKRLVWGGRAPVRAVLYMATLVGLKHNPVLRVFYARLRAAGKPFKVAATACMRKLLTILNAMLRHNQSWDPEHA

SEQ ID NO: 76796 - protein, 309 aa, unidentified
MTSVKYIGMDVHKEAISIAVMNSAGKLLMESIIETKASTILQFVAGLRGDLQITFEEGTWAAWLYDLLKAHVSQIVVCNPRKNALLKDGNKSDRIDARKLADLLRGNYLKPVYHGENGLRMLKELSRTYLTISKDLVRVMNRLKALYRSWGISCSGRSVYAPGNREAWLNKITETGVRRRAEYFYQQLDTLQRLRREVRRHLLSEGRKHSATKILHGIPTIGPIRSALLIALIQTPHRFRTKRQLWAYSGLALETHDSAQYRYLDGQLLRSRKPQQLRGLNQEHNHDLKSIFKGAAQKATVGRGPFRDF

SEQ ID NO: 76797 - protein, 310 aa, unidentified
MDVVHRRCAGLDISKKDAKVAVRVAGGGRAGTKTTVTTWSSMTGQVLALREHLVAQQVTCVVMEATSDYWKPFYYVLEDGPWELMLVNARHARNMPGRKTDVSDAAWLAQLGAHGLVRGSFVPPAPIRALRDLTRTRTALTRERAREVQRLEKLLEDAGIKLSAVATDIVGVSGRAMLEALIAGQRDPEVLADLAKRKLRWKLGELSEALDGRFADHHAFLARTHLDLIDHLTGTIDQVTTRIEEAMAPFRGVRDLIVTVPGISTGVADVIIAETGADMTRFASPGHLASWAGTCPGANESAGRVKSTHT

SEQ ID NO: 76798 - protein, 347 aa, unidentified
MDYVGIDLHKISSQICIINDEGELTERRIKSTRPSFDEVFAGWPRARILVEASTESEWAAQHLEALGHEVIVADPNFAPMYATRDKKIKTDKRDARALCEACRLGAYRHAHRTSERQRRIRSQLLVRSALVRTRSKYISLVGSLARREGCRIATGGSDNFTARVEAAGLPAHVMAAIAPLFESLKMLNRQIAEADAELEKIVKEDEVVRRLCTVPGVGPVTATTFAATIDDATRFGAAKQVRSYLGLVPREYSSGERQHRGRISEAGGSRARTLLVEAAWALLRWRNAKNQALYDWAMRIAARRGRARACLALARKLAGILYAMWRDGTEFDPQALRQGDAVAAAAA

SEQ ID NO: 76799 - protein, 344 aa, unidentified
MKHYAGIDVSLEASSVCVVDAEGRIVREGKIDSEPEPLIAWFAALGFPLERIGLEAGPLSQWLHAAMTQAGLAAELLETRHVRTAFKTMPVKTDKKDARGIAQLMRLGWFRPVHCKSASAQEVRALLTARRLLQGKLHDVEMSIRGVLRGFGLKVGATTPRTYAGRVRDLVEGHEVLKAIAACLLKAREVLAEEFRGLDRRLRAIARDDDRTRRLMTTPGVGALVALTFVAAVDDPERFRSSRAVGPHFGLTPRKYQSGETDYTGRISKIGDAGVRAMLYEAANVILTHAVRGSDLKAWALAVARRAGMRKAKVALARKLAVVLHRMLRDQTVFVAHRRAPMAA

SEQ ID NO: 76800 - protein, 348 aa, unidentified
MATTIVEAARSVTGGVDTHLDIHVAAAIDPLGGLLGVESFATTPAGYSKLLVWLGAFGPVALVGVEGTGAYGAGLTRYLRRHGVEVVEVDRQNRQARRAQGKSDAADAIEAARAAQSGRASGAAKTRDGNVEAIRALVVTKRSARAVRIKTLNQIRHLSFTSPDDLRERLKDVSAKMLAAEAAALRPRPGSDPVMFATKLAIQTLGRRVLDLEDETARIDAILSELVTATAPSLLALHGVGIDTASALLLAAGDNPERLHSEAAWAHRCGVAPIEASSGKVTRYRLNRGGDRQANSALWRIVMVRMVSDPRTRDYVERRTKEGRSKREIIRILKRYVAREVFPHLPRS

SEQ ID NO: 76801 - protein, 362 aa, unidentified
MQIATIGLDIAKNVFQVHGIDATERVVVRKQLRRRQVLEFFKALAPCLVGMEACATAHYWARELMKLGHLVRLMPAKDVKAYVKRNKNDAADAEAICEAVRRPTMRFVQIKSAEQQGRLMLHRARDLLMRQRTQVINALRAHMAEFGVVAPQGRQGVKELLLIIAGGEDERLPVDAHASLVVLSAEFTAMQTMIGSIEKRILAHHRANEASRRLETIPGIGIAGATAITATVPDPTVFRSGRDFAAWIGIVPREDSTGGKQRLGPISKRGDRYLRRILVVGAVAVLRHARQNPEKYPWLAQLLARKPFKVAAVALATSRQLPRCERVIRRCVGASTQRAQWKVWGAAKRCVEHRHGALVTQV

SEQ ID NO: 76802 - protein, 440 aa, unidentified
MSCTDLGHPVPTATRSEDSTVFVALELSRKSWLVATSSPGEARISKRVVTAGDGPGLLALLGKLRETAERRLGRAVRVVVIQEAGLDGFWVHRLLVDNGIESHVVDAASLAVDRRKRRRKTDAIDAEGLLRALMAWTRGERRVCSMVRPPSPEEEDRRRLCREREALVTERIRHTNRIKGLLAGQGIPDFDPLRPKHRARLDELRTGDGRPLLPCLLAEIRRQLGRLDTVVRDLATVEAERNSLVGLCLMDRPAQSPTEGAEPSGVPEAVTAPVAQEIDPAVAPEEAASCAASEAAPANAASKMAPVEPAALLMKLKGIGPEFAAVLWFEALFRSFGNRRQIAAYAGLAPVPWQSGGIDRDQGIAKAGNPRLRKTMIQVAWLWIRHQPGSAISQWFARRVGTARGRVRRIAIVAVARKLLVALWRYVTQGVVPEGAVLKA

SEQ ID NO: 76803 - protein, 345 aa, unidentified
MDHFAGLDVSVKETSVCIVDDTGKIVREVKVASEPEALLAVLKNPAYHFKRIGLEAGPLSQWLYSALAGAELPVICVETRHMRAVLKAQINKTDRNDARGIAQMMRAGLYRPVHVKTLRSQKLRMLLTHRKLLQAKAIAVENDLRATLRNFGLKVGVVGTVKFEARIKELVEDVPDLAVLVEPLLVVRRVLREQISVLHRRLLAIVRDDDVCRRLMTVPGVGPVVALTYRVTVDVPVRFRKSKSVGAVFGLTPSRHQSGESDRPGAISRCGDEMMRSMLYEAAQILLVRSTKWSWLKAWAMKIARHRGMKKAIVALARRLAVIMHRIWVNGTAFRWTQEQAAAAT

SEQ ID NO: 76804 - protein, 358 aa, unidentified
MESQDIKYVGIDCGKKSLEVVRIHSENSLKERRQFSTTETGINNLLKWLTQNDIVGLEAGTQSFRIAKSILNKGIQVIVLNPGDLATIYQSLKKTDKEDSLKIARLIQRYPMEELPVVPVPTDEEEDNRRLCTEQENWTRQLTQGKNRLHSLFTQAGLTEITKKHLRTKSSRETSVTLLPSRYQKEAERILQVLDLVEQNLKLIEEETKDALKKNPAYVQTIMSMPGIGMITSLAILSYMGDCKRFSSAKQAAYYVGLVPRVDISGDSAYYGRIVNRGCHSIRRVIVQAAWSLVRCQHGGKLKEFYERLYSKKGAKKSIIAVSRKMIEVLYSMIRTGALFDSMPENVLYRKLAQYGLM

SEQ ID NO: 76805 - protein, 412 aa, unidentified
MEVVFERCCGLDVHKATVVVCLWMRDQWGKIHKEIKTFGTMTADLLVLSDWLRSKEVTHVAMESTGVFWKPIYNLLEDSFTVLLVNAAHIKRVPGRKTDVTDCEWIADLLAHGLLKGSFIPPKPIRELRDLTRYRKSLSDERVREVNRLHKLLQSANIKLSSVASDVMGMSGRKMLEALLGGNTDPEVLADLARGKLRKKLPELRKALQGCFSAHHRLILEHILGHVDFLDEAMERISEEVAAHTAPFDEQIQFMDTIPGVDRKASEGTIAEIGLDMEQFPTHRHLASWTGLCPGNNESAGKRKKGRMRKGNLWFRRYVIEMALAASRTKGTYLNALYHRLVSRKGHKKAIVAVAHAILVIIYHVLKHRVPYRELGADYFDKLNATYIKRHHLKRLESLGFKVTLEPLEVAA

SEQ ID NO: 76806 - protein, 309 aa, unidentified
MRHSSTLSVGLDVHTESIAVAYAREERDAEVIFLGTIGTRQCDIDTLVRTLTSKATHVGFVYEAGPCGSWLYRYLTKQPLICWVVAPSLVPKQAGDRVTTDRRDATQLARLMRSGELTPVDVPAVEDEAIRDLSRAREDAIRDRQAATSRLKACLLRQEIRYEGRATWGPAHLRWLAEVVCPTPAQPMGFQAYVRAVSEHQERLQRLEAERREQVPAWRLPPVVQALQAMRGVQFTVAVTRLAALGDLTRVDTPRPLMSSRGLTPTAYSSGERRRQGTIPTAGHTFARRALIEGAWAYRYPAKVSRHLH

SEQ ID NO: 76807 - protein, 374 aa, unidentified
MPTSITYVAMDTHKKQHRLALKFPGQERLIELSVLNNVREITKMVKKIIKQAPGLVTFCYEAGVCGFTLKRRIEALGPRCIVIAPSLVPKKPGERVKTDRRDARKLLELFQANLLTEVQAPDEKQEADRELTRLRETAMENLKRARHQLLKLLTRHGFVYTDGKHWTQRHLLWLRGLEFHLPKLRKVFDSYFDEMTYGLRRLESLDQQVEQLAQQPEYRDIVGALCCFHGIQTLTAITLLTEIFDYGRFATPRELMSYLGLTPSEYSSGDRQKKGSITKAGNKRIRRLLNETAWHYRHRYLPGKGLKQRRKGQPQWAIEIADNAGRRLTRRHRHLIEAGKMPVKANIAIARELAGFIWALMREYEARKTIKDVA

SEQ ID NO: 76808 - protein, 360 aa, unidentified
MEYIAFDAYKRYTQVSVETVDGKRRYEGRIAHVRGALQQFLTTCERGSPVALETVGNWYWIVDEIEAAGQVPQLVHARKAKLMLGMVNKTDKLDARGLNRLQRAGTLPTVWIPPGPLRDQRDLPRTRMVLTRERTRLKNRIHATLAKYGLRLEGTSDLFGRRGRQWLLTAALPVLAPHSRYATERLLEQLDVVSAQIEGFEQRLRAVFAPTPELQLLRTLPGVGWVLAVVILLEVGDIRRFPRAAQLAAYAGTTPRVHASGGRTHYGPARGDVNRYLKWAFIEAASTAWRTRPARPHRHVSRLYARVQQRKGHATAVGAVARHLAEATYWILTKREPYRDPASSTEGPARSAHERATLGI

SEQ ID NO: 76809 - protein, 371 aa, unidentified
MKSDSTIKFIGLDVHSKTISVAIADEGRKGEVRHYGTIENTFEAIDKVIKSLTATGIELRFIYEAGPCGFALYRYLSGNGFTCIVTSPAMIPRPKNVRIKNDRKDALTLARLYRAGELTGIYVPEPEDEAIRDLGRARDDARMAERKAKQRLNSFLIRNNLIYPGKTKWNRTYFNWLGSVGMKYPAQKVALQEYIEAVNECTGRVARLREQIGLAVEEWRMAPMVKALQALRGVSLICATITVAELGDLSRFQNPKELMAYLGLVPSEHSSGESIRRGGITKTGNGHARRVLVEGAWTYKHHARVTYPLIKRQRELPKSICQISWKAQLRLCARYRKMVARKKPNNVVVIAIARELAAFMWAIAQEVRAAA

SEQ ID NO: 76810 - protein, 345 aa, unidentified
MAITYVGLDVSQKATSICVIDDAGAIVWEGCCRSHPEDIIASVKKQASGALRVGLETGPLAVWHWHTLKAAGLPVVCLHARHVHAAIALQVNKTDRNDAYALAQVVRAGWFRAVDVKSLDTHRIRLVLTARKRVVSMRSALYSQIRGVLKTFGIVLPAGKGSRFEHAVHQAIESDESLEPVIGSLLEIWRSLTAQLRFYNRAVDQMAKESDICQRLMTIPGVGVLTALAFMTAIDDPNRFMRSADVGPYLGLTPRRYQSGEVDRAGHISKCGDRMARTQLFEAAHVMMTRSETTSPLQVWANQLRRRIGVKKAKVALARRLAVVMHRMWIDGTSFDCALGEPIAA

SEQ ID NO: 76811 - protein, 349 aa, unidentified
MTIVETTCSVTAGVDTHADVHVAAAVDPVGGVLGIESFPTTSAGYAQLVAWLRSHGEVALVGVEGTGSYGAGLCRHLTRTGIRVVEVDRPNRQVRRREGKSDPVDAVAAARAALSGQALGQPKSRDGDVEAIRVLEVACRSATEERIATLNQLRHLVICADDQVRSRFAGLSVVRLTAEAAGLRPRPTDTVRYSTLFAIRTLGRRVAALDAELVELKAVARPLIDRTAPGLLSMYGVGYDVAAKLLVAAGDNPDRLRSEAAFAHLCGVAPLEASSGKTIRHRLNRGGNRQANKALYHVVITRMASHQPTKDYVARRRAEGKSTGEIARILKRYVAREAFKHLRPVATLS

SEQ ID NO: 76812 - protein, 356 aa, unidentified
MPTQVTKKIDFTGKQLFIGLDVHKKSWSVTILVDGTEHRTFTQPPEPESLNSYLQRMFPGGEYNSAYEAGFCGYGIHRRLNQLGIKNIVINAADIPTSQKDKLQKRDPADSRKIARSLEKGSLRGIHIFDRELEELRSLNRTRFYLMRDLRRSKTRIKSFLQYYGEPIPAEFDNNQWTIRFVSWLKQVKMQTMSGQDAFSNLIGSYEYHRSQLLTLSRQIRERIREYDRELYTLLKSVSGIGPLTASALITELGDINRFTNIDQLGSYVGLIPRIRESGETTHTGGITFRCNTFLRTLLIESSWQAIRMDPAMMQYYHSHLVNNKGHKVVIKVARKLLNRIRYVMKNRQPYIIGVA

SEQ ID NO: 76813 - protein, 383 aa, unidentified
MVTGLPHAKGGIAMSSIVYVGMDVHTTNYTMCCYVIDGDADFARVELEPDYKFILNYLDQVEESYGEECEFICGYEAGCLGYSLYNDLSSKGVECIILAPTTMATQKKKGIKNDFRDAKDIAKCLAYNTYSRVHVPTMEDNAVKEYIRLRVATKNELKKVKQQLIAFCTRNGKIWYEGSKWTLKHLDWLRKIDFNEALLNETLQEYIASYYQLSEKIDRFDKRISEIADTEPYQEKVNKLKCFNGIKDYTALSVIVEISDFSRFKTADHFASYLGLVPGENSSGQTIRRTGITKAGNSHLRKLLVETAQCYTRGAVGRKSKALIARQERNDPNVIAYADKANERLKRKYYRLVRSNHKHNVAVTAVARELACFIWGMMTNNIA

SEQ ID NO: 76814 - protein, 343 aa, unidentified
MQAVTTIGLDIAKSVFQVHGIDAEGNVIVRRQLKRRHILTFFQKLPLCLVGIEACASSHHWSREIKALGHTVRLMPPAYVKPYVKRQKNDATDAEAICEAVRRPTMRFVETKTPEQQSCLTLHRTRHLFIRQQTAVINAIRAHLAEFGIVASVGRQGVDKLLDIVADARDTRLPEVARACLAALGNQLRMLKAPILNFDRMITAWHRSNETSKRLDALPGVGPALATALVASVADPKAFRSGRDFSAWVGLVPKQNSSGGKQKLGSISKQGDRYLRSLFTAGALAVIRYAKIHGTGHRPWLTALLARRPTKIAAIALANKIARMAWAMMARGERYREPVALAA

SEQ ID NO: 76815 - protein, 353 aa, unidentified
MTSTKYIGMDVHKESISIAVRNAAGKLVMECVIETKASVILDFIHGLRGELQVTFEEGTWGTWLYDLLKPHVTKLVVCDPRKNSRQGNKNDRIDARELSDRLYMNKLSSVYHGEAGVRTLKELARSYLTVSKDLTRVMTRVKAIYRSWGIPCAGKQVYAPRHRAEWLAKITEVGVLRRAEFYYQQLDALRSLRQEVRRDLLAESKKHPATKLLCQIPSIGQIRAALLIALIQTPHRFRTKRPLWKYSGFAIEMHSSADYRKVKGQLERTKKRISVRGLNRDCNHDLKNLFKSAATIASAKPGPFQEFYAALVAKGMRPEMARLTLARKIATIVLIVWKKGVSFDAQYLKPQTA

SEQ ID NO: 76816 - protein, 353 aa, unidentified
MAGANVNQDVVGGVDTHKDVHAAAALSVTGQLLGTALFPTTRAGLSQLLTWLTGYGALIRVGVEGTGSYGSGLTRQLRSAGISVVEVNRPNRQFRRQRGKSDTVDAEAAARAALSGTAAGTPKSQDGMVEAIRLLRLARRSAVKARTQTGNQLHAVVQSAPTALRDSLRGQSLAKLVTLARRFRRRAAMTPLAAARFTLKSLADRWATLEAELRDLDHQLELLVSAAAPSLVALTGVGTETGGALLVAIGDNPDRLHSEAAFAALCGASPVEASSGRQKRHRLNRGGNRDANRALWVVVMCRMATDATTRAYVERRTQQGLSKREIVRCLKRYVARQIYRTMLPTLQHATATA

SEQ ID NO: 76817 - protein, 341 aa, unidentified
MKQEMHVLGIDIAKRVFHAIGMDNTGKLVFRKRLSRHDLMPFMAKLPPVLIGMEACGGAHYWARRFREHGHEVKLMAPQFVKPYVKSNKNDSRDAEAIAEAVTRPTMRFVPTKDVAQQDIQALHRVRERLIGERTALVNEVHGLLHEYGIVMPKGVSKFRQAVVEKLGSEKDKLTALSQEMFWKLVEEFAALEKQLAYYQEKLDTLATTHPECQRLMTIPGIGPLTATALVAAVSDASAFKNGRQFAAWLGLVPRQHSTGGKERLLGISKRGDTYLRKLLVHGARATIRWVGRKTDRRSQWMRQLLERRGHNRTAVAVANKNARIVWALLTHHQDYQPATS

SEQ ID NO: 76818 - protein, 411 aa, unidentified
MDIVVARCAGLDVHKDTVVACVRTPGSEGQRAEQVRTFGTTTVELLALRDWLVAEEVSLVGMESTGVYWRCVYYVLEDALACWLLNARHLRNVPGRKTDVADAAWICQLVEHGMVRPSFVPPKPIRELRNLTRYRKAQIEERTRETQRLDKVLQDAGVKLSSVAGDILGRSGRDMLTALVAGTRDPGVLAELARGKLRQKLPALRQALAGRFGAHHGLLVGQILAKLDFLDEAIAQLSAEIDRVIAPYQPQVALLDTIPGVDRRTAEALIAELGVDMARFGSAARLASWAGMCPGQHESAGKQRSGRTRKGPKWLGAHLTEAAKAAGRTKDTYLAAQYQRLRGRRGTAKATKAVGHSILVAVYHILDRDQPYQDLGADWFVRRRPEAQARKLISQLNTLGYQVTLNPIQAA

SEQ ID NO: 76819 - protein, 407 aa, unidentified
MDLLKTVFGIDVSSRKSNVCIMVNGQKVNDYAISNDMVGFNRLLGDLKQVTKPQIIFEATGVYSRRLQAFLDMHELRYVMMNPLEAKRKTKDDLHQNKTDKLDALYLAKLQSEHPQRLAYVQNKEYQELMANNRIYEQASHDLITNKNRLHKAIQLTFPEIEHLLANPRGKNYWSIALRFPHPDIVLETKEADIIDFLKGLSGIGKKRANDITQNLIRLAKVACPAVKKNSAHVRGLKMAINNILSAEEECQTALQEMAKLAPKRDLEILTSIPGIGENTALRIISELGDIRRFNNPSQLNAFVGVDPQVYESGNLTAHLSISKRGTAIGRKVLYLAINQIQSAKKAGNPCHIADYYEKRKRSSETASHKKAAIASIHKLLRTIFALIKNDQLYSYDVAKHNQRLLS

SEQ ID NO: 76820 - protein, 361 aa, unidentified
MNASTTVAVDLAKSVFQLAVADVAWKVVESHRLTRSQFERFFDNRAVDLVIMEACGSAHYWGRRLAGLGIRVMLLPAAYVRAYVKRNKTDAADARALLEAARASDMVPVRIKSEEQQALQGLHRIRSLWMGTRTSRINALRGFCREFGLVVPQGARTGVEAISRALADPHVEIPGLIRTSMALLIEEIRLLEQRIAQLERELTEVARHSPACVSLLTVPGIGLLTATAMVAATGGSVSHFKDARHFASWFGLTPREFSSGNSRVLGRISKKGDRYLRMLLTHGARAVLRAASVAKQTQRHLDGLREWALAVQGRTNHNKAACALANKLARICYATLRDHAPFDEAARLTKKQSRQSFALPA

SEQ ID NO: 76821 - protein, 316 aa, unidentified
MSKTTIVCAGIDTGKRRLDVAITTSGAELAVENTADGHVRLAAWLRRHRVKRVGIEASGGYERDVVLALRRDGFKVIMFQPAQVRAFAKFNGVRAKNDKIDARLIADCTAAVKTIHAAPDPRLLKLADHLTLIEQIGEDVARHKTRRETCRDERLRALWSTEIARLQRMLDAELKALGAAIRAHRDLATRLDLIASVDGIGERTAIAILVRMPEIGRLSREQAAALVGLAPYDDDSGEHHGERHIAGGRERLRTSLYAAALPAACRWNAALIALYQRLIAAGKPHKLALVACARKLLIFANTVVARGTPWQSEPAH

SEQ ID NO: 76822 - protein, 387 aa, unidentified
MQASTVDTPTAGHCGTIFVAIELSQKSWLVTLHSPDKDKISRQKLEGGDHAELLALIGRVRERAARALGAVPAVVSCYEAGYDGFWLHRLLLAAGITNYVFDPASIAVDQRARRVKTDRIDGEKMLRTLMAYLRGEPQVVRIVRVPAAEQEDARRASRERGRLIKEQTAHTTRIKALLRLLGMAVGNPRRRDWLNWLAAQRDWQGQAVPPRMLSEIRHEHARLMLVRERLDEFMQASAAADPAPAAAQMAERSELLLRLKCLGPAFATTLASEVFYKDFRNRREVASYFGLTPSPWQSGGIDRDQGISKAGNPRARCAAIELSWLWLRHQPESALTRWFRSRTHNNASKRNKRIAIVALARKLMVALWHYLTTGLVPEGALLKAVKA

SEQ ID NO: 76823 - protein, 339 aa, unidentified
MVKATTIGLDIAKQVFQVHGADKAGKAVLRRKLRRNEVLRFFSELSPCLVGIEASGSTHYWARMIGGLGHTVRLMAPQFVKPYVKSQKNDANDAEAICEAVTRPNMRFVPQKTVEQQDLQCLHRVRSRLVASRTQLINQVRGLLAEYGIVLPQHPGHVRSGLPAVLEDSENQLTGFGRDLFHSLYEELTQLDEKIAAADHRIQVAFHNHPDCRRISAVEGVGPLIATAIVAAISNGHAFENGRQFSAWLGLVPRQNSSGGKSRLLGISKRGDPYLRTLLIHGARSVVFRAKAKTDKRSLWIMDKQQRLGTTKACVAVANKNARIIWSLIAREQEYRRAA

SEQ ID NO: 76824 - protein, 359 aa, unidentified
MEYGAIDLHKKQSQIRILTAGGDVIEDRRIVTARERFTAVFGLRRPMRILVEASTESEWVARHLETLGHEVIVADPNYLPMYGDRSRRVKTDRRDVAALADACRRAVYRAAYRRSDQQRAVQAQLRVRQGLVNTRTRAISLARSLMRASGHHIRSGESASFLQRLAACEVPNDLTAILAPLRGVIEVVNDELASADTRFAALVENDPVIKRLTTLPGIGPLTASAFVAALDDVNRFRGAKAASQVTSYLGLVPREFSSGERQHRGHLVRSAQPQVQTLLVQAAWRVRRSTRSETAALRDWADRVSRRRGKNIATVALARRLARILFAMWRDEVDYQPRRIHANRQPQAATTEQPVARAV

SEQ ID NO: 76825 - protein, 473 aa, unidentified
MSKSKRPAKIGGVGPEIAQSKRGSQKKQGERAVFQPNAGGIDIGAREIYVAVPPDRDEHPVRKCGTFTDDLDEMAQWLVSCGISTVAMESTGVYWIPVYEAVERHGIEVCLVDPRNMKNVPGKRTDFHECQWIQHLHSLGLLHAAFRPESGVRAVRALMRHRNDLVQMASQHVQHMQKALTQMNVQFQHVISDLTGLTGMAILDAILNGERDPAVLAKLRDPLIKADQETIRKSLVGNWRAEHILVLKQRLSLYRSYRDQIHDCDQEIEILLAGFEPKVDPEEKPLPEDRKKRQRQRKKKSGSPDFDMRMEAYKLFGVDLTQIPGLMLLVFMLFSEVGRDMSRWPTAGHFVSWLGLCTDNDISGGKVLWRGARRAKNRAGTLFRMAASSLYREQGPIGDYLRRMKAKLGPAGGTTATAHKIAVIFYTMVKNQVEYDASLWAKRDAMREKRLEARLHKQAAQRGYRLVPLEAAA

SEQ ID NO: 76826 - protein, 333 aa, unidentified
MEQSSVCVGDAGGRIIREAKVASAPEALVQFLKDLALPVSRLGLEAGPLSQWLYAGLTAAGFAAVLLETRHVKAALSARVVKTDRKDARGIAQLLRRGWFRPVHCKSPPAQEVRALLVARKPLQAKRRDVELGLRGLLRGFGLKVGEVGKGPFAARVRDLVAGHPMLERIAQAMLRAREGLREEFAKLHRAMLAIVRADTVCRRLMTVPRGWRAGCGDVYLGDRRSATVRPLQRGRRAFGLTPEKYQSGERDISGAISKVGDALVRTALYEAARVMLTRAVRFPARKRWAIEVAKRRGLKRAKVALARKLAVVMHAMWRDGTAFRWGKEAEVG

SEQ ID NO: 76827 - protein, 347 aa, unidentified
MRFYTRQHKHYCGIDLHARTMYLCILNQAGDILLQQNIKSEPKAFLRVIEPYREDLVVAVECIFTWYWLADLCAQEKIPFVLGHALYMKAIHGGKAKNDKIDAHKIATLLRGGMMPEAYVYPPGMRSTRDLLRRRLYLVRKRGQLLVHIQNSHHQYNLPEPTRKIIHRSNRVGLAEAFDDLAIRRSIEIDLELVTHYDKLINDLELYLVRNAKEHDPNSFFLLRSIPGVGKILALTILYEIHDVRRFPSVQDFASYARLIKCSKESAGKRLGTSGGKIGNVHLKWAFSEAAVLFLARNEKGKQLLARLTRRHGKGKALSILAHKLGRVTFHILQRGTAFDMTKFVTA

SEQ ID NO: 76828 - protein, 445 aa, unidentified
MSFDRLKRPQSRKRLPGHKLKPSRATLLVQNSKPHLSMKQTYILAIDVAKHKVRAALSGADERLLFEKDLPVSAGGLRELLVRLREHVAEPEGLLVLIEATGMLHLNWSVALIRAGYAVVVINPLIARRLYTLGNSIRDNKSDPIDARQLCGIGRLHGEKLLSLYRFALKPEQLCLQRLQSVRKAVRKSLSNLKKSYGSLLDVSFPELGRLLEIDGVGIRQLLSQAPTPCAIARMRRSSLEKNWMLRPKAAQLKKLAAESMADPELAQASRPALLAMLQSIEAMETRLRELDRQIEALTSQSVDPQTKALVESIPGFGALNAAKLLAFLPGEILHAGSNRQAAARLQAYMGNDPRVRQSGQWQGQTKMSKRGVEMLRTALFQCAFSASQHDPELRSFYQRKRAQGKHHEVALSHLMRILTRRLVAVLRSGQPYQPNDNSELKNAA

SEQ ID NO: 76829 - protein, 407 aa, unidentified
MICVGIDVSKRKSTVCFMAPGDKIIRRPFDVKHTKEELQPLVDEIRVQAKYDEIKVVMESTGVYHLSIAYFLQQNGIFVSVVNALKVANSNKAENFRHTKTDSIDSTNIARYGIAYWAKLPQFDLNGDKYFLLKRLCDAYLNFSEERSRILLQLQSQLEQTMPGIFDLFGGFDINSGKDKLLDFLERYCHIEDIIAKSEAEFVASYREWAKEKGYRSNESKAATIYAQAKNGIPSIPNNPIVRETIMWYVGLLRRADEALMASLTRMEDIAKDLPEYELVGEMGGVGRVTGVALIAQIGDVRRFKNKHPLICFAGLTPSIHESGKFRASQNHIVKKGPARLRKVLYQVMMLLVMHKIPKDDAVYRFIKKKEAEGKYKKVAKVAGMAKFLRIYYGRVMHLYRDLGLAA

SEQ ID NO: 76830 - protein, 349 aa, unidentified
MIVIGIDSHKRTHTAVAADGNGRKVGETTVATTSAGHLALVRWATRFPDRRFALEDTRHLSRRLAADLLRAGEAVAWVPTRLMAGARRHGREQGKSDPIDALAVARAALANPDLPVASLEGEERELRLLVDHRENLVAERTRAQNRLRWHLHELDPGSEPGPRSLDRAVVLRALDERLEGVPGTVARIARELVVRIRELTRTIDALEREITRLAREIAPTLLDLPGCGPLSAAKLVGQVARISRFTSAAAFARHNGSAPLPVWSGNDVRHRLSRKGDRQVNVALHRIAITQMRIDERGRAYYEHRRAAGDTKTEAIRALKRRISDEIFRRMRHDERLRATPRAALAAAA

SEQ ID NO: 76831 - protein, 344 aa, unidentified
MQIKSIGIDLGKTTFHLVALGAHSQVVIRKKFSRQQLLTYAANLPSCLMGMEAGVGSHFLGRALREQGHEVRLIPAQFVRPFVKSNKNDYCDAEAIAEAVERENMRFVPIKTEDQLDLQALHRVRERLVSRRTSVINQIRAFLLERGISFRKGPASLRRQMPEILENADERLTARMRRLLDFLWQEWKHLQLQIESLSEDLEKIANSDAACVRLQQIPGVGPLVATAVVSAIGNGAAFHKGREFAAWLGLVPGQWSTGGKAKLLGISKRGNPYLRKMFIHGARAAVLRVKREGSYLGQWMGGLESRAARNVVIVATANKLARISWAVLSSGENYRPRPALAVAS

SEQ ID NO: 76832 - protein, 368 aa, unidentified
MLKISFHLKPGTMRKINDLSFEGETIFCGLDVHKKNWRVNVRDNEFELEDFSQNPCADDLAKHLWHRYPNAKIKVAYEAGFCGFGIQRSLKQLGMECIVVNAADVPTTDKEKKRKQDKIDARKLCYNLSKKQLTAIYIPELLMEHARSLVRQRARLVWDQTRCKNRIWQLLMCHGLNVQASREKQYWSSRFITSLKQLDCKSTFLRQTLDLAIEEFIYIWKLVNEGTRKLRKLGSEELFAQVQILIRSIPGIGLINSMVILTEIQDIWRFKTLDSLCAYVGIVPDTENTGDIQRVKGITKRCNWYLRTAIVESSWSIIRQDPALLMKYKGYCKRMQRNKAIIKIAKHLLSRIRYVWTNQMQYEIAIVK

SEQ ID NO: 76833 - protein, 375 aa, unidentified
MTEDGGGRGRSLAPKVKQPAGEQDRRATIKPAHSPNSRRGRKGEPASCKAGRRPGKQGGSKMESEEVVVGIDVAAGSLEVDAGGGGCWRAANDARGVAELVKRLAPLAPALVVLEASGGYERRAWLKLSAAGMAVARINPSDSHHFAQARRQLAKTDRLDARGLRQFGEQLRPAPTPPPSPAEQELQDLVKRRQQLVSMLVAERNRRQQAASAAIRQSIDRIIRSLEREQAALDERLEHKLEQRPSKLVALLQTVPGVGFVTSAVLVARLPELGRLNRHQVAALVGVAPFERRSGKWRGESHIFGGRTDVRCALYMAAHNAVRCPGPLREGYLRLCAAGKKRKEALTACIRKLVIMLNAMVKHQTPWRPPCPSPA

SEQ ID NO: 76834 - protein, 322 aa, unidentified
MAEVEVMVGVDVSGAQLDVALWPSRESFSVSNDEQGVEQLLTRMVQVRPRAVVVEATGGLEGLLVGELCAAQVPVAVVNPRQVREFARSLGQLAKTDRLDALILAQFGHSAHSSDRLKLTQLLPAADAELKALVRRRRQLIGMLVAETNRRQRASKVVKKSIVATIRSLKRTLAELEQQLCDTVKNSPAQQKKATLLELVPGVGPQLARTLIAEVPELGQLGRRQIAALIGVAPHAHESGQFKGRRRIWGGRAGVRNTLYMGMLTATRFNPLLAPFYRRLLERGKSKKLAYIACARKLLVILNAMLRDHTIWNPNLDFQHSR

SEQ ID NO: 76835 - protein, 363 aa, unidentified
MIIIGVDFHPSGQQIAFLDQETGECGERQLNHSDGEAEKFYRELKQRGVSVRVGMEATGHSRWFERLLAELGFEVWIGDAAEIKRQRVRKQKTDREDARLVLKLLLENRFPRIWVPSPENRDLRQLLWHRHRLVQMRTRIMNQLHAVAMNEGYRWKKKLFSAQGRALLEKLSLAPWASRRRKELLELMDQLDPKIAELTAAVEREAQQRPEVVRLMTHPGVGPITGVAYVLVIGTPERFPCGKQIGSYTGLIPCEDSSAGKQRLGHISKQGNTLLRYLLGEAAQAAARCNPDWRRRYVHLAMRRHKNIAKAAMARKLAVRLYWMWRNGWDYSQLVEFGSHAGKLGTGHGVEQSVVHLIGHPAP

SEQ ID NO: 76836 - protein, 296 aa, unidentified
MNIVFLGIDLAKNVFQLCGLNQAGKPVYTKRTGRKELLQTLANIPACLIGIEASTGAFYWQREFEKLGHKVKVISPQYVKPFVRGQKNDGNDAQAIAVALMQPTMQFVPPKSPEQQDIQALHRARQRIVNHRTATVCQIRGLLLDRGIPIGSAVSRARRAIPLILEDAENGLSSRMRRTIAELYDLFNDLERRIHFFDKEIETVFRQSEACQRIAKVKGIGPKTATAVAAAIGKGTEFKNGRHFAAWLGLVPRQHSSGDRQVLMNMTKKGDKHLRTLLFMVPALSSGLPRITMMVI

SEQ ID NO: 76837 - protein, 437 aa, unidentified
MSSTVVNVGIDLGVKSMHQAVGFDTEGQKITGLIKFNTTTADLDKLIDELGREKQLRFMMEPTAMAWMPVAQYLLAKGYQAFLVSAEKVHDLRKFYSKHAKNDRLDAETLARIPFICPDALSPPSIDDSEVNMLRRWVKMQDRLTHTIADCKRRILDLVGFAVPKLKIDSRTIFSPIGRQILKEYLSPHKVKNMGHKCFKEALMPFITQEQGEAFIDAVYEALSDADMLYGDDGVLDWEGLHEEIRINIELLEHNENALEQVGERIQVLYKSLHPSGNLETIYGVGKETAPVYVAALSGRQFKEKGFRSFCGVIPKTKQSGYSNQKEKMTKAGPPWLRRALYMSADTARKWDPQLARLYYQHRMRGAPHTKAICAVMARMADRILKIFEEDRYYELQDLEGRPISSSTAKQIIKERFTVSKNTMIRQRKWNRDLISA

SEQ ID NO: 76838 - protein, 387 aa, unidentified
MAGQSLKQGGRVVDQHNRAFVGIDTSKLRNAVAVAEDGRGGDVRYLGEIDTAEAATRKLVAKLAAKYRQLTFCYEAGPTGYGLYRLIRKLGHDCIVAAPSLIPKKPGDRVKTNRRDAVGLAKLSRAGELTAVWVPDERHEAMRDLSRAREAARKDLKGKRQQVSSFMLRLGRHYPGKKTWGPAHMNWLMLQKLEHREQRIALEELLGAVRQESERVERLEQAIRDAVPEWSLAELVTALQAMRGIDLVAAVTVLAEIGDLSRFQNPRELMGYLGLVPSESSTGDTVNRGGITKAGNGRARRILVEAAWSYRHPPRVSREKQIKVAAAPRAVREIAWKAQMRLCGRFRSLTRKGKRPTVVATAIARELSAFIWAINREVVESHATANQ

SEQ ID NO: 76839 - protein, 392 aa, unidentified
MIFVGIDVAKDKHDCFITNSDGEVLYKVFTITNNLEGFHDLYQKISSVMVDASKVKAGLEATGHYSYNLLGYLIDKGLTAYVINPLHTNLYRKSLSLRQTKTDKVDARTIASMLMSDVNLKSYSETSYHNQELKSLTRYRFDKVKERAKLKVSIARLINILFPELEKLVPTLHMASVYSLLSEFPGASHVASAHLTRLTNLLSEASKGHYDKDTAIHFREAAKHSIGSVMPAKSLELKHTIKLIQELTTEIDEIETAVKRIMDEEIRSPILTIPGISYRMGAMIIAEIGDFHRFDSADKILAYAGMSPSTYQSGQLDNGYSHMEKRGSRYLRYALYNATKYVCHWDEFFGAYLEKKRSEGKHYNVALSHAAKKPVRTIFAMEKSGQAYKATS

SEQ ID NO: 76840 - protein, 389 aa, unidentified
MKIYVGIDIAKLNHFAAAISSDGEIILEPFKFTNDADGFQLLVSKLDSFDKNSIIIGLESTAHYGDNLVRYLVAEFYQVCVLNPIKTCQMRKNNIRKTKTDKVDTYVIAKTLMMQDDLRFVSFYDLDMMDLKALGRFRQKTIKQRTRLKIQLTTYVDQVFPEIQYFFKSGLHQNAVYALLKEAPSPKEIASMHMTHLANLLKVNSHGHFTKEQAKELRVLAQKSVGANDSAISIQITQTIQQIELLDSQLEKIEAEMTDIIKFNDSVIMTIPGIGYINGGMILGEIGDIHRFSNPNKLLAFAGLDPSVYQSGNFQAKTTRMSKRGSRVLRYALVNAAWNVVRNNATFKAYYDAKRAEGRSHYNALGHCAGKLVRVIWKMLTDKVEFNLE

SEQ ID NO: 76841 - protein, 395 aa, unidentified
MFIVGIDVAKRSHEVCMITSDGQTVQRPFSIRNNCTGYNLMLEKIRKHTNIKSQIVFAMESTAHYWLALFTRLRKDGYHVILLNPIQTSAMRDMFIRKIKTDAKDSFIIAELIRFGRYAESNVAQDRLLALKELCRNRFYLVDMAGDLKRKLIALIDRVFPEYEAQFDTIFCKSSVALLKKYPTPQKLSNAHLDKLTGLLWNSSNGHFGEWKARELKELARNSFGVEDCDGAYSTLILLMLDQIQSLSGKADALEKEISRLFQSFDTTVTTIPGVGPIIGAVILSEVGDISRFSSADKLAAYIGVDPSVNQSGEFQAAHAHMSKRGSPYLRRCIWMASQVAVQRDPMFRAYYEKKAAEGLKYMTIIGHVTRKMTAVVFAILRDHKVYEPILPTAA

SEQ ID NO: 76842 - protein, 402 aa, unidentified
MNAVGIDVSKSKSVVAIMRPFGEIVSTHFEIKHTASDIHSLIELINSVEGESRIVMEHTGRYYEVLAHQLLEANLFVSAINPKLIKDFDNDSLRKVKSDKADAVKIARYALDKWQNLKQYNVMDELRNQLKTMNRQFGFYMKHKTAMKNNLIGILDQTYPGVNTYFDSPARSDGSQKWVDFASTYWHVDCVRKMSINAFIDHYENWCKRKKYNFSKSKAEEIYGKAKELVPVLPKDDITKLIIKQAVDQLNSASITVESLRTLMNETASKLPEYPVVMAMKGVGTSLGPQLMAEIGDVSRFTHTGAITAFAGVDPGVNESGSYEQKSVPTSKRGSSDLRKTLFQVMDVLIKTHPQDDPVYQFLDKKRAQKKPYYVYMTAGANKFLRIYYGRVKEYLASLPES

SEQ ID NO: 76843 - protein, 340 aa, unidentified
MKNTKYFIGLDVHKEKTSYCVRDKRGNILLENQTATLYSELQPRLKPYLNTAKIGLEASTSYYTLYRTFLTNGHDISVANTIQLRQLIAKNDKLDAKRLSEMLRLGTFPCSYIPDEKMQHLRSLVQVRHSLMEEKVRCNVRIQAFLDKNGVIMPPQNAFGKHWRQTLLEHLSRGTVSGELQYGYDHFLFLEKKQRQVEQEMKHYTRMHWNKDYALIQSVTGFGPVLACYVVAHVCPIERFPSNRKLRRYAGVIPVTKQSGETTSKGHIPKGSSRKQLRWALVQAANTAGKTDTPLGRYYRKKKKQKKITAIAKIAVASSMIDILYKVLTTKRPYQAVSAE

SEQ ID NO: 76844 - protein, 405 aa, unidentified
MDIIVERGAGLDVHKETVVACIMGIGIKKEIRTFSTMTNDLLQLKIWLKGHGITHIAMESTGVYWKPIFNILEDTFEVILVNARHVKNVPGRKTDVKDSEWLCKLLRSGLVRGSFIPPKEIRELRDLTRYRRKLIQAVTSEKQRIEKILEDANIKLSSVVSDIFGVSGTRIIEELMKGDLEVGEMAELSKGKLRKKKDDLKEALVGHMETHHVFMIKASLNHIRALEEILSTMEQKITEKIDLHYKEEYKLLQTIPPVKDSASVIIAEMGVNMNLFPTEMHLSSWSGMSPGNNESAGKKKPGTTTHGNKCLKSILTELAWVASRMKGTYLRAKYQSLVGRRGKKRALIAVGHKILIMCYHILKYKVPCKELGGNYLDMRKKDRIVKNYIKRLTNLGFAVTLNEAA

SEQ ID NO: 76845 - protein, 401 aa, unidentified
MPELWAGTDAGKTEHHCVVIGTDGKRKLSRRVANDETALLQLISDVLGLSDGEPVTWAIDLNAGGAALMIALLTDNGQQVLYIPGRTVHHASGSYRGDGKTDAKDAFVIADQARMRRDLQTMHRGDDIAVDLRILTSRRLDLAADRTRAINRMRAQMLEYFPALERAFDYSTSKASLALLTGYQTPAALRRIGRNRLAEWLKNRKVRNYKLVAATAVEAAEAQHTAVPGEKLAAAVVARLAREVMALDEEIAETDALIEGRFRDHPHAEVILSMPGLGPVLGAEFIAHTGGDMNVYGSPDRLAGVAGLAPVPKDSGRISGNMRRPRRYCRRLLRVFYMSAMVAARCCPVSKAFYDRKRAEGKGHRQAIIALARRRLNVLWALIRDGRTFEITAPPSPVALS

SEQ ID NO: 76846 - protein, 339 aa, unidentified
MKLYGAIDLHSNNNVTVLIDEQDKVVYEKRLPNDLGVIAQQLAAYQSSLEGIVVESTYNWYWLVDGLMDKGHQIHLANTAAIQQYEGLKYTDDHSDARWLAHILRLGVLPQGYIYPKEERAVRDLLRKRGQMVRQRTANLLSIQNLITRNTGSSISSNRIKTLDSETVDALLPNPDLALAVKANLAMIQCADGQIDILERTVTDRVKLRAEFSFLKTVPGIGQILALTIMLETGEIQRFPTVGDYASYCRCVGSQKLSNGKKKGSGNTKNGNKYLAWAFVEAANFAIRYNARIKSFYQRKKAKSHGVLAIKAVAHKLCRACYYIVKNRVAFDIAKAFAG

SEQ ID NO: 76847 - protein, 345 aa, unidentified
MLYVGLDLSRKRLDWQALDAAGERVAVGAVPPDRDGLAHLPQRLGDAQVLAVIESMSGARFVHDQLEQRGWEVRIADAVKARGLAPLACKTDRIDCWLLAELARRDLVPEIWLPDPRVRAERERARFRLHLVKHRSALKNRIHAILFQHGIPNGHSDLFGAGGRRMLERLRLPEPWASTVACSLELIDSLDQQIAACERELERLGAEHRYMPLLTTAPGIGWVLAYTIASEIGDIGRFHSPRKLVGYTGLCPRVDQSGERDRRGPLRKNGPTYLRWALIEAAHAGLRWHQPYRELAERLRARHGKKRGSKIAVLEIARRDTEAIWHMLTKNEPFAPAGADLTLAA

SEQ ID NO: 76848 - protein, 389 aa, unidentified
MKIYVGIDIAKLNHFAAAISSDGEIIIEPFKFTNDADGFQLLVSKLESFDKNSLIIGLESTAHYGDNLVRYLVAEFYQVCVLNPIITCQMRKNNIRKTKTDKVDTFVIAKTLMMQDDLRFVSFYDLDMMDLKALGRFRQKTIKQRTRLKIQLTTYVDQVFPEIQYFFKSGLHQNAVYALLKEAPSPKEIASMHMTHLANLLKVNSHGHFTKEQAKELRVLAQKSVGANDSAISIQITQTIQQIELLDSQLDKIEAEMTDIMKFNDSVIMTIPGIGYINGGMILGEIGDIHRFSNPNKLLAFAGLDPSVYQSGNFQAKTTRMSKRGSRVLRYALVNAAWNVVRNNVTFKAYYDAKRAEGRSHYNALGHCAGKLVRVIWKMLTDEVEFNLE

SEQ ID NO: 76849 - protein, 417 aa, unidentified
MKKRTYRSKEVKQINWDELKESLSGEKIAVAIDVAKQKQYAVLTNMDGSVSTLFRWQHPEQTSQMFEAIGSLDCPITVILESTSTYGDIFRYQSLIRQFDVHQASAKRVHDAKEVYDGVPSLHDAKAASIIARFYLDGLTKPWRELNENERQLNALRREYEIHQSQYQRNQNRLEAYLSRHWPEVGYLLGYSSVALETLLMKYGSPEKVAAHAVDAQKVIKKASRSMLKPEKIKAVVQSAKNTLGVPCIEAESQYLQALATEMNHSRQRRRVTKNALEAEVDNDVQLTEMAKLIGKVTTAVLLSFHLDPRNFKCGRSLQKAMGLNLKEKSSGRLVGQLKLTKRGSSKARMYLYFAALRLIQKDPVVKEWYQNKVNPKAKNKTVIAVMRKLVKALWHVAQGQAFDANELFSVPTKKAA

SEQ ID NO: 76850 - protein, 388 aa, unidentified
MRQTDDLSKSITPFVQGNTLVAIIELSLSSWLVAGVVPGIARQPLKKLEPDKAELLRLLQRWRDEAVKSGCAIERVVVAYEAGRDGFWLARWLRAHEIEVHVIHSTSVAVSREHRRAKTDRLDTAMLLRVFMGWLRGERGHCGMVAVPTIEEEDAKRPHRERENLVGEKTRIVNRMKAALIRLGIRGFKPELRRAPLKLEGLRTPEGLPIPPNTLDEIRRDLARLAMVREQIDLIEQARLERITQGPKTGPNAMVRLVASIVGVGVETADMLVREVLSRDLRDRRAVARYAGLTGSPDESGSKRREKGLARAGNARVRRGLIQLAWRFLGFQKDSALTQWYRARTDGVKGASKTKMIVALARKLLIALWRMVTTGEVPEGVRLRPVEA

SEQ ID NO: 76851 - protein, 456 aa, unidentified
MNQNTFVGVDPASGDFECAFIRDGEREATHRTFTIKVTELDHMIEWIRDEKVDVIAIEGSGGYTRPLERALRTAEIPFYSIDPYRITRYRQAVLGQHKNNQKDAVAVAHFAREQAAQGNLEAHRRTWFPDETLRPLVRLYEQKQKEATREINRLWQRIQNVSGDMFLTLRGLSEGTYTSRCLSQQWLLKLFAWYPDITTWQSFTRDGIAETIDEHRTRIIDKIMELKDVAADVPPYSTVAQVELQVSASTALALKQAVRLLYHQIEAEAAKNTFTRRLMEYGGIGAITSAQIVSEIADISRFPDDDHLASYAGLGRREHKTGIGMAERSAFKFNHRLKNTFFTAARNYTLYNPDSHLTGYYRSLKARGMKQTERYKRVARALVRRFYRDLKAVAEQEAETRHEGNPEPEPAGNDSLKQPHTSPYEKKYTPGRSRKSKQTSTAAHPQKKEVTTADFP

SEQ ID NO: 76852 - protein, 320 aa, unidentified
MAQSSRNVVWIGIDVAKAAIDVAYAEGGAIVRVPRTAERVQQWAAGVPCAARVVMEATGGYERLVAMALRARGIAVCIVNPRQVRDFAKATGQLAKTDRIDARVLAHFGRALQPRVTVAPAEDVQTLRALLDRRRQLVEARTAEKNRRKLAPAAIVGSIDDHIEWLDDQIDALDRAIADTVRARAAMRGAVARLRTAPGVGPVVAATLLAHLPELGTLDRRRMAALAGLAPFARESGESRGRRAIWGGRAEARAMLFLAAQAAARWDDQLKAFYARLVAHGKPKKAALAAVARKLLTAVNAMARDQQPWRSEAAPQPSCC

SEQ ID NO: 76853 - protein, 449 aa, unidentified
MNRPQVIDDEEHERVHERVAAVDVAKDSGMVCTRTPHPSRPGARRSTVWTVKARMGAVRTLGRQLKKDGIEIVTLESTSDYWRIWFFVLEACGLAVQLVNAAQARNLPGRPKTDKLDAMWLARLTEMGLLRASFVPPASIRDLRDYTRARTRLVQERTRCWQRLEKLLESALIKLSAVASKLTTESAKDMIKAMIAGQRDPRTLAALARTPMRARHDDLVQVLDGMFDLHHGELAQLLLDQIAFLDGKITQLTGRAAELTAAMPAAWGINADGTTGPDAGTGPDAPVLNAVARLAEIPGISENLARSIIAEIGLDMSRFPTAGHLVSWAGLCPSARQSGTRTRAGKKGQGDTWLRGSLGQAATGAARTATFLGERYGRIARRRGKAKAQVAVARSILVTIWHLLADPADRFTDLGPGYYQARTDTDRKIRNHIRQIEALGFTVTLTKAA

SEQ ID NO: 76854 - protein, 375 aa, unidentified
MTKSNILFIGMDVHKESIEIALADDGANGEVRRYGRIGGTLDALKKALRKLVSEDKTLHFCYEAGPCGYELYRYLTDQGHVCIVVAPSLIPKKPGDKVKTDKRDAVQLVRLFRAGELTPVYVPDREDEAMRDLSRAREDAMIIQKSARQRLKSFLLRHNIRYQGRANWSEKHLRWLADGVRLPTPVQQVVFQEYVNTVTEAACRMERLVAEIHHHVKTWRLYPVVQALMAMRGVRMIVAVTVIAELGDLTRFENPQQLMSYLGLTPCEYSSGERQRRGAITKTGNHHVRRILIEAAWSYRFFPKLSPAIQKRQEHQPLPIREIAWKAQLRLSKRYKTMIQRGKLPNVVVVAVARELAGFMWAIAQAVPLSNPSRT

SEQ ID NO: 76855 - protein, 348 aa, unidentified
MALTIVETRAITGGVDTHADVHVAAALDPIGGLLGVQEFPVTLAGYARLLDWLGGFGTVCLVGIEGTGSYGAGLARHVTAAGVRVVEVDRSDRQDRRRQGKSDPLDAVSAARAAQSGRARGAPKGRDGTVEAIRVLMVAKRSARSERIQTINQARALILTGPDDLRARFARHTVAALVAELASLRPRPGSTVGYPTRIALRELGRRAQFPGAQLERLDELIVPRVTAHAPSLLALYGIGAHTAALLLIAAGDHPERLRSEAAWAHLCAAAPIQASSGKTVRHRLNPGGDRQANHALWRIVFTRMGSDPATRAYVERRTEEGLSKKEIIRCLKRYVAREVYPHLRAAAG

SEQ ID NO: 76856 - protein, 514 aa, unidentified
MKPFTVVVGIDLARRAAHQAVLLPAEAPDRGKVRRMWSVTHDLPGLEGLCHRIRKQTGRESLDGVLVNMEPTSGVWPVVGAYLGLQGAQVCLTRTDLTSQWRKVHSRYRKTDRVDARTLASVPLLFPERVWPIRPVPTEIRLLRDLSAQRQRLVEEIIRWKNRFLAVVEPVWSGLLGALSESQRFSAVGRAFFRRFANPCEVLGYGRARFAAWYAKHAHGLTDPELVDVLWTSAESAAALWRTFEQRQALPWSPVALELLIAQDLRMIEFHEGQLRDIEGRIAAARKDVPECDLLEQMPGVGKVVSVTLAGLLLPADRFANAGQCGAYTGFTGRKKGSAGRETQGLPITKTGNRRLKRDLALAADTAMYHDPQLAEFAIRLLNNGKHYNEVRVAVGRKIALRARALLQRAAHTPNAAFQWRDLQNRCITAHEAKALARELWERHRAEQAKGLNAPVHSRPPKDASQQAVAQPVLQYAPIAETMQPPDPNAPVDNSTQTWQKRVKKPLKNRHKST

SEQ ID NO: 76857 - protein, 319 aa, unidentified
MTIIRIGLDTSKHVFQIHGVDENEKPVLRRQLRRSEVEKFFAQLPPTRIGIEACGASHHWARLLRGLGHAVLLMPPQYIKGYVKRGKNDAIDAEAICEAMSRPTMRFVPVKTAEQQAALTMLGVRDLLVKQRTMLINALRGHAAEFGVTAAKGPNKIVELLQRLAAGEGVPTLAREMIEARLMAWHRQDQTSQCLATIPGVGPIAGVSFALKIPDPRAFRSARHFAAWIGITPRENSTAGKHRPGKISHQGDESLRRLLVLGATAVIQRAKRGRVSPWLLGLLARKPKKLAAVALANKMARVIWAMMISGEVYRRPQEA

SEQ ID NO: 76858 - protein, 379 aa, unidentified
MIKKYVVGIDIAKKDFKACLIQNTEENIKIKSSGNFSNNADGLKRFNIWVSKHLQKEKSIIYVMEATGTYHEQLAWFLFDQKQTIHVVLPNRAKAYMISLGQKSKNDKVDAKGLAMMGATQKLDVWAPISKKIYNLRGLTRHLEDLQSLRTALKNQRQAIEYGMHEVKEVTRSIDQTIKTIDKQIEKCKQQIHKVIDADEKLSSKVSHMISIKGVSTLTAAVILSETNGFSLIKNIKQLVSYAGYDVRENQSGMSSGKTRITKKGNAHIRRAMHLPAFNMVRYDVKTFSDLYHRVYNKSGIKMKAYVAIQRKLLCLMYTLWKKNEPFNPKYTISEKQESMLLPSIDLKGVESKTVSKNIETALDELPCDQSPEVLFSIS

SEQ ID NO: 76859 - protein, 405 aa, unidentified
MNAVGIDVSKGKSTVAIMQPFGIIVASPYEVGHTVSELKRLADRIRGLTGETRIVMEYTGIYCQPIARFLYDEGFFVSVVHAKLLYDFGNNSIRRVKTDKADAVKIAAYALSNWLELPRFVPEEEIRQMLKAFSRQYDKYSKLKTVLKNNLIALTEQTFPGVNVLFSSPARKSDGHQKWLDFAAKFWHCECICGVSAKSFATSYQKWCAKEGYRFRLSKANDVYAAACGHKSVMPKSDATKFLIMQAVAQVNAIGETLAAVSKEMNRLAALLPEYPVVMDFFGVGETLGPQLMAEVGDINRFKKKGSLVCFAGLDAPPHQSGQFESRNRHISKKGSPHLRKVLFLIVDGLLKHAPSDNPIYQFINKKRAERKHYYSYMTAGCAKFLRVYYGRVKEFLEKLHSAIA

SEQ ID NO: 76860 - protein, 285 aa, unidentified
MKVFYLGVDVSKKKLDLCLRSNGKDILYDVIPNDLSSIKSWLTRTFEKFFLSEDSLVVCAEHTGQYTYPLVCATKSIGVYLCLEDAAKIKYCHGIPRGKNDKIDACRIAMYAERYNDCLQPYTASELIIQKLKNLSTERSMLVADRAKYQSQLKDQVDYMEHSIYIAKCNRVEGIINTFTDYIAQIDLEIKELINQAPVIAHQMDLLMSVDGVGERVALKMIMETDAFTSFTDPRKFCCHAGVVPFVYVSGSSQRSKNRVSNRADKSIKHLLHMAALSVSRHEYP

SEQ ID NO: 76861 - protein, 319 aa, unidentified
MDILGIDIAKRSFDVALLRNTKLRNKKFNNNSAGFTQLDQWLVKQAVVDLHACLEATGNYGEALASHLHQAGHVVSIVNPACIKAFGQSELQRNKTDRVDAGVIARFCEKQKPQPWVPAPSEIRELQALVRHLDSLTETRTQLMNRLNSTQVESVINSLQTVIEAVNAEIAATKRKIRDHINGHPDLKECRDLLTSIPGIAATTAAKLLAEIEHLREYKHPRQAVAYAGLSPRHNDSGEVRRPSRLSKIGNSRVRKALYMPAVVALKYNPIIKQLSERLSQRGKCKMVVLGAVMRKLLHLAYGVLKTRKPFDENHATAS

SEQ ID NO: 76862 - protein, 469 aa, unidentified
MMETKRRREQRSMLPVHPDAAAIDIGATVHVAAVGPARDPEPVRSFGTFTGDLHRLADWFAQCGIKTVVMESTGVYWIPIYEILEQRGFEVRVVNARDAKHVPGRKTDVSDAAWLQRLHEFGLLRGSFRPQGAIAALRAYLRQRERLLDYAAAHIQHMQKALTQMNLQIHHVISDITGATGMRIIRAIVAGERDPDTLASYRDIRCHSSAETVRQALIGNYREEHLFALAQAVELYEVYQAKVATCDEKIEGVLERLKQPCRAPAKPLRAARHKTRQPNAPAFDARGALYAVLGVDLTQIHGLGPYLALKLISECGTDLSAWPSAKHFTSWLSLAPGNKISGGKILSSRTRPSGNRAAALLRLAATTVGRTETALELFTAACRRGLERQKQSQRQLERSQSCFTMLFAMGWTTQIPARPITKSAIGGVSSPISNDVRRRSDTFSSQPRSRQCRWLFLRKAAAYFAKEST

SEQ ID NO: 76863 - protein, 337 aa, unidentified
MKLYCGIDLHANNSVVAVLDEGDSAVYEKRLPNDLSTIIDVLRPYQADLTGCVVESTYNWYWLVDGLTEAGFPVHLAHTGAMPQYAGLKYTNDFSDARHLAHLLRLGILPTGYIYPKEERALRNLLRRRLLLVRQKTLHHMSLQSMIARHSGQRLCANEIKALETKQLADFLPPPILLGGQITHQARCWMDTAIKRIERELQKRVQPRMDYQLLQSIPGVGPALGTTIALETGTIQRFPGPGNYASYARCVRSEKISNGKYKGQGNKKNGNKYLAWAFMEAAHYGAIWNPQIKRYYQRKQAKAHILVAKKAVANKLARACYHMLKRGEVFDVTRAFG

SEQ ID NO: 76864 - protein, 374 aa, unidentified
MTTNGARRSGDATRTEVVLGVDTHLDFHVAVVLDHLGRRLGEAKTPTTTKGYRNLVSWAEGFGPVRCAGVEGTGSYGAGLARHLKAADIAVMEVERPKRRHLRRRGKSDPIDAERAARAVLAGETAGVPRSGDGRVEMVRALRGARRSALKARVQAANLLKATLVTAPEELRWRLRALPSGELVALAARFRPGGEPEDVEAAIRFALRSVARRYQALSEEIAALDAQLERLVAEAAPGLVSLPGVGTNHAATLLVLAGDNPERLRSEASFASLCGVSPVEASSGKVVRHRLNRGGNRDANRALHMVCVVRMGSDRRSRAYVTRRTAEGKSKWEIMGCLKRYIAREVYRVLLSSAAPAPPLIGTASGSVVGAKTG

SEQ ID NO: 76865 - protein, 340 aa, unidentified
MNIKRIGLDLAKNIFQIHAVDHHEHVVLRKTLRRDRMTAFFSQLSPCLIGIEACGAAHYWARELTRMGHTVHIIPPQRVKPYLKGQKNDANDAEAICEAISRPGMRFVAMKTERQQTLQAEHRVRARLIRARTALSNEIRGLLGEFGLVLPVGIRQLRKALPEILSQQELWDDRFIRLLSELAEELQMLDERVARHDRRLEQSARDDVRIKRLLAIEGMGPVVASALVAAVGDGRQFKSGREMAAYLGLVPRQHSSGGKARLGSVSKRGDSYLRTLIIHGARAVLNACPNKTDRRSQWLQALSERRNRNIATVALANKNARIAWALLSREEDYHGLQAVG

SEQ ID NO: 76866 - protein, 389 aa, unidentified
MAEVLRKLTGRAALDAGVVSGNGKKDGRGNTFGPNRDRLTVGVDLGDRWSQYCILGLEGETLAEGQLRTTQEDVGEFFRGLTTARVVVEVGTHSAWVRDVITECGHEVLVANPRLMEGSKRRKRKSDRIDANKLARLGRVDPQSLYPIRHRSREVRQDLVVLRARDALVSVRTELINTTRGLVKSMGTRLPRCSSPSFAEKVKDAIPVEVGEALQPLVQLVETVNECIERYDERIEELGRKKYGHTTLLRQVKGVGPITSLAYVLTLEDPQRFASSREVGPYLGLVPKQEDSGDSQPQLGISKAGDRMLRRLLVGSSQYMLGAFGPDTDLRRYGLRLCERGGKNAKKRAVVAVARKLAVLLHHLWVTGDVYEPLHHTGAETRTAQAAAA

SEQ ID NO: 76867 - protein, 344 aa, unidentified
MGEVSTIGLDIAKSVFQVHGVSSDGEVVIRKRVSRAKVLEFFASLPSCLVGIEACPTAHHWSRQLHALGHTVRLMPPSYVKAYLKRSKNDANDAAAICEAVTRPSMRFVPMKSEQQQSGLMLHRSRQLLVRQRTMLSNAIRGHMAELGVISAKGRNGTAELLKIIANKTNDCIPAAAQFSLDVLARQYAATTAEIGVIEKRIHAWHRSCEESQRLEEIPGIGPIVATALVAEVGDWKAFSSGRNLAAWIGLVPKQHSTGGKDRLGGISKQGNRYLRWLLVAGAMAVIRYARQHGTKRLWLVRIMERRPIKVAAVALANKIARIAWAIMVHGERFKEPRLLPVAA

SEQ ID NO: 76868 - protein, 337 aa, unidentified
MEYFAGLDVSMSETHVCVVTQDGTVIHEVRVPSTPADIVAALKQVPACRRVLFETGRMAPMLYHGLSQLGLPVVCVESRQAYQALKSLATHKTDRNDARGLAHLARTGFFKPVHVKSLPAHAVRSLIIARKKLVGQRVTLENQIRGLAVVFGVRLPRALSAAFIRQALRASEGIPGLSSAMRGLVAARAAVLAAVVAIDADIRQMVRASEACRRLMSIPGIGQLTALAFTAAVDDPGRFRRSRDIGAYLGLVPRRYQSGEVDYTGSISKCGDRRVRTLLYEAANVMLTRYKGPLKLKDWALAIAKRSTLRKARIALARRLAIIMHAMLRHGTEFKPA

SEQ ID NO: 76869 - protein, 349 aa, unidentified
MHSTTVAVDLAKNVFELAVADAEGKIGERLRLNRARFSSFFVHRAPCRVLMEACGSAHYWARWIGAHGHAVQLLPAQYVRQYVRRNKTDRADAAALIEAARCTTIRTVPAKSLEQQQVLVLHRLRSQWMSTRHRYLNTLRGLLREFGIAVPLGVRVARTRIAHYLAQPPQELPAAIRPLLAQMLSEVKELEHHVEQIERDLTALTRADPVVQQLRQIPGIGLLSSTAIRAAVGDVERFPCGRCFASWLGLTPREYSSGERRRLGGISKRGDVYLRTLLVHGARSALLAAHRQQRSGRPLDHLRQWALQCERERGHNVATVALANRLARIVWATWKHARAFDGNWGRAAQ

SEQ ID NO: 76870 - protein, 411 aa, unidentified
MDVLYLRCAGIDVHKRTAVVTVGWVDDQGQRQKQTRTYGTMSGDIERLRQWLVERGVTHVAMESTGVYWKPLFNLLEPHVEVVLANAAHVKAVPGRKTDVRDSEWLLDLMQHGLIQGSFIPDAPIRALRDLTRYRTSLIEERTRALNRIQKVLEDANIKLASVVSEVLGASGRAMLEALIAGETDPEVLASLARGTLRKKHDALVQALAGRIQDHQRVLLRTLLAQVDHLEQAITQLSAEIADRLVPYAEALELLCTIAGVKRRVAEVVLAEIGPDLSRFADARHLCSWAAICPGNHESAGKRRSGRMRHGNRWLRGVLLQAAWAAIKVKGGYFGAQFRRIAKRRGDKRAAIAVAHSLLTVIYYVLTRGVPYDDLGADYFDRLRPEQQARYHARRLAELGFDVTLNPIAAA

SEQ ID NO: 76871 - protein, 422 aa, unidentified
MKVFNPADFAALIAIDWADRKHDVCELDQQNNETTFSVISAKPEAINAWANALKQKYNGQQVAVACELKKGPLIYALSKFKHIVLFTINPSTVAKYRKAFTHSGAKDDPTDAAIQLEILQQHMSKLNVIMPDTQSIRSLAQLVEYRRKLVQDRVDLTNRLSTTLKNYYPQVLDWFNEKDSMIFCDFLLRWPSLAKVKRARKQTLHDFFNLHNARYPNVNEKRINDIKHAESLTSDNAIIGPNLLLVECLVGQLKQLMLSIERFDHEIKSIYKQYSDRFIFDSLPGAGPQMAPRLLAAMGSNRERYQSSEEVQKYAGIAPVTERSGKKEWIHWRYSCTTFLRQTFVEWAGQSVRYSFWAKAYYEQQKSKGKPHNTIIRALAFKWIRILFRCWKTKTAYDESTYLEALKRKGSPLLKYAMESNF

SEQ ID NO: 76872 - protein, 346 aa, unidentified
MKIIGCDFHPSFQQIAMLDLATGEWTKKKLPHASGEAEQFYRSLQGEAVRVGIEATGSTRWFERLLEELGQELVMGDAARIRSLVTRKQKTDARDAEHLLRLLERDQFPAIWVPSAGERDLRELVLHRHKLVEMRTRIKNQLQHVALNEGLQKKRQLWTERGRRWLEDLALPRWTERRREDLLHFLDELDARIAELDQAVGEAARQDARVRLLMTHPGVGPVTALAFVLVVGEVTRFPRSKKLASYLGLIPSEDSSGTRRRLGAISKQGNTLLRTLLVEAGQSAARYDPELRRAYQRLCHKKQHTGIGKVMVARKLAVRLYWMLKTQQPYRPARMQSSPSHSVSAA

SEQ ID NO: 76873 - protein, 389 aa, unidentified
MPSVSERPEAPTAIQTHLAASFVSLELSRSIWLITSLSPASGEKMSKHSVRAGDVAALLARFSELKRKASERTGKSFPIVVIQEAGLDGFWLHRVLQSEGVESHVVDPSSIATSRRRRRAKTDRIDGEALLRALLAYKRGEPRVCAMVKVPTPEEEDRRRLCRERKVLIAERVKHVNRVKGLLFSQGISGYEPLRRDRRQRLDELTTGDGRPLPVHLKTQIRRELDRLELLLDQIKEAEAERDALLAAPQPAAPAPAGRMLLEFKGIGAELAAVLWLEALFRHFDNRRQLASYAGLAPTPWQSGSVDHEQGVSKAGNPRLRTSLIQLAWLWLRHQPQSALTLWFKERVSGNGGHFKKSTIVALARKLLVALWKYVTAGVVIDGAVMKDA

SEQ ID NO: 76874 - protein, 345 aa, unidentified
MSYYAGIDVSLEQSSVCVLDGEGKIIREAKVASEPEALIAWFGSLGLAMTRIGLEAGPLSQWLFAAMKQAGLPVELLETRHVRNAFKTMPVKTDRKDARGIAELMRTGWFRPVHCKSISAQETRAILTTRTLIESKLRDVEMSLRGVLRGFGLKVGKTTPTNFAERIKQLVSEHSNLQVIADALLAVREVLLREFRSFEKRVRTMARHDERARLLMTTTGVGAVISLTYAAAIDDPARFKNSKQVGAHYGITPKRYQSGEIDYTGRISKIGDKSVRTALYQAAHIILTRPVKASALKSWAMQLAKRIGMAKAKVALARKLAVILHRMLVEGKPFDHKLPNQVAAA

SEQ ID NO: 76875 - protein, 536 aa, unidentified
MLMARSWGDLPDASDQKRRPRQWCTSEWTCTARSRTWSPSTGGATILSRRFEHSREAFRRVFGELEPEPISVAFEATYGWGWFADLLADAGIEAHMAHPLATKAIGAGRVKNDAVDAATLAHLLRTNLLPKAWIAPPEVRELRRLVRMRASLVRIRSRLKCQVHAICADAGVSVPASDLFGRKGRATLETLTLPPRSASRLAANLRLIDDLVREIVAADREIVAAFRDDDRVRRLLPIPGIGILTAATIVAEVWDVGRFPSADHLASWAGLTPTERSSADHVRRGHISKQGSRWLRWAMVEAATKIGSSRSARLHRFADPIADRRGTKIARVALARRILTLVRPHRHERLGEDDAARNEPLVPLASPRTSSRRPTARRSPGPSSDARRVPGLGFASQQGAEDALDNRARREKRERRHRSLDRLAGGEDASLEGGRNHRLPDRLVAAEDEWVDEVRRERPQRNEGEDRLDTHGHEGEPAQHLADDDAAGSLGRSPGGGHHNASEEHPRTGRCQGSDPAPSARRIPAPSGQGRLRGSR

SEQ ID NO: 76876 - protein, 371 aa, unidentified
MLYLAIDQHAKQITICVRNEEGETVLRRQVSTRPEKIEAFFGQLAEMDAEFMAILEVCGFNDWLIEDLRKWKCREIVLIHPEKPSKKKTDRRDAQKLADLLWLNRQRLAAGQIVRGLRRVYMVSQEEREDRQLTSLRKNLGQRLTRTLNKIHRIVNRHNLIWQYPTKTFQTRAGRRWLAEVPLPAVDRLEMDALLKEWEVCDEQIARVDEEITQRASRPAANDVLNPTQILMTTPGVSYYSGLTLASRIGPIERFPRPRSLANYFGLTPGCRNSGNAQDRLGSITKQGSKTARFILGQLVLHLLKHDPKMRNWYRRIKLRRGSKIARVAVMRRLTTIFWHLLTYKEPYAIGGPPPRLRQKQASSAEENAAA

SEQ ID NO: 76877 - protein, 431 aa, unidentified
MDRVMIGVDPHKLSVTFEARDSREVLRAKGQFGTDARSYRQLLAYARQWPERIWAVEGANGIGRPLAQRLLASGERVLDVPAKLAARARVFDTGQGRKTDPADAHAIVMVALRDKRLRELGTDPGLTVLRLLCDRRDELSRSRAQALNRLHRLFLELIPGGAPVKKSTAQYQALLARVRPRDLAGKTRRRMAAEELADLGRLDAKLKAMKAELKAAVLASGSHLMDIHGIGPAAAARILADVGDIARFPNRAHFASWTGTAPIDASSGQHTHHRLSRAGNRRLNHVLYMAGIVQLRNDTPGRAYYRRRVAEGKTSMEAMRCLRRRLSDVVYRQLAADTQPQQAGPGGHSGATLLSSAADLPPGIGTSDQPLPGPAPATLPPSLTAPHSPAAQPGASPRRRTRGVNVERPTGRTRLTPTSAGAHSKSPGPPS

SEQ ID NO: 76878 - protein, 359 aa, unidentified
MDVRDPAKRHVVGGVDTHKDLHVAAVVDERDRVLGSRSFTTTRQGYRQMLAWMGSFGEVQRIGIESTGSYGAGLLRFVQTVGIEVLEVTTPDRHDRRRRGKNDDLDAQNAAHAAFAGQRTVTPRSRDGMVESLRVLSACRKTAVAARRVALQLIQNTIVCAPDGLRDDLRSMTRMQLIRTLAAWRPDLTAYRDVEAAYRITFKSLARRYLELHDEIADLDVMIGAIVDELAPDLVARNSIGHVGAAQLLLTAGDNPDRLRSEASFAALCGTSPVPASSGKTIRHRLNRGGDRHANSALHIIAIGRLRTDPKTKKYVAKRIAEGHSKLEAIRALKRYIAREVFTLIMRRHKTINQTQIAA

SEQ ID NO: 76879 - protein, 342 aa, unidentified
MESVQGLVVGVDTHKDTHSAAMVDELGGVHAALDVGANRNGYRSLLEWARCQGSRRIWVVEGTGSYGAGLAAFLSAEGEVVFEGDRPQRRKRGAAGKSDQLDAIKVAREALARPHPAVPRRRGQREAIRILLTTREGAVQAYRQGLNQLYALVVSAPEPIRERLIRLKGEQLIHACIRVRGASYLESSVTATTMRQIARRLNLLLSEAADYERQLAELVGAAAPSLLAEPGVGPITAAQLLISWSHAGRIRHEGAFAALAGVAPVPASSGRVVRHRLNHQGDRQLNRALHVVALSRSSFHRPTRAYIARRTAEGKSTREIRRCLKRYLARRFFRLLQRLDNP

SEQ ID NO: 76880 - protein, 360 aa, unidentified
MQKQLVTRYNVGVDFSFKKFDVKLAANYQDNTRKVIGSRKFENNEKGFKELAGWVEDKCKEKGAQVRISGEATGVYHERCCYYLHGKGYYVTIAVPSRVKKYKESCGYKSKDDCVDATALAYMGLEKNLDKWEPMNSFYYDLRSLTRHYQSVQEMETVLRNQLHAEQAGMFASKAVVQQIKAGIKLFSSQADLLKGAIEEKVNSAPEVKRKLEGITDKLKGVAILTVATVIGETNGFAFFTNRLQTASFVGYDVVRDQSGNREGKTKISKKGNSHIRRALYFPAINVVKCKMKPFAQKYERIFERTKIKMKGYTAIQKDLLMMIFTLWKYDRKFEPYYKYQQEQKALVISGDCKAVSSFG

SEQ ID NO: 76881 - protein, 400 aa, unidentified
MISVGIDVSKGKSTVCLLKPYGEIVCKPFEVQHTEKDLEDLANLLQKLDGEIKIVMEATGIYHLPILTFLLEKGFFVSVINPLMMKRFSKDNSLRGAKNDRLDSVMIASYGIEKWYKLKKYEVNDRIYTELRLLGRQYYRFMQTHVKHVQELTHLLDYTAPGLKAMFNSWNEHSNRDKLSDFVERFWHFDLITSLSREEFVEQYLLWAKEKKYHQSRSKAEKVYDLASNGIPTLSSHTPSTQLMIQGAINVLRIVNNSLYHILSRMKELAKSLPEYATVRSMGGVGDSLAPRLIAEIGNVKRLRNGHSLVALAGIDPPPYESGQFVGTHRRISKRGSPNLRKIGFEVMRMLKSHKEPEDNAVYNYILKKEAEGKNKKLSKIAGLNKFLRIYYVRVMEVYQ

SEQ ID NO: 76882 - protein, 317 aa, unidentified
MSKYSMNCAGIDTGKRKLDVALDGRAERLQVDNNADGHKALSAWLRRHRAKRVGIEASGGYEQAVVAELRRDHFQVIVFQPVQVRAYAKFHLQRAKNDKIDAALIAACTAAAKKIYAPPDPRLAPFSEHLTMIEQITEDIARFKTRRESCRDPRIGQFWDEEVARLKRRLRIELEQLVAAIREHRDLAERLDLIASVDGVGERTAVAILVRMPEIGTLSREQAAALAGLAPYDDDSGDQVGVRRIDGGRERLRKSLYAAALAASFRWNPQLGAMYRRLLAAGKAHKLALVACARKLLIFVNTVVARGTPWTKKTAAV

SEQ ID NO: 76883 - protein, 380 aa, unidentified
MEKACGLDVHKDSVFACILDEQGKKIFEKRYGTLTPNLMELRDTLLAIGCVRVAMESTSIYWMPIWHVLHGDFSLTLANPYFIKQLPGRKSDVKDAQWIAECLQKDLIKGSFVVDGVLQQMRQYARQHRRLTKHRVRLEQQLDNQLQRCNIRFSNYVSNQSNNVSMRKIIKAVEAGERDPEKLSRLVHGRTKNRHGTQVITDSLNGVVGQVDVEMLKQCMEQIELIEKQQASCLNHLEELANTHFAEEISLLCTIPSVQKLSALFILSEIGHDMSAFSNANSLVGWAGLRPRNEESAGRIQSRKTLHGNKYLRQILVEISWSAARSNKSFLGKKYSILSKRMKSQKALIAITRKMLVIIYNVLKTKQPFDHNRNIQALVA

SEQ ID NO: 76884 - protein, 475 aa, unidentified
MGRDSGKQKKENMKALSPEQEAGLKQKAEEISKGLQSYTWRDLETGGKFTHNDKLTFIRDDMLIVGCDIGSERHYARAIDAKGRELSKGAYSFENSAEGFQSAKDWALCLAAQHGKNQIVLGVEPTGHYWFSLAAWMIAKGISVVQVNPYAVKQTKELADNSQAKNDAKDPKLIAELVKNGNYGVPYLPEDVYAELRVLCTLRDQLMEDRVRNMNRLHREMKIVFPEYREAFGKIDGIFTLSVLANAPLPSELVALGEDGVKDIWHAEKLRGGGYKRAKEIVRLAGVSAGLTQGAEARKIAIVSFVGKVMELAAELEEIEAQIALKCREIPRADNILEIHGLGATTVSGILAEMGDIDRFDAAKEIQKLSGLGLVACSSGKHQGQTKISHRGRKRLRYWLFQGALSVVSHNEAFRQIHAYYTTRAENPLKKMQSITVIACKLLRIIFTILKKGVRFDPDKMLSDITHPAPLDAAA

SEQ ID NO: 76885 - protein, 428 aa, unidentified
MLKQNTEPDPAPDFAAFLAIDWADEEHAFHLQVVGQSKIETGTLEQKPHVLGPWVAKLRERFGGRPIAVGLEQSRGALIHGLMSYDFLVLYPIHPTTVAKYREAFKSSGAKSDPLDAGQILEILTQHQDRLHRLNPDTVETRLLGRLVEDRRKAVDLRTTHVQALGANLKEYYPQALELTNDNLSSRLAGDLLIKWPTFEDFQQAKPSTLKRFYYGHNVRSPEVIERVLTLAQKSQALTTDPAIVESGRRLTQMYARLIQALHPAIADYDQRIQQVFNAHPEAKLFRDLPGAGPALAPRLLAFFGTDRSRYAAAFNVQSFTGIAPVTKSSGKSKVVYARAACPKFDRQTFHEFSRLSVTRCQWARNYVQYYTDKGKKYHTIIRALAYKWIRILFKCWQERTPYNEDKYMETLKLRGSIFATWHLQKKS

SEQ ID NO: 76886 - protein, 411 aa, unidentified
MDLLIERCAGLDVGKLEVVACVRAPDGKGGRRSEVRTYDTFTSGLEALAGWLGAEGVTEVVMEATGQYWKPIWYLLEDRHFELLLVNARHVKILPGRKTDVGDAAWLAELLEHGLLRGSFVPPPVIRELRDLTRYRKRLIQAHASEEQRIHKTLEDAGIKLDSVASDVLGVSGRLMLNALVAGERDPEVLADLAKRRLRSKIPELRQALRGRFGDHHALLVRLSLTHIEQLEAAIAELDARVDAMIAPFERARDRLDTITGVGKRAAECIIAEIGVDMSVFPTAGHLASWAGRCPGNNKTGGKRRSGKTTKGNRWLGDILTECAWAAAHTRDTYLSAQFWRLARRIGKQKAAIAVGHSILVIAWHLLNNDCDYQDLGGDFFARRDTDRARQRAIAQLEQLGYQVTLEPVAA

SEQ ID NO: 76887 - protein, 447 aa, unidentified
MATKARKAKKIKTSKGVRLEIVNQMAAGIDVSSTEMQVCVPAHCDEDNNRRFGTFTEDLHHISKWLKSCGITTVAMEATGVYWVQLFMTLQGDGFDVLMVNAKAIKNIGEEKTDEVDAEWIMLLHSYGLLKASFQPDNQARRIRNLSRHRDNLLRSSSREVLHIQKAMELMNIKLVNVISDILGKSGMDIIKAIIDGERNPVKLALLADPRCKASKETIQKSLEANWDEDLVFMLKQSYSLYLFYQQQMCECDKQIEQIAKEYLVEIDVAGVEKLIRSNKKKTKKNAVTIDVEQIAFQMWGVNLMLIPGISDAAMLRLIGELGHDFTEKFESYKQFSRWCNLCPNNKISGGKLLSSKIPKRKNPVGLILRQAANSLKASKTPLGFYFRRMQSKDGYLGAIVATANKLAKIIYKLVKTKTEYNDSYDKITEEEILKRRLSGSYCRYCQ

SEQ ID NO: 76888 - protein, 343 aa, unidentified
MEQLTVIAIDLAKSVIQIHGSDSKGKCLIRKKLRRNQLLPFMAKLPHCLVGMEACGGSHYWAREIKQLGHDVKLIPPQFVKPYVKTNKTDVADAEAICEAVGRPKMRFVPIKGPEQQAVLLLHREREGLIKERTAVINRIRSSFSEFGVAIPAGPKRLRQWLSDSYGDVENDLPVTLNRLMFRMVDRLNYIESEICDLDKEINDQNKSDERCKRLIEIPGVGRLAASAIVASVGNAKEFRSGREFAAWLGLVPRQHSSGGKQNLQGISKRGDAYIRKMLIHGARAVIRHMNRNSAPVDWLEDLMKRRHHNVVIVALANKLARTIWALLSKEQSYKRYEDTVVA

SEQ ID NO: 76889 - protein, 435 aa, unidentified
MEEVTDEPLYRDRVCGIDIGKAGMAATIRVPSDKDPARRASETREFATTKRGVLALADWMRCWQVPAVVMEATSDYWKPVFYRLEAEGFECVLADAKQVKHLPGRPKRDPSDSRWLAACFERGAVRSCFVPDPEFRIIRLHTRYRRDLTDERTREKNRVEKLLESAAIKVSSVVTDLHGVTGRDIMDHLIAGERNPKVLAQLARARARRKITELEHALDGAEFFTAGHAALLTAMLARIDRVNEEIARLSEVIEQLLAPYEEQLQQAESMPGWGRRSAEDAVAETGVDMTKFPTGGHLSSWAGKTPLDHQSGKRAGRARHKKGNKYLAAVTGETAVSAGKTATREGARYRKLARSRGKGKAQVAVGNTQLRVYHKLLSNPGMRYQDLGPDYYERQAATRRKIAYHVREIQALGLEVTLARIPDPEPDRPATTPAA

SEQ ID NO: 76890 - protein, 319 aa, unidentified
MSTQNSQIEINVGVDTGKYQLDIYLRPLGIDFTVSNDEKGIQKALQTLKKYAPTRIIIEATGRLHHLFITACGKAKLPFSVINPASIRKFAEAIGQFAKTDKLDAQLIAHYGEAVKPELSRLKPANIQKMSDFLARRRQLVGMQTMEKNRLKGLPKSLSSFIRPVLSTLKNQIAKLDKKLLKLISQCDEYKTKKAILNSVPGIGNIITFSLLSDMPELGKISNKEAAALIGVAPMNRDSGTYQGQRKIRGGRASIRSVMFMGMMSAIRFNPVIKVTYERLLAAGKAKKVALIACIRKMIVILNSMVKSGIHWDNNFAKN

SEQ ID NO: 76891 - protein, 313 aa, unidentified
MAFLHHQPQLCLGFDIAKDTITVADGTTTRTIANQRRAIRALLKRYKHIDLVVCEPTGGHETLLLEECLRAGIACHRADTLKVKSFIRSFGTHGKSDAIDAGMLSAYGRERWEKLCLWQAPDADETRLRALVRRRQELMAFRGAEKNRLKAPGGRGLAASFKAMIKAVDNQIKTIEADIRELIANSRTLKHRAAICTAMDNLGPIMAAKLLASLPELGSLTRRKAAALAGLAPHPNDSGQKHGYRKIRGGRPDVRTMLYMPALCAAAGKGEFAAFYKRLRANGKKPMVAIAAIMRKIVVTLNARLRDAMIPQS

SEQ ID NO: 76892 - protein, 343 aa, unidentified
MTHFVGLDVSQKMTAICVVDNAGHRLWRGQCPTVPEQITVLVRRHAGDEARIGIETGAMTPWLVHELRNLGLEVVCLDARHARAALKMQINKTDQNDAEGLAQIVRTGWYRSVHVKSFESHRARALLGARTQLTGMTTRLSNHIRGVLKTFGLLPGAMRGLPFDRKVEALLLDRSDVALIVRPMLVAWRQLREQIVAFDKAIRALVKSNSACRLLMSVPGIGVLSALAYVSTVEDPARFGQSRSVGAHLGLTPRQYQSGEVDRSGRISRCGDTLARTLLYEAAVVILSRVKRASRLKDWARVIAKRSGNGKARVALARKLSVILHSVWRSGEPFRWSEHASAA

SEQ ID NO: 76893 - protein, 411 aa, unidentified
MAGKKLWVGIDVGKQFHHACAVDEHGKVVFSRKVVNRQAAIEDLITRTRAKAGGVGGGAGEVVWAVDMTSGAAGLLLVLLLATGQPVRSVPGRLVNRMAGAFAGEAKTDAKDARTIAETARLRTDLSNVAIPEQVVGDLQVLTAEREDLMADWVRGVNRLRERLASIFPGLEQAFDYSTRSALILLTGYQTPAALRAAGAGQVETYLREHHAWAPGIPAMAATAVAVAGEQSVALPGETVTAALIARQAAQLLDRDREIKDLDKQLAARFAEHPHAQIITSVDGFGPVLGAELLADTGGDLAAAFGTPGRLAAYAGLAPVPRDSGRVRGNLHRPKRYHRGLRRVFYLAALSAMRRPDSPSRAYYQRKRAEGKRHVQALIAFARRLVDLVWALIRDNRCFTTEAPAPAATTA

SEQ ID NO: 76894 - protein, 429 aa, unidentified
MIMGFTKPIEHSNLITKEGDFMNPLYVGIDVSSKSNVVYFMLPNGDKHSNFSVANSHDGSTQLVKRICSVLSSESLDTVSIGLEATSVYGDNLVYFLREDASLASFNRKIHVLNPKQVNKFKESYNDLPKNDWVDSFVIADCLRFGRINKEVYIGDYHYKALQNLTRARYFAVCNLTKEKQRFMNVLFKKYSTMTQEKVFSETFSTTALAVYDEFESAEALAYMDLQELTAFIIEKGKNRFPDPDAVAKAIQKAARSSYRLPKTVNDSVNQVLSISITSMKALESQIKEFDKAIAAQMELLPNVLISIPGIGPVYSAGIMAEIGDINRFDNQASLAKYAGLAWTQHQSGNFEAQNTRLIHSGNRFLKYYLCEAAFSLVRCDKEYKAFYHQKYKEVNRYQHKRALALTARKFVRLVFTLLKDNRLYRPAE

SEQ ID NO: 76895 - protein, 425 aa, unidentified
MRTESTPGARGPVFCGVDTHADSHWLYVLDWRGRKVLSRQFPADAAGYEALAGAIAAAGEPACVAMEGTSSYGAGLTRHLASLGMPVREALSPARMQRRRPGQGKCDEADAERAARAAMSGSKLGTPKSQDGWVDGVRCMLAARSGAVKARTSAINTARSLLTTAPEGLRSRFRGMGGPRLMEELPSVRAEGALGAALGALADLWAAARDAALDMERAIEASLEENCPALLAMYGCGPVSAAKLAVAAGDNPGRLRSEASFAAICGACPIPASSGKTVRHRLNRGDRQANSALHEIARQRVMRDPETAEYAERARGRGKSDREVMRCLKRYVAREAYRAPHEIRRPEDASELVAARRAARVSQVRAASILGTSEKYISMLERGQRELRPIRRAYEAWVEAGLPLDWDRQAFEAERKMDSKKHLAK

SEQ ID NO: 76896 - protein, 453 aa, unidentified
MAQGSGLTRGDRNRNDRIAALRGVVRRDRAVLAIDLGEDKQAAALVDHEGRVLARRIVKAKAHQLGGLLAWAAEQAARAGFAGLTVACEPTGHRWKALMGLADAAGHGFCCVQSLAVARAREGDDYTRDKTDHRDAYLIGKLVIRLECYLPERAGEDWARLRHLGARRFALVADVISCMQQVGDLLACAWPAALETAKRPLEATTWLAAMGAVVDRCNGNPARLRTMGYEKFVAAVRRELPRWGAKKIYHKIVKGLWEALADAGGVIAQRRGALERVHLLMGDWRSLLARLADTEGRMTAVLDELGLTELVTSIDGLSAVGAAAILAETGDLARFASARSVVKHAGLNPAEHTSATLAGKTRISHRGRPGLRAAAWRAVWGGMRHNRVLHARHAHLTGRDGNRLSDGQARAACAATLLRWLYAVVTRRQPWDARIAAGAISAHPGAVTTAAAA

SEQ ID NO: 76897 - protein, 501 aa, unidentified
MRKLFPHAPNPAQKAPQTGETGTSNRDRERGRSPGRGSRRTAGAAHGTVHLPVLRPHAAGIDAGATHMYVAPPPDRAGGQPVEVFETFTEDLQRLARWLGALNVDTVVVESTGVYWVPLFQILETHGIEVCLVNPKHVKNVRGRKTDMVDAQWLQYLHSVGLLEKSYRPADQICVVRSIIRHRASLVADAGKQTQRMQKALAQMNILIHHVLSDLTGVSGMRILTAIVAGERDPEKLAALRDGKVKADLATILKALHGDWRAEHLFVLRQALQTYQFLQGQIQQCDVEVEQLLRKLDGQADPEDVPPAPKNAHSGKPRKNQMQFRDTDVRTELFRLFGTDLTQQEGLGPATVLSLYAELGADLSAFPTAKRFASWLGLCPNPKITGGRTIRHRRRDVQHRVAAIFRLAAQSLHSRRSDLGDFLRAMQARLGKAEGITAMAHKLARIFYRLVTSKEPYDPSRLAHQNAARQKRKLKRLQEVANGLGYTLTPNPAAPAKAVVS

SEQ ID NO: 76898 - protein, 326 aa, unidentified
MVTPFSLSVVGIDVSKATLAVCHQVDGQFHHLEVSNTQAGFAQLMQACGKDSLFIMEATGTYYLALAYYLHGRATQVAVLNPLIIKRFIQMHLNKGKSDRKDAQWLMRYGQQQATACWQPEEPLLVECRQLEQVSEQLLKQKTMVSNSLEALTQQPVISPIALQQLKQTKQQLEDQLKTIEIELLALLEKRYTQEMTLLRSIPSIGRKTAGMLLLFAGGFTSYTNHRQLIAKAGLSPREHTSGTSIRGKVRITKMGGGLIRSKLYVCSFSAKRANAACKALYDRLVAKGKNGKVALIAVCNKLLKQAFAIVKSGVLYQADFAKIAA

SEQ ID NO: 76899 - protein, 374 aa, unidentified
MSNILSLETERHQFLYVGMDIHKDNHTAAVTNCFGQNLLKLEISNSEKDFNDLVARVERLSKAENLKPVFGLEDSYGYGLRLAKHLYQKGLSVKMVPPVLVDRARQYETHPEKSDFLDALGVAKVLIQRIDRLPNYSISKNDEISKAIKELVIDREFLVKEQSRLKNQLHRLLHKSYNSEYRKKFKDPFSLKALKYWRRCPFPHKIDENIDTIPIFKNQIRRKIKRLLDIRQETKEIKNELDCLILQTNQKLETLNGCGTVLASHVLAEVRNIDRFHSPHSLAKYAGLCPREKSSGKTKRHIKTKSGNRRLNMAIHRIALSQISKSGNQYAKTYFQRKISEGKTKVQALCCLKRRLIDIIFMMLKYKQVYNYVG

SEQ ID NO: 76900 - protein, 273 aa, unidentified
MDHFAGLDVSVKETSVCVVDDTGKIVREVKVASEPEALLAVLKNPAYHFKRIGLEAGPLSQWLFSALAEAELPVVCVETRHMQALLKAQINKTDRNDARGIAQMMRVGLYRPVHVKTLRSQKLRMLLTHRKLLQSKAIAIENDLRGTLRNFGLKVGKVGTVKFEARIKELVENLPDLAELVEPLLVVRRVLREQFVILHRRLLAIVRDDEVCRRLITTPGVGPVVALTYRATVDVPARFRKSKAVGAVLGLTPPSINRARSIGAAEYHAAEMR

SEQ ID NO: 76901 - protein, 367 aa, unidentified
MNNSTIVVGLDVHKDSIVAAVLPGGAGKVSEVINIGNSSLEIKRLVERITRRGAAEFVYEAGPCGYEIWRQITGMGKVCSVIAPGLTPTKPGDHVKTDRRDAENLARYHRAGELTEVHVPTQLEESVRGLLRAREDLLEDRLRARHRLRNFLLRQGRCYGKSLWGVNHELWLKAQKLDYPALSQTFETYLRTLDEVNAGLAEVERLILGWAEGEEYRGAVKCLRCFKGIDTLAAITILAEAQDLTRFGTARGFMSYTGLVGSEYSSGERVLRGGITKAGNAHIRRVLVESAWSYRHRNVTSPDLLARRKGCPAEAVKIAKKAQGRLTAKFWRMMSKGKKQPVIVVAIARELAGFIWSMSRHFPAKAA

SEQ ID NO: 76902 - protein, 334 aa, unidentified
MDTHADVHVAAALDPIGGLLGAGEFPATAAGYARLLGWLGGFGTVCLVGIEGTGSYGAGLARHVTAAGVRIAGVDRSDRQDRRRQGKSDPLDAVSAARAAQSGRARGASKGRDGSVEAIRALMVAKRSAAGERTRTIGQARALVLTGPDDLRARFAAHTPAALVAGLGSLRPRPGGDVAGHATRVALRELGRRAQFLDSQLERPGELIVPLVTAHAPGLLALYGVGPNTAALLLIAAGDHPGRLRSEAAWAHLCGAAPIPASSGKVTRHRHCPGGDRQANHALWRIVFTRLGSDPATRAYAERRTAEGKSKAEIIRCLKRYVAREVYRYLRPGG

SEQ ID NO: 76903 - protein, 411 aa, unidentified
MEILYAICCGLDVHKDSITVCLRRLGGGHVTQALRCFGTTTGELLALLDWLETAGCTHVAMESTGVYWKPVFNVLEGHFAQVLVVNAQHIKALPGRKKDTLDAEWIAQLLQHGLLRGSFIPPAPIRDLREATRYRKQVIRLRADETNRLHKLLEGANLKLGSVASDILGVSGRAMLAALVHGETDAAALAGLARGRLRKKQPQLVAALTGRITPVQRTLLGQQLAHVEYLDRAIATLDALIATLLAPYQAEAERLRSIPGIDTRSAETLLAELGADMTVFPSDCHCASWAGMCPGHNESAGKRKSGKTRKGSKWLRTALTEAAWAASHTRTYLGAQYHRFARRRGKKKAVVATGHTILMIAYHILKDGTTYRELGQDYFDRRDTARIRDRLIARLEALGLRVTLEPMPQAA

SEQ ID NO: 76904 - protein, 356 aa, unidentified
MTLSTLVQSYVGLDIYVGIDVHQRTYTIWVQVEQVKVKKWTMTASPSQLAQQLNKYFAGGVIHTVYEAGFAGYGLHRELKGQGIDSIVVHPAAVEVAAHDRVKTDKRDAQKLATQLEAGRLKGIRIPTPEQEQRRLLSRTRSQLVSNRARIKIQIRMKAHQFGLIAPEERREMSLRWVEDLLAQDVSVEFTLAIRALVAVWKSMNEQIRGLERQLQQQADADPTEATYRSAPAVGPISARVLANELGDMSQFKNERQLFSYTGLTPRERSSGDTIRKGSITKQGNAHLRGILIEIAWRARAKDPDLARHYAQLSTRMGGKRAIVAIARKLIGRIRAAFRKGELYQINYQGDLAATV

SEQ ID NO: 76905 - protein, 427 aa, unidentified
MTTRNGDQQEPQFAAFLAIDWADQKHVWSLQSADSELREQGEVEQTPEAIAAWVAQMRQRFGHRPIAVAVEQTRGALVFLLSKYEQLHIFPVPPAMTANLRKAFYSSGAKDDPKDSDLLLDIVFLHREKLRRLAPDTEATRLIQNLVEERRKLVDEKTAQSNRLMAHLKIYFPQIPRLFEDVGSPLVCALLERWPSLEQLQKVRPAVLRNFFRQHRCRQELIESRLQAIGSALPALGDQAVVKVKMQVVKVTVQLIQILHQGIKALDRQIQEAAEAHPDFFIFDSLPGAGAVMAPRLLAAFGSQRERYESAEEMQTWSGIAPVLASSGKQQWVHFRYACPKFLRQTFHEWADYSIAQSEWARAYYELQCRRGKKHHAAVRALAFKWIRILYRCWKDRVAYDESIYLAALMKRKSPLAPAAMAAPVGL

SEQ ID NO: 76906 - protein, 416 aa, unidentified
MSDEICWFVGFDWASEQHRACLLDAEGKPMAERNVTHDGAALAELCDWLIERTGARPEQIAVAIETPRGPVVEMLLERGFQVFALNPKQLDRFRDRFTVAGAKDDSRDAEVLGHSLRTDRDAFRRLSVDDPLVIELREWSRIHDELKQEQNRLTNRMRDQLWRYYPQAIELGDLAADWFLELWQQVPTPAKAARVTEKTVARILKQHRIRRFDAAEVLGILRRQPLTVAPGTVEAATAHIGTVVARLRLVNQQLKEADRRLDELCDAIEAAAETAPGQICEQRDVAILRSCPGLGRITIAALLAEGCDPLRRRDYHALRMLSGIAPVTRRSGKSIIVVRRHACNSRLQNALYHWASAAKQHDPISQKRYAELRRRGHSHARALRGVGDRLLYVLCTLLERQVLFDPEYTTSQTAAA

SEQ ID NO: 76907 - protein, 411 aa, unidentified
MNRKLTLLYIGVDLHKNHHTAIMMNCLHEKLGELKFDNKPSAFPVFLKEVNKIAKKEGLTPIFGLEDVGGYGRGLAMFLIENKYEVKAVNPALTVSMRRSSPNNKKTDAWDAECVARILISNLDTLPNANPLDLYYAISQLVTRRANIVSVVTGIKLQLHQLLGYHYPSYKKFFSQVDGKTALAFWRKYPSPSCLKGVGVDELANFLYKKSNRYLSTKKAEEILSLVEQDGDTSKGYQEANDFLVKDVVRDIIIRERQLDQIDAELKKHMAILDYKLETMHGISTVTAAELIAEIGDISRFSNADKLANFAGIAPVQHSSGNKQKARKSKLGNRSLYDIFYNLAIRMLGVSRGEKKPNHPLYHAYYEKKLAEGKTKWQAIICVMRKLVNVIYSMMKYKTEYKMPVLPERAA

SEQ ID NO: 76908 - protein, 338 aa, unidentified
MAVDAAGREVSRWRGANSVEGWRQVAVWAAALDGDVRWGIEGAWNYGRGLAQQLVAAGATVYEVNPRRTAEGRRRARRMDKNDRLDARAVALLVWREATALPVVQADDETAVLDLLITEREAAIAEATRLRNQAHQLLLLLDPGYAARLPRLRTTAGARALETSMTADPHPLQQHRAAAVRRLAQRLRLALEQARDLASQLRALAAPRFAPLAGSCGIELLTAAALAGILGPGRRFATDAQLAAYAGVAPLEVSSAERVRHRLNRGGTRRLDAILYRVALTQTRASPLAQAYLARRISEGKTRREAIRALKRHLVRVIWRAWQECQRSADGVPISVAA

SEQ ID NO: 76909 - protein, 315 aa, unidentified
MSDFKKFNSFIGIDVSKDKIDCFISQTGEFIQVENNQRSIKAWIKGLSPDKKLLVIIDLTGGYEDLCVKEFCKAGFYVHRAEGRRVKGFMKATGQLAKTDKLDAQVLAKYGEVLQKNLVIYSPVQNDIRPYVVRLDALKEMMRRELNHSHAPKLEETIRKTILKHVEFIKKEIALLEQKLEKIIQQDPLLHKRFCWFLNQRGISKKTAFLLLGMLPELGKLNRREISALAGVAPYANDSGTLSGRRFTRSGRPPVKRALFLCAMVLVRYDESIKAFYYRLVERGKPKKVALTAVMHKFIIRLNARLKDDLKNDTF

SEQ ID NO: 76910 - protein, 407 aa, unidentified
MEVFLGVDWAEDHHDLCLQDPSGAVVASRRIPDGLEGVQTLHALLAEHVEAPAEVIVGIETDHGLLVAALVAGGYQVYAVNPMSVSRYRDRHHAARAKSDKSDAKLLADLVRTDRHNHRRAIPDSELLEAIKVLARSHQNLIWTRQRLTNQLRSALREYFPGALVAFEDLRHHDTLAVLGKAPTPTQARRLTTAQIRAALKRGGRERNLDRRAAELHAVFAQPQLRASELVEDAFGVTTAAQTRIIGDLNEQIALLEAKLHERFDQHPDAELLLRLPGLGVILAARVLAEFGDAPNRYLDAKARRNYAGTAPITRASGTSEVVIARLVRNKRLFDACYQWAFCALSASPGARAYYDAHDPGPKTGKTARRKLANKLVGILHGNLTHHSAYDEAIAWQHWQVSQPGAA

SEQ ID NO: 76911 - protein, 409 aa, unidentified
MIYCGIDWAERTHDVALVDDSGQLLAKRHITDDAAGYKILLDLLAEYGDTEENPVPVAIETSRGLLVAVLRTGKRQVFAINPMAAARYRDRHSVSRKKSDPGDALVLANILRTDMHAHRPLPQDSDLARALAVLARAQQDATWNRQQISNQLRSLLREYYPSALAAFESWKNGLCRRETHELLKAAPTPTRAARLTRTQLQAALKRAGRKRGVEAEAERLREVFRADWAHQPPLVEGALGQQMLALLVQLQAACTAADNLAEAVEEAFPQHPDAEIILSFPGLGIQLGARVLAEIGDDRKRFADARGLKAYAGASPITRASGKKSSITRRWVKNDRLSHAGYLWAFSAITASPGAKTHYRRRRDGHGDWHAAAQRNLFNRMLGQLYHCLQHRKLFDEHTAFPVELAAAA

SEQ ID NO: 76912 - protein, 362 aa, unidentified
MPKDQALVTERITAGVDTHKDLHVAAIVDAHDRFVASECFASTRQGYKKMLTWMRSFGTIERVGIECTGTYGAGLLRYLQATGITVLEVIAPDKVDRRRRGKDDTLDAINAAHAAYSGTRTVTPKSRNGMIEALRVLKSCRKTAISARRVALQLIQNNIVSAPDQLREQLRSMTRMQLIRTLAAWRPDLTDYRNVTPAYRIAFKSLGRRYLELHDEIADLDTMIAALVDELAPDLIARIAIGYETAAQLLITAGDNIERLHSEAGFAALCGVSPVPASSGKIQRHRLNRGGDRAANSALHIIAVGRIRLHPKTQAYMAKRLSHGNSKLEAIRCLKRYIAREVFYCLRKRNLEIQRTKSALDC

SEQ ID NO: 76913 - protein, 430 aa, unidentified
MGLIVPSAMDSEQTDQPFPYDWFVGIDWGSQQHQVCVLDRDRRRVAERAVDHDGARLARLAEWLWSVSAGQPQRVAVAIEVPRGAMVEGLIERSFHVFAINPKQLARFRDRHTMSGAKDDRRDAFVLADSIRTDQPRFRRLQLEEPQLLRLRELSRAEETLLEEFRRSANRLRDQLHRFYPQMLELCSGADESWLWDLIDLAPPPAHAALLNEEQVQRVLKAHRIRRVKAKEVLTCLQVSALPVAPGAAEAAQAHGEFLLPCLRVLAEQLQACSQQVSALLSTLAAAPSEGEGPSDVAMVLSLPGVGRKITAWLFAEASQPLAERDDQVWRTHGGVAPVTRQSGKRRVVVMRRGCNPRLRHALYHMARVAMQRDTHFSSVYAALRAKGQRHGQALRNIGDRLLRILMAMLRHRTCYDASRMRREPVVQMG

SEQ ID NO: 76914 - protein, 412 aa, unidentified
MDVYCGIDWAEDHHDIALVDQDGKLLARRRISDDAAGLAQLLALLAEHGDSPGELIPVAIETPRGLLVACLRATGRLVYPINPMAVARYRDRHSVAGKKSDHGDSVVLAGVLRTDLHAHRPLPADTELAQAIAVLARAQQDAVWDRTTAHNKLRSCLREYYPGFLAAYATAKGGIMRPDARAVLAAAPTPADAARLTLTQLRALLRKAGRSRGIDTEATRLRDAFRTEQMRQLPLVEAAMGRQALALLGQLDAACTAASDLERAVTESFNLHPDAGIITSFPGLGALTGARVLAEIGDDRSRFQDAKGLKAYAGAAPITRASGKTKSVTRRHIKNNRLNAAGYTWAFSALTASPGARAHYDRRRADGDRHAGAQRNLFGRLLGCLWHCLTTGCEYDEATAFPTTPEKLPKAA

SEQ ID NO: 76915 - protein, 371 aa, unidentified
MNTIVYLGMDVHKESYTLCCYCYDTDKIEYKQTIPADYKLILKYMEKIRNRYEGDVSFVCGYEAGCLGYSLYHKLKDHDVDCKILAPTTMAITNTSHVKTDKRDAANIARCLAFHTYSEVHVPDDEDNAVKEYIRMRDDQKQMLKKVKQQILAFVLRSGKKFDGGKTYWTIAHIKWLRSLELKGLDKETLKEYLITYDYLVEKINRLDQRIEELASNEKYAQTVKNMGCFLGVKTHTALSMIVEIGDFDRFEKAQKFAGFLGLVPSENSSGESTNRFSITKAGNSHLRRLMIEAAQSYTRGNIGHKSIALKQRQKGCDPGIIAYADKANERLRRKFYRMTLNKGINRNIATTAVARELACFMWGMATGNIS

SEQ ID NO: 76916 - protein, 409 aa, unidentified
MEVIYPRCCGLDIHKESISACVLVKESGKREKHLARFGTMTSDLLKLGDWLRSWGVKRVAMESTGVYWKPIWNILEDEFELELINAQHIKQVPGRKTDTKDCEWIAELLQHGLVRASFVPAQAQRDLRELTRYRATLCEDKVRVANRIQKVLEDANVKLACVASDILGASGRAMLEALVAGERDAAHLAGMAKQRLREKLAQLERALEGRVREHHRFLLRQLLDELYFIEGKITQVEQRLEQQMGSFRQAVTLWQTIPGVNEITAWSLVAEMGVDLSQFERVEKLTAWAGVCPGNNESGGRRLSGTSRKGNRWLRRVLTQAAWAAVRKGDTYLGARFRRLASRRGRKRALLAIAHKILVIAYWMLKTGQQFRDLGADYFDRLKSTDLTRSLVRRLERLGYKVALEHVAS

SEQ ID NO: 76917 - protein, 331 aa, unidentified
MKYFGIDVSKKKIDCAWLRDSVTGKVKTRIFDNTPKGFQLLLAWASDQSQVTTEDLHFSLEATGVYHEALAYALYEGGAQVAVLNPLQVKRYAESLGRRSKTDKKDSIVLARYGATQQSRCWQPEPAEIRVLKALITRLEAVEKDLQREKNRLEKTEISQASPEVATSIRTMSGHLEAEKKRLLRHINEHIDQHPRLKSDRQLLESIPGVGPVVSRYLMALLHSRDFKSAPQVAAYIGLVPLHQQSGTSVRGKSTISKTGNATLRAKLYMAAVVATQHNATIKAQYQRLLKNGKAKMTALIAAMRKLVHICFGVLKHQTPFQAQAPTGAGV

SEQ ID NO: 76918 - protein, 400 aa, unidentified
MIDTGDIDVFLGLDVGKGEHHATAVTPAGKKAFDKRLPNTEPKLRELFAKLQAKHGTVLVVVDQPASIGALPLAIARDMGCPVAYLPGLTMRRIADLYPGEAKTDAKDAFIIADAARAMPHTLRAIDGQDETIAELEMIVGFDDDLAGEATRVANRLHGLLTQIHPSLERVLGPRLQHPAVLTLLERFGSPAQIRKAGRRRLITLLRPKAPRMAERLVEEIFDALDEQTVTVPGTEAAALIAPSLAASLTAVLDQRKLLAGRIEELLETHPLSKVLTSMPGVGVRTGARILIEVGDGSTFPTAGHLAAYAGLAPATRNSGSSIRGEQPSRRGNKQLKRAFFLSAFAALGDPASRAYYDKKIAQGKHHTQALLCLARRRADVLFAMLRDGTFYEPQPAAAS

SEQ ID NO: 76919 - protein, 343 aa, unidentified
MKIIRVGVDLAKNVFQAHGVDRNEKPVWKRKLKREEWLKVLQEKVEPGCEIGMEACGAAHHWARKLQALGYRVKLIAPQFVKPYVKSNKNDANDAEAICEAMSRPNMRFVTIKTVEQQDVQAVHRIRAELMGQRNAKANQIRGLVSEYGLVAPKQISHLRAAIPCWLEDAENGLTSLFRKMLNGMWADFLLLDQRVKELDQEIVMIAAADPVAQRLQQLRGVGPMVATALLATVGDASQFTKGRHMAASLGLTPKQNSSGGKEMLLGISKHGDAYVRSLLIHGARSMINASKGKDDRLSQWVTRIATTRHPNIAAVAMANKTARIAWAMIRKGSDYQPELAAA

SEQ ID NO: 76920 - protein, 310 aa, unidentified
MYIGIDVSKAQLDVAERPSGERAVMPHTEDSITMLVERLRHRQPAGLVLEATGGLEVPLASALAVAGIPVAVVNPRQVRDFAKATGRLAKTDAIDAQTLARFAEAVRPAPRPLPDEAAQAFSALLTRRRQLIEMLVAEQNRMQRAPRPIQPQIQAHVTWLKQQLAALDEDLTHRIQSTPIWREQEDLLRSVPGIGPVVSRTLLAELPELGTLTHKQLAALVGVAPLNRDSGTLRGRRTTWGGRAVVRAALYMSTLVATKHNPVIKVFYQRLRAAGKAPKVALVACMRRLVTILNAIVKHRTPWRLAVPNT

SEQ ID NO: 76921 - protein, 360 aa, unidentified
MQLHDALTIPKIFIGLDIHKKSWTVSIQTDLFFHKTYSLASVSEDLYQYVERTFPNHEVHLVYEAGCCGFSVARYFLNLGWHVLVINPADVKTGDKERYQKTDALDSKNLSNQLKAGVLKGIYIPTEEHEQFTTLARHRTQVTKKLRQTKSHIKSMLLFHGIKVPDQFDNSNWSNDFVAWLEELKFSTSCGDLALQGKIRLYKFIKSEYLEIANQMRLHCRKNNKKDYYLLKSIPGIGGYLASVIIAECGDLRRFNTEAQFSSYIGLVPGIYNSGDSEKCLGITPRSRSQLRSYLIEAAWVAIRKDIEMQQYYRKHQGKNVKSIIVKVAHKMARRILSVIKTETPYQVNRNLEVEQKNKI

SEQ ID NO: 76922 - protein, 357 aa, unidentified
MNLKYSIGIDVSKKDFHCCLSVIDSCQKVTVKSSRKLSNSPGGFKEFLAWIKQHQKEELPLRIVMEATGVYHEQLAWFLHSKGLVLSILLPNKAKKYLQADGANSKNDSIDARGLAKIGAEKNLEPWAPGSEKLYELRHYTRQHQNLKETINVIGNQLEALNHAQFQSREVIKQLNKTIKLLEQQVLEMEKAMEKLVKTDKVLNLHYENITAIKGVNLLSFCVIVAETNGFTLFKSSASLVKYSGYDVIENQSGKHIGKTKISKKGNSRIRRILFMPAFCAVRDDQPQFKNLYERVVERTGFKMKGYVAVQKKLLVMMYHLWKNEQRYNPQFNYLEKTIAPEKSRATHDKIPEGSFH

SEQ ID NO: 76923 - protein, 498 aa, unidentified
MILQPKDGARNKLGRKALQKAVARAQGRKTKKSVKKRGRRERTSRREGQAVPTTPSLNQLERVNRNAAGIDLGAMVHYVAVPPGRDPETDVRCFETFTEDLEAIADWLSGCGVDTVAMESTGVYWIPLYELLEQRGFQVLLINPADFKKFRRKTDVSDCQWLQTLHTFGLLQGSFRPEEKIVTLRAYLRHRDRLVKCASDEVRRMQKALEQMNVKLTEVISDITGMTGMAIIRAILAGQRDPQRLAALRHSGCKNDVQTIALALRGNWRQEHLFALRQALELYEVHLEKLKDLDGQIEAYLQTFEDRTEGEGQQLEPSRRKRALDPCLNSRDLVYKMTGIDLTEVDGIGGTAALQIVAEIGTDMSKWETDKHFVSWLCLCPELHLTGGRRKSDRSHTQPSNNRAAAILRMCAQSLLNANCALGAFGRRIRARKGGAHAVTAVARKLAIIVYHMLKERRPYKDQGASYYEERYRQRMVENLRRRARQLGLGLVPLALPE

SEQ ID NO: 76924 - protein, 337 aa, unidentified
MKTNLIGLDIAKSIFHLVMVNEFGKLLKKKELKRRNLLAYISQLEPCIIVMEACGSAHHWARAFQYFGHEVKLIAPQYVKPYVRGNKTDYNDALAIAEAAQRPDMRFVPIKNIEQHDIQIVHRLRERLVKNRTALVNQTRGLLAEYGLIIYKGVAAVRSELPIILEDAENGLTMMAREFFADLYDELLTIEAKLKNCEQKIKQINEHHYICKRLNEITGIGPITATALFAAAGTAQEFKNGRHFSAWIGLVPKQHSTGGKANLLGISKRGNSYLRTLLIHGARSLLINAPKKNDKLSVWVTKLKERSCYNKACVALANKLARIAWVIMAKNESFKLA

SEQ ID NO: 76925 - protein, 466 aa, unidentified
MGRFAWLPFLIGWAGCVGAADGPAEVANGARVAVAIAPLDLPGATDVHYTLAVLNSASPTSSVRPRNYVGLLVREIAYGRFTNREANMMNEETRNKLSANPNTLYIGADVGAAEMKLAAADRQRSRPLEKTLEPFDDVGLMDWLKAVRKGLGLEAGPVVFVHEAGRDGFSLHWWLEMLGVHSVVVDPASIETSSRRRRVKTDRLDARLLLTKARGYFGGDGGVFSVVRVPSEEVEDARRVSRELKALKEEATRGKTRINGLLAQKGVKLALSKDFVARLKEVMTPWGTSLPPHLKAEILRQVERLELAESQIAQLEQAHQVAMAEGATDADRQGAKLVQLVSIGMATAVTLPKEFFWRDFKNGKEVGAAAGLTGTPRVTGTSTDIEQGISKAGNSRVRTLMIEIAWMWVRLQPNSPITQWFYARVDGTKRSKRKNIVAVARKLLIALWRYATMDVVPEGARLKTAN

SEQ ID NO: 76926 - protein, 312 aa, unidentified
MAKPVSQITLGIDVAKDELVIADWDTGEITTLINQPSEIQAWLGSLHGPVRMALEPTSHYHLALADKAQAGGHQVYLVNPRQLAYYREAVGQRNKSDPQDALLLARYLAHEAPQLRLYEPQSAAGRELWTLLTRRATAVESCKRVRQSFKDSGISVKALASEYRKVLQRIDRRMQALIEESGWRESYQHCLSIPGIGPLNATALVIAFHRGAFSSQDAFIAYLGMDVRIRESGTFRGKRKLSKKGPPELRRLLYCAAVAGRRHEPFAQYRQRQIEKGLPKIAANCILARKIARLAFTIMSRQEDYKMRAAAY

SEQ ID NO: 76927 - protein, 414 aa, unidentified
MLKIVYPICCGMDVHKSFVVACIATTNERGVTTYKSKRFSTFTGDLRRCAAWLAENNCKDVCMESTGKYWIPLYNILERTCNIVLAHPKYVKAIRGKKTDKRDAKWIADIFKHDLVTGSFIPLADIRQLRDLVRYRWKLTSFTTGEKNRAQNCLTVSNFKLDDVFSDVFGKAAFAITTRILNNPAEKITDVSNFRTKGMKATDEQVLAAVDGAMCEEQAEKLRIIRSHMDSLHLCKLNLESLILATAEKYLPQLNLVMTAPGIQSFAAIGIISEIGVDMSVFPTSKHLCSWAGLTPQNNESAGKKKTTRISRAGAYIKPLLVQCALCAIRAKQFPEVRNRYLALKKRRGHKKAIIAIARILLTAIYNMLKKNEPYNPELYRKGDRPPTHREVSVGEAIFILQRQGYLVTAPPTP

SEQ ID NO: 76928 - protein, 342 aa, unidentified
MDHFAGLDVSVKETSVCIVDDTGKIVREVRVASEPEALLAVLKNPAYHFKRIGLEAGPLSQWLFSALAEAELPVVCVETRHMQAVLKAQINKTDCNDARGIAQMMRVGLYRPVHVKTLRSQKLRMLLTHRKLLQSKAIAIDNDLRGTLRNFGLKVGVVGTVKFEARIKELVENLPDLAVLVEPLLAVRRVLREQFVILHRRLLAIVRDDEVCRRLMTTPGVGPVVALTYRATVDVPARFRKSKSVGAVFGLTCSKYQSGEIDRSGRISRCGDEMMRVMLYEAAQSMLYSKKWSWLKAWAMQIARRRGMKKAIVALARRLAVILHRIWVDGTEFRWTREAITA

SEQ ID NO: 76929 - protein, 386 aa, unidentified
MIYIGIDISKYKHDCFIATETNHVSFSFENNKLGFDEFLTHTKPFSKSEMIIGLEATGHYGDNLKSFLLFHGYKFMEINPFLVKKFSDSKSLRKLKTDKKDAKLISEYMMTVDFKAYHHQSYHINKLKSLTRYRSRLVSSRTSLYNQVTKSLDIVFPEYRPFMKEQGYSELSLYLLVKYTYPLKIKALKQSHHDTLIKVSMGKFSYVKFIKLKELASNSIGTHDETQIYLIKENIKLIQTYNNLIKEIESNIFSIMEKYPTYFQTIKGIGLLSAAIILAEYGDISLFDNPAQMTSFAGLDSSINQSGTTSSTGKLVKRGSKYLRSTLINVCQTVYIYNSIFYDYYTKKKLEGKHHRVAMTHLAKKLIRIIFHLEKNQVSFNQSLLK

SEQ ID NO: 76930 - protein, 384 aa, unidentified
MLIERNAPHIQALDKMDLSKIHFINNRAGGAYMAKYNIGVDYHKRFTYFVVKSSKGVVLKNGQVINKKDHVQKFLEGFTSDSAAVLESCRNWCVMHDWLEDIVDEVVLANPYKVKAIAEAKIKTDKIDASILSDLLRADLVPRCYVAPKNVREMRNLLRERIYFVRMRTMTKNRITTIFDRYPEEKAKFKTWTDLFGKKGRVQLESINMSESDRAIVNRELDYIDSINTFIKDIETVIKENFKLSKNAQILKTIPGIGEFFSMLIDAEIGDINRFKNEKALACYAGLVPSTYSSGGTTHHGRLIKHSNKLLRWAFIEAIIPAIRSDEKLRFEYDLLRSRMNWNKAKAAMGRKLLTIAFHCLKKKQKYKKLNRLELEEYKLRRAA

SEQ ID NO: 76931 - protein, 342 aa, unidentified
MGSVKGGGRSGHVMSALVCGLDVHKDSTYATIMDPSGKIVDQTRMNNERVLSYLSRFSVDRVAMESSNQVASLYRKLESKGYSVVLSHPKKTRYIAEAKIKSDRVDSEAIAELLRLDALPLAYMPDKEISVLREQVRRRAFLVRERVRLRVKIKSILTYEGVRWPSDHGLFTRKGVEWLRSLCFEPVESYLRVLKPLDDEIRLLSKQLRGLAGKDEEVKLLMTVPGIGYYSALLVKSEIGDVNRFAFGDRLCSYAGLVPSTHASGNTVRHGGITKEGSKWLRWVMVEAAQTHVHKYDTSITRVYSRIAERRGRRSAVVAAAHKLLLVCYSVLKNRRPYYDQA

SEQ ID NO: 76932 - protein, 342 aa, unidentified
MSIVILGIDLGKNSCSVAGLDASGRVVLRRRLRRQTIAGFARQWRGCIVAMEACCGAHHLGRQLVAQGHEVRLMSPEYVRPYVKAHKNDDRDAEAIAEAATRPTMRFVEIKSEAQLDLQSLHRARERLVSERTALINHLRALLLERGIVVPQGRRKLERALPGILADESSGLSARLRRLASDLREEWRALDERIAAFDAEFVSQARTDEAARRLATVPGIGSLTATALVAAVGNAKAFARGRDMAAWLGLVPRQMTTGGKPKLLGISKRGNRYLRKNLIHGARAVLPYLATRDTPLGKWVQGLLARAHKNTVVVALANKLARIAWAVLAHGRSFEAAHVTAV

SEQ ID NO: 76933 - protein, 352 aa, unidentified
MSITMIGLDTAKSVFQVHAVDGAGQVVTRRKLRRDELTAFFEEQAACTVVMEACSAAHHWARVLTGFGHDVKLIAPEAVRPFVKKGKKNDAADAAGNCEAASRPGVRFVPIKSLEQQGILALHSARSLLVKQQTMLANAICGLTAEFGLAVPLGMGKLGELLALVDADEAVPAKARQALTALFDQCSALHESIETFEAEIVAHARHDAAARRLATIPGIGPITASLVAATVADIGVFQSARHFAAWLGLVPRQHSTGGKTPLGRITKAGNREIRRLLVLGATSMVRRAPGWNSAAGAWARGVLERRPARLVTVALALALANKMARIAWAVMTRRGLSCDGTCCCSRRCGVTA

SEQ ID NO: 76934 - protein, 351 aa, unidentified
MAEYIAFDAHKRYTWVDRQDHSTGEVHQHRLVHAPGAVRQYLSGCAPGSSVAVEATGNWYWIVEEIEQAGMRPLLVHPFKAKLMMGLTNKTDKLDAQGLNRLQRNGTLPTVWIPPGPLRDLRELTRTRVVFVRQRTRLKNRLTATLAKYGVPPSASSDPYGKRGRAELQQKLQSLPQQTRWVSAQLLRQLDFVDEQVRQLEQHLEQLVEVTPEMQRLMSLPGVGIILAATMALEIGDVRRFPSAMHLASYAGTTPRVHASGGKVRYGALRVDVNRYLKWAFAEAANSVAVNHVRHAERHVSQLYRRLRQRKGHPTAIGAVMRHLAEAAFHVLSGEEEYRDPALGRGWTSKV

SEQ ID NO: 76935 - protein, 369 aa, unidentified
MKNDTTVFVGRDVHKDSISVAAVGSSEADPVIEIGRVGTRHYDIERLLKRLSGLGRPRLVYEAGPCGFWLQRLLREKGIECVVVAPSLIPKRPGDRVKTDRRDARNLALALRAGTLTAVHIPTAEEEAFRDVVRAWQQSKRDVTAARQRLKSFLLRHDVRYSGRASWSRAHRRWLSELVMEQPPQQVVLQELIEAINERERRRDRLEAQMDQLAPTWSGYRLAQALQAFRGIQKTVAYTVVSECVAFDRFAHPSQLMAWLGLVPSEHSSGGTRRQGPITRCGNRWARTLLVEAAWAYRYPAKVSRIIEARSQEVDPAIRALAWKAQVRLCHRYRRLAARGKHANVVVTAIARELAAFIWDAARQVPRAA

SEQ ID NO: 76936 - protein, 351 aa, unidentified
MPRTTTLHAVTAIGIDMGKNTLHLIGVDARGAIVLREKVARGRIALRLANLPPCLIGIEAGMATHYVARELAALGHDVKQVPATYAKPFRQGHKNDFRDAHAVAEAVQRPTTRFVPAKTNEQLDLQALHRVRSRLVSERTAVINQIRGFLLERGIVVRQGLRFLRQQLPDILAKRTDVLSPRMARIVADLANDWRRLDERIETVTDEIGTLAKSDDSCRRVMTVPGIGPIISSAMVAAIGNGAAFARGRDFSAWLGLVPKQMSTGDRTILGRISKRGNGYLRTLFMQAARVILLRSANWPKHGFGLWLVRAAQRLHPNVLAAALANKLARIAWTVLAQERSYEARVTKAAA

SEQ ID NO: 76937 - protein, 387 aa, unidentified
MPQQLDDLSRSLTPLEQDSTIVAVIEMSQASWLVAGIVPGIERHPLKKLEPSEVELLRLLMRWRAEATQNGRTITRIAVAFEAGRDGFWLARWLRARGIEAYVIHPTSVAVSREHRRAKTDRLDTGLLKRVFLGWLRGEPDHCHMVAIPTLAEEDAKRPNREREGLVRERTRLVNRVKSCLVRFGVRTFKPTLRNAPDRLATLRTPEGVPLPPNTLLELRRDMARLRFVMDQIKEVEEARAQGLNQAPPDKTHVMVRLLARVIGIGLETADMLVQEVLARTWRDRRAVARYAGLTGSPDESGSRRREKGLAKAGNARVRRGMIQLAWRFLLFQKESALAQWYRARTADARGSTRKTLIVALARKLLIALWRMVTTGEVPAGVVLRAA

SEQ ID NO: 76938 - protein, 414 aa, unidentified
MEVIHSRVAGMDVSKRDAKVCVRVAGAGRRKTVETVTTWGATTNQVLALRDQLVAEQVSLVVMEATGAYWKPFYYLLEDAGFEVLLVNARQVKNLPGRKTDVSDAAWLAQLGAHGLVRGSFVPPAPIRELRDLTRARTMMTRERGREIQRLEKLLEDAGIKLSSVASDITGVSGRLMLQALIDGQHDPAVLADLAKRRLRAKIPELVEALTGRFSDHHAFLARMYLDAIDQRSRAIADLSGRIEVVMEPFRSFADLVATIPGIGDRTAEVIVAETGADMSVFPTAAHFASWAGTCPGSHESAGRVKSTKTRPGNPYLKAALGTAALSIANSHGTYLAAKYRRIAARRGPMKAIVAVEHAILIAIWNMAHTGAEYDDPGPDYYTRRDPERARRRALDQLQTLGYQVTLTPITTTA

SEQ ID NO: 76939 - protein, 375 aa, unidentified
MKKELYLGLDVHKDCISTAVAEEGRKGEVRETGAISNDLHAVEKWIGRLRKAYGKEVILRACYEAGPCGFGLARRLEQLGVECQVVAPSLTPTRSGDRVKTDRRDARKLARLLRAGELTPVYIPEPTDEAIRDLCRARSDAVDDRCRSRHRLKGFLLRHGYRYQGKSSWSAAHERYLRELVLPHPAMKVILEEYLQGIAAAGERIARCEEAMRVLLEQWRLAPAVRALMAMKGFRTVAAMILVSELGEVHRFAHPRQVMAYLGLVPTENTSSERRRQGHITKCGNAHARWLLVECAQHYASPPKVSKELSRRQQGQSAQVRAISWRAQNRLHGRYTRLSARRLQRNKAIVAVARELCGFIWELLRTQPCYQAPSI

SEQ ID NO: 76940 - protein, 344 aa, unidentified
MVTTIGIDPHKATHTAVAIDDDETVLAEITIRADKDQARKLIDWAQSVNGDGRLWAVEAATGLGHLLSQQLIASGETVVDVPPVLASRIRVLSSGKSDKNDPNDARSVAIAALRRESLAEVKREDDAAVLRMLAKRHRELTALRTQAVCRLHAMLAVLRPGGMGHRLSAKQASRMLGGVRGLDAVGEQRRQMAKTHIVDIRRLDRDLEASKTQIRRAVAAADTTVTDIYGVGPVVAAFLVGYTPPIERFTSADRYAAYNGTAPIEVSSGGKVRHRLSRRGNRTLNHAIHTAAVTQISHQTPGRVYYDKKLDEGKTNKEALRALKRRISNVVYRQLIADARRHDG

SEQ ID NO: 76941 - protein, 386 aa, unidentified
MTVRVINPPAAMRVEMAHCLIAIELSKKTWVIGFIRPFSSKISRRTLNGGDWKGLLELIDEVRTRASRETGRAVEVVSCYEAGYDGFWLHRLLEAHGIRNYVIDPASLQVDRRARSVKTDRIDTERLLRSLMAYLRGEPKVWSVVRAPTLAEEDARRLHRERDRLISERVRHVNRIKGLCALHGIYDYQPLRPQAMARLEQLRTAQGIPLPPRLKSEIKRELQRLELVVEMIATLEAERDAIVEDAASTHINAKKIRDLHKLKAIGPEFAAVLVGEIFHRHFDNRRQLASYVGYAPSPFQSGSVARDQGISKAGNSKGRTTGIELAWLWLRYQPGSDLSIWFQARVGATKGRIRRIAIVALARKLMVALWRYLETGLVPRGAVLKG

SEQ ID NO: 76942 - protein, 349 aa, unidentified
MEQHEVILGVDTHLDTHVGAVISETGKLLGTLSVPAETAGYLKLLTWANSLGHLRRAGVEGTGTYGAGLARVLRDHEIEVLEVNRPDRAARRSRGKSDPTDAENAARAVLAGKATAIPKEQSGAAEAMRAVSVARRSAVKAKTQAINQLRALLVSAPQDIRERLLKTKTAECVANCSRLRSLGNTPMLQTLATTLRLLAKRYLALAEELTTLDAMLEQLTLKHARRLRERFGVGPQTAAVLVAVAGDNPERLKSDAALAALCGTSPLQASSGKTVRHRLNRGGDRAANNALWTIAMVRMRSDPRTRAYVERRTKEGMSNKEIHRCLKRYIVREMYPLILADLADSARTT

SEQ ID NO: 76943 - protein, 428 aa, unidentified
MNKMEAEKTEEYAALIGLDWAAEKHDVCVWDAATGEVRQRVVDHTPEALAEWLGDLQAQYPGQRLALCLEQSRGALIYALMGHAFLDLYPVNPVTLARYREAFAPSRAKDDPGDARLLSEILRLHREKLAVWKPDDEQTRTLGFLNEERRKAVNLRTKLVLRLQAVLKLYFPQALQWVGTDIAAPMACDWLLKWPTLEAIQRARPQTVRSFFYAHNCRSSDHIESVIAAIAEAKPLTRDAAVLAVQPLTVQMLAKQLRLLHGSIVAYERQINALFRQHPDAFLFESLPGAGGILAPRLLSAFGSDRSRHPTAQDMQTYSGVAPVIERSGKSCWTHWRWNCPKFLRQTFHEYAKSSILYSAWARAYYDQQKQRGKGHNAAIRALAFKWVRVIHRCWQTRTPYDEGLYLQALAQRGSPLVALLAAPAREA

SEQ ID NO: 76944 - protein, 402 aa, unidentified
MRYIGLDVGRDFAHAAVVEGTGSARKLGRLRMGEELAAFAATLGPDDAVALEASGNTWALVELLGRHAGRVVVSNPLRTRAIADAKRKTDDIDAATLAELLAADYLPAVWIPDEATRRLRRIVAHRAGLVRDRTATRNRVSAILGRRLVRSPLSDPFGSRGRAGLAALELPPDERLALDSALRLNAVLDAEVDLADRAIATALIDDPRVRHLLTIPGIGLVTAAGILAVVGDIGRFPRPAKLVSYLGLDPKVRQSGDRPAHPGHISRAGQAHARGLVTEAAHAAVRAPGPLATSFLRLRARRGGGIAIVAVARKLAVLVWHLLTKDEDYRDARPDLVRAKQRALGRLAGRATARTRPSHRGATGSSHDQGRARLRGGDDPHHPALRHAIDRVQLDDTPVPGA

SEQ ID NO: 76945 - protein, 315 aa, unidentified
MQTPLDIGADVSKDHVIVACAKQSFPTRKLLNQRAELSAWLKGLPAGSRIGMEATGCYHELLASLAQRLGLVVYVLNPKDVYHYAKATGQRGKTDRVDAALIARYVAKEHTELHAWFPPSPVQRQLQSLTRRRGKLTGARATLRSTLGALPALRGELRVMLEQFDAIITKLDAQARKLIQACPERGQAFERLDAIPAVGPTVGVGLLAALERWPLPRADAFVAFIGMDPRANDSGTKTGRRRLSKRGDPELRRLLYNAAMSGSRTRVWRPVYERARANGLTRVEALVVLARQIARTAWSIYTHKTDFDPARVHAA

SEQ ID NO: 76946 - protein, 394 aa, unidentified
MTATYTHSIPAGTLVLHVAFELGANQWKLGFSTGLGVAVRLRTIGAGNLAVLRREIELAKKKFRLTDDVPVCSCYEAGRDGFWLHRWLVEQGIGNIIVDAASIEVNRRYRRRKTDSLDAAKLVAMLIRHHAGEKLWSVVRVPSREDEERRHLHRDLEEMKAETTQHRNRIRGLLAGVGARVAEINSNFLEMLPTLQTADGREIPGELRARLLREFERLQFVEQQIRSLERQRNQKLRDGDDQEYVVKARKLMGLRAIGPHSAWVFVLELFGWRRVNNRRQLASLVGLTPTPYDSGEDEREQGISKAGNRRLRTLLVEIGWCWLQYQKSSALSQWYHQRFAGGSKRQKKIGIVALARKVLIALWKYLQRGEMPEGAVLVDWRAKLVGLGAQPLPV

SEQ ID NO: 76947 - protein, 415 aa, unidentified
MSARFTVAIDLSKFKHTASLIDTETGEAAQSLTFKVNEVGFMQFDQLLRSFSTDPNDFIIGCEATGHYGETLLRRLQTQGYAIVRMNPAQVAQFRRGLGRKAKTDALDAEAMAKQLSVTNWVIDQAISQPLRQLRSLTRLRLDFVEEQSRWINRIRAVINQIYPEIEPLLKNLTTATSMAILTHYPSRQLLAEADLSELTALVQKASRQNKGADFAIQLKQTAQNSVGLDDSCLEVELRIMMQQFTTIANSIREIEREIRQYTELIFAGYSKRLDLDEPLTLSSFPYGNYLTIATLLSELGDINRFPSIKQLLSYLGWCPNTQESGMSQVKHPRMSHRGNRFARRIVWLMSVGAVRWVKEYQTYFHQRIDAGKNKMKTLVAIGRKLLSVFYAVLKTGQPYDPQRYLERLSLPIAS

SEQ ID NO: 76948 - protein, 351 aa, unidentified
MIILAIDLGKFNSMCCFFDTDTQEYHFQAASTTRLYLSTLLKNNAIDLVVMEACGPSGWIRDLCAEHGIDTLVCSTNEEAWRWRNVKRKTDRDDALKLARLAMLRQLTPVHVPSHQVREHRTLVKYRKTLDQRINRVKNSIRSLFANRGIEIATGQRAWCTGREQINSFRKPLSECSMDELWQGELDVELTQLDSLSEQVVEVERRLTAIAKDDDRIQRLQTIPGVGRKTAEVLVTALDDVHRFKNARQVSAYIGLVPRQYQSGETDRNGRITKRGSRLLRAMLLECAWVSLRYNSWARATYDRIRGGQTTRKKKAAIALARKLAVVAWSMLKHETDWDPRRMGIEVDEEP

SEQ ID NO: 76949 - protein, 360 aa, unidentified
MHATTVAVDLAKSVFQLAVADDQWRFVETQCLTRTQFERWFVNRSVGLVIMEACGSAHHWARWLNTLGIPVRLLPAQYVRAYVRRNKTNGTDATALLEAARASDIRPVRVKSVEQQALQGLHRIRSLWMGTRTSRINALRGLCREFGITIPQGARTGVETITRVLADPRSAVPDLIRHTAGMLIEEIRLLEARIAQVERELTAVARHSPACTLLLSVPGIGLLTATALVAATSGDVTHFQDARHFASWFGLTPREYSSGSSRYLGRISKKGDRYLRMLLTHGARSVLRTAKVADGAGKDVCGIRRWALDVQGRSNHNKATCALANKLARICYATLRDHAPFDEAARMTRKAGRQSFALPA

SEQ ID NO: 76950 - protein, 340 aa, unidentified
MEIAVLGIDLGKNSCSIVGFDDGGAVVLRRRMHREGVIKLAGKLRPCVVAMEACCGAHHLGRVLRAQGHEVRLMSPEYVRPYVKSQKNDDRDAEAIAEAATRPTMRFVELKSEEQLDMQTLHRARDRLVGERTALINQLRAVLLERGITVAQGRRKLERHLAGLDAQGGLSQRMRVLIEDMRLQWCELDRRIAELDKELTKWVRNEEVARRLMTIPGIGVLNATALIAAIGQGESFARGRDLAAWLGLVPRQLTTGGRPRLVGISKRGNKYLRKLLIHGARAALPTLLESPTSLGAWLRGLMTRMHKNAVVVALANKLARLAWAVLRHGEMFRFAVSAAA

SEQ ID NO: 76951 - protein, 341 aa, unidentified
MKKFIRIGVDLAKNYFQIHALVSEGGPAVTRKVRRSKMHEFFSQIEPCLIGMEACGSAHYWARELKAMGHEVLLMPPAYTKPYVKRGKNDAVDADACCEAMSRPGMRFVPIKSAEQQATLMLHKTRELLVKQRTMSVNALRSHLSEFGIIAAKGIGRVDELLELAESDATLPNAARAGVKVLSQALEGLDKAIDDLEDEITSAHAQNEMTRLLYKVPGIGKIISSVIAASVPDPSVFKSGRDFAAWLGLTPRQNSSGGKRTLGAITKQGNRYIRKLLVLGATSLLNVMGKRKGALRDWIVGLLAKKPARLVTVALANKLARILWAMMKTGESFRTEMFAKA

SEQ ID NO: 76952 - protein, 323 aa, unidentified
MQRIIIGVDVSQDFLDGHIRPTSVRQRFANTSAGIAELVAWVRPFAAERILFESTGPYQIAAVGALLAEGFPVVVVNARQVRDFAKAMNYLAKTDTIDAAVIAHFGEVATTKVRPLESEEIRTLRDLYDRRGQLVHMRAMEKNQRHSASVARASANVLHSIDKHIEYLEKQIHDLEQRMDRLIEKSATFQARNEILQTITGIGPHVSRTLLVHLPELGQYTRQKIAALVGLAPFNDDSGEHVGHRHIRGGRNKVRVGMYQAAIAAIRHCPRMKAFYATLKARGKASRVAIIAIARKILILANALVRDMKPYENRTNSICLKTT

SEQ ID NO: 76953 - protein, 457 aa, unidentified
MEKQGFLAIDVSKGYSDFLLVGSSGGVMEEGFQLPDSKDGRQKLKELVAGWQAAGLEELYCGVESTGGYENNWYSWLKTAFKDTAVYVCRINPRGVKAIGEASLKRTITDAVSAENIASYMTRFPHKLDYGQRGEAPNEGFKEGKMHITCIRMLQKQKVQSSNQLEKLLYQYFSEVLVYCRHGIPVWLLAALAKYPTAAAVAKAGVARLSAINNISAEKAKSIIAKAKDNTQEVSPQIAHVIMVTAAEVLHKEALVKQERKYLAALYKDCEEVVLLSSIPGVGIDSAVAFALEIEDVARFADAKKMAAFFGVHPTFKQSGDGMWGNHMSKAGRGEIRATLYMVALSGARHNPVLKQVYAASRAKGMKHGQAAGVVMHKMLRIIYGILKSKTKFNASTDEQNQQDAKEKQKDNEQKIKEGKKLKKQKKHRFQTISTDAPISRRTEQRIKKQTAAQASD

SEQ ID NO: 76954 - protein, 326 aa, unidentified
MLGVDIAHTTFTAARWAAGESQRLGTFPNTAAGFAAFAQVVPPDERALTLEPTGGYELRLASWAVAQGWTVHIPNPAHVRAWATGRGQRAKTDRQDALVLARYGAECAPPVWQPLGAELSELDDLLHRKDDLEQMLRQERNRQHALGARPQVARAVPPSMQRVIGLLEEELRQVEEAIAAHLQTHGALQETAAQLQTVPGIGARSVLPLLVTLGRWHARTAGRGTAKGLVAYAGLDPVPYESGTSVHRHATISRQGNRALRSRLYWCALGAIRGNNPLRAFYHRLLAHHKAKKLALVAAARKILSWAWAVYRDQTPFDPARAAAAA

SEQ ID NO: 76955 - protein, 306 aa, unidentified
MRKMQDYILKGKRIFIGLEDSKRTWKLCVRSEGMIVHEINMSADYMNLLSYLKNRYPDCEIKVMYEAGFGGFWLHDRLESDNIVCIVTPPHKVTQAKVNKVKTDRIDARRLALNLENNDYRSCHVADREHRENRQVSRTLSQIQKNITSNKNRIRKLLDFHGLNAGLPSGAWKPSHYQSLKSMKLSSTLRVCLDIYLRLLDSLETLKSELKERLESISEQDRYRESVRIKESCPGVGRLSAIRFTLEWGDLSRFPTGKHLASYTGLTSSEYSTGEQVHRGRITGQGSRLADPMCLAGDKTRPGFIK

SEQ ID NO: 76956 - protein, 311 aa, unidentified
MTQIVCGVDVSKRRLDAHVVPCGAFESFDNDADGIAALAGFCRRHGVQLVAMEATGGYERTPFSLLWEAGIACGMTNPRSVRRYAEAMGILEKTDRIDAGVIARFAIAKELRPTNPPTPRQQRLNALVARLRQVTDDLAVQKRRRGSAINEEMVSSLDEVIALLKRQARALEGEIGSLIDDDPLWARLDAALRIKGVANRTVARLLAELPEIGLYANKAVVKLVGLAPLAHDSGAKTGKRHIRGGRAGIRSILFLVADIVRRYDQSLADFHRKLTQAGKPKMVVRIALARKLLVRLNAKAREAREQYALAT

SEQ ID NO: 76957 - protein, 399 aa, unidentified
MYDTSGIGVFLGLDVGKGEHHGHGLTPAGKKVFDKRLPNSEPRLREVFDKLKTKFGTVLVIVDQPANIGALPLAVARDCGCEVAYLPGLAMRRAADMYEGEAKTDARDAFVIADVARTNPRTLRQITIVDETEAELAMLVGFDDDLAGESTRTSNRLRGLLAQIHPSLERVLGKRIHHPAVLELLGRYGSPQQLHQAGTDQIAAVLKPKAPRMAARLAAAITEALAEQSVVVPGTNAAEVIVPSLARQLSEILSQRDALEGRLAALLEAHPLHRLLISMPGVGVRIAATLLVTIGDGRTFPDADHLASYAGLSPATKSSGSSIKGEHAPRRGNRQLKRAMFLSAFAALHDPASRAYYDRHRTSGKTHTQALLRLARRRITVLFAMLRDGCFYKSRTATA

SEQ ID NO: 76958 - protein, 364 aa, unidentified
MSTITIGVDLAKHLFSVCEVDASGRVIRRQDLHREAFGIWLAEIPAGTVVAMEACSGAHHWARRCLEYGLQPRLMSAQFVTPFRKSRRLKNDRNDAEAIATAARQGNMRFVPIKSVDQQVRLSWHRVREGYKAQSLAVANRLRGLLAEFGHVVAQSDHALRIALADLDQTALPGELKELLRELGEHWTQVRERIRACSARIEAHAQVDERCVRLRTIIGIGPITADAFVASVGMGKEFKNGRQMAAWLGLVPAQHSSGGHTRLGTISCRGDTYLRTLLIQGSRSSLQRAKTVSVEKATPEQLWIQQLACRLPFGKLLVAIANKHARQSWAMLAHEEAFDADAWLKHSTVQRAACKQAVTLATPA

SEQ ID NO: 76959 - protein, 404 aa, unidentified
MEQVYVGIDWADDHHDVHVTDNSAAILDSFSIPHSYEGVEQFRKRLGKFSKKPEEILVAIESHQGLLIYSLLELGYQIYLINPKSMDRYRDRYRMSSSKSDPKDAMVLANILRTDLHLYKPLPKETMADARLRHLTRAHKSLGQLKVKLTNQLTTQLKSYYPVALHIFSKLDQKITLAFLENYPTPGKAAAASLEELQEFFREQSYPCQYRVPLVYESLQQPSLLAPKEMEEIHQIIVLSLIPVLRSLLIEIEKQVKEIAKEFKQNQAYHIFSSLPVGEITAARLNGELGSNGSRYPTREYLQTSAGTAPVTRRSGKTKIILFRWQCNKHLRSAFQDLARESVNRCHWAGEYFGRQLKLGHKASRAYRALANRWAAIIWKMLQEGQPFSQARLANAAGIVMATA

SEQ ID NO: 76960 - protein, 346 aa, unidentified
MDQQHHVGLDVSVKETAICIVDPHGKVVHRATVESHPEVIGRHLIDLGYAYARVGLEAGPLSPWLYAGLVEVGLPAICVETRHMHAALSARINKTDRNDALGIAQIMRVGLFKPVHVKTPASQQRRLLLTSRKLLQRKAYDIESDLRGQLRNFGLKVGVVGGWASSSACATSCSICPSSPPWSCRCWRRAALRTQLAKLHKMLLEQVRTDPVCRRLMTAPGVGPVVALTYRTCVDNPARFGRSQCVGAHYGLTPRLYQSGETMRVGRISKCGDRMMRAALYEAALVLLTGSRGRWSRLKVWGLAVAKRRGMQKALVAVARKLAIVLHRMWRDGTDFRWSAAATTAA

SEQ ID NO: 76961 - protein, 479 aa, unidentified
MTPHKDYGLDPRPSAPTPLLPLSPLLSDALQVCHPHAAGIDIGEAEHWVAVPPGRDPQPVRRFGTFTADLDALADWLIECGVTTVAMESTGVYWIPLFELLETRGLEVLLIDPRQAKRAPGRPKTDRLDCKWLQRLHAYGLLAAAFRPAEQVCVLRSYLRHRQMLLTYGAHHIQHMHKALQQMNLKLSQVVSDLTSVTGMAILHAIIAGERAPLTLAKLRNPHCQHSEEEIAKALQGTWRAEHLFALQQAVELYHFYHQQLTVCDQHIQAHLGTFADKSDGQPLPPKPRRHKKVNEPRCDARTPLYRLAGVDLTTIEGIEEGTALVILSEIGTDMSRWPSVKHFCSWLGLAPQHQISGGKVLSRRVRPGAQRVTVALRLAARTVHQAHTALGAFYRRMRSRLGAPKAITATAHKLARLVYSLLKHGSAYVQQGIEAYESQYRERKIKALARQARAFGYTLMALGTPEVPSLDVVAVPTP

SEQ ID NO: 76962 - protein, 353 aa, unidentified
MSEDKYIAFDVHQATTVVSVMNAAGRELNTAVLPTQPQALIGFLGSLRDRLHLTFEEGTYSAWLYDVLQGRVAELVVCDPRRNALLKEGSKTDRNDARKLADLLRTGMLRPVYHGSRSLRNLQEMAHCYQAFVQDTTRVMNRIKAFYRGRGIDCAGRGVYSPRQRGIWLERLSAGASRLRGELLHEHLQEVRHLRRQARRALLAESRKHLVAARLGEIPGLGPVRVALLMALIQNPHRFRTCRKLWTYAGLGLVQKGSSEYRLVEGRAVRRPGALQLRGLNHNHRPGLKEIFKSAALAAIRQPGPFKDYYESRVQRGVDPAIARVTVARKLAALVLSLWKKGGRYRAEGMTQA

SEQ ID NO: 76963 - protein, 331 aa, unidentified
MASSNLQGRARGKANRKGGPMNKARYVGIDVSQEYLDVAISDQKRVLRVRSDEAGLELLRRQLKDEGPELIVMEASGGYERRPATVLLGASLPVAIVNPRQVRDFARSVGQLAKTDAIDARVLARFAEVFKPTPSMLSEESDQQLHELQLRRRQLVEMIVAERNRLRNAPRTADRIEEHLRWLEEEVKRTEEELDGLIHSDPELKSKAALLISVPGVGRVLALTLLGSLPELGLLNRKQIAALVGVAPLNWDSGKLRGKRAVWGGRAHVRAVLYMAALVASRRNPLIRALYQRLCEAGKPKKVALVAAMRKLLIILNSMMRSRTHWAPNSS

SEQ ID NO: 76964 - protein, 331 aa, unidentified
MKIKQTIGIDISKLTFDVRIHSNQCYQVFDNTSKGFKELIKWTDKNNPTSKENTLFILEYTGIYSEGISLFFSKKNILFSLVPGLEIKKSLGISRGKNDKVDATKIALYGYRRREEIKPCIIPSDDINQIKRLLTLRERLVKQRAGHKSTLKEQKRTYLKKENKLLFGIQEKTIKFLTKHINNIELEMKQIIQENQELNQQYKLIVSVKGIGNQTALFMIVTTNGFTKFNSWRKYASYCGIAPFSNTSGTSIRGKTKVNNLANKKLKSLFDLCAKSAIQNNPEMKVYYHKRLEKGKNKMSTINIVRCKLMARVFAAINRQTPYVNTLKFVA

SEQ ID NO: 76965 - protein, 350 aa, unidentified
MASKRSVIGGVDTHTATHHAAVIDLNGRLIDDAEFSATPAGYAAMLTWMRGKGKLRQVGVEGTGAYGAGLARHLHDQGIDVLEVPRPDRRIRRQRGKSDPIDAEAAARTVLAGQASGAPKLADGPIEAIRMLRVARNGAVKARTAALNTLRSMLITAPEPLRTQLRTLSSAQLVAACARLRPDLGHLADPVQAAKHALRSLAQRVQHLNDETRSLRTQLDQLTQVAAPATSAVFGLGPDTVAALLIAIGDNPDRLRSEAAFAHLCGVAPIPASSGKTHRHRLHRGGERAGNSALHIAAVVRLRYDPRSRAYADRRTTEGMSMPEILRCQKRYLAREVFKALRADYAELST

SEQ ID NO: 76966 - protein, 388 aa, unidentified
MIYVGIDIAKLNHFAAAVSSDGEILIEPFKFTNDYDGFYLLLSKLAPLDQNSIIIGLESTAHYGDNLVRFLISKDFKVCVLNPIQTSFMRKNNVRKTKTDKVDTFVIAKTLMMQDSLRFLTLEDLDYLELKELGRFRQKLVKQRTRLKIQLTSYVDQVFPELQYFFKSGLHQHSVYALLKEAPTPNAIASMHMTHLAHILEVASHGHFGKDKARDLRVLAQKSVGVNDSSLSIQITHTIEQIELLDSQLFHTELEMANLVPCLHSVIMTIPGIGFVNGGLILGEIGDIHRFSEPKKLLAFAGLDPSVHQSGNFQAKKTRMSKRGSRVLRYALMNAAHNVVKNNTTFKDYYDSKKAEGRSHYNALGHCAGKLVRVIWKMLTDNVEFNLE

SEQ ID NO: 76967 - protein, 340 aa, unidentified
MKKVSTIGLDLAKNVFQAHGADASGAVIFRKKLRRAQVLEFFATQPACTVAMEACGGSHFWGREIGNYGHRVRLIPPAYVKPFVKRQKNDAADAEAICEAAQRPTMRFVAVKSEAAQGAAVVFRTRDMLVRQRTQIINALRGHLAEFGLIVAQGPAHVAKLIMAVQDPKQPLPEAARPILCVLVDMLGLLDQRIKLLDIAIARRAKEDEVARRLMSIPGVGPVIATAVAALAPPAETFKRGRDFAAWLGLTPLQHSTGGKQRLGATSKMGERTLRRLLIIGASSVVRWAARKGAPAGSWLASMIARKPAMLVRIALANKMARVIWALMAKGGTYRAPVVA

SEQ ID NO: 76968 - protein, 331 aa, unidentified
MPAIIGIDIAEATLAVALWREGHEIVPAEFANSPDGLNRLQRFLKKHQATSAHACMEATGRYWETAAEFLVAHGYQVSVVNPARIKKYAESQLARNKTDRLDAGLIAEFCRTQQPAPWTPPPPAVRELQALIRQLDDLEADRQRQRNRLHALQHGAQPSPTVSTQLQQQIDFLTSQIEQLKQAIQDHIDQYPDLQRDRDLLDTIKGIGPLTAAKLIAEYGDLRQFSGVRQVVAFAGLNPRHRQSGSSIRGQTSISKMGRASIRAALYLPAVVAQRHDPRLAAFAARLRARGMSQMAIVVAVMRKLLHFAFGVLKSERPYDPYFQLSQAAQT

SEQ ID NO: 76969 - protein, 412 aa, unidentified
MEVLYDCCCGIDVHARMLVACLIKDGRRETRTYSTMTDDLLRLLDWLKSSGCTQVAIESTGVYWRPVFNILEGSLSVMLVNARDAKGFKARKTDVIDAEWLADLLRHGLLKASFIPPLEIRELRELTRYRESLVREQTALANRIQKLIESGNIKLGQVVSDALGVSGKQMLRALAAGEQDAKKMSHLARRRMKRKQPELERALAGRLTQAQRWVLRELLDQYEQVEAAITRVEEKIREEIESAEDPFVGEAVGLLDTIPGIAETIAQTIVSEIGVEMRRFPTDKHLASWAGMCPGNNESAGKRKSGKTRRGNRYLRTALVQAAWAASHQKETYLAAQYQRLVKRMGKKKALLAVGHSILVIVYHVLQSRLSYRELGGDYFDKRDIEKRQQRLIRQLEALGLKVTVEQLPIAA

SEQ ID NO: 76970 - protein, 312 aa, unidentified
MLTPSVYLGADVSKSTIDLGCSLFVVPAFIPNTPAGFRGLLKILARSPSSIHVVCEATGPYHKGFVAALHQAGVVVSVVNPRLPRDFARSRGQLAKTDKIDARLLADFGTTLRPAPTPQPEARMILLDDLVTRRAQLVEDRAREKVRLQQTTCAEALASLKLHVHHLDGQIEKLLARIAEVVEACPGLRAKVARLVEVQGVGTLTASALLAALPELGTLSKNEVTALAGLAPFNRDSGAFRGSRSIRGGRSEVRRTLYMAAFCASRRNPILKAVYQRLRAAGKAHKVALVAVMRKLLVYLNSILKSLPCSPA

SEQ ID NO: 76971 - protein, 332 aa, unidentified
MDNFYFIGVDVSKKKLDFCVLFEGKVLREEQVSNHQQAVARLIGELKNDLEMDNEQFLICAEHTGQYTFPLVCACKSVECKLWLENPSQIKYSSGMQRGKNDKVDAKRIAIYASRFGDKVKYYDRPSEEIERLKQLERERALYVTDLAKYKGQMYDQKDFMPAALYRKKTKRMKGLIQELQAAIDAITAEMEKIIGSTEVLARQMELLMSIDGVGKVVALNVIIETEAFSRFDNPRKFCCHAGVAPFSYTSGSSQHSKNKVSHRANKNIKKLLHMAAVSGTHRKEGELKAYYMRKVEEGKNKMSVINALRAKIVARMFAVIKRNEFYTPIYS

SEQ ID NO: 76972 - protein, 404 aa, unidentified
MKGPIVSIDVSKGKSDYQAFKDLNVKYTGSRSIKHNKEGFDEIVNLVREMEKKLETEVCVVYEATGVYHRVLKKVLEDNNIKQFIINPLLSAKTRKNDSLRSPKTDKLDPKSIAKTYYSHSLHNSHKQETIYHELRELSRYYEDILVHIRKDKVAFRAQLDIVFPGYDTLYDDLYGPVALAIIEKYPHPEMLQKKKINTVSKVLQNKTCHRQAVSDTMADKAIEYSKTIYSGCDKDDIEVLILQRFIKKLNEDMAEAERTIGEMIKLAQELPDFNIIKSIPGIGDNLAARIIAELGDMTRFKKKNELVAFAGLDPRISESGQNDGDHMHITKKGNKRLRCLLYLAVTCSIRLKRDDNSIKDFYIKKKQQSNPMCSKAAKTACASKLVRIIYSMCKTGELYQYNK

SEQ ID NO: 76973 - protein, 415 aa, unidentified
MKVVFPTCCGVDVHKTFVVATIITTPADSLQPHYQKKRFSTFNSDLNRFADWLLEHNCLDVCMESTGKYWVPVFNILEKRGIRVVIANPKWVKAVKGNKDDTKDSKWIGDLFRIGLVKSSFIPDLNIRILREFTRYRYKLVSMKSSEKNRFQNAFTVCNVALDSVVSDMFGKSATAITDYLTSDESFDPEHCVSLLQRSLKKKAEQVLESIEGFSIADEQKARIKIIREHHDFIKEMIAKVDTCVNEMVAKYEGEINLLCTIPGIDRRSAITIISEIGTDMSQFGSSKRLCCWAGLTPGNNESAGKKKSVRISRAGVYLKPALVQVAHAAVKDNDHPYYKLKYERIAKRRGKKRAIIAIARMILTAIYSMFCTGEVWNPVDLFKIDMPEHLKEQQLAKAIKQAKRFLEKQGLSVA

SEQ ID NO: 76974 - protein, 357 aa, unidentified
MGKPIKNLSSVTCVGLDIAKNVFQVHAIDAVGAVVVAKRVRRSQLLTFFASLPRCLVAIEACSSAHHWARALIALGHDAKLIPPAYVKPYVRRNKNDAADAAAICEAAGRPNMRFVAVRSVDNQAQLMRHRTRELLDGDRTRMLNALRGHLAEIGVVAPQGVQHAYALKRLAADGFDENGEIVVPDCVREALAPLVHQIEAIDAEIAAIDEKIKALVKADDTARRLMTIPGVGPVIASAVVATVQDAGAFANGREFAAFLGLTPRQSSTGGKERLGRITKMGDRYLRKLLVVGACAALVHRKGHHDALRCWADQLLARKTVKYKFKLTAVALANKLARIIFALLARGGEYDERPVAA

SEQ ID NO: 76975 - protein, 414 aa, unidentified
MFAVGVDVSNGRSMVAILHSKYELVMKPFEVPHTNEGFASLTVMLHGLGGEVRIVMEHTGRYYESFAMSMYRAGFFVSAVNPLAIKNYQPGISIRKVKTDKADALKIAQFAIDKWEILPQYTPMDMIRYNLKTLNRQFQLSSKMQTALTNNLIALLEQSYPGIRSSFKTPPRSDGSEKWVDYVDTFWHVDCVAKLSQEEFVKRYEKWCGRHKYNFSEQKAIELHNAARSKYAVVPKDDFCKLMVQEAVTQLNAISRTVETYRAEMNRLASQLPEYDTVMAFFGVGESMGPQLMAEIGDLRRFAHQKSLVGFAGTDPIKDDSGDKVSDSTHSSKRGSPYLRRTLYLIMSSLLQNQPQDDPVYQFLDKKRSEGKKYYVYMTAGMTKFLRIYYGKVRDCLKEKGLWEQPSMDEVNPG

SEQ ID NO: 76976 - protein, 403 aa, unidentified
MFAGIDIASERHVLARLDEAGAAIGKPITITEDRAGYDALLAALAPPPVLIVMEATGHYWKNLFAVLTAAGHEVALLNPLIARRFQEASLERTKTDAIDATGLARLAFEKRPAPTHLHDEIAEALRELVRHRDRLRQDFDDRVRQLHRLVDLGFPEFTRYVRGLDSMLATCLLAEYPTAHAFARATPRRLAKLRYDGRHFVGPELAQSLVEAAKRSIGQHHGPAYKLQARHICQDLDTWRQRLAEIEHDIENLLDTHVPGKLITSIDGIGPQTAARIIAAAGDPSHFKSAGAFAAYVGVVPGLRQSGKQTSTRAGIGPLGNARLRRALWMPVLSAVKRNPWLRAFYLRLRDAGKPAKLALIAAMRKLLHAVYSVAKYRRPFVATEQGRAVEPPNSATPRPCGT

SEQ ID NO: 76977 - protein, 331 aa, unidentified
MFPVGIDVSKNTLDLCMLYDGIKGRIKTRNIQNNRHSVENILRWLRLQHCGPEDVHVVMEATGVYHERLATELHDAGFQVSLANPHRSREFARGMGIMTKTDKVDAYMLACYAFLKKPHRWEPPTPEIRYLGALLRRRDVLLGDALREENRLEKYLSTDTPADIISSCRRMAQLLREEVSNIERQIKVHIKASTALRRDYTLLTSIKSVGPQLGMHMLVVLRSHNFVSAEQAAAFLGVVPIEKRSGTSVRSRPRMSKIGPPQLRAKLYMSALCGKIYNKRMRNIYDEMCLRGKPKMVAIGALMRKLVHWCYGVLKTGTIFNDEGLKPVLST

SEQ ID NO: 76978 - protein, 416 aa, unidentified
MQSAPTTLSSAPPNGLTCGIDWAKDDHAVAVVDSAGREVHRWTVEHTNAGLHGLLRRLARTGVAEVAIERSDGPVVDALLGGGLTVVVIAPSQLKNLRSRYGSAGNKDDRFDAFVLADTLRTDRARLRPLTPDSPATVTLRASCRARRDLVTHRVALANQLRAHLQTVFPAAVGLFRDLDSSISLRFLTRFDCQDRADWLSVNRLAAWLASVGYCGRVDPAVLHARLTAAPRGATGEHGTAAAHVTHALLAALTTLVEQIKTLTEQIDEQLDLHADAHIFTSLPRSGRVRAARLLAEIGDCRARYPTPEALYCSAGAAPSTRQSGKHRAVTFRWACDKQLRDAVCDFAADSRHANPWAANLYQRAIDRGHDHPHAVRILARAWLYIIWHCWQDGVAYDPAQHKALQRLTQDHQAAA

SEQ ID NO: 76979 - protein, 413 aa, unidentified
MEVKEKVKRYYLGVDWADEVHQVWVSDSQGSKVAEMKVAQSPEGMSEFGRWLHERRADGIELWAAIEKPEGRIVDFLLDDGVVVYPINPKAVDRARDRFRMSGSKSDLFDAYVLSEFLRTDHGHLRALQPNSAQAQELKMLTRDYQRLVTQRTRLLNQVVATLKEYYPRPLDLFTDISTEKALDFIKQCPTPETANELNRKQWNRFARAHRFSQNETEELWKTVKAPQLPIPQHVVRAKAKLIAVLVEQLEVLVKATTHYSGEIQRFFASMPAAKLVSGLPGAKSGTTLASVWAEIGDAPGRWQSFRHLQAQAGSVPLTKESGKVRVVHFRFSCNKRLRHAVYWLAFTSLNQSEWAKVYYREQRSKGHTHHQAIRALGAKWLKIIFVLWKDHKPYDENYHLANITRQRMRQAA

SEQ ID NO: 76980 - protein, 347 aa, unidentified
MRFYTQQHQFYCGIDLHARTMYICILNHDGEILVHRDMKARPETFLKVIAPYREDMVVAVECLLTWYWLADLCAQQGLPFVLGHALYMKAIHGGKAQNDRIDARKIAVLLRRGMIPPAYVYPAEMRATRDLLRRRMHLMRKRAELLGHIQNTNSQYNLPEIGKKIAYKANRDGIAERFPDPAVQKSIEVDLALLDHYDRLLRDMELTVLKTAKQHDANTLYLLCTVPGIGEILSLVLLYEIHDIQRFPRVPDFVSYCRLVQCAKESAGKRYGTSGAKIGNAYLKWAFSAAAVLFLRTKPAGQKYLARLEKNHGTGKALTVLAHKLARAVYHMLKRETAFDMPMFLQS

SEQ ID NO: 76981 - protein, 338 aa, unidentified
MELYAGIDLHSNNAVLMVLDGADRVVFAKRLANDLEAILMALRSCAGSILGVAVESTYNWYWLVDGLQDAGYRVHLVNTAAVKVYDGLKHSGDFSDARHLAHLLRLGILPEGYIYPREQRAVRDLMRKRSQLVRQRSSQILSMQNLVARNLGAQCSGNDIKRWDDEDIDAMNLLDDQKLALKANLAVMDCLDRQVHTLERRILASTKLSESFQALKSVSGVGDVLALTIALETGDIGRFASPGQFASYARTVDSRRESNGKKKGEGNAKCGNKHLAWAFIEAAHFAVRYDAAIKRWYQKKCASSLSVVAIKAVAHKLARACWHVMKDGRPFEASRAFG

SEQ ID NO: 76982 - protein, 343 aa, unidentified
MQSISTIGLDIAKSVFQVHGVDAAGQVVIRRQLKRRYVLAFFQKLPPCLVGIEACASSHHWSRELQALGHTVRLMPPAYVKPYVKRQKNDITDAEAICEAVARPNMRFVPTKTVEQQSCLMLHRARHLFIRQQTAVINSIRAYLAEFGIVAPVGRRGVEQLLEVVADPADCRLPEVGRACLAALGSQLRALKAQILEFDRRILAWHRSNTTSKRLDAIPGVGPALATALVASVADAKAFRSGRDFSAWVGLVPKQNSSGGKDKLGSISKQGDRYLRSLFTAGALAVIRYAKIHGTGHRPWLTGLLARRPTKVAAIALANKLARMAWAMMVRNERYKEPAALAA

SEQ ID NO: 76983 - protein, 444 aa, unidentified
MAGTLHLGIDVSMAENTCCFLLQNGTEARRRLTVPNNLPGTNQLVEELLRLMEHHHLDRLMVGLEATNLYWWHLACFLNSSPQLAPFEPRVYAFNPRLIKGFKKALSDTPRSDVNDAYAIAERLRFGHLPAPFIPNELYQPLQRLTRFRCHLTHQITREKSYFLSFLFLKFSEYQNLDPFSNTFGAASQAVLTDYLTVDEIVAAPLEELVGLLVQEGRNRFPSPDAVATVIKRAANDSYRPHPSLNEPLNLILSTTLENIRTLTRQVKKLDQAIERELQKFPNPLISVPGLGPVFVAGIMAEIQDIHRFPDHPAVAKFAGLFWRTSESGSFQAEETSLGKSGNAYLRYYLIEAANSVRMHNAEYARYYRTKYDESTKHKHKRALVLTARKLVRMVDAMLRHNQLYVPRPEDSAQEVNDRPMVKARPAKQHHYRQVESGSPALCA

SEQ ID NO: 76984 - protein, 407 aa, unidentified
MELVALYKRVIGLDIHQAQITACALIEEPDGSARIEQRQFGAFKRDRRELADWVSSLRPDEVVMESTGIYWKSPYAALEAIGIRAKVVNARHVKNVPGRKTDVGDAHWLATLARAGLLRGSFVPSAKLRELRLIARQRQKLVGQLASEKNRLHKVLTDSGVRLGVVVSDLHGQSARAMVKAIIAGQSPQEVLKLASRRLKASREEIFDALQGDLTASHRFVLDELMRHIEEIEARIARFDTRLLAELESERDALALLQTIPGVDLIGAAMLLVEIGTDMESFGNADRLASWVGICPGNNESAGKRKSGHLRKGNLYVRRLLCEFAHAASRTTSVFKSKFLSLVVRRGHKRAIIAIGHKILRTIFFMLKRREHYRDSATDYEALSVQRNAPRWIKSLTKFGFINPANA

SEQ ID NO: 76985 - protein, 347 aa, unidentified
MEEYAGLDVSLKTVSICVCNGEGRVLWRGAVVNDPDVVAAALSRHAPELVRAVLETGSCGIHLYRGLAAVGVPIVCVCARHAKGVLKCKVNKSDANDAEGLAQLARTGWYREVYVKSAEAHVVRAHLLARKQVAKARRDFENQIRAQLRTFGLKVGAVARGRFEARARRLLAQVPALYLAVDQLLMARRSLLMAQDALEAEAKRLAAADGRCRILQTMPGVGPLTALAFVSAMDGPARFARSSSLGAYLGLTPRGYQSGEVAWTGRISKTGDAMARALLYEAANSLMVRVKARVPLKFWALKLAERVGGKKARVALARKMAVILHRMLADGTAYHWGTAYRWTPKMA

SEQ ID NO: 76986 - protein, 309 aa, unidentified
MKQSIVYIGIDVAKAHLDVAWQEQSRRFANDKCGQAALIKWLKQSAFPVQLICEASGGYEQALVESLEHTDITASVVQANRVRQYARAAGILAKTDKVDARVLAAFGAAMQPKATPPLCPEQKRLRQYEAQRRHLSAVLVAEQNRLAQLSYAELRVLSRSLISKIKKQIATIDARINALIAQDKQLCQKAQKLTSITGVGARTAALVLAQMPELGQLNRRQAAALGGLAPFNRESGTLRGKRTIFGGRRALRSGLYMAAMVAARRNPILCSFYQRLRAKGKPHKLALTAVMRKLLLALNQNLKPITSPA

SEQ ID NO: 76987 - protein, 347 aa, unidentified
MKKSIFIGIDVSKDTLDVSVHSTEAAEQFIDQQFTNNTDGFNNILYWINSNGFDLDDCLFCMEHTGVYSLGIAIFLYEQGLFVSVVPALQIKRSLGIVRGKNDKVDARRIASFAMDKCSKLKPYEPDGEHVLRIKQLLTYRDQLRRICSSLKNSRHSHKGYTKKTGQIIVLDSINNQIEGLEKEIYKIEKKIKEIIKQDKDLNNNFKMATSVKGVGLIVGAYILVTTSNFKKFSTSRKYCCYIGVAPFPNQSGTSIKGKTRVSNLANKRLKTLLHNSAGTAIQHDPEIKNYYQRKLKEGKDESAVKNAVCNKIVHRVFAAVKRQTPYVSLYKEKIFQKKVKKNLVIS

SEQ ID NO: 76988 - protein, 421 aa, unidentified
MENTAARKRKQVPEGYLIIGIDPHKKRHAAVAITQDFTTRDKSKFDNTREGLETMLRRARTEMVASGCRGVMFAIETGGHYWRNVAYFLDEQGIPFRFINQFTLKRRREGKDLNRRKNDYRDSEVAAQLLCTGEFTESTIPQGVYAELRTAHNAYRRLVKERTRITNLVKGLLDGLFPEFTEVFKDPCGLTALSVLSAGAIPGVIAGMTEDEFVAAIEAKHLRRLMRKKLAALHNAAMTSIGIMAGARSVSAEISFLVEKHELIRRHICIIERTLVNLVDEAEEGKYLLSIRGLNYVAAAGLLAELGSFKLYRTAKQMIKMAGSNPTESESAGKRGSHTPMSKQGRPVLRYCAWTSVIPMLRFNSDFRAWAKQRRERPAHANPLNGREVVGAALNRLLRLAFAMVKNQTYYLSPQLLQVTG

SEQ ID NO: 76989 - protein, 321 aa, unidentified
MNRVLVGVDVCRDFLDAHARPSGLPKRFDNTPAGIEQLVAWLRSLAPERIIFESTGPYQKAAVGALLAADLPAVVVNARQVRDFAKGTGQLAKTDAIDASVLAHFGEVVATVVRPLPSQEILEFRELCDRRGQLVRMLASEKNHRHAAQGASPKVIKNIDKHIAFLQRQIDDLEERMDRIVADSETFKAKDEILQSIVGIGRQVSRVLLVHLPELGKGTRRSIAALVGLAPFADDSGASSRIRHIRGGRAKVRMALYQAAVAAVRYCPTMKSFYASLKARGKATRVALIAVARKLLVLANALLRTGIPYQRPTNSVCLKNA

SEQ ID NO: 76990 - protein, 370 aa, unidentified
MKETITSFIGLDVHKDSIAIAVAQAGRQAPRFVGTVAPELASLCKALRRVANAKCTLVVYEAGPCGYGLARHLNAHGYTCEVIAPARIARSPAEQRIKTDRRDALLLARESRAGNLVPVVMPDERDEAIRDLSRTREDACTARLRARQQLKAMLLRHGRAYQGKSSWTLAHERHLSTIGFTYPAQDIAFAEYRQAVKDSHERLERLTAALRAQSSQWRMNPLVQALMSLRGFDFVAAVTFVAEIGDPRRFAHPRALMAYLGLVPSEASTGQTRHQGSITKTGNKHARRILIEAAWNYRHAARISRVLEVRQQGQPKIVRDISWRAQLRLTKRFRHLAMGRRLPRNKVNVAIARELAGFVWDIARQVKPLA

SEQ ID NO: 76991 - protein, 349 aa, unidentified
MNRTTYGLDLAKNVMQLHWVDDQTGEIGRKKLARGKLAEYFARLRPVRVAMEACVSAHHWARVLGGLGHQVELLPARQVKPFVRSNKDDAADARAIWLAMQQGDIRRVPIKTCEQQAVLALHRTRQHWVSVRTATINALRGHLYEFGVVLRGGRKAGLKALGEQRAVIDAQMPAVMQGLVDGQLQSLAQVQQRIDALEHEIEALQKQLDNAPALREVPGIGVLGATALAATLGDGRAWRSGREFSASLGLVPSHSGTGGKTRTGKLSKRGDPYLRTLLIHGARSVIEHAKHKPKWLEQLLARRPPNVVAVALANKMARTAWALVAHGREYQREWKNTPPKGCAAQAATA

SEQ ID NO: 76992 - protein, 457 aa, unidentified
MAATTKRKVRSAQKPLPSIHARAAGIDVGSTFHVVAVPPERADQPVRTFRSFTGELHQLADWLKEVGVTTVAMESTGVYWIPVFEILEARGFEALLVNARDVKNVPGRKTDVVDAQWLQQLHQYGLLRGSFRPRDEIVRLRAFLRHRERLVDYGASHIQHMQKALMQMNVQLHHVVSDITGLTGMRIIRAIVEGIHDPDVLAEHRDVRCKASQDTIRQALTGNYRSEHVFALRQSLELYEFHHAKVAECDVEIEAVLRALNADRETPEAPLPEVRHSQGSNEPRFELREALYTFLGADLSQIHGFGPYTVLRLLAECGDDMRKWPTAKHFTSWLSLAPGNKISGGRLLSSKTRRSSNRAAALLRIAAVNIGRTQTSLGAFYRRLASRTGKAKAVTATARKLAVLFYNALRYGMSYADAGADYYEERYRQRVVHNLQRRARQMGFTLVQDTGATAGVS

SEQ ID NO: 76993 - protein, 403 aa, unidentified
MNSVGIDISKGRSTVAVMRPFGEVIISPFEVRHTDSELSELARQLKSLDGETRVVMEATGNYHASVAKLLYDVGLYVSVVNAKLVHDYGNNELRRVKTDRKDAVKLANYGLDRWLTLPKYIPEEDTRLLLKNCYRQYRQYSKVQTVLKNNLISLLDTMFPNANRLFSSPIRGDGSEKWVDFVAEFWHCRCVSEKSERAFTSKYLRWCRKHGYNFSEAKAHTIYAEANGHIGVMPKSETTKLLVEQAVAQLRATSTALAALKHEMQTLASQLPEYPVVMDLFGVGPTLGPQLIAEIGDVRRFYSKKALVAYAGLDAPPNDSGDVTGRHKSMSKIGASSLRRTLFLVMSVYLQNAPLDEPVYQFMDRKRAEGKPYRVYMMASANKFLRIYYATVKAYLESLEHTA

SEQ ID NO: 76994 - protein, 346 aa, unidentified
MRHIGLDVHQRETKLCWIHGATGEVGNRATVPTAQVVDAVRALPGPRCVVLETGGQSWFLAGMLQSLPETEVFVVDAFQARRALEGMHRGKKTDKWDAYGLAKLSLQGRAAAMAVWLADLPTQQLRTLVRTRAALVQQTTALQNQLRALLRAAGLRVPGSDLMGRQAQQDLDALLPLLPPISVLCGEQLRRSLHFGKAQIHALEQELTTLARAHPACQRLMTLPGCGVILAATIVAEIGSISRFRQAKHLRSYAGLTPAICQSGERSHQGPLRRGHRGLKYALVLLAQHFAWHRGFADTGLKQAYYRCLHRHGPTPAKVALARHLCDVIFAMLRDGTDFTPQPRVA

SEQ ID NO: 76995 - protein, 421 aa, unidentified
MKKIQAKKIIIVNEKTLMVTADIGKVTNTGYCRCPDGTGLNPFEFSNHGLGFEKLWGFISRIKADKDLQEVVFGFESTGPYAEPLIHYLRNKGVRVVQVNPMHTKRLKELNGNSPSKTDQKDPKVIADIIKLGHSLTVIIPEGPAAELRRLTQARERSMQRRTAFLNQLQDLIFIIFPEFSQVVKNVKTKSAQYLLKHYPTPQDIAGCGIKKLFRILKKISRGKLREGCAEALYEAAKASVGIKEGRASILLEIKEILAQIEACERFIANLEREMSLYLKEIPYSSYILSLKGIGEVTAAGMIGEAGDFSKFDTASEIEKLAGLDLFEISSGKHKGQRHISKRGRPLLRKLLFFASINVVRKEGILHEQYQRYLQRGMLKMKAIVAISRKLLRIIYALVRNNSNYVFGYTKTQNLLSKEAA

SEQ ID NO: 76996 - protein, 361 aa, unidentified
MLGRRLRTTRSHHVDGVREARVFAGIDSHKDVLVAAIVDQVGRVSEVGSFENHPDGFAQLFAWLGNSPAVVRVGVECSGSYGRQAALRLQEAGWRVVEVPSRSTARDRGRDRKVGKNDVQDAVIIARIVARDDDLPPIRAVGPSEDLAALLAHRDHLIGERTRVANRVHATLSELHPGYTRSCPKLITTKALRAAAGIVADDVTVRGELVRVQLGRLEDLDREIRARKRQLAQLVADTGTTVTELCGAGPVVAARILVAVGDPGRFATRHKFARMNGTAPIPASSGRTDRQRLHRGGNRQLNRAIHTIALTQIRHHPDARAYYDRKRQESKTRREALRCLKRRISDAVYRQLQHDRVRLTT

SEQ ID NO: 76997 - protein, 340 aa, unidentified
MTQVLYVGIDMSKERFDVALCLEREATTLGQYPNNEKGFQKMAKELLPKGEANEDTAVHLIVEPTGGYEKRLVVFAFEQGWRVSLPNPKQVRDWAKGMGVRAKNDPLDSRTLAQFGAICQPAPENCLATEVAGLDTLLRRQEDLQQMLRDEQNRRQALGYKPHASPAAKGSVDRMIELLEKELEQVEAAIEDLLDQHTDLKVQARLLLTIPGIGPKTVLIILVFLHRWQARTAGQGSAKGLVAFAGLDPREHRSGDSVFERSTISKMGCTFTRHKLYLGAKGGVRARSGPLRHFYDRLRGRGKAYDLTLIAAARKILVWAFAIFSRQVPFDPALHAPAST

SEQ ID NO: 76998 - protein, 410 aa, unidentified
MRYWVGFDVGKAFHWLCVLDEEGEQVLSRRVEATEEDLEASCSEIEALGGERTVGIDLLGGPATLLEAVLLGRGETIFHVPGIAVNRARDAYPGEAKSDSKDAHVIADQLRLRRGSLHEVRPKDESNAEMRVLVAHRRDLLQDQTRRAARLREVLLGVFPGLEAALDLKREGALVAVTKVATPSAARKLGAARLFRWLKARGVRKAEDLAGRIVGAAKAQRRELPAAETKAALASEIAREMLRTRERLAELDRRLEELLADDPAARIVRTMPGMGVVFTAEFLAEVGDLGRFASADSLAAAAGVAPVLRASGATSYRRRARRGNKVLKRVLYRSAFSCISHHERSETFYRKKRAEGKGHHQAVIALARRRVDVLWAMLGDAARRADLQRAPSSSGLTNASGCVTRVKKAS

SEQ ID NO: 76999 - protein, 354 aa, unidentified
MTSDYGQPAPTFASIGIDIGKDVFHIVGFDAAGKVVLRKKFKRLALESELAKLPPSIVGLEACLSAHFVSRTLRRLGHSPRIIPAIYVKPFTKGQKNDYNDAEAIAEAALRPNLRVVQEKTQDQLDLQALHRVRARLVSRRTATINQIRAFLIEHGIAVRTGSGALRRSLFAILENRAAELSPRMSDLIVGLYEDWLWLDERIETLTGEIEQISHREANCKRLMSVPGIGPMISTAMVAAIGTGEAFERGRDFGAWLGLVPRQYSTGGKSILGRISKRGSRYLRTLFIQAANVILMRPQTWERFSFGAWLKAAQPRLHRNKLATALANKLARIAWSVLRHNTAFDAHRVEVVAI

SEQ ID NO: 77000 - protein, 417 aa, unidentified
MSLTPHHVAARVEHRVCAGIDWASADHAVCILDVGGSLLERFFVVHDAAGLKAMVRRLLKAGVDEVGIERGDGPVVDALLQAGLVVLVIAPGQVKNLRSRYGSAGNKDDRFDAYVLADVVRTDRARLRPLVRDSTATIAMRTTVRARRDLVQHRVAAANQLRAHLQLVFPGAAGLFAAIDTAISLSFIERFTTQTHADWLSPKRLGSWLSSVGYSGRTDPSLLHARLLAAPRGTTEPDAEVHAETTRAYVALLRVLNTQIAVLEDNLTAQLTTHPDTHIFASLPRVQTLRVARLIGEIGDARGKFPTADSLAALAGVAPSTRQSGKVKAVTFRWGCNKQRRDALCDFAGDSRHANPWAAELYNRAIARGHDHPHAVRILSRAWAGIIWRCWHDNLSYDPNQHRALQTTLANNATQAA

SEQ ID NO: 77001 - protein, 346 aa, unidentified
MGKSITDLSSVTTVGLDLAKHVFQVHGVDASGRVVVAKAIRRNKLLEFFASLPPCLVGLEASGSAHHWARELIKLGHDARIMPPAYVKPYIRRQKNDASDAAAICEAVTRPSMRFVGVRSLENQAALMRHKAREMLVAQRTQLLNGLRGHLTEVGVIAPQGLRFARELAELIEACDETIPFEVCEALAPLVVQLRNLDEAIARLDRIIAKLAQKDETARRLMSIPGFGPITASAMAATIQDTSSFAGPREFAAFLGLTPKQNSSGGKPKLGRISKMGNRYLRKLLVVGAHAVLFHRKPHTDPLRMWAKKLIDKKPFKLVAVALANKMARIAFAILRGKTVYREIPA

SEQ ID NO: 77002 - protein, 331 aa, unidentified
MEIKEIIGIDVSKLTMDCCHHSSGSYKEFDNNIDGIASMVSWSLQVSVVSKNKLLFIFEHTGLYSDQLIQFLGSGNYLFNVVPGLEIKRSLGIARGKDDRADAKRIALYGHRVKDEVKPFQIPSKTLDTLKRLMSMRKKLVTQRAGYIALLKEQKRVLSKQHNKVLFRVHQKMIITLDKQITIVEQEMKHLIEEDSELQNLYRLITSVKGIGGVTARFLIVYTTGFKSFETWRKFASYCGIAPFPYRSGTSIRGRTKVSHLANKEGKSLLSMCAVSAIQSNPEMKAYYNRRIDQGKNKMSTINIIRNKLLARAFAAVQRGTPYVDTMKYAC

SEQ ID NO: 77003 - protein, 419 aa, unidentified
MSFKILKNNCCGLDVHKTWIYACIGITDSFKRTEYKQARFSSFTKGLQELCLWLAKYNCIDVCMESTGKYWIPVFNVLEKNNIFVTLSHPKYTKPQKGNKTDRKDAKWICDLYMCGMVKPSFIPPADIRQLRDLVRYRFKLTCMITGEKNRAHNCLTVSNLKLDDVFSDIFGKSSRSITEQILQHPGEVFDVAPFVDSRCKTPIEEIQAAVDGAISHEQAVKLRQCLKHIDELEMHKAEIEREIFRLSQKYESVLELIRTIPGFDKNPLTAIQVLSEIGADMSVFPTAKNLVSWAGCCPRNDQSSRKIKSTRISRAGSYFKPVLVQIANALIKSKKHPEFTTRYRRIKARRGHKKAIIAICRMILTAIWHILTDLKPYTPEGFLESRPVNKEKVLTISQALNLIKQRGYIIKDDVGPVT

SEQ ID NO: 77004 - protein, 390 aa, unidentified
MEVRLVHNTPSAALDSEAAQCVFAIELSKANWSIGVQKPTGGKIGRYVLNAGDAKGLLELIHRICAREARKLGRPVAAVSCYEAGYDGFWLHRVLEADGVRNYVLDPASLQVNRRARRAKTDRIDAERMVRALLAYLRGDPEACSVVRVPSVIEEDAKRLERERDRLIAERIQHVNRIKGLCALQGVYDYEPLHRGARTRLENLRTRDGRLLPERLRAELIRELERLELVVKMIAVVEAERNAIVAGEADAPAHPHAGKVQALAKLKGIGPGFAMGLSGEVFYRNFANRRELASYVGLTPAPFRSGAVDRDQGITKAGNAKARSLMIELAWMWRRHQPGSALSGWFRERVRDQRGRPRRIAIVALARKLLVALWRYVEVGLIPSGAVLKG

SEQ ID NO: 77005 - protein, 345 aa, unidentified
MNATTVAVDLAKNAFELAGADGNWKVIEKARLTRSQFARWFDNRAVQLVVMEACGSAHHWARTLRARGIEVRLLPAQYVRAYVKRNKTDAADAVALLEAARATDIKPVAVKSIEQQALQALHRMRSAWMATRTGRINMLRGFCREFGLEVPVGAVRGIAQIARFIADDRSAIPAILRTPMRLALEEIRLMEARIEQVERELAEIARRSPACAALTSVPGIGLLTSTAMLAAVGDPKSFNAGRRYSSFLGLTPREYSSGGTRYLGRISKRGDRYIRMLLTHGARSVLRAATVARRAGRNVDRLRSWALAVQDRTNHNKATCALANKLARIAWAVWVKHERYQAAPA

SEQ ID NO: 77006 - protein, 330 aa, unidentified
MTTNPPQIVFNHILAFEVSKEQLLVHTLPADEQCAIDNKPQAVRRLIKAEIKRNRNKQLGQMLVVCEATGGYERHVLDAAVEMGLSVHRAHGTRVRHFGGYCGLLAKTDPIDARLLAQYGLKTENIRLYSPPPPETAALRALHARRTEIQQMLIAETGRLDHAQHKNVLKSLRDHIASLKAALAAIEADIAQLVEKCEVLRKKVALMQTVIGIGPISAMVVLAYLPDIGRLTRGQAARLAGLAPINNDSGKKRGARHVEAGRTAIRRALYMAAGVAMRTNPVVKAFADRLRGKGYPFKYVVTAVMRKLVVILNAVLRDGQSWRGAQVALV

SEQ ID NO: 77007 - protein, 353 aa, unidentified
MIIIGVDFHPEFQQIASVDTETGEFQEKRLAHREDAETFYRALAGQKVRVGMEASGHARWFERLLAELQFELWIGDAAEIQSKRVRKQKTDRQDAQLILRLMLKDDFPQIWVPSWENRDLRQLLWHRHRMVQVRTRIMNQLQALALNEGLRCKKRLWREHGRRQLESFRLAPWASRRRRDLLELLDRLNPTIAELSQAIEQEAEKCPEAQRLMTHPGVGPLTALAFVLIIGKAERFQCGKQIASYLGLVPLEKSSGNRRRLGHITKQGSSMVRFLLVEAAQVTVRSLPEWRRKYVQLMMRRGRKIAKVAMARRLAVALYWMWRKGWNYEQSKSSVRTRASSEQAMVCSRTPSN

SEQ ID NO: 77008 - protein, 320 aa, unidentified
METEKVYVGIDVSKDTLDVAVHASEQRWRFANSDKGITEALSCLEELCPTLVVLEATGGMEYPLAAALAVAGRPVVVVNPRQVRDFARATGRLAKTDAIDARVLAHFAAAMHPPTRPLLDTQGQELKAILARRRQLIEMLTAERNRLHSARSKAVKANIQAHIAWLEKEMTHIDHDLGHSIRQSPVWQEKDDLLKSVPGVGPVLSTTILADLPELGLLDRRQIAALVGVAPFNRDSGHIRGQRAVWGGRAVVRSALYMATLVATRYNPIIRDFYRHLLLAGKPKKLALTACMRKLLTILNAMLKHKTPWHYPISGTLQTS

SEQ ID NO: 77009 - protein, 354 aa, unidentified
MIFKGHKLTIGVDLGDRWSCYCVLDEAGEILLEQKVATAPEAMKQIFEKIPRSLIAMETGTHSPWVSRLLTELGYKVIVAHAQKVQLITKSNRKDDRHDARTLARLARIDPELLGPVRHRSAQAQIHLTVIRARAELVRARTALVNAARGLVKSYGQRLPKCGTQQVSRELGAGLHAELREVLEPLLQEIESLNERIKEYDVRMEKIARESYPQVELLKQVKGVGTQIALTYVLTLEDPHRFPKSREVGCFLGLRPGRRDSGESQPQMRISKEDDRYLRTMLVQGAHYILGPFGEDSDLRRWGLKLAARGGKSAKKRAVVAVARKLAVLLHRLWVSGEVYEPLRNSKKAMSTAA

SEQ ID NO: 77010 - protein, 342 aa, unidentified
MEISTIGIDLSKTTFHLIGLNPRGEIVLRRKLSRKQLLIYTANRSPMLIGMEACGGAHYLARALRDQGHDARLMPAQYVKPYVKTNKNDYLDAEAIAEAVQRPTMRFAPIKNNEQLDLQALHRVRDRWVARRTAVMNQIRGFLLERGIPIRKGPSHLMTQLQIIFADGDSSLSGRLLHLIRELKEEWDELERKIEEASAELTRIAKQDDGCHRLMEVPGFGPIVSTALVAAIGNGISFRKGRDLAAWLGLVPRQHSTGGKTRLLGISKLGNEYLRRMMLHGARSVVMQMERKPSALGEWLADLSARSHRNVTVVALANKMARIAWAILSKGTHYCAPAFVAA

SEQ ID NO: 77011 - protein, 347 aa, unidentified
MRFYTTQHPFYCGIDLHARTMYVCILSQSGEVLVHRNMKTDPDTFLHVVAPYRQGLVVAVECLFTWYWLADLCADEGIPFVLGHALYMKAIHGGKAKNDKIDSQKIAALLRGGMLPQAYVYPARMRATRDLLRRRMHLAHKRAELLAHVQNTNSQYNLPAIGKKIAYKANREGVAERFADPAVQKSIEVDLALITYYDELLRDVELPIVKTARHHDANTLHLLQTVPGIGKILSLVLLYEIHDVHRFPRVQDFVSYCRLVKCARESAGKRYGTSGTKIGNAHLKWAFSEAAVLFLRDHPAAQKYLARLEKKHEKGKALTIRAQKLARAVYHMLTRQVAFDREMFFQR

SEQ ID NO: 77012 - protein, 438 aa, unidentified
MGSYAGVDWASEKHDVLIEDELGEELFAGSFAHDEAGLRSLCRALVRHDVQLVAIERPDGLLVERLLDAGLRVLALHPNQVAATRARFRAAGGKSDRFDAFVLCELARTDSHRFRVLEPDSDQTKALRALTRAREDLVQARTTLSNQLRAELERFWPGPIGLFSALDSPISLAFLKRYPSPKDARSLAAKRMQAFLASQHYSGGKQPSELVAKLRCAPDGRAGEQETDARRTIVLSLLAALLPIVAQIKTLERQITTALREHPDGEIFRSLFKGPDSVVTAATMLGEIGDCRARYPSGDALAGDAGQGAVAVESGKRKVACFRWACNKRLRDAFCTLADSTRHWHPWAQALYADALTRGHDHPRATRSVGRAWCRVVWRCWQDRTPYDPARHRALQQRLTVIIPATAGPVLDHLATARMAAGLLATNPADSPKVSASQ

SEQ ID NO: 77013 - protein, 421 aa, unidentified
MKGLRTKRVRAVKEGTLIATVDIGVASNTGYCTTLDGRSTKSFRFDNTKEGFEKFWCMTIASKNRFGCDEVVVGYESTGPYAEPLVHYLASKEVKVVQVNPMHTKKMKEVNDNSPLKTDSKDPRVIADIIRLGRALSIVVPEGDAASLRRLNNARERHVGEQTALLNQLQQLVFLIFPEFKTVLKNVKSKTAQHILKRYSTPERIGGLSKEALGEQMRKWSMGKFGIKEAESLIGLARETVGIKEGLAGIFLDIRHILMQLEAEVRFISEIEAEMGATLDRIPYSVRLLSIKGLGAVSVAGLIGEVGDFSKFGTQSEIMKLAGLDLYEISSGKRKGQRRISKRGRSLLRKILFYAAIQMIRKNGIMYDYYARLTGRGMERMRALIAVSRKLLRIIYAIVRDNTDYVGEYQVPQRMVIKKAA

SEQ ID NO: 77014 - protein, 443 aa, unidentified
MSFDRLKRTQSRKRLPGHKLKPSRATLFVQNSKPHLSMKPTYFLGIDAAKHKMRAVLSNRSEHVLFEEDLSVQATGLRQLLAAIKRQVNDPQQLLVLIEATGLLHLNWSAALTKAGYAVAVINPLIARRLYTLQNSIRDNKSDPIDARGLCTIGLLHGEKLLVHYRFSLRPEQFRLQRAQSVRKALRSALTNLKKTYQSLMDLSFPELGGLLQLDGVGIRQLLIQAPTPAAIAGKRLSNLEKNWMVRPKAAALKALAADSMADPDLAAASGPALVALLQSVAAMEARLHALDQQIAKLACTSVDQKTKALIETIPGFGPVNAAKTLAWLPTEILHSGSNRKVAARLQAFMGNDPRLRQSGQWKGHTKMSKRGVEMLRTAFFQSAFSAAHNDPELRTYYQCKRAQGKTHEVALSHLMRILTRRLVAVLRSGKPYQSHYNLKNAA

SEQ ID NO: 77015 - protein, 343 aa, unidentified
MLTITTIGLDIAKSVFQVHGVDAGGQAIIRRQLKRRYVLTFFQKLSPCLVGIEACASAHHWSRELQALGHTVRLMPPAYVKPYVKRQKNDATDAEAICEAVTRANMRFVPTKTPEQQSGLVLHRTRHLFIRQQTSVINAIRAHLAEFGIIAPVGRRGVEELLNVVADPNDRRVPEIARACLSALGAQLRRMKEQILEFDRLIRAWHRSNEMSMRLEEAPGVGPVLATALVAAVADPKSFRSGRNFSAWIGMVPKQHSSGGKNRLGNISKQGDRYLRGLFVAGALSVIRYAKIHGTKHRPWLTALLARRPTKVAAIALANKIARMVWAMMARGQRYKEPVALAR

SEQ ID NO: 77016 - protein, 314 aa, unidentified
MKITTVGIDLAKNVFQVHGIDERGQAVLRKQLRRAQVAVFFGNLPPCVIGMEACASAHHWARTLQRFGHTVRLIAPQFVTPYVKTNKNDVADAEAICEAVGRPNMRFVPAKSIEQQAILSVHRVRQGFVKARTAQANQIRGLLGEFGLVIPQGIINVAKQVPEILEDASNELPVPFRHLIDRLTKHLKELDRQVKEFEREIIAWHRSSELSRKLEKIPGIGPLAASALVASIADAHSFDNGRQVSAWLGLVPRQSSSGGKPTLLGMSKRGDAYLRTLLIHGARSAILAAKNKVDNTPGGHPNSSTCGHLKIPHP

SEQ ID NO: 77017 - protein, 349 aa, unidentified
MRTFTPPAGTRFYAGVDLHARALFLVILDDDGQVRFARNLAANPDAFLRAVAPFRDGLLVACECMHCWYWLADTCRDEEINFVLGHAWGMKAVHGCKTKCDRKDAEAIARLLKGGNFPPAYAYPKERRGLRDLLRARLRLVRQRAHLYGHVHTARRQANLPPVSSDVKYKCKRAAITADIADLCVRRRVETYLALLEPLDTAIRRLEAEIEDAARQHFPTELAVLQSTPGVGAVLSLTILLEIDTIDRFDTRQQFCSYARLCGAVQTSDNKRTGEGNRKAGNAWLKWAFSEAAVLSAQKDERVGALLNRLASKLGKAKAYSALAHKLGRAFYHMLHTREVFDVHRFVRR

SEQ ID NO: 77018 - protein, 346 aa, unidentified
MPIVGGLDIHRKQITFDYVDTITGEAQRGQIAPADRAHLAGWLARRFAGQDDVEFALEGCTGWRYVAEELSAAGVVAHVGEPTDTAALRGRKRHAKTDRTDAGHLRQLLADGRLPECWIPPSHILECRALLELYRDLRVEHTAWVQRIHAVLFHQGARQLGAGGLHTEQGLSELRAIAATQLSAAGQLQVATALDMLATLEEHLATLHRRLLHAARHLTGAKVLTAQLYGVGPITALALTCWLAGAGRFSSTRKAVRFTGLDVTVYSSDGKRSPGHLSRQGPAVLRWCVYEAGKTHARTTAPDHRYYAQVKQRIDGKRAAISEARKIVRQAGHILTELGDDALAAA

SEQ ID NO: 77019 - protein, 382 aa, unidentified
MTIDRFFRQCVGIDISKDKFTACLYMYDRASDEGCCTQSIDFANTKSGFNQLVRWSRKEAVKGFPLTYLMEPTGVYYESLAYHLHKIGWTVYVVLPNKARKFCEAEGIKTKTDAMDARCLALMGCVSCKLKPWSPPAPIYQELRQMTRFHADLCRIRTSVSNRMEALDHMESAEKSVRRNCEKLLDEIDRLMEKNGKAIMQKVAEDKELEQKVKRIATAKGLGETTVVCVIAETQGFHLIENRKQLVGYSGLDVKAEQSGKEDPRHHISKKGNAHIRAALYMPALVAVRYNRQIRDAYGRICQKHPNEKIIGVTAAMRRLLLLIYTLWKNGEKYDGNRDKTHTQRKKEPEPEYGPDDCIGPSTEPVDRVDWNTKDGDGYPPF

SEQ ID NO: 77020 - protein, 378 aa, unidentified
MPDVTACLDPGDVRLWVSLDVHKFSIVAATLPPAGGKPELSRIETTERAIRRFIDRLGGPEGLAVCYEAGPGGFALWRLLTSIGVACDVVAPSLIPVRAGDRVKTDRRDAKKLVALYRAGLLRFVMPPTAELEGLRDLLRCRDDIRCARTAARHRVLKQLLRHGRIFRDGRTAWTLKHRRWINAQRLDDPLARLALGQMLIHLDGIERQLDTLDAELEQIAASERWGGQVQILTRFRGISTLTALGLIAEIGDFARFSHPRELASWLGITPSEYSSGDQQHRGHITKAGNRHARRLLAEAAWHYRHAPRRPATGPPPDERAWQAQIRLHHRYRHLTEHGKRSTVVNVAIARELVGFLWAAMTDQPLTTRDQQPQEAAA

SEQ ID NO: 77021 - protein, 346 aa, unidentified
MQHYVGLDVSLKQTAVCVVDQTGKIKREAMVASDPDAIAQFIAAHAPHAARIGLETGATSTWLWTELNKRGLPVICIDARHAKAALKMQINKSDRNDAAGIARIMQCGWYKEVRVKALDSHAVRALLSSRALLVQMKRDLENQIRGFLKNFGLVIGRAKMNTFTAKTVELIDGQPLLAAAIEPLLKAREALARQIAGFDTKLLRLARSEPQARRFMTVPGVGAITALCYLATIDDPERFKKSRSVGAYVGLTTRRYASGETDRTGRISKCGDSMLRCYLFEAANVLLTRVSRWSSLKAWGMRIAKRTSLNKARVAVARKLAVILHRMWIDGSEFCWSAQEPALQAG

SEQ ID NO: 77022 - protein, 387 aa, unidentified
MMYCGIDVAKLKHAVSLMDEKGEIVKASLTISNTRAGFDQLHAELQALGGAITVGLEATGHYWLALYDDLTRNHYPVIVLNPLQVAAYRKSGIRKIKSDASDAVWIADYIRIATLPPSEQNLPVFLQLRELSRFRFRLTEQVGDLKRKLLTILDRVFPEYERLFSNVFLHASRAVLQEAVSAQEFADFDLQELAQVLAEASHGRFGLEKAEKLQAQARQSVGIAFLTDAVHLEMRCFLAQLELLDSQRAEIDLAIAELMQQIPQHITSIPGVGPVTGAAILSEIGDIRRFETLDKLVAYAGIDATVYQTGQFQASEAHMSKRGSPYFRHALWLAATAAVLHDPSLKAYYQKKRDEGKHHGTALGAVCHKLLARIFVVLKEKRAYVIR

SEQ ID NO: 77023 - protein, 345 aa, unidentified
MKYFAGLDVSLEETAICVVDEAGRIVKEARAASEPQALIEALQKVDLPLERIGLEACSLTAWLHDGMCADGLPAICIETRQANAAMKTMPNKTDRNDARALAQIMRTGWYRQVHVKSRQCRLWRSLLVARRTVLNEMRTIENGVRAILREAGIKLGTPSRTAFASRVRELADTDLVVMPLVEPLLMILATMLREFGRLTKQVLIIARQEQVCRRLMSVPGVGPITALAFRATIDQPDRFRRSRDVGAHLGLTPARYQSGETDIQGKVSRCGDELARTALYEAAHSLLVLSKKWSSLRAWGMNVAKRRGMARARVAVARKLAVILHRMWSDATEFRFGKEPGRVSA

SEQ ID NO: 77024 - protein, 402 aa, unidentified
MNAVGIDVSKSKSVVAIMRPFGEIVSTPFEIKHTASDIHSLIELINSVEGESRIVMEHTGRYYEVLAHQLLEANLFVSAINPKLIKDFDNDSLRKVKSDKADAVKIARYALDKWQNLKQYNVMNELRNQLKTMNRQFGFYMKHKTAMKNNLIGILDQTYPGVNTYFDSPARSDGSQKWVDFASTYWHVDCVRKMSLNAFIDHYQNWCKRKKYNFSQSKAEEIYGKAKELVPVLPKDSVTKLIIKQAVDQLNSASTTVESLRTLMNETASKLPEYPVVMAMKGVGTSLGPQLMAEIGNVSRFTHKSAITAFAGVDPGVNESGSYEQKSVPTSKRGSSDLRKTLFQVMDVLIKTHPQDDPVYQFLDKKRAQGKPYYVYMTAGANKFLRIYYGRVKEYLASLPES

SEQ ID NO: 77025 - protein, 341 aa, unidentified
MQDVTLVGIDLGKHSFHLHGQDRHGKAVFRKKVSRKQLIEFFATFHACTVVMEACAGAHHMARKLASFGHQVKLISPQFVRPFVKSNKNDFVDAEAICEAASRPAMRFVTPKTESQQTLSALHRVRDSLVRDRVKAVNQIHGFLLEFGISLPVGNAIITRLPAVLAEHSLPPSLVAILERLHVHFKYLSEQIGEIDKELARQLADNEFGQRLLTIPGVGPITASVLAAEMGDGKQFGCSRDFAASIGLVPRQYSTGGKANLLGISKRGDKKIRRLLVQCARAYMQRLERQSGPLSDWVRAMLARRHSNVVACALANKLARTAWALVTRNTTFNAGSAAMPA

SEQ ID NO: 77026 - protein, 341 aa, unidentified
MKRLYYIGLDIHKKTISYCVKQVDGKIVQQGVIAAERKTLLKWMEGLPGEWLGAMEATMFTGWVYDFLKPHAVELKVAHPEMLKAITAAKKKNDRADAEKIADLLRVNLLPECHMLSQELRELRRILRYRNMIVRTGVKMKNKISGLLMDVGATYDKAKLHRRKYFSNLLERVEDIPESVKEMLRLSRSSLEMFEAVQRKLINTLREDNLIHERVERLMSIRGIGEVMALTWVLEIGEVSRFSSARQAISYCGLCSAQRESAGKEQRGPISKKRNKHLQTMLIEAAKLAPRWNPQLAALHEKEVNQGHRNRATISVARKLVEYMLAVERQQRDFVPSELAA

SEQ ID NO: 77027 - protein, 418 aa, unidentified
MQNQYAAFVAIDWADKKHAFSLQVAGQRKKETGTLEQKPEVIGPWINKLRERFGGRQVAVAVEQSRGALIHALLSYDFIVIYPLHPVTVAKFREAFKSSGAKSDPLDTEQILQILTKHLELLRPLNPDTQETRLLARLVEDRRKTVELRTSQIEALGACLKEYYPQAIEVLSGNLSTRLAVDFLKKWPTFEAFQQTKEGTLKRFFYGHNVRSPEAIKKVLAAAKSATALTTDPAIVESGSRLAQMYAQLIQTLNPIIQNYEERIEKLFRAHPEAHLFEQLPGAGPAMAPRLLAFFGTDRARYETANNVHSFTGIGPVTRSSGSTKSVYMRRACPKFDRQTFHEFARLSVVKCQWAANYVEYYTTKGKKYHAIIRALAFKWIRILYRCWQNRTPYNQNQYMATLAKRGSIFATLHLKTS

SEQ ID NO: 77028 - protein, 376 aa, unidentified
MGKCIIKARRFVGLDVHAETIAVAVAETEGEVRALGVIPNRLSSVRKLVDKLGDVRTWRACYEAGPTGYALYWQLTKLGVECVVVAPTLVPVKAGDRVKTDRRDAERLARSFRAGELTPVWVPDAAHEALRDLVRAREAAKADQLRARHRLGKFLLRHGRRPSQPLRAWTERHLDWIRREVKFEQCAQQATLEDYLAEVDHLAQRIVRLEKAIDEAVEGAPESMKALVSALQALRGIAKMSAVTTVAEVGRLSQFAKARQLMGYSGAVSSENSSGERTRRGGITKTGNAHLRRVLVEAAWCQRHFPSLTRTLRKRQEGLPAAVVEIAAKARHRLSARYRRLLARGKPRQQVVTAIARELLGFVWAIGVEVERTTAA

SEQ ID NO: 77029 - protein, 348 aa, unidentified
MMNLYQTQHPFYCGIDLHANEMYACVVDQDGKKLLHRNFKTRQPEKLFEQLEPYGSDVVVGCESTFNWYWLCDACEEKKIPFLLGHALYLKAIHGGKVKSDKIDSEKLARLLRGGNFAVSYAYPSRWRATRDLLRRRGHFVSRRGETLAHLQIVNHQQNLPAFPKKLQYKSNRQGIAERFSDPAVAFSVETDVAMLDAYDKIIRDLERFLEQSAKIHDANNFYLLKTIPGVGKIIAMTMLYEIHEIKRFPEVGDFLSYARLVRGSHTSAGKNYGSPGKKMGNRYLKWAFSEIVPLIKRQSPEVKKFLERIEKKHGKARAHSTLATKLGRAIYFMLRRGETFDIAKLLR

SEQ ID NO: 77030 - protein, 387 aa, unidentified
MPAPAPGPAQAAIDVNLAAIFVSLELSRSTWLITSLSPGGGEKMSKRSVRSGDVAGLLLQLARLQEKARVRTGKTFPVIVVQEAGLDGFWVHRVLEEEGVGSHVVDAASILTSRRRRRAKTDRIDGEALLRTLLAYKRGEPRVCAMVRAPSPREEDERRLSRERGALVAERVRHVNRIKGLLFAQGVCDYEPLRRDRRRRLEGLTTGDGRPLPPRLKRQIGRELDRLELLLEQLEAVEAERDALLAPEGEAPPSSAAALAGLRGIGPELAAMLWLECFFRDFGNRRQVAAYAGLAPTPWQSGAVRHEQGVSKAGNPRVRTAMIQLAWLWLRHQPTSALSPWFRERVERDGGRGKKTSIVALARRLLVALWKYVRDGVVIEGAVMKAA

SEQ ID NO: 77031 - protein, 488 aa, unidentified
MSKLDICMTGLALTFTLYATGVVCMPSKKTPKKRELDELACVFPNAAGLDIGSAEIVVAVPPDRDVEPVRVFQTFTPDLHALVAWLVACGIDTVAMEATGVFWIPIYELLEAAGITPYLVNARHVKTVPGRKTDWNDAQWLQKLHALGLLQASFRPDGEIRTLRTLVRYRAELIERRAPHINHLIQALKHMNIQLNLVLADITGKSGMAILRAIVAGARDPQQLAEYRESGCKHSEAEIAKALTGSWDDAQLFILEQALAIFDYYTTKIAACDAKLEQQYQAMESRAEKDAPLPDLPPAKPDSKSKNALTFNARAQIARVVGVDLVAVMGLSAVTVQTIISEIGTDMERFPTVKHFCSWLGLAPHNDKSGGKVLRSRTMKVRNRANQAFRQAAQSVAQSHSSLGAYYRAMRRRLGPRQAIVATAHKIARTVYHLLKTHQPYREETAAEYDRKRRERELKHLARRAQKLGYSLTVVPVTTPESQTEPVG

SEQ ID NO: 77032 - protein, 345 aa, unidentified
MKVVYPICCGVDVHKTFLVATIITSQGITPHYSKKRFSTFNNSILQFKQWLIDNNCFDVCMESTGKYWVPVYNLLEDTIRITVANPKWVKAVKGNKDDTKDSKWIGDLFRLGLVPGSYIPNKPIRILREYTRYRSKLVSCKSSEKNRFQNAFTVCNVALDAVVSDMFGKSAASITDYLISSDSFDPEYCTSLLQKSLKKKADIVVESIEGYQMTQAQKERMVMVRSHLDFVTKSIAELDEKLDKMVEPYESAISLLCTIPGVDRTSAITIISEIGTDMSQFASSKRLCCWAGLTPGNNESAGKKKSVRITRAGVYLKPALVQVAHAAVKSDKSPYYKIKYERIYK

SEQ ID NO: 77033 - protein, 457 aa, unidentified
MSAPKKVKKKSSNKANTQLPTLHSHAAGIDIGAAQIQVAVPCDADAHPVRTFSTFTDDLHAVRDWLLQCGVQTVAMESTSVYWIALFQILEAAGLEVCLVNARHCKNLPGRKTDISDCQWLQYLHSVGLLRASFRPPEQVCAVRSLLRHRATLTRYAGSHVQHLQKALTQMNLQIHNVISDLTGVTGLAILEAILAGERDPQKLAALKDHRIKASRDTIARSLQGDWRPEHLFVIQQALATWRHYQKLIAQCDDQIQRLLARFDSKLDLIQHPLPPSRLGHKKPQRNEPDFDARSELYRLCGVDLTQVPGIQINTSLVLFTELGPDFVSRFPTAKCFASWLGLCPDNRITGGKIISVKTRDVKSRAAQALRLAAQSLWHSQDYLGQCFRRWKARLGTPKAITAMAHKLARIIWHLIKYRTPYNPSVWSLAEEKLKKKKLKYLQQTASALGYKLLCTA

SEQ ID NO: 77034 - protein, 326 aa, unidentified
MQVYKVSSDGVVSNKAVKRADFLNEFRNIPPALIGMEACGGSQHWARELQSLGHTVRLMPPKLVKPYVTGLKNDKNDARGIYTALEMSVREVPVKSAAIRDLALLQTMRAKRQREKVAKINHIRGILTEYGLVMGKSLNAFLAKAGSLIVELKDRADVSPYVVSELIALFEEVKEAIAKIKELETNIESIAKTLKQYDLFRSAPGVGPITAATMLVLLCNPAVFKNGREFAAYIGLAPKSSGSGGKNFVTHIPKKCECNNEVRTLLVQCAHSICRCRHKSDWVSSILARKPKKVAIIAIANKLARQLWIMAKKGEKFEKRFILAAV

SEQ ID NO: 77035 - protein, 483 aa, unidentified
MINPLRCVSHYLTERSSMTEKPGAGQGKTTKKFRGKKTDFELINPDAAGIDIGSEEHWVAVPEGRDDHVVRKFGCFTSDLHEMAEWLKHCGVKTVAMESTGVYWIAPFQILERHGFEVKLVNARQARNVPGRKSDVSDCQWLQRLHTYGLLSGSFRPEDQICVMRSYWRHRDNLVRYASSHIQHMQKALTEMNVQIHKVLSDITGVTGMRIIRAILSGERNGERLADMRAPGVKRTKEDIVKALEGDYREEHLFALQQAVELYDIYQKKIHECDERIEGCLNGFDGQAVIEPCKENNPLAKKSRHRVRKSENNIALRTELYRITGVDFTEIDGLDVLSINTILSEVGLKPEAFPSAKHFTSWLGLSPNNRITGGKIKSSRTKHVLNRAATAFRIAAQSLANSKSALGGFYRRIRARLGAPKAITATAHKLARIFYTLWKTKQHYADIGAEYYEKQYKERVVRSLKKKAQELGYTIVLQEAQVS

SEQ ID NO: 77036 - protein, 338 aa, unidentified
MGTIYIGMDMHKSFIQAAAMDEKGTIVAEERIGTEAEDIGRFAGMFSGMEIKAAIEAPCAWHNIYEILESLGIETVLVNSRRTKAIAEAKIKTDSLDAKTIAHCLRTGFIAKSWIPPKQIRDLRCIMRHRLSLGIEITRYKNRVHSILLRNGIKHEYSDLFGKAGMEFLESLELQGAELYRLQSNLNIVKVLEAEKKSVAKKINQLCKADEQAMLLTSIKGIGYYSAMIIMAEIGDMQRFPNPKKLCSYAGLVPRTMQSGSHVYHGRLIRECNQNLKWILNQCAHVHNRRCRDSPIARVYYRMVRRGKGSNKATVAASRKMLTCIWHMLTKGEEFKGR

SEQ ID NO: 77037 - protein, 355 aa, unidentified
MSQKLESTIAVIGIDIGKHSFHVVGHDERGAIVLRQKWSRGQVDARFANMPPCLVGMEACVGAHHLSRKLNSFGHHARLMPAKYVRPYSKGQKNDFRDAEAIAEAVQRPTMKFVATKTAEQLDLQALHRVRERLVSQRTGILNQIRAFLLERGIAVRQGQRFLRAELPCILATPPDVLSPRIVRIIEDLAGDWRRLDERVEGLSNEIETIARQDAGCERLMSVPGIGPIISSAMVAAIGAGDVFTKGRDFAAWLGLVPKQISTGDRTILGKISRRGNRYLRVLFVQAAWVVLVKVKPTRWGYGLKRWIEAAKKRLHHNVLAIALANKLARIAWAVLAKGRAFELTRTDDAGVRPA

SEQ ID NO: 77038 - protein, 396 aa, unidentified
MKKNHTSPPAPQGRVIGLDLHPDVFSAAALAGRDAATAQVEQSWDRLRTAELEKWARKLQPGDVVVLEASGNSFTAVERLRAAGVPAIVLESQRAGQIRKSYCANDRLDAVKLARIYLSGLAQPVWTPDETTRARRETLATYRKAVVTAVRVRNRLKSFLSDHHVRLGNGAQLTRDSGAKAVLAAAPWSSLQRMVLEEMLAELRMAHDRRQRLSAAIAREVAAYPRILQLMRLLGVRHIIAFAIMAVVGDIERFANPRKLVAYLGLTPSVEDSGLTIRGRGALVSAGRGDLRSLLTQAAQNAMNQKASPLHAWGWKLCLRKGHRNIAVTAVARKLTVSIWYLLKGLFRPLASVDDSLKVKLTKLATAIGLPAIRELGFKSKAAFIEEKEAWLLKPA

SEQ ID NO: 77039 - protein, 381 aa, unidentified
MRREWTDEQFVGGAFSSGYSFTGRDRPSTPWDTKPVGELGSSRHFLNNPNSCQSLFKSSHLARPGKGEMMSERKYVGIDVDKINLEVAFDPEQPKKSFPNDKGGFKALIKLFQESAVDQVVMEATGGLQNPLAVALARRNIAVAVVNPRQVRNFAKAMGYLAKTDAIDALVILKFAEAVKPEPRPVKSKQAQQLTDLIARQEQLVQMLTAEKNRLHTANKSVRKDIEVHIKWLKRRMKDIDNELRRRIEDSPIWRVKDDLLQSVPGVGPKTSAKLIASLPELGNLNRRQIAALVGVAPFNRDSGSFRGRRTIWGGRAQVRCALYMAVLSATKHNPVIRAFYQRLLEAGKAKKLALAACMRKLIVILNTMMKNQTHWQTTRT

SEQ ID NO: 77040 - protein, 373 aa, unidentified
MVEHTTTYVAFDNSKETLAVAIAEGGLRGDVRFWGTIPNRADAVRKLVERLAAKHPTLSFCYEAGPCGYGLYRQILSLGHPCKVVAPSLVPTKPGGHIKTDRRDAKMLAALFRAGELQGVWVPDADHEAVRELVRARQTAMQEVRRSRQLLLSFLLRHDRATPTRHHWTRAHRSWLARQSFAHPAEQVVFEELIQRIEVAAARQDRLEDAIRKLLPAWSLAPVVAALQALRGVAMLAAVTLVAEIGDFGRFASPRQLMAWLGLVPKEHSSGRKVARGNITKAGNTRARRVLVEGAWTYRLPARMGEDITRRNEGLPQAIRAAAWKAQTRLCARYRRLQHTGKPQNVIVVAIARELAAFVWSIARMVQPPIRSA

SEQ ID NO: 77041 - protein, 351 aa, unidentified
MTVIIGVDPHKATHTAVAIGDDEGELGTIKVRATRKQVPQLLAWAEPFAKRTWAIESAAGLGYLLAQQLVDAGETVVDVPATLASRVRLLGSGRSDKNDPNDARSVAVAALRAPALREVQAVDHGEVLRLLAKRNLDIGSHRTRVVCRLHAAMAGLTPGGMAKELNGSDADAFLELVTPMTPVEHVRLELARELLVDVRRLDVQLKESHARIRLAVTASKTTLTDIFGVGPILACALIGYTRDVRRFRNRDQFAAYNGTAPVEVSSGGRVTHRLSRRGNRRLNHSIHMAAVTQIRHQHSEGRTFFDRKIAEGKTKKEALRALKRQVSNAVYRQLLIDAAAAGPGGQTGATL

SEQ ID NO: 77042 - protein, 346 aa, unidentified
MLHAGLDLSRRKVDVCLLSTQGEIVDEWASPPDADGLRGLAARAAMRGPAVRGVIESMNGARFVHDRLEEHGWDVLIADATKVKGLAPLACKTDKIDARVLATLSARDLVPEIWLPDPSIRRERELARFRLHLVRHRTTLKNRIHAALIAFGHPCPVSDLFGHAGRELLNRLTIPDPWRRNIEVSLRLIDDLELQIAQLTVQLKRQGADHRYIPLLVTAPGLGWINAFTVASEIGDIGRFASPAKLCGYTGLCPRVIQSGASDRRGPISKHGPKYLRWALFEAALNACKHPYYAERYQHTKRRLGRQRGPKVAQIDLARRLTEAIWHMLTRNQPFAPAGAPFRLAA

SEQ ID NO: 77043 - protein, 349 aa, unidentified
MHSTTVAVDLAKNVFELAVCDADGTIGERFRLNRARFSAFFVHREPCRVLMEACGSAHFWARRIAAHGHVVQLLPAQYVRQYVRRNKTDRADAAALIEAARCAAIRSVPAKSLEQQQVLVLHRLRSQWQSTRQRYLNTLRGLLREFGIAVPLGAQVARTRIAHYLAQPPQELPAAIPPLLVQMLSEVKELEQHIEQIERELKTLTRTDPVIQQLRQIPGIGLLGSTAIRAAVGDVQRFPCARSFASWLGLTPREYSSGERRRLGGISKRGDVYLRTLLIHGARSALLAAHRRQRTGHPLDHLRQWALQCERQRGHNVATVALANRLARIVWATWKHGRAFDGNWACAAY

SEQ ID NO: 77044 - protein, 427 aa, unidentified
MHNTTVVPFPASISAYAVVVAFDVGMDELHYHARFLDQVVEDMLPNNTRSIEGGLLALQDKARRAGCNQLVVTVEPTGIYHQLLLDTALRLGMKTAFVNAEVVAKLRMLESNDLNKTDIKDPRVIALVSSLGKTIKHRVLQEPHELMRHYHKLYNKAEVAAVESKCAIHKHLKTLFPDFGFKKEFTFGKSGRALLKGFGFNPYTIVQAGQSVFAAEMKKLAPKIQHKSINQLFIQAQASAARPIPQRVHQVYELALRQSFEDLVINENRKSETKNALEQLYDEVRALDPKLPPPQPGVVAKLSLARFIAETGPLSDFESHRQLLRFIGLNLVERQSGKFRGRTKIAKKGRTLARKVADQIVLPLVKRDRLFGTEYHRMRDVQKMPGTKAMTAMARKFVKLLFGWYKSGRAFDVSRVHTCQSKMPKAA

SEQ ID NO: 77045 - protein, 455 aa, unidentified
MARQKRPTTVKVQVNALEQIKPHAAGIDVGAEEVYVAVPPDRDQQSVRSFPTYTADLRRLAEWLKACKIETVAMEATGVYWIPLYEILEEEGFEVYLVNARHLKNVSGRKTDVLDCQWIQQLHTYGLLSPSFRPPEEIVSIRSLVRHREMLVQYRSAHIQHMQKALTLMNVRLTNVLSDISGVTGLKIIRAILSGEQNPQKLATLREPGCKKSEAEIAKSLEGHYKREHLFTLKQALELYDFYDRQLEACDAELEAMYQKFDPPENPGTPPPAPRTKKRRKNQAHFDLAPSLYRLTGVDLTQIDGVDELTVQKVLSEIGTDMSKWPTVKHFTSWLCLCPNNKVTGGKIVQRGVQPTKNRASTALRIAAASLKRSDSSLGAFYRRMRARAGTPVAVTSTAHKLARIIYHMLKERVPYQDFGVDYYEQQFRARAIHNLNRRAAKLGFRLEPNVLEVS

SEQ ID NO: 77046 - protein, 328 aa, unidentified
MMYVGLDVHKRVCYGTVMDGEGRVVKRGRFSNDPEGLEEFMEGIEEALVALEAGYCWQPLYDGLEEAGHDVRLAHPQKVKAIAEAKVKTDKIDSETLAHLLRAGLLPESYVPPRDIRELRDRVRRRAFLVRLRTTLKNRIHSELAKRGMRLGAPLFTREGVELLRGLGLEAVDQMLSVIEALDRQIARISGSLRRMSGEEPRARLLTTIPGVGYYIALLLISEIGDVRRFPDSEKLCSYAGLVPSVKRSGGSTRHGGITREGSRWMRWALTQAVHVHIRYDTNLTRFYQRLAERKTGQEAVIATARKMLKVVYWMLRDMKPYDPWNVG

SEQ ID NO: 77047 - protein, 350 aa, unidentified
MDALNKTKRYVYFIGIDISKETLDIAVMVQGSVLVHNNIPNEPKAIKEHMLHLKASLKFTTRNTVVGMENTGIYGNHVINKLKTLKIDTVVDPPLRIKNSSGLIRAKTDKKDAERIALYLYKSRDILRLRIPRRPIIEQLAGLSALRKRLQSLHIAMRVPLKEHTGFVKKGLIEQNNRLCSRSFDALRLDIKDVEDSIEATWKADEETNRLMTLMQSVPCVGPVVALEILICTNEFKNIRTIRQFASYAGIAPFPYKSGTTIRKKTRVSKIANKKMKALLHNSAVLAKKFIPDIKAYYHRKTDIEGKHKMSVLNAIRLKIAARVYSCIKNNRLYEKIHEYKPAKNLAPPI

SEQ ID NO: 77048 - protein, 421 aa, unidentified
MGKLKIVYPICCGMDVHRDFLVACIASTNAQGVTDYEVKRFSTFSGGLRDLRDWLAERNCVDVCMESTGKYWFPVHNILEAACNVVVSHPKFVKAIKGKKTDKKDAMWIADLFKHDLVRGSFIPPEDIRQLRDLCRYWQKLTWCLNGEKNRAQNCLTVSNFKLDSVFSNVFGKSSSAILEYMLEHPGESFDVAPFVHHRCKSPIEDIQAAVDGAFNPFQAEKLKIIREHMDNLDNLKMLLESLILTLAEPYWHQVKMLLTVPGISEPMTAIRIIAEIGTDMSIFDSSKHLCSWAGLTPQNNESAGKKKTTRIGKAGQYIKPLLVQCALAACNPRSKKHPEILNKYQQLKKRRGSKKARVAIARRLLTAIHQMLLKDEPYSPFVAPASESIPEKRILTLDEGLAMLRRKGFILDCDAAPALT

SEQ ID NO: 77049 - protein, 367 aa, unidentified
MDYTLHHHVGAASPEAAGFQANRTRPVIKIGLDVHALFYMAVAQHDHATPGAPRRFTPEQFVPWVSSLITAGHEVHVVYESCGFGFGLQRALTAAGATCHVISPQALDESRSGVKTDGRDARTLCLRLDRYVQGNRNALSVIRVPTEAEEQRRHVSRQREQLVRHRSKMQAQGRCLLVNHGLPAPAHWWMEQTWSRLIKLLPGWIVPMLEVTRPVLLSLHAQILALSARLEAAAPREAPRGLGKLTTTILGNEVCDWKRFNNRREVSSYTGLCPGEHSSGGKRKQGHVTKHGNPRLRAALVECAWRLVRFQPQYPPVRKRMHLLGKGARATGAARKKAIVTVARHLAVDLWRIHTGQCSAAKLGLQL

SEQ ID NO: 77050 - protein, 360 aa, unidentified
MSAAPAPAPETSTGPDVVIGVDTHKLIHMAVALSANGGRLGSLKLDAKRSGYEELIRWSAEFGRSPVFAVEGTGCYGAGLCRALQLAGLEVVEVNRPDRSTRHRRGKDDTIDAEVAARSFIAGQSTVIPKAGNDLVEMIRMLKVVKDSATDNRTAALNQLHAIVVTAPAALRERLQQLKGKELVECCSGLRSGEIRTPLAAAKMALRALARRIQQLDQELKETLAQLDQLTMQHCPELRNTYGIGVDISATLVVAVGDNQERLKSEASFAALCGVNPLPASSGKVVRHRLNRSGNRQANCALHRIVICRMQRHQQTRDYVERRTAEGRTIREIIRCLKRFVAREVFGILRGGPSVRTAAA

SEQ ID NO: 77051 - protein, 408 aa, unidentified
MKVVFGIDVSKSASTVCELIGESKNEFEITNDRPGFLQLLKELHVFAIHPQIIFEATGVYSRRLQTFLEDYGYDYIILNPLKAKKEMDQGLRHNKTDRNDAYHLALIQKLYHHPVNQSQAEEYHQLNALSRFYDQLTSDLIMAKNRLHQALQSTFPEIETLFSNSKGNNYWQIIKQYPHCESMIESDKEQIVRWLLTLKGFGNKHAQKTAKKLLELAHKSYPVVKDDSVETKQARYYADRQLVLSSQRERIIDQMTALAKKLPNRDLEILESIPGFAQTTAVRVLAELGDMRRFSNPNKINAFIGIDPGRYQSGEMDSSLSITKHGNAVARKILYRAIGQIDNAAKTNPCHIADYYESKKRSSQTKGFKKIAIASIHKLIRTIYALIQNDQLYDYSVATHNQKDFCRN

SEQ ID NO: 77052 - protein, 331 aa, unidentified
MHYSHYIGVDISKNTLDAAIYAAEMRRSDTKHLTNDKAGLKELVDWAKAAGVKPKDMLICAEHTGVYSNELQLFCEKKGIALCLESPLQIKRSMGLVRGKDDQIDAIRIAQYAYDHKDKLKLFHRPSGNIITLANLLRERRLYVRQKATLMAQQAEIGSYESATSRNRRESLIDKHAAAVKSVEKQMMEIIKGDKALKKTYDLISSVVGIGPITAIDTIVYTNNFQNFDTPRQYASFIGVAPFDHTSGTSVNGRTRVSQFCRKQQKVSITMAARSAIVNDPWMKNYYHRKMKEKGDQRNQHGVVLNAVKFKLVLRMFSVVKSGTPYKVMKY

SEQ ID NO: 77053 - protein, 309 aa, unidentified
MEPIFVGIDVAKNRLDVHIQPSGEAFAVTRDEVGLADLARRVAILSPLVVALEATGGYEVVVAATLAAAALPVVVINPRQVRQFARATGRLAKTDTLNAQTIAPFAAAVRPPVRAIPDAQARLLTQLVARRRQLVDMLGAEQNRRQLIEPALQGRLDAHIRWLQQAVHELDDDIHTAIRSSPMWRATEDLLRSVPGIGPITASTLIADLPELGRLDRRKIAALVGVAPINRDSGTVRGRRMIAGGRAPVRHVLYMATVAAIRHNAIIAAFYRRLVADGRPGKLAVTAAMRKLLVILNAILRDGRPWQPA

SEQ ID NO: 77054 - protein, 350 aa, unidentified
MIIIGVDFHPEFQQIAWVDTDTGELQEQRLQHREEAETFYRELAAKAVQVRIGMEASGYGRWFEHLLGELKVELWIGDAAEIRTKRVRKQKTDRQDAQLILKLMLEDRFPRIWVPSWENRDLRQLLWHRHRMVQARTRIMNQLQAVALNQGLRCKKRLWGERGRQQLEAFPLAPWASRRRQDLLELLDRLNPTNAELSQAIEQEVESCPAAKRLMTHPGVGPVTALAFVLIIGTAERFQCGKQITSYLGLAPLEESSGNRRRLGHITKQGSSILRFLLVEAAQASARSLPEWRSKYFHLTMRRGRKIAKVAMARRLAVRLFWMMRQGWDYQQWVKFGSHAEQPGNRHGVQ

SEQ ID NO: 77055 - protein, 429 aa, unidentified
MTPPQNSNHNPPPDSQVEPLPEAWIGLDWGNQQHAFALQDRSGRCERGTLEHSSENLHQWLGQIGQHYGGRPVALALEASRGAVVHALLNYAWLTIYPINPITSARYRQAFTPSGAKDDLPDADVLLELVRDHAVKLRPLEVQDAPTVKLAELVHARRDIVDRRTQTINQTTSLLKTYYPQALELAGGLDRDMALDFLSRWPDVISLKAVRPATLKRFYHPHNVRSTQLVEERLQFIQKAVALTTQEARVSVAVLQLRHLVEQLRAFRKHIAIFDQEIQIAFRQHPEAGLYRDLPGAGAQLAPRLCVAFGTLRTTYPDPASLQKHAGVAPVREKSGNQLWTHWRWQAPVFLRQTFVEWAGQTVVYCPWAGRYYARMKNKGKKHAAILRALAFKWIRILWKCWQDRRPYDQAAYLKQLRHRKSPNAVAAT

SEQ ID NO: 77056 - protein, 357 aa, unidentified
MEQFIGCDAHKKFSLFVAMNEDGEYGRAIRVGHDREVFRAFLKDLPPGSQIALETSGSYYWLVDEMERAGHRPQLAHALTAKRRMEGRHKTDERDARGLAMLLRNGTLPQVWIPPAELRDQREMLRLRMSLVRMKTQLKNRIHGVLLRYNLCIQASDLYGDQGRAELLSRKGELPGWSRESVLEQLQMVDSVESQIVDCEKQLEAMLYPNAERDLLKTLPCVGKVLSAVIALEIGDVRRFGEVKFLVSYAGLVPSARESAERKRQGRCPRDCNVYLKWAFVEAANLIASKQKTWPERHAVRLYQRVKQNTKMHGKATMAVARHLAEASYWILTKQEVYREPKSKAASSFVDARVSAN

SEQ ID NO: 77057 - protein, 408 aa, unidentified
MGRAAEVVAPSSSIRTDGGCPVVQVNDLSRSLAAFDPISTLVVVVEMSKASWLVSSVVPGVERQPLKKLEPDATALLRLIERWRNEAVRVGRPISRIALAYEAGRDGFWLARWLIARGIEAHVIHSASVAVSRERKRAKTDRLDAAMLMRVFLGWLRGERGHCGMVAIPTMEEEDARRPNRERESLVNERSRIINRMKSALARLGIRGFKPHLRKAPERLAGLRTAEGTGLPANIIEEFRRDMARLALVREQISSIEKTRAERLERAPDTGPHAMVRLLARVIGIGIETADMLVREILSRKLRDRRALARYAGLTGSPDESGLKSREKGLAKAGNARVRRGLIQLAWRFLMFQKDSALARWYRTRTEGPSGARKTTMIVALARKLLIALWRLVTTGEVPDGVELRPAA

SEQ ID NO: 77058 - protein, 338 aa, unidentified
MLHVGLDLHKKYSTVVVMDDNGNVQLAETLYHDDRARLIAFFSELAGKAIVTVEATRDWYWLYELLEELGVTVKLANARKVRLIAESWLKTDKVDPKSLAQLERTGFLPEAYIPPREIRDNREYLRYRLTLVRLRTGLKNKVHALLDKLGIKHPFADLFCLAGRRFLSQLTLRPAYREELSNYLALIEDIERRIVTATKEITRQLKPDPRAKLLMTIPGIGYLTSYLLLNEIGDIKRFPSPGKLCAYGGIVPIVRQSADHRWQGHITKEGNRYIRWALTESACKAPSKDYALGSFYRRVAYRRGPLKARVAVARKLLVAVWYVLTYGEPYKGTAFPTV

SEQ ID NO: 77059 - protein, 350 aa, unidentified
MVVVGADVHKHTHTFVAVDEVGRKLGEKTVKALTSGHAEAVMWARERFGAQVVWAIEDCRHLSARLERDLLTAGQQVVRVPPKLMAQARASARTRGKSDPIDALAVARGFLREPDLPVASHDKVSRELKLLVDRREVLVAQRTAMINRLRWRVHELDPERAPGPASLDRGKHRHLLGASLATVPGLVAELARDELADITRLTEAINALAKRIGSRVRTVAPALLAMPGCAELTAAKLVGETAGVTRFKSEAAFARHAGVAPVPVWSGNTAGRVRMTRSGNRQLNAALHRIAITQIRLEGLGQTYYRHRLAAGDSNPEALRCLKRRLARIIFGHLHTDHQHRTQPCQTAAA

SEQ ID NO: 77060 - protein, 407 aa, unidentified
MDLLKTVFGIDVSSRKSNVCIMVNGQKVNDYAISNDMVGFNRLLGDLKQVTKPQIIFEATGVYSRRLQAFLDMHELRYVMMNPLEAKRKTKDDLHQNKTDKLDALYLAKLQSEHPQRLAYVQNKEYQELMANNRIYEQASHDLISNKNRLHKAVQLTFPEIEHLMVNPRGKNYWSIVLRFPHPDIVLETKEADIIDFLKGLSGIGKKRANDIAQSLIRLAKVACPAVKKNSAHIRGLKMAINNILSAEEECQTALQEMAKLAPKRDLEILTSIPGIGENTALRIISELGDIRRFNNPSQLNAFVGVDPQVYESGNLTAHLSISKRGTAIGRKVLYLAINQIQSAKKAGNPCHIADYYEKRKRSSETASHKKAAIASIHKLLRTIFALIKNDQLYSYDVAKHNQRLLS

SEQ ID NO: 77061 - protein, 401 aa, unidentified
MAPSAPASNLADGAHPTRKPKQQMKPLNDLSRSLTPFAPNHSKESWLVAGIIPGVERQPLKKLAADENELLKLLGRWRAEAEKAGHKIARLAVAFETGRDGFWLARWLRARGIEAHVIHAASVAVSREHRRAKTDRLDTEGLKRAFLGWLRGEREHCKMAAIPTSAEEDAKRPHRERETFVGEQTSIINRLKATLIRLGIRNFNPKLKQAPERLEHLRTPEGEPIPPNTLAELRRDMQRRRLVSEQIRQIEEARLEQLKQAPKTGPNLMVLVLVRVIGMGIETADMLVKEILSRNLRDRRAVARYAGLTGSPDESGSKRREKGLARSGNARVRRGMVQLAWRFLNFQKESALAKWFRARTENSRGSRKKMIVALARKLLIALWHLVRNGVVPEGVILRPAH

SEQ ID NO: 77062 - protein, 338 aa, unidentified
MNTIALLGIDIGKHTFHLHGQDARGHQVLRKKLNRNQLLPFLAQISICKIAMESCGGSQWLARKIMEQGHHVQLIAPQHVKAYVTGNKNDFIDAEAICEAASRPRTRSVQVKTVEQQVLSTEHRLRKSLVNRRTAVINQVHGFLLEFGVVFPVGYAALDRLSGLMESRELPTRLISAIKRMLEDIRQLTHEIKKLDVEIKQQLTQNDAGQRLQSIPGIGPLIASALVADVGDASVFNSSRDFAASLGLVPRQYSTGGETTLLGISKRGDKYLRSLLMQGAHAVLCRVDKRTDALGVWAKNLLARKHPNKVACALANKMARIVWALLTKGGTFNSTLLA

SEQ ID NO: 77063 - protein, 352 aa, unidentified
MNKDNTKYVGIDLGDKTSLIHIRNGAGEFVEEIRIPTTVKAMKRVFGQQEPEKIAIEVGSHSRWVSRLLRSYGHEVVVADARKLRLIYENPRKSDRVDAEYLAKLLRLDASLLSPIIHRGDEAQQHLAILRSRDSLVQARTQLVNHARGIVKSFGYRLPSCSTKSFATKARPALPESLRPALGPILESIQQISEHIRKYDQEIERLCQEVYPETINMRQIKGVGALTALAYVLTLEDVNRFQKSREVGPYLGLVPRRNQSGDADPQGRITKTGDQYLRRLLVGCAQYILGPFGEDSHLRTWGLGMAESGGKRAKKRAVVAVARKLAVLLHKLWISGEDYHPFYPKQTKPSIA

SEQ ID NO: 77064 - protein, 329 aa, unidentified
MTPLLPLPVVGIDVSKATLAICYLVNDQAKHLEVSNSKAGFQQLVKACGAQCQFVMEATGTYNLALAYYLHEQGGQVAVLNPLVIKRFIQMHLSKGKSDRKDAQWLLRYGQQQPLKVWQPDETVLVECRQLEQVTEQLLKQKVMVSNALEALQQQPIVSKLALKRLQQMLKTLTQQVAAVEAELLALLEQRFADEMTLLCSIPGIGRKTAGMLLLFAGGFTHFDNYRQVIAMAGLSPREHTSGTSIRGKVRITKMGGGLIRGKLFMCSFSAKKTNAACQALFDRLVAKGKNKKLALIAVCNKLLKQAFAIIKSGVPYQADFTSKLALKA

SEQ ID NO: 77065 - protein, 347 aa, unidentified
MKILALDLGKNKTVGCDYQRESGKHRFRSSFTTPAALQQLVKEVKPDRVVIEVCNIAGWVCDLLRGMGVEVQVANTTDDAWRWRKVKKKNDRADALKAAQLSAVNQLREVHIPTIDVRQWRALIVFRQQLVKRRGKVKNHIRDLLLVEGQILPRGGRCWTQLGVARLEAMAKPLAEVGMNELWRGQLDMELRQLREVQQEITVAEVKLDAIAKADPRVQLLRTIPGVGPRLSEAIVALLDRPERFRKANQVSAYIGMVPKQFDSGESERHGRITKHGSRLVRSLLVEVAWAGLRYNPWVRQTYQRISGGKKSRRKIAIVAVGRRLLVRCWAMLRDGTSWRAPVSQVA

SEQ ID NO: 77066 - protein, 363 aa, unidentified
MYKTSHTRRHRNPPSGSVVVGIDTHLDIHRAALVDAATGAPVADQQFPATPAGYLELLDWAVGHGRVSRAGVEQTGTYGAGLSAVLHAAGIEVIEINHTERGDRARHGKTDELDAYRAATAAAAGTQKGLAKHYHPAIAALRPLMVLRAHHRSSRQRAWGRVGGMLVTCPDDLADQVRGLNSAQKLARIAAWRPDLTRLHDPVNSYKLALRDLARACLDHDRAIVEIDAQLLRILTPIAPTLLAQHHVGPVTTAQLLITAGHPGRITSGDAFAKLVGVAPLPVQSGKSSRWRLSRSGDRQANSVIHRVVIGRLGTDPRSKTYIQRRVSEGKTRSEAIRALKRHVTRDLWTALQTDLNNLPHTT

SEQ ID NO: 77067 - protein, 356 aa, unidentified
MENNNKLDFTGQPIYVGLDVHKKSWAVSILTRQGDYKSFSQPPHVAALAHYLRHHFPGGLYYAVYEAGCCGFWIHDQLVREAIDCIVVNPADVPTRNKERRRRRDRVDCRKLARGLRGGELEGIYVPTRAKLEDRSLIRTRLSMGRKQTRCKNQIKSMLLFYGIEIPEEKEMGHWSRRFLRWIEETRLERTSGDLALKFHLEELDHLRQIIAKLNRAILALSRAEEYRPWVSLLRTIPGISTLTAMILLLELGEITRFRSIDQLCSYVGLIPDTQSSGEKEHVEGVTQRRHSHLRWLLIEASWIAVRKDPALMMAFNEYCKRMRKSKAIIKIARKLLNRVRYVLKNQAEYVPCVIE

SEQ ID NO: 77068 - protein, 400 aa, unidentified
MNAVGIDVSKGKSMVAILRPYGELIEAPFEVKHTSSGVQSLIQTIQSIDGESRIVMEHTGRYYEPLFCQLTQAGLFVTAVNPKLIKDFGTNSLRKVKSDKADAIKIAKYALDSWSDLKQYSVMDKIRKQLKTMNRQLDFYMKHKTSMKNNFIGLLDQTFPGVNNYFRSPAREDGSQKWVDFATTYWHVDCVRNMSRSAFINHYQNWCKRKEYNFRQSKAEEIYETAKELVPVLPKDNVTKFIVKQAARQLADASETVAQLKAKMNEAASKLPEYPVVMAMYGVGSSLGPQLMAEIGDVSRFTHKGALTAFAGVDPGVNESGSYEQKSVHVSKRGSAQLRKTLFQVMDCLIKNMPQDDPVYRFMDKKRTEGKPYYVYMTAGANKFLRIYYGRVKEYLLSLQ

SEQ ID NO: 77069 - protein, 343 aa, unidentified
MEHFAGVDVSVKETSVCVVDDTGKIIREVKVASEPGTLLAVLKNPAYHLKRIGLEAGPLSQWLFSALAEAGLPAICVETRHMRAALKAQINKTDRNDARGIAQMMRAGLYRPVHVKTVRSQKLRMLLTHRKLLQSKAIAIENDLRATLRNFGLKVGMVGTVKFEARIKELVENLPDLTVLVEPLLIVRRVLREQIGILHRRLMAIVRDDDVCRRLMTVPGVGPVVALTYRATVDVPARFRNSKAVGAVFGLTPSRYQSGEINLTGAISRCGDEMMRAVLYEAAQVMLTRTIKWSWLKAWAMQIARRRGMKKAIVALARRLAVIMHRIWVDGSEFRWTREAAAA

SEQ ID NO: 77070 - protein, 352 aa, unidentified
MTRITTIGLDIAKSIFQVHAIDAGDHVVVVKAIRRAQVLAFFGRLEPCLVGIEACGSAHFWAREIGELGHTVKLMPPKYVKAYVKRGKTDAGDAEAICEAVTRQTMTFVAVKSAGQQALAMLHSVRETLIGQRTQAINALRGHLSELGVIAPQGLLGQAELARIVRDDDDARLPLIARVALKLLVAQIEAVSGRIAETDAALRAEHKSSAQSRALETVPSIGPVIASALRARVGDAHGFENGRHMAAWIGLVPEQDSSGGKVKQRGISKKGDRYLRRLLVSGAMAMVQHAQRKPDKYPWIAKLLGSKPPKLVAVAVANKTARIAWAIMARGGTYDPGFHAKRTAAAVLAAPV

SEQ ID NO: 77071 - protein, 408 aa, unidentified
MYIGWDWATATHDVTVMDNTGARVDRWELAHTAEGLDKTLARLRRYGAPADLPAAIETTRGLVVDRLLAAGHPVVPVHPNAFHAMRPRWGASKAKTDAGDSHKLADYLRTDGHMLRRLVPTDTATLELQALTRQRADHIEAKVSAVNQLAALLDVHWPGGKTVFASLDSDIALDFLDRYPTPAAAAAAKLTAGRLETWCKRRRYSGKKAGSELIERLRSAPTAASRLSDTIVTQLVRVQVQVVRALRTAIRELDTAIKTALAVHPYAPLLASMPRIGQVNLAQVIGEIGPILERAESCEQFIAETGVVPVTRASGKAHAVTFRYATNRRARVAITIFADNSRHGSDWAAKIYNDARARKKRHPHAIRILARAWLRVMWACWRDGACYDPAIHRTNGKINTPADPPQAP

SEQ ID NO: 77072 - protein, 298 aa, unidentified
MNKLNAIGVDLAKNVIQVSVLSPSNRELRNSALSRRKFAEFLAKQRPGLVAFEACATAHYWARTAQRHGHDVKIIPAKAVAPFRQGHKTDENDALAVAEAARRPNVKLAPLKTVEQQGMQAIQRSRELLVHERVALSNHLRGLLLEFGIVIPQGFASLYRQLPEILEDGENELPDLYRPTLNLLYATLGTGEAFVNGRQFAAYLGLTPKQFSSGGKVNLVGISKRVANRRLRAVLIQGARAYVYHMKEPNTTKDRWLWAIVERSGKCKAAVALANKNVRTAGAMLTQNTEYQRYPLAA

SEQ ID NO: 77073 - protein, 419 aa, unidentified
MNGIETKKLKVVNSQTLIVAIDIGKTTNTGYCRCPGGKDIKPFEFSNNAEGFRKLWDCICWMKRSHHLEEVVVGFESTGAYGEPLGHYLKDKAVRLVQVNPMHTKRMKDLQGNSPGKTDRKDPKVIADIISLGHALSVVIPEGAAAELRRLTLARQRCLQRRTALYNQLQDLVFILFPEFLQVIKDVKTKTAQYLLRHYPTPQDIGKCGVETLSLVLKRVSRGKLGRVRAQALYGAARESVGLKEGTKGILLEIDEIVCSLEACHRFIEKMEEEMVVYLQEIPYSDSLLSVKGIGEVTVAGLIGEIGDFRQFHTLGEVMKLAGLNLFEISSGKHKGNRHISKRGRPVLRKLLYFAAINTVRKGGVMHAPYHRHLDKGMPKTKALIAIARKLLRILFALARDHSQYVETYSQKEALELAA

SEQ ID NO: 77074 - protein, 400 aa, unidentified
MSGLKGNVNSFVGIDISKDKFDACGITGDEANLFQFSATMDRKGFEKLKGHLGTISVSSVLIGMESTASYHVNLFSYLVSEGYKVILINPLLISNYVKMQLRKTKTDKKDAVVIAQFLLANGDNLIQRATPSLISDLRDLSRQRESLVDEMTSLKIEIKQLLNITFPELEHMVGIFTKSTIKLLQQYPSAFALRDADLSQLSQMLIADSYGHKREAFAKTLIKAAHSSIGTNSTAKEMILKQKIALLLHLEEALQEITAMLIEMARKLMEEDINIMTSIKGIGDKTAANFLVEMGGDINQFERSGKIIAMAGLDPAVYQSGKHEGHGRITKRGNRHLRRIIWMMTTRVIQYSDAFKVYYLKRRKEGLPYKKAVLATAHKLIRVIYAMLTQRTTFCPQANS

SEQ ID NO: 77075 - protein, 411 aa, unidentified
MQVIYERCCGLDVHKRTITACGLKWLGSDWQKEIRQFGTMTKDLLALSDWLMREGCTHVAMESTGVYWKPVYNILEGQLELLVVNAQHLKAVPGRKTDVRDAEWIAELLAHGLLRGSFVPPPSVRELRDLTRYRTSLVRDRARTINRLQKVLEAANIKLASVVSDIDGVSARLMLEALVAGERDTEQLARLAKGRLKEKHAQLVEALSCRLQPHQSFLIAEHLAQIDYLEGAIERLSGEIEERLRPFEPEIGWLDTIPGVNRRTAEVLWAETGGDMSRFASARHLASWAGMCPGNNESAGKRRTGRTRKGSPWLRHCLVEAAHGAAHTKNKYLSSQYHRLAARRGKKKAQVAVGHSILVIAYHLLTRKQAYSDLGANYFDERDRQAVTNRCLNRLQKLGYQVTLEKLPMAA

SEQ ID NO: 77076 - protein, 314 aa, unidentified
MNIEEIFAGIDVSKNHLDAGLNPSGQFERFNNDETGIIDLVAWLKQARPSLIVLEATGGLEMLVVAALRVAGLPIAVVNARQVRDFAKATGRLAKTDKLDALVLAHFAQAVRPAIREGRTDAEQELVEQVVRRRQLVEMRAQEKIRLSMAGARQKASIKEHIAWLDERISDLDGELKNILKASEIWKERIDLLQSAPGVGPVTILTLLSYLPELGRLNRREIASLAGLAPFNRDSGFQRGYRMIWGGRAEVRSILYMATLSAVRGNNSIASFYQRLVEKGKPAKVALTASMRKLLTILNAMMKQNKHWSCSQNA

SEQ ID NO: 77077 - protein, 346 aa, unidentified
MLYAGLDLSRKRLDVHILDEDGRTVEVTAVSPDAAGLRRLAAHVLQFGHEVDGAIESMTGARFVHDTLERYGWDVAIADAAKVKGIAPLAAKTDRIDARVLAELARLELVPEIWLPNPTVRAERERARFRLHLVHHRTALKNRIHATLMTFGHPVPVADLFGVAGREVLARLALPEPWSGTLATSLRMVDELGAEIDACEAELRRLGADHPSIPLLLTVPGIGPLLAYTIASEIGDIGRFSSPKKLTGYTGLCPIVRQSGNRDVRGPLAKNGPKYLRWALIEAATHAARDAHYRERYERTKRRLGRQRGAKVARIDIARKLAEAIWHVLTKNEPFAPAGPTKLLVA

SEQ ID NO: 77078 - protein, 364 aa, unidentified
MKKVYYIGLDVHKDTTQMAVLEMKGKEPIALKVIDSDPSKVAKAILPYHKEGKVYVGYEAGCMGYTLYRVLTAMKIDCQIIAPNKVFKGGTNEKIKTDKRDATAIAWMLRREEGAGIAVPEREDEAARDLLRCRSDMQDDLKRAKQRMHKFLLRQGHIFESTRYWTGKHREWMKRLVFAMPLDKAVFEQYLATIESIEERVARIDVQIQEIAETPRYAERVRIFRAFRGVDYIIALSLVCEIGDFKRFPQAAALMSYLGLVPSEYSSGKKRIQGGITKTGNGHIRKLLTEAAWHYARPVQVSKRLATRRVGTSESVISYADKAMNRLHKKYMKLVLKGKSKQAAVTAVARELSGFLWGVMTSAA

SEQ ID NO: 77079 - protein, 452 aa, unidentified
MKKAEAIKESLTASTWRELETNGKFDKNEKLSFISDDMLILGCDVGSETHYMRAIDTRGRELSKSVYSFNNDSEGFRSAKEWAVQIAAEHNKSQIVLGLEPTGHYWFCLAAWMISNGISVVQVNPYAVKQTKEVEDNSQMKDDRKDPKLIANLVKDGNFGMPYLPEKLYAELRRLSMFRDQLNEDRTRTINRMHREMKIYFPEYKDALGKVDGAFSLELLRQAPFPDDLISLGEDGIRKIWHDARLRGRGYSRAGEILQYAKVSVGIKDGAIAGKAAVKWFVQKILELDAELAVIENQINQKCQEIPHAGNILEISGIGENILSGILAEMGDISRFDDVKEIQKLSGLGLVACSSGKHKGETRISHRGRKRLRYWLFQAAKSAVAHAEEFKELHIYYTTRADNPLKKMQSLIVIACKLLRIIYTILKKGIVYDPKKMLMDIRRVEKKEAIVA

SEQ ID NO: 77080 - protein, 369 aa, unidentified
MGKHSEVFVAFDVAKKKHAVAIAEGGRTGEVRFLGDVENSALPIERTIKRLADRYERLHVCFEAGPTGYGLYRQVRALGQDCMVVAPALIPKRAGERIKTNRRDAVTLARLHRAGELTGVWAPDAAHEAVRDLVRAREAAADDLRRKRQPLLSFLLRHSRIYSGGGHWTLAHRRWLAGQKFEHAAQQTVFQEGIDMIEDALQRLRRLEKQLPVIVPEWSMAPVVEAYQAMRGASFLVAVTFAAEIGDVRRFDTPRQLMSFLGLVPAERSTGDTIRRKGLTLAGNRRARRALVEAAWTYRYPARVSETLRARLEGLPKPVRDIAWKAQVRLCARYRRLSATGKKLPIVVAAIAREMAAFLWAIGHEVAPA

SEQ ID NO: 77081 - protein, 313 aa, unidentified
MNEKFVGIDVSKYAFDLNVNGNDKVEHFNNDVKGIKKCSKALVKLAPALVVIEATGGYEMNLAMALQQAGLAVSVINPARIRNFAKAAGILAKTDDIDAKAISFFASALKPPTTAMITESTRKIKSLVARRGQLIRMRTAEMNRQGHAVDKFVDKSLKATIKLLDKQIESIDKEIKGCINNDPEMNTKANIAESMPGIGEVTASMLVTELPELGSLTRRQIASLAGLAPIARDSGTFKGKRMTGGGRGDVRAKLYMPTLVAIQYNPAIREFYQRLVKAGKTKMTAVTACMRKMLTILNVMVAKKEYWKSELYA

SEQ ID NO: 77082 - protein, 386 aa, unidentified
MEVLHPRCAGLDIHATNVVACVRITSGRSVTYEHRTVATTTRGLLELADWLTEHGVTHAAMEATGVYWKPVWHVLEDGFTLVLANAMHIRNIPGRKNDKNDATWIADLLALGLIRSSFVPPAPIQALRDLTRTRKQLVREVTRHTQRIQKTLEDANVKLTEIVSDILGTSGRAILQALVAGETDPERLADLTSGRLKATRTQLVEALQGRVTDHHRFMLHLHLTQIGALDTAIAEVEARIREALTPFIAEIGDDMSKFPSAGHLLSWAGLCPRLDESNGKRRSTRTRQGAPWLKTTLVQIAWPAARKKNSYFHAQFLRLKSRRGPKKAIVAVAASMLTDVYYMLRDGVEFHDLGDQYFVQHDKARLTKRLLQRLRDLGVDVEVKAA

SEQ ID NO: 77083 - protein, 333 aa, unidentified
MNDATIIGIDLAKRTFQLHGAAADGAVVFRKKLSRDRLLPFLAQQPAAIIAMEACASAHYWAREIMALGHEVRLLPPIYVKPFVKRQKNDSADAEAIAEAASRPTMRFVAVKSAEQQGSGMLFRTRDLWVRQRTQSVNALRGHLAEFGIVAPAGHARIDRLAQAINDETANIPKIARDLARMLLAQIDEQTARIAALEKEIRQRAPKDPEVARLMTIPGVGAICATAVKAFCPSMSLFRSGRDFAAWVGLTPKQNSTGGKTWLGRISKMGQRDIRRLLIIGASAVVCWAAPKGVPKGSWLARMMARKPHMLVVVALANKMARTIWAMSVREQN

SEQ ID NO: 77084 - protein, 372 aa, unidentified
MNKKILYVGLDVDDKAFHAGLEGEGVNQSYEFSCKPTVGALIKKLKKYRELGYELKLCYEATYLGFCLYRDLASQGIQCEVVAASLIPEMAGMRVKTDRLDCRKLAQYYMKGLLTVVHVPKEEDEVVRDLIRSRSFLVGELKRIRLHILSICRRMGIDYRQATDNLQAQYWTVAHREWLESKANKWEDQVLRLNLTTLLSFTKQVEGHLETYQSQIGELANEPRYEKKVQALVCYRGIETLTAMTVVTELGDIKRFSHPKQITSYIGLDIVEYSLGGKEKRFGITKMGNRHVRTAIVEACQLASSPPKIGKALSKRREKIDEKYIEISDRCMRRLYKKSTHLAFRGKHGNKIKVACAREMLGFIWESLRQAA

SEQ ID NO: 77085 - protein, 328 aa, unidentified
MKFLVVGVDVSKATLDLCIKPFDLQLQINNNLQGFKSFCKELKKNRGADTAVMVVMEHTGNYSARFEKFLQGKSIDYCKIAALEIKRSLGMVRGKNDKIDASRIAQYGWLRREQLKADVPCDDSLVRLKDLLSLRRKIVRDRSGYVCRLKELKSGKDYRKSDPIIQSQQNIVAMLTSQQKLVEKQIRELIHSDEKLKQTSELLKTIKGIGEIVAAFMICCTNNFKRFSKARQFNCYAGLAPFKNESGTSIKGRARVSHLANKEAKSLLNLAACAAIRHDIELKKYYQRRVSGGMKKMSCLNIIRSKIVSRIFAVAKRQTPFVTLPMAA

SEQ ID NO: 77086 - protein, 424 aa, unidentified
MNFKMQDKQNQLIERISDKHLIVGVDIAQQFHVARAINYRGIIVGDPLTFENSEVGFKSLLSWIQSLQEMKNLNAAIVGMEPTGHYWKNISKWLDEQKIEVVTVNPHLVKRNKENRDNTQSKSDKKDALVIADMVKNGYYSFISPSSESFEMLRVLISNRDVIVKRLVSSANQIHRWVDIVFPELRQVFKDITCKGAIATLRLFPTPAEIASLEPLDVMNGWKSLMQRQPGPKKAQLLIQLAKSSIGTTQALGAYKFHLEQLLEEYDLTIYQLARVEQQIKEELYKIPYVQKLLMIKGISEISLAGILGEAGDLSGFSHGNSLLRHAGLHLAEASSGKWKGQIVVSKRGRSRLRRFLYLATMSLVMNNDEFKALHAHNVKVKKMKKMKSIMKLIGKLARIFVGIAKRNEEYCPSKLKEIIPLAA

SEQ ID NO: 77087 - protein, 370 aa, unidentified
MNEAITSYIGLDIHKDSIAVALAEAGRAVPRFIGTMPPDPTLLCKALTRCAQRDSTLVVYEAGPCGYGWARYLKAHGWHCEVISPAHITRKASEKLLKTDRLDALLLARESRAGNLVKVAMPDEQDEAMRDLARAREDATAARLRARLQLKAMLLRHGRAYHGRSSWTAAHERHLCRIQFDHPAQQIAFDEYRQAVKDAHERVQRLTQALGEQCERWRMQRVVKALMCLRGLDLIAAIVFIAEIGDLSRFAHPKALMKYLGLIPSEHSSGNTRRQGPITKAGNKHARRILVEAAWTYRFNPRVSRPIEVRQQGQPKAIRDIAWRAQLRLTHRFRKLNAGRKMTQNKCCVAVARELAGFIWDIARQVRLCA

SEQ ID NO: 77088 - protein, 431 aa, unidentified
MEVIHPRVAGIDVHKKIVWVAVRLPGQRPGERTVTVKRFKTFWRSLRQMAAWLAELGVTDAAMESTGVYWWPVYHALAGAGIEVCVCNAAHMRNVPGRKRDVIDCQWIAELHEHGLLRPSFIPAGAVAELRSRTRYRKKLIEQRTSEGQRLAKVLEDAGIKIDSVASRLLLKSGRAMIEALIAGERNPGRLADLALGRLRRKIEELQLACDGRFTAAHGQMCRLHLDAYDHLTAKIAELDELVAEAAAPFAALIARLQTIPGIGRRTAEVIVAETGGDMARFATAARLAAWAGLAPGDNESAGKRRHAAARKGNRHLRTAMVESAWATARTRTRPGARFRRLARRFGKGNEKKAAVAVAHTLICIAWAVLSRGEDYAEAGEDYYQQRDRRDREHLIRHHQQALARLGCQVTLIPPGDGSPPPSATSQQPAA

SEQ ID NO: 77089 - protein, 338 aa, unidentified
MGKFSGIDLHSNNSVVVVSDDADRVLYQRRLPNDPAQIRAALAPHREDLVGVVIEATYNWYWLVDQLINDGYRVHLANPAAIRQYEGFKYSGDFTDAAHLAQLLRLGLLPEGYIYPAEERPVRDLSRKRIQLVQCRTAQILAIENLFSRHTGGQMQAERVKHLDITQVNGFGFAPDVTLAMQANLAVMQTLQEEIGIIEKRLMERVKLHPDYALLNSVPGIGPVLATTIMLETGTISRFTKVGNFSSYCRCVDSRRESNSRKKGEGNTKNGNRYLAWAFVEAANFAIRTCPEARRFYERKKRTRNGIVAIKALAHKLARACYHMLQEHKPFEVTRCFG

SEQ ID NO: 77090 - protein, 480 aa, unidentified
MNVKATRTKKQVNVENQAIKLLSKEELGIKIEVIKKELRSYTWRDLETNGKFAKNDKLSFITDDMLIAGCDIGSETHYIRAIDVRGRELSNRAFEFSNTSEGFANAKAWMLALAAKNDKKQIALGLEPTGHYWFALAAWMVSNGISVVQVNPYAVKQSKEIEDNSQLKDDRKDPKLIANLVKDGNYGMPYLPEKVYADMRRLSMFRDQLTEDRIRNINRLHRELKIYFPEYMDAFGKIDGAFTLEVLKVSAIPSDITALGAEGIKNIWHNEKLRGRGYSRANEIVSYAEKSVGLTDGTDAGREAVKWYAEQILKLDEQLAVIESTLHEKCREIPYAENILEIRGVGENILAGILAEMGDISRFDDVKEIQKLSGMGLVACSSGKHKGQTKISHRGRKRLRYWLFQAAKSAVSHADEFKQLHEYYTTRTNNPLKKMQSLVVIACKILRVSYTILKTGTTYDPQKLLKDIKRPTASQAPMAA

SEQ ID NO: 77091 - protein, 345 aa, unidentified
MNITTIGLDLAKSVFQVHGVDERGKAVSRKALKRAEVMKFFAKLLPCLVGMEACGSAHFWARKLTELGHTVKLMAPQFVKPYVKTNKNDARDAEAICEAVSRPNMRFVPIKTVEQQALLGLHRARQGFVTARTAQVNQIRGLLAEFGIVVPKGIGYLQRKMPEILGDAANGLPCASRDFFSRLFSHFHHLDGQVKELEVHIKAWHREDTASQRLEAIPGIGPLTASALVASVGNASTFKNGRQLAAWLGLVPRQASSGGKERLLGISKRGDTYLRTLLIHGARSVLLTLRRRSDQSEGWAARLTARRNHNIAAVALANKNARIVWALLAHGRDYQAGYVKAAAAA

SEQ ID NO: 77092 - protein, 323 aa, unidentified
MTQTSVKENMKFIGIDISKHKLDVCFSDNKKISLTNSECGFSQLKKQLPRAEECLIVLEPTGGYEKCVIVSLQKSHYNVVLANALKVRRYAEAMGFLAKNDPIDSYVIKSFGEDLYPKGKLAVLIAKNVEFRQLEQWLGRSRQLVKLIATEKQRVEKASDKMIIKSMHRIIRHLEKELRQVEQKIEKISDKCQLSEQTNKYKTVKGIGDVCANALVTYLPELGSLNHGQVAALVGVAPYCHESGKSQGKNKIKGGRKTLRSLLYMATLSAIKHNPAIKVFYDRLMGKGKHHNVAMVACLRKLLCILNAMAKNGTMWQENYKVI

SEQ ID NO: 77093 - protein, 365 aa, unidentified
MGQRPWIGGWWLPRTILLHNLDRRKEMSRFVGVDLHKNMFTVSYFNPGTGKHQLKGYPIQNIGSFIKELNRDDTVGVESTNNTRYFVNQIRDCVKEVKVINPSQFKVISKSVKKTDKNDAKVIAEFLSKDMVPEVRMKDKKTAQINSLANTRDKLVKLRTALKNKIHNILSSHGILLKKEYLSSDKALERILNQPVDPTARVELEVIVTQIRSLNEGIKKLDKELEDKGKELPGHENITSIKGIGNKSGSILLSVIGDINDFENEKKLAAYFGIVPRVSNSNETEWQGRITKRGSKLGRTTLVQCTLIAIRYSPYLNSFYQRIKAKKGSGKAIIATAKKLLGIIYITLKENIIYEDFPNFVIKTT

SEQ ID NO: 77094 - protein, 358 aa, unidentified
MEKRQNYILTKEKVFVGLDDSKRTWSLCVRSMGVVIHETSMPAKYEVLRNYFHKKFPRCQIVVMYEAGFRGFGLHDQLVTDGWDCVVTPPHTVTEEKSNRTKNDRTDCRRLAKNLESGDYHSCFVPDKGLREDRQIARTYRQVQADIVRVCNRIRRMLEYHGLDAGLPAGRWRSTSAYDWLRRHLSELELSDALRFSFEAKFRELDNLQELKEELLRQLKKLAKSDRYRENVELLMSAPGIGILTAIRLALEWGDLSRFKRKEEFASFLGLIPSDHSSGDQERRGHITKQGNQLVRRCLVESAWLAIKYDPVLLDKFRRVLSHSGSKKKAIVAVARKLALRVRRALLTGEPYVVGVVQ

SEQ ID NO: 77095 - protein, 410 aa, unidentified
MEVLYPHCAGLDVHKTTVVACARLAQSDGAHSEIRTFGTTTGDLLNLSAWLSEKRCTHVVMEATGVYWRPVWHILSDGEFALTLANAAHVKNVPGRKTDVRDCAWLADLMAHGLIRGSFVPDGQTEAMRTLLRTRKQLVRERSSHVQRLQKTLEGANIKLDSVISDIMGKSGRAMVEALIAGETDAKALVALADRRIRAAPEALEQALTGRVVKHHRFMLRLHLGQIDAIDAAIASLDAEVEADLAPFREGVELLKTIPGVNDVGAPTILSEIGCDMTRFPTADHLVSWAGLCPRSDESAGKRRSTRMKKGAPWLKVTLIECAWAAKRKNGSYLQAQFNRICARRGPKKAIGAVAASILRAVYHMLKNKVPYQDLGADYFIRRNKTAHTRRLLKSLQNLGYAVQLTPVAA

SEQ ID NO: 77096 - protein, 336 aa, unidentified
MKYIGLDVHKKNTFACVMNISGKEIHSMEVSSKPSGLKEIAEYMENEEYAVLMESSTYSIKVHRFFQDRGVLTYTAHAKYLAMITKSDRKTDKIDASHLARYLRLWMSDELPLSMSYIPSREAEALRALCRLREELTHEIADSIRRIKSHLSATGIEIPYPVANHRTKKFMSYMRTWHKNDMTLMNRLDMLESLFGRAKKIEAEMEISGRNDNNVRLLMTVPGIGMQSAVQMMSMIIDVTRFPDPEKLCSYFGMAPRVRNSGEKEHHGRMTKNGDPMMRAVLDRVTYVHICNCDSSITEFYNRKSNENKKKALTSASRKMLCMIYAILSRGTGFAA

SEQ ID NO: 77097 - protein, 402 aa, unidentified
MRYFVGLDWAKLTHAVCVIAEDGAIVLRLAVDHTAEGLARLVTALRRFGDPADLGIAIERPSGLLVDTLVEAGFVVYPIHPNVVKASRPRYSAALGKSDPGDAYLLADLLRTDGHRFRALCSLSDETRALRALVRARTDLVSTRVGLANQLRALLESFWAGAVAIFGEVDSPITLAFLLEYPTPASAARLGPKRLAAFLSAEGYSGRRSPDELLQRLRAAPSVKLGPAEMEAKGTLVGSYATLLDTTVQQIRQLTSAIERAALAHSDATVFTSFPRIGKLNAAQILAELGAHDRFLSEQQLAGEAGVAPVTRMSGKHRAVVFRWACNHRLRAALTWWADNSRRASPWAQAVYLSARQRGCDHPHAIRILTRAWLRVLWRCWKDAKPYDPTQHRAATALTQPA

SEQ ID NO: 77098 - protein, 400 aa, unidentified
MHSKSIQACVRRLGKDARIHQEVRAFGTMTKDILALADWLSSEEVTHVAMESTGVYWKPIYNILEGRFTILLVNARHVKNVPGRKTDLKDCQWLAQLLQCGLLKGSFVPDRPQKELRDLTRLRTQLVNEKSAVINRIHKILEDANIKLGVVATDILGKSGRDMIRALIRGEEDPVQIAEFARRQLRGKIPQLRCALEGHVTDHHRFILNELMDDLEYLEGQIERFSQRIDQVSGPFEEAIEEVARLPGFEKRSAENVIAEIGCDMERFPSEEHLSSWAGMCPGNNESAGKHKRGKTNKGSRWLRTTLAQSAWAASKKKGCYFQAQYSRLAGRRGKKRTLIAVGHSLLVVIYHVLNNKTGYKELGADYFDKLNSKRLVPYLVKRLENIGYEVNLVPCQKAA

SEQ ID NO: 77099 - protein, 373 aa, unidentified
MSTTPVQFCPMLAIAVEMSGATWLVGSCAGTKLRRKAVSDEAPLVRMRSLLAEVETALKRFGAGEHTRVVVAYEAGQEGFWLVRELRARGIEAEVIDPVSLKVDRRGKRAKTDRLDVEALARALYAWMAGDTTALRMVRVPSKEDEDNREWQRERDRLTSERRSCLDRIGKKLRTHGIWRWDRVALTQGTLRCADGTPLGRMLQETLRMELDRVEKAEARLDVLNAQVGELTDAAHSRIERLALLRGIGEIGGRGLALKLYWRDFNNRRQVGACTGLVSLAYDSGTMRQDQGISKQGDPSLRALLVEVSWLWLKHQPTSAISAWFKRRTEGQGKRHKRSMIVAVARRLAIALWRYLKDGVVPEGATFKAGRAI

SEQ ID NO: 77100 - protein, 328 aa, unidentified
MSRAAVGIDVSKKTLDVAVTVDGKEVVSAGQFANETKGHKALLKWVNKQTRKHSSSEVHYTMEATGSYSEDLHEFLSEAGEKVSVENPMKVKSFSQVQMMRTKTDAVDAAVIARYAWIIKPALTPPMEPSIKRLRALVRHVEHLTGHKAQEANRLEGARDKLVIKSIKAIVKRYDQEIAKTMEEINKHVADNPDLKKKRDLLTSIPGIGEKLSSQLLCEIKGDAVSVKAQVAHAGLAPRQRVSGSSVRGKTQICKMGNARLRKALYMPTMSAIRCNPHIREFYKKLVSQGKHKMVALCACMRKLLVIALGVLRNGVPYQEDWVSKRPA

SEQ ID NO: 77101 - protein, 336 aa, unidentified
MSKVTVFVGLDYHQDAVQVCVMDRAGTLLANRPCPNSWETICDVAGRDGHTVRAAIEACSGAAELAEELVSRAGWSVDLAHPGYVARMKQSPDKTDFGDARVLADLERVGYLPRVWLAPFAIRELRRLSRFRQQLAAQRRNCKLRIRALLRDGRVKPPEGKAWSAGWMKWLQQTGEVSAQTRWILDRQLAHLAYLASEIRAAEKRLAALTTDDPVVQKLLTLQGVGLITAVTLRAEIGRFDRFRNGKQMSRFCGLSPRNASSGQRQADAGLIKAGNAELRAVLIELAHRLIRYDRRWGRLAMCLRIGGKPGSVVAAAIANRWVRWLHHEMQTIQAA

SEQ ID NO: 77102 - protein, 344 aa, unidentified
MYHYAGIDVSLESSTICVVDGTGKILRETKVASEPEALIAWFRSSGLAFERIGLEAGPLSQWLYAALREAGFAVELLETRHVRDAFKSMPVKSDRNDARGIAQLMRLGWFRPVHCKSIEAQETRAVLTARKLLQSKLRDIENSLRGVLRGFGLKVGKTTECTFAARIGELVAGHPRLELVAKALLEAHAVLRREFNGLDKHTQKLARAHPPARLLMTTPSVGPIVALTYAAAIDDPKRFRSSKTTGAHFGLTPKKHQSGQKDYTGRISKIGDASVREALYQAAHVMLTKPIKGCSALKSWAMRISKRAGMRKAKVALARKLAVILHRMLADAKPFNPTAKAATT

SEQ ID NO: 77103 - protein, 343 aa, unidentified
MEAKRFIGIDLHRDCFTACVRLENGREYLKRWKLEEMPKFAAKLRPTDQVAVEMTGNTRLFHDQVAPLVDRIVAVNPTQFQVITHSVKKTDPNDARLLALYLAKDLLPEVRMKDKTQAQIASLTQTRDTMVKLRTALKNKVNNICSANGVNLNRESLASEKGLRAVGEMPFDPLVNLELKIIVDQIRRLNQSIAELEKVIGDEGQKLEGHKNLTSIKGIGKLSGGILLSIIGDIGDFADEGKLAAYFGIVPRVSNSNETEHSGRITKRGTKLGRTTLIQCALIAQRYSPYLKTYFEKMKARRGAGKAIVALARKFLGIIYRTLKNNWVFEDFPNFVLAEEATA

SEQ ID NO: 77104 - protein, 343 aa, unidentified
MQTVTTIGLDIAKSVFQIHGVDAAGQVVIRRQLKRRVVLAFFEKLSPCLVGIEACASSHHWSRELQALGHTVRLMPPAYVTPYVKRQKNDMADAEAICEAVTRANMRFVPTKTLEQQSCLMLHRTRHLFIRQQTAVINSIRGHLAEFGIVAPVGRKGVMELLQVVADPSDKRVPEVARACLAALGNQLLSLKEQILEFDRMIMAWHRSNEPSKRLRYIPGVGPMLATALVASVADPRNFRSGRNFSAWVGLVPKQHSSGGKDRLGSISKQGDRYLRSLFVAGALAVIRYAKVQGTKHRPWLTALLARKPTKVAAIALANKLARMAWAMMARGERYRNPVALAA

SEQ ID NO: 77105 - protein, 374 aa, unidentified
MKQVSKFVGLDVHKDTIAVAVSEANGGPTRYYGEIPNTAKALAKLVKTLTAQGDPVAFCYEAGPCGYGIYRQLTQLGQACAVVAPSLIPTKPGDRVKTDRRDSESLSRLHRAGELTAVWVPDLEQEAMRDLTRAREDMKGLERITKQRLNAFLLRHGRNYDRGKCRWTQAHSRWLEGLKFERAVQQIVFQEYGNAVKQAEARVAGLEQELAQALKTWELAPVVEALMALRGVKLITAMTVLAELGDLSRFTSPSQLMAYLGLVPREHSSGQTRRRGGITKTGNGHVRRVLVEAAWGYRFPARKTAHLQRRAKQTSEAVQAIAWKAQKRLCGRYRHLLTAGKLTVQACTAVARELAGFIWAIAWEVMNRPVVTTR

SEQ ID NO: 77106 - protein, 411 aa, unidentified
MRLFVGDDWAEDHHDVEVMDAAGRVLAKRRLPEGVAGIAQLHELIGRHLGEDADEAEVVIGIETDRGPWVAALVAAGYTVYGVNPLQASRYRERHGVSGAKSDAGDAHMLTDMVRTDSHQLRAVAGDSAEAEGLKVLARTHKTLIWERTRAVQRLRHQLLGYFPGALEAFDDLDAPDALELLGKAPDPARAARLTRAQVSAALKRARRRNIPDRATAVLAALRSPQLGQPAAVTAAYAATVRSLIAVITVLNEQVKILQRQVEEDFGRHPDAEIYRSQPGMGAVLGARVLAEFGDDPHRYTDGKARRNYAATSPITRASGKKKVVAARFIHNDRLVDALNAQAFTALRASPGARALYDEFRGRGIEHNDALRRLANRLVGILHGCLKTRTLYDEATAWSHRQNLPQSSVAA

SEQ ID NO: 77107 - protein, 391 aa, unidentified
MIYIGIDVAKDKHDCFITNSDGEVLFKAFTISNNLDGFNELYQKIESVMEDTTKVKVGLEATGHYSYNLLGYLIDKGLPTYVINPLHTNLYRKSLSLRQTKTDKVDARTIASMLMSDVNLKSYSDTSYHNEELKSLTRYRFDKVKERAKLKTSVSRLVCILFPELEKLVPTLHMASVYALLSEFPSAKHVATAHLTRLTNLLSKSSKGRYGKDTAITFRDSARASIGSNMPAKSLELKHTIKLIQELDSEIDEIENEIKIIMDEINSPILSIPGINYRMGAMIIAEIGDFNRFDSPDKILAYAGFSPSTYQSGQLDGAYAHMEKRGSRYLRYALYNATKYVCHWDPTFAAYLAKKRAEGKHYNVAISHAVKKLVRVIYHLEKTKQQYIKAA

SEQ ID NO: 77108 - protein, 344 aa, unidentified
MTTKLMAGIDLHSNNLFCGIVDMAGKRVFEKKLPCHLESVLKALKPFKKQLEKVAVESTYNWYWLVDGLQDHGYPVVLANPAAMQQYDGLKHADDKSDGFFLAEMLRLNILPTGHICDRAVRPVRDLLRRRMGLVHKRTSLILSLKSLHTRMTGRDLGTGAIKALKPKEAEKLFEHPADQLITRLDLQLVEQLNQSIKTIEATILATVKSLPDYQMLQTIPGVGRILGMTITLETVDPKRFASPGDYASYCRCVDSRRMSNGKKKGANNGKCGNKYLAWAFVEAAHFAQRHDRACQKFYDHKKGQVNGIVATKALACKLAKAAWHMMSQNTRYDAGRMFPGARK

SEQ ID NO: 77109 - protein, 354 aa, unidentified
MIIIGCDFHTRYQQIAMAREETSELLVERRLDHESGEAQAFYRSLQSLREPVRVGIEATGPIHWFERLLAELGHELWIGDSAKIRASEVRKQKTDERDARLILGLLLAKRFPKIWVPTPAERDLRQLLWHRHKLVCLRTMLGNQLHFLAMSQGLCRKRKLFTKKGRAELTGLALGPWTRRRREELLKLLDQLDPPIAEVDRAVLEEAQRRDDAVLLMTHPGIGPVTSLAFVLTIGTVTRFCCSRKLVSYLGLNPSEDSSGQRRRLGAISKQGNTMVRWLLIEAVYPAVRKDLALRQDYQRLKFRRGHAVAKVAIARKLAVRMYWMLRSGADYAQLVRRQGSPGATLVDASPSLG

SEQ ID NO: 77110 - protein, 361 aa, unidentified
MSESMALVGLDVHQAQTVAALLDPATGELRVERLRGEPASVVPVFLEELDCPVAAVYEAGPTGFALARVAEQRGLDIRVVAPGSIPRAPGDRVKTDRRDAKRLVRLFAAGELSYAFVPSEADERFRDLVRCIEDARKDLMRSRHRLSKFLLRRGQRFPCRAWTQPHERWLVKLRFEDAPSQATFLDYLSAVQALVQRRRTLIGVLEQTVPESSHAQTVERLRCFRGIDTLTAAGLCAEIGDFTRFAKPALLSGFLGVVPSEYTSDDKRTQGQITKAGPPHARRLLVEAAHHYRHQARVGERLAARQSGQDPRVVQVAWRCQRRLHARWSHLAGTRGKKTGTVAIACARELAAFCWEAATLD

SEQ ID NO: 77111 - protein, 406 aa, unidentified
MDVVYTHVCGLDVHKKNVVACVITPETKEIRTFSTMTDDLILLVDWIKSNGCTHVAMESTASFWKPIYNLLELEDIQTLVVNAKNIKNVPGRKTDVKDAEWIASLLRHGLLQGSFIPNRDQRELRELIRYRRSLIDERAREVNRIQKVLEGANIKLSSVASDVLGKSGRAMIEAMIAGEENPELLSELAQRRLKNKKAELQRALNGLIGNHQKLMLAAQLRHIDYLDEEIGRLDEEIKRRMLPFEEDLELLDTIPGVARRTAETIAAEIGTNMDQFPSAAHLCSWAGLCPGQNESAGKRKSGKTRKGNKKLRSALVEAARAAGRTKNTYLSSQYHRIAARRGANRAAVAVAHSILMIAYYILKRRQPYIELGPNYYEERKRDTNIRQSLKILESLGLKVTVESTAS

SEQ ID NO: 77112 - protein, 456 aa, unidentified
MTTSLECIEPNAAGIDVGSFSHFVAVPAGRDEKCVKEFSAFTADLQALADWLKTCDIKTVAMESTGVYWIPLYEILEEKGFQVCLVNARYLKNVSGRKSDVLDCQWIQQLHSFGLLKPSFRPEEETIRLRQLVRHRGTLVKWSATHIQQMQKALTQMNLQLHNVVSDITGVTGMKIIRSICDGEQDPKKLASHRDSRCENSAETIAKSLQGHYKAEILFSLKQALSSYDHYQKQIAECNEAIRKITETFEDKSNGKSLSKHKRETHKVRIGFDAQTQFFKMLGTNLTEIPGINTLTVMAFVSEVGTTVDKWPNAKAFASWLGLCPGTKISGGKRLNSKSKPCANRLAEALRMAASTLSKSQTCLGAFLRRLKARLGPAKAVTAVAHKMAVIIYNMVKNRTGYREAGLDYYDKLHKERAVKNLRRFAERLGYTVMPQTTAKTALCNTQNSNTLQCVI

SEQ ID NO: 77113 - protein, 319 aa, unidentified
MAKIVLGIDVSKRTLDVALIFEARTLCKQFKNSTDGFRSLSDWLASLEIKQVHACLEATGIYGEAVALFLHECGHRVSVVNPLRIKGYASANMQRNKTDRLDARLIATFCLTQEPDEWQPPSAEVKHLQSLVRRVEVLEEMLQAEENRLTNAAPQIKSSIERIITLIKEEIKVLERQIKQHIDRNPHLKEQSELLQTIPGIGARTANLLLSEIEFERYSSARSIAAQAGVTPRKRQSGTSLKQTSLSKLGNARLRKALYFPAIVARQHNEIVKEFAKRLKKNGKTPMQIVCAAMRKLLHIAFGVLKHKRAFDASLAFSA

SEQ ID NO: 77114 - protein, 408 aa, unidentified
MDVVHARCCGIDVHQASLAVCVSIKEEGKSEKHKLHCGTTTAELLRLSDWLHGHGVTQVAMEATGVYWKPVWHVLEGQFELLLANPTQVKALRGRKTDLKDGERIADFLQHGLLQGSFVPPRSIQQLRDLTRSRTMLKQEQVRVGNRIMKVLEDANLKLSSVMSDVMGVSGREMLRAIIQGKTNPAELAELARGSLRGKIPQLQQAARGSLNEHHRFLIEQWMGMWDELAARIAKFEERIEEQIRPFEPVVKTWASLPGIDRVTAWTLVAEMGADMRQFPTAAQAASWAALCPGQEESAGKRQSGRTRRGNVWLRRALTQAAWGASVTKGSYFKAFYHRLAARKGKKRAIVAVAHALLVTGYMLLWTGRKFEDLGAHYFDRLDRERLTKRLVKRLERLGHKVALQPAA

SEQ ID NO: 77115 - protein, 340 aa, unidentified
MDHYAGIDVSLESSSVCIVDAQGKIVKEAKVASEPEALIAWFVSQPILPARIGLEAGPLSQWLFAGLKSAGLAVELIETRHVRDAFKAMPVKTDRKDARGIAQLMRLGWFCPVHCKSLPAQEVRALLTARKLLQAKRHDLEMSLRGVLRGFGLKVGPTTPKTFEGRVRDLVAHHGTFGMIADALLKARTVLMQEFKAIEKRLYAFARGDTPTRRLMTMPGVGAMVALTFSSAIDDPGRFRSSRVVGAHFGLTPRKHQSGESDVTGRISKIGDHGVRVALYEAANVILTRAVKGSDLKNWALGIAKRAGMRKAKVALARKLAVVLHRMLADGTSFMPWAVW

SEQ ID NO: 77116 - protein, 416 aa, unidentified
MNAVGIDVSSRKSTVAVLRPLGEVVCLPFDVSHDADGLASLAEKLKALDGETRVVMEHTGRYYEAVAKALHEAGFFVCAVNPLLIKEYGANSLRRVKTDKADAVKIARYALDNWADLRDFTPMDAIRYDLKTLNRQFQLASKQRTASANNLIALLEQSFPGIRKCFDSPVRSDGTQKWVDFAHSFWHVDCVRKQPFAAFCERYRKWCKRHAYLFKLSNAEEVYALAKRAVVLTPKSKVVKVLVQEAANQLISISRSVEVYRAEIDRLAAMLPEYPVVMAMYGVGKSYGPQLMAEIGDVRRFERKQALVAFAGIDPMPNQSGDKNVRSNKSSKRGSPYLRKTLFNVIRTYLQCAPQDEPVFQFLNRKRAEGKPFYVYMLAAANKFLRRYYAKLRDFFASLDTLQPVDPIPTILKATL

SEQ ID NO: 77117 - protein, 463 aa, unidentified
MSDVKRSSKKKTTKAGPAALPVLEPMVAGVDVGSTQHWVCGPARADGEPNVRVFGTTTLQLNELADWLVKQDVKSVAMESTYVYWIPVFELLESRGLKVVLVNARQLHNVPGRKTDFSDCQWIQLLHSCGLLRGSFRPTEAIVGLRALQRQMANIVAERSRCVQWMQKALDQMNVQVHRAVTDLTGTTGMAIVRAIVAGERDPARLAVYRDRRCHKSVEAIAQYLTGTWREEHLFNLAAALRLYDSLQDTIASYETRLRAQLEALQPPERQHEDVPRHPNPTKEKTIRQRGEQPLRTSLWRFAGVDLTRFDGIRAVAAQTVLTEVGPDVTAFPTEHHFVSWLRLCPRTPISGGKPLKKRRNGMGANRVAAALRMAALGIQRSKTALGASFRRIARHKGAAVAVFATARQLARLIYRMLRYGQDYVDIGEAAYEAKFQARLLAGISENARSLGLTLTKNEAAAG

SEQ ID NO: 77118 - protein, 432 aa, unidentified
MEKIREKAAGIDIGAKKVFVAIEGQEVRYFFTFTEDFEKLRDYLLEFKIITVAMEATGVYWNILYEILEEAGIDVWLVDGRQTKQVPGRKTDVKDCQWIQQLHSYGLLNRCFVAEADIKELRAYQRLREDHIRSASMHINHMQKALTEMNIRLTEVLSQIHGVSGMAIIEAILKGERNKETLLKLCDSKIIKHKKEDVLKSLNGRYTKHGIFALKQAFDSYMFYQHQIEQCDQMLSEVIEKIGKGKQDQYPQGPRKPIRHNKPDINNLGITLLKIFDGKDATALSGITDYSWMQLMSETGTNLSRWQSEKAYTSWLGLAPGQHTSGKMRRTKRKNGHPKAGQIFRQIAQSIITSKHIALGAFGRRLRARKGSQIAIKSVARKLAVLYWRIMVKGMTFVEEGIKKYEQQLLLQKQKSLERLAKDLNVQIAYNV

SEQ ID NO: 77119 - protein, 344 aa, unidentified
MSEVIIIGLDIAKHVFHAHGADERGQAIFSKRISRGKLLDFFAAQPSCTVALEACGGAHHWARQLTRLGHEVRLIPPAYVKPFVKRQKNDAIDAEAICEAAQRPSMRFVAVKSEQQQAAGLVFRTRDLLVRQRTQLINAIRGHLAEYGWVAPKGPSHVAMLADLIEEEAMASSLPEATHAMFRLMLDLLAGLNGKIADLDKEIARRAREDEVSRRLMTVPGIGPISATAIAALAPPAETFAKGRDFAAWLGLTPLQRSTGGKQKLGATSKMGERTLRRLLIIGSSAVVQQASKRGAPRGSWLEQMLARKPRMLVTVALANKMARIVWALLVKQENYRAPVAAKA

SEQ ID NO: 77120 - protein, 341 aa, unidentified
MERFIRTAIDLGKNYFQVHGLESEGGRSISRKVKRSKMHEVYSQIEPCRVGMEACGSAHYWARQLTAMGHEVVLIPPAYIKPYVKRGKNDVVDAAAICEAMSRPDMRFVPIKSADQQAVLMLHKTRELLVKQRTMAVNALRGHLAEFGIVAAKGIGRVDELLALAKADAALPHIAGAAVACMAGHLEGLDLSIETVDEEIAKAHRQNPISGLLDEIPGIGTLIASATAASVPDPGVFKSGRDFAAWLGLTPRQNSSGGKEKLGAITKQGNRYIRKMLVTGATSVLRVAGKRKGALADWINALRARKPERLVAVALANKLARICWAIMTTGEGFRTDTYVKA

SEQ ID NO: 77121 - protein, 338 aa, unidentified
MYYTGIDLHKKTSFITTIDKDGKIVTRANLQNVEEDILAYFAALDKETKIVIESMASWYWLYDLLTGEGFEVVISNPVKTKAIASAKIKNDKLDSHMLAQLLRADLVATVHVSSLETRKLKELLRHRSRLVRDATRMKNRIHMLLMKNNFRSPFSDLFGVKGLRYLEEIDLPDYHRQQVETYLLLYQKLREQIEPLTKRVRALAKENHTAQLLMTIPGIGPITAMFIIAEVDDISRFRSYRNLASYAGLVPSLDASAGKEKRGRITKQGSRYLRTALVEAAQAAARMKNCRVSIFFRRRIVKGGYQKAIVATAHKILQYAFYVWKNQTPYKETYPVCA

SEQ ID NO: 77122 - protein, 456 aa, unidentified
MVVDEEIFILFVQEKKKSFLATMTLINFVAANQKNYAFNLLSVFIMVFWSVQYLLQHLLVQTQLSDQLLQPLILILQLPQTPQFRHARPGKFFLPVNGMDYLLPLRLTVRNVLTRRITMNIVFLGIDLAKNVFQLCGLNQASKPVYTKRTGRKELLQTLANIPACLIGIEASTGAFYWQREFEKLGHKVKVISPQYVKPFVRGQKNDGNDAQAIAVALMQPTMQFVPPKSPEQQDIQALHRARQRIVNHRTATVCQIRGLLLDRGIPIGSAVSRARRAIPLIPEDAENGLSSRMRRTIAELYDLFNDLKRRIHFFDKEIETVFRQSEACQRIAKVKGIGPKTATAVVAAIGKGTEFKNGRHFAAWLGLVPRQHSSGDRQVLMNMTKKGDKHLRTLFIHGAHAVVRVATNNNDGHMNQWVNQLKERRGFNKTTVAVANKNARIIWSILRNETGYQVV

SEQ ID NO: 77123 - protein, 344 aa, unidentified
MNSTTIAVDVAKSVFEVAVSIHPGQVHERHRLSREAFGRFLGAHPPATVLMEACGSAHYWARPAQSHGHRVVLVAPHVVRPYVVRNKTDRTDAKGLLEVFRNEDVQPVPVKSTTQQALAALHRLRSTWLATRTARLNTVRGLLREFGLIIPVGAHHVVPHVRAVLEDVDAGIPGLLRPPLAAAVEEIGELNRRIRAVERQLETAAADTLAVGHLRTIPGIGLLTATALVATVGDVARFPSARHFASYLGLTPREHSSGARRRLGAISKRGDTYLRMLLIHGARAVLWHAKAKAAASPDRLRIWALQLERLRGHNKAAVALANKLARIAWAVWRRGTPFAVVPAA

SEQ ID NO: 77124 - protein, 387 aa, unidentified
MTKNKGRVVGLDVHPDSFAGAVVQGRDPASAVVLSTSTRVELERLEEWARRHTSTEDTLVLEASGNAFAVAARLRAIGREVEILDSHHAGKVGKVYCANDRVDAVKIARIYLSALSPIVWQPDQKTLERREIFSAYQAVVKESTRAKQQLRSMLNEHCVRLEKGFRLCHPQAITRLLKLREWTPARRMLLQQLHGSLLAARARRTMLRRHMAQEIVAEEALLRLTRLCGINLITLYGVVAAVGDVHRFTQSKKLVAYLGLNPSVSQSGNFQGNGALKRHGRGALRALLIQSGKKLLEVNNPLQKWGLAVAARRGRNKAAVAVARKLCVALWHVMMGHAIGTLERLDTLQTKLSKFATEIGPAALTAFGYNNKADFVEKKLYVLRSYP

SEQ ID NO: 77125 - protein, 414 aa, unidentified
MDEPTTSAGLDWAKDEHALCVLEEASGRVLLERRFAHEEGGIEKLCRSLMQMGVERVAVERPEGVLVERVLEAGIVVIPVHPNQLKASRPRFRASGHRAKSDSFDAFCLAELARTDHHRFRALVPDSDQTKALRALTRSREDLVGTRVALANRLRAELEAFWPGSATLFSEIDCAISLAFLKRYPSPIDASGLGEKRLLGFLSRQGYPGRKSALELLQRLRKAPQGRAGESEIEARRATVLALVAALETLLEQIRLLEERIAKAVRAHPDGEVFLSLFRSSKSTITAASLVAEIGERRGRYPTNEALAAAAGMSPVAVESGRRKVAVFRRACDKRLRRAVAILAESTRQHNPWAKDIYQRARQRGCDHAHAIRVLGRAWVRVIWRMWQDGQPYDPSRHGGLQHFRSTEELPQGV

SEQ ID NO: 77126 - protein, 455 aa, unidentified
MPKTKRSRMEMSPVHANAAAIDIGATLHVAAVGPDRDPEPVRSFGTFTGDLHRLADWFKQCGVSTVAMESTGVYWIPVFEILEQLGFTVVLVNARDAKHVPGRKTDVTDAQWLQRLHEYGLLRASFRPESRIAALRDYLRQRERLLDYAASHIQHMQKALMQMNLQLHHVVSDITGATGMRIIRAVVAGERNPVTLAALRDQRCKESAETIRQALVGNDREEHIFALAQAVELYDTYLAKVDDCDKRIEAVLTELKATCPPPPAPLPAPRYRTQQPNALSFPAREVLHQILGVDLTQIHGLGPYLALKLVGECGTDLSAWPSAKHFSSWLCLAPSNKISGGKVLSSRTRRSSNRAAALLRLAAVTVGRTETALGAFYRRLAGRVGKAKAVTATARKIAVLFYNTLRHGMGYADPGASYYEDRYRQRVLANLKRRAKSLGYALQLTEITAAGTEVS

SEQ ID NO: 77127 - protein, 388 aa, unidentified
MEPTSIQPTAVRTDLGAIFVSLELSRSTWLITSLSPGSGEKMSKHVVDGGNVAELLDRFEQLQQKARLRTGKSFPIVTIQEAGLDGFWIHRVLEANGIESYVVDAASIATSRRRRRAKTDKIDGEALTRTLLAFKRGEPRVCAMVRAPDPEDEDRRRICRERKVLIAERVRHVNRVKGLLFAQGVSGYQPLRKDRRQRLEELQTGDGRELPKHLKAQINRELDRLELLLEQISTVESERNSLLSTCEQPAVEATSPAAMLLSLKGVGAEFAAVLWTEALSRHFDNRRQIAAYAGLTPTPWMSGTIDHEQGVSKAGNPRLRTTMIQLSWLWLRNQPASALSRWFVDRVQLNGGRLKKAAIVALARKLLIALWKFVTAGVVIEGAVMKTV

SEQ ID NO: 77128 - protein, 382 aa, unidentified
MLNKTSIRTIGVDVHKDSYSICTYCPESDSFVGEIMMTSSSKLVTNYVKRLEKDLGPDNSIIIGYEAGPTGFGLQRDLLKAGIDCKVMAPTTIYEKKGGNRVKTDRGDARKIAKALHWGAYKEVIPLSPEDEATRDYIRMRDDRQNALKKAKQQLKSFLLRKGKHYPEKGSSWTLKYRAWLKSLEFELSTDQLTYNEYYAEVCRLEEMVERFDKQIEEYSQDDRYKENVSNLRSFGGIDTYIAMATVCEVGDFSRFPTAKDFSSFIGVCPGQQSSGGKTQMTGITKAGNSHLRRLFMESANSMARTTIFNKSKRLKARQSGNSAAVIAYADKGTARIRYKYNKMVREGKNANLAKAACAREIACFVWGMMTGNINGEVIAEM

SEQ ID NO: 77129 - protein, 336 aa, unidentified
MAIVRVFVGLDYHVDFVQVCVMNRKGKILRNRKAANDWQAIAAMVAEMGRVASAAIEACSGAAHLTDELIHNAHWPLQLSHPGYVARMKQSPDKTDFSDAQLLADLSRVGYIPKVWLAPPEVRELRRLLRFRQQLADQRRNVKLRIGALLREHRVAQPAANPWTRRWRIWLEALELPAETQWIIGRQLRRFDAVNLDIAAAESRLAKLAERDRLLQFLLTLSGIGLVTAVTLRAEIGRFDRFHNGKQLSRFCGLSPRNASSGNRQADAGLIRAGNPQLRAVIVQAAHRLKRYDPRWSALAMRLRRRGKSGSLIAAAIANRWMRSLYHQVQHWSTAN

SEQ ID NO: 77130 - protein, 369 aa, unidentified
MEVLHARCAGLDVHKDTIVACVRLAAGDEVQQEVRSFATTTQGLLALADWLMASGVTHAAMEATGVYWKPVWHVLESACELVLANAAHVRNVPGRKTDVNDAVWIADLLAHGLLRASFVPPTPILELRDLTRTRKQLVREISQHTLRIQKVLEDANVKITGLISDLLGLSGRAILEALANGETDAERLVDLTQGRLKAKRAALLQALQGHVTEHHRFLIRLHLGQIDALQRAVGEIEARLGEVLVPFRWATRLLITMPGVSDVVAQVLVAEIGTEMGRFPTAGHLVSWAGLCPRMDQSAGKRRSTRVRHGAPWLKTVLVQAAWAGVPHWVRYVGAWALATVGSRHSSPAQTKKKARALCMTASVSGRAP

SEQ ID NO: 77131 - protein, 367 aa, unidentified
MKKVSTVAAKASRKFSQQKLTIGLDLGDRSSWYCVLDEAGSVLLEQRLSTTPKALREVFGGMPRSRIALETGMHSPWVSRLLSELGHEVIVAHARNVRLIGESRKKDDRLDAQTLARLARIDPELLSPVKHRSAKAQADLSVIRARAGLVRARTALVNTARGLAKSYGERLRGCNVRNMNPEKAEGLSPELQAALQPLLAALGSLSERIAEYNQRIEKLAQESYPQVALLKQVKGVGTLIALTFLLTLEDPHRFCKSRDVGCYLGLQPGRRNSGQNEPQLHISKEGDPYLRTLLVQGAHHILGPFGADSDLRRWGLKLAERGGKSGKKRAIIATARKLAVLLHHLWVSGEEYEPLHNSSQTTVAAAA

SEQ ID NO: 77132 - protein, 347 aa, unidentified
MDHIGIDVHKKESQICILAEEGELLEQRIRTEPARFAAVLGARPRGRIVLETSTESEWVARCLEGLGHEVIVADPNFAPMYATRSRKVKTDRRDARALAEACLLGAYRPAHRLSDPQRHVRGRLLVRDAIVRTRTRYIALIRSLLRQHGYRVPSGSAEGFPLRVGTLALPGPLRSQIAPLLAVMRHLNRQLTYSDETIAHLAVQDPRVQRLRSVPSVGPVTAAAFVATIDDVQRFRHAHQVEAYLGLVPREFSSGESQHRGHITKAGDARMRWLLIQVAISILRRRPPQAEALRAWALRIAVRRGKHVAVVALARRVAGILYALLRDGSVFTPRAAPQPDPVAAVPA

SEQ ID NO: 77133 - protein, 372 aa, unidentified
MASIIYVGMDVHTTNLTFCCYNADSDRGFAVAQTEPDYRQVIKYMERVQKQRGEECKFVCGYEAGCLGYSLYHQLTRCGVDCVILAPSTMHQEKGKRIKTDRRDAENIARCLAFSLYSPVYVPTTEDDAVKEYIRMRDDIKVDLKRVKQQIIAFTTRHGFAFDGKSYWTQKHLKWLETLVFEHPLYKETLQEYLILYYMLDEKVAVYDTRIEEMSHLEHYEENVQKLCCFRGVAAHTALSLLVEVGDFQRFRSAKHFAAYLGLVPGEHSSSDKQIRTSITKAGNTHLRRLLVEAAQSYNRGAIGKKSAALKARQGGNPAEIIAYADKANERMQRKYYRIAFKSRHNIAKTAIARELACFVWGMMTGNISNAA

SEQ ID NO: 77134 - protein, 407 aa, unidentified
MSCKEPSPDRFVGLDVHKHYLIAAAVDPDRNEVMSPRRVPLERLDTWVRKALTPQDAVVLEMTTNAFQLYDDLLPHVHSVTVVHPPHVALITRAQVMTDKIAARTLAKLHAVGLLPCVWIPPFGVRDHRALVAQRTKMVRLSTQAKNRLHAVLHRHHLLPPAGTLFDSSDRQWWLTLDISALELARVRCDLDTLVFARAQIDLLEETMLDLAVQDERVVLLLQLPGVGLITAVTLLAAIGDISRFSEAKNLVGYAGLGARVHDSGQTHHTGHITKAGRRDIRAAMVEAAHVAVRTHPYWHAELARLEPRLGKNKAIVAIARKLLMAVWHILTNDCADRFADPERVARKLLCLAHRLGCARQPQGQSAAQFVRHHLDRLGLGAELTSFSFGKTRSIDLPPSQLAAEAN

SEQ ID NO: 77135 - protein, 344 aa, unidentified
MEITTIGLDLAKSVFQVHAVDATGQPVVRKALRRAQVLPFFARLPPCLIGIEACGTSHHWARELIKLGHDVRLMPPAYVKPYVKRGKTDAADAEAICEAVTRPSMRFVPVKSPEQQAALSLHRTRDLLVKQRTQLINMMRGLLGEFGIDIPQGLERALLLARKIVDGEALDVPAPAARMVGTLSQQALDAHVRLREIDRDLLAWQRSNDVACRLMTIPGIGPVGATALAASVTDPHQFRSGRQFAAWLGLTPLQNSSGGKERLGRISKMGDKYLRKLLIVGMTSLVRRARHKPETVDPRLAALLARKPVRVATVAMANKAARVVWAIMTRGDTYRAGHLPMLAG

SEQ ID NO: 77136 - protein, 423 aa, unidentified
MKVTFLTCCGVDVHKSFLVATIIKTTGGIDPSYLKKRFSTFNNSILEFKQWLLDNDCHDVCMESTGKYWIPVFNLLEDEINVTIANPKWVKAVKGNKDDTKDSKWIGDLFRLGLVKGSYVPCKAIRILREYTRYRYKLVSCRSSEKNRYQNALTVCNVALDSVVSDIFGKSSTSIIDYLLEQPGTSVNHEEIASKLLKSLKSKEDAVIESIEGYQMTDSQKYRMRLIRTHMDYITAEINDIDSSIEKMISSNPDYENAVRLLCTIPGVKRDSAIAIISEIGTDMTQFCNSKRLCCWAGLTPGCNETGGKKKSVRIMRAGVYLKPALVQCAHAAVKSSKSPYYKKKYESLVKRRGKKRAIIAIARMILTAIYQMLSTGEEWNPCDLYKVDMPAPLIEKEKTKAIKQAKKLLLREGIISESQLVS

SEQ ID NO: 77137 - protein, 451 aa, unidentified
MARKGKARKTDGAVLPVMRPHAAGIDIGATEIFVAVPTDRDAENVRSFPTFTQDLYALAEWLKRCGIETVAMESTGVYWIPLFQILEDRGFEVCLVNARHVKNVPGRRTDVSDCQWLQFLHSVGLLRASYRPDQDVCAVRSLLRHRESLVQMGATHVNHMQKALDQMNLQLHHVISDITGLTGLAIVDAILSGERDPFTLAKLRHERIKASEEVIAKSLVGDYRIEHLFTLRQSLIAYRGYQQLIDECDREIRRSLDTFQPPQPPADSHHQPESKKRRASADAGLRTELKRVFGVDLTKIPGIRTGIAQMLFGEIGPDFTKFRSASAFASWMGLCPDNDISGGKVLWVGTRKVKCRAATSLRMAAQSLHHSKSGLGDFYRRMRAKLGAPKAITAAAHKLARIIFHLVTTRQEFDDTRFAADQLRYLKRQENKLRARAHSLGFQLIPLENAG

SEQ ID NO: 77138 - protein, 459 aa, unidentified
MGKTKLGLRSRLYREFLNGTEPTELLIVAIDVSKFQPKAAIFEYFGDVIVEPFFFTPDHRGVAELCTIAQKALADTGKKKVVFGLENTGHYHEIILKILVDKGQSAIQINAVTTHEERKSFLNYSKTDDIDLHVIASAVAGGKVTFNSIPDDLKAELQYLTRTRRFLVKERSKLVTMLRVLLDHYWPYLQGIPEIVDKKMVVHKVFDDFSISLSLSFLKLVPSPKDALALGEQGLIQLCGENHLKIGLNRIQLILHSARLTRAVSERMLQHYIYHVRFYADNILRLNQEIASLEAKIEPVLCRTRGVLLLSMEQVNVTTAAEFMAEVGLEVHRYHSASAIIKLAGTNPVPSQSAGHSGQMKISKQGNPWLREAVTRIGKNLILGGNPYFVAFAGHLSCRFAKQRQVAAANKFIRVAYVMLTKGELFAPKVWQGESLTVDPLSKLKAENRNLAQQVLNSM

SEQ ID NO: 77139 - protein, 353 aa, unidentified
MTLYIGVDFHPHQQTVCWCDTQSGETQVLDLAHDLEKVRKFYWSLPERAIVGIEASGRARWFEKLLFEKGHKLLVGNPVLIRKRATSRHKNDRRDAELILDLLVRGEFPALWRRPAESESVLEILRLRTALVKQRTGVYNRLQVLAHSAGLPKRRMKGQTFQAILKSLDLDEAGSLSRSQYFALLGSLDKQIGELEEWLRRKAEKDEKTKLLQTQKGVGYLTALATVHYLGDVTRFARTAKQVASFAGLDPVEHSSAGRTRFGGVSKAGSPMLRFQLGQAASIAARYDARLKSFYQRLAKKKPKRVAKTAAARRLLVKLAIMLRDNINADEFDRRGRTVGNARSVPGSAMTAP

SEQ ID NO: 77140 - protein, 354 aa, unidentified
MKYFAGMDVSLEETAICVVDETGRVIKEARAASEPEALHALLSSFNVPFERVGLEACSLTAWLHSELTSAGWPAICIESRHAKAAMGAMPNKTDRNDARAIAQIMRTGWFKAVHVKTPICRSWRSLLVARRTVLNEMRTIENVVRAILRETGLKLGTPARKDFIFRARELATGEEVLVRMIEPLLEILATMLREFTKLTNQVLIIVRNEPVCRRLMSAPGVGPLTALAFRATIDQPERFKKSRDVGAHLGLTPRRYQSGETDIQGRVSRCGDELARTALYEAAHSLLVRSKKWSALRAWGMKIAKRRGMARARVAVARKLATILHRMWIDKANFCFGHEQLADPTTRAITIVAA

SEQ ID NO: 77141 - protein, 411 aa, unidentified
MEVIYKRCCGLDVHKEIVVACLLIREGGKVLKEIRTFLTMTSDLVVLHDWLQAHQVTHVAMESTGIYWRPVFNLLEGSFTVLLVNAAHIKTVPGRKTDVKDCEWIADLLSHGLLRGSFIPPEPIRDLRDLTRYRKSLTDERVREVNRLQKLLESANIKLSSVATDVMGVSGKAMLEALISGSTDPEVLSDLAKGRLRKKLPLLKEALQGRFRPHHRFLLGEILVHLDFLDEAIERLSQEVVNRTVPFSKVIELMDLIPGIDQRVAEGVLSEIGVEMSCFPTHRHVTSWAGVCPGNNESAGKRKSGKTQKGNRWLRRYLIEASWAAVRSKGTYLSALYHRLVARRGKKKAIVAVAHALLVMIYHILKDQVPYRELGSDHFDKLNATYVQRHHVKRLESLGFKVILEPLSQAA

SEQ ID NO: 77142 - protein, 449 aa, unidentified
MREPQEIEDEDHEQVVERVAAVDVAKASGMVCTRVPHESKVGRRVTKVWQVDATTNAIIELGEHLAALGVERVTVESTSDYWRGFYYLLEAAGLRVQLVNAREVKNVPGRPKTDKLDAVWLAKLTERGMLRPSFVPPAEIRQLRDYTRLRVDLTHERTRYWQRLEKLLEDALIKVSSVASTLDTASTRDMLEALIAGERDPRVLAGLARGRMKAKHAALAQALTGRFDAHHAELARMLLDQIDALSAQIGTLTARLQELLGAIPAAQGVDADGSTGPGAGSGADAAVLPAAARLDEVTGIGPGAAQVILAEIGLDMGVFPSPGQLVSWAKLCPRTIQSGAKTRAGTTGKGNPYLRGVLGEAAAAAAKTDTFLGERYRRLVKRRGKLKALVAVARSILVIVWHLLADPAARYADLGADYYTRRIDKDKKARNHIRQLEVLGFTVTLAPAA

SEQ ID NO: 77143 - protein, 405 aa, unidentified
MYYVGVDIAKDKHYVCILDDAKELACKPFWIYSDILGLRELLKRLAELSLDMNDFIIGIESTGAFSENFYSYITDADYKVILLNSYQTSKYRDFSTLKKIKNDSIDAYVIAELLASGKYKASYISNEDYHNLKVLNRLKKSLDDKIKTIKREITTVVATVNPEIEKVFPNIFTKTAIAIIKSYPTAMDISKATPEKLTKIFRHIKGNSFNLEKAKYLIELAKSSIYTGRANESRALMIKTNIKILELYIQERDEVEEQIQILIDNQLDDDSSNIENLKSIPGVSNKTVTAILGECGDLRRFESAKAFIGFLGLYPTLYQSGKSLSTGTLAKRGIPIAKHALYMAAVSAVRHNNELHKLFRDKVSSGKSKKEALIIIAKKLASIIYSLFKYNQAYNPYRVLIQHKK

SEQ ID NO: 77144 - protein, 381 aa, unidentified
MDQEQATPEKGHTTKFPVLYVAFELGNSTWKLACSDGRKVRQVTVTARDLGQVQGALLRAQTHFGMDGASPVVSCYEAGRDGFWLHRYLQDQGIDNVVVDSASLEVDRRLRRAKTDRIDAGKLLRMLIRYHGGEKQLWRVVRVPSREDEDARHLHRELESLKRERTRHRNRIHGILMQQGLRIPNPSKKRFLKDLEALRTWDGHKLPVAMKARLVRVHLQLRLVEDQISILATEKREQLKQVDNAKMRQVAQLLRLPGIGPVSSWTFVMEFFGWRRFRNRREVAALAGLTPTPYDSGRKLREQGISKAGNRRIRTLAIEIAWAWLRYQPRSKLSQWFSERFAGGGTRMRRIGIVAVARRLLIDLWRFLEYGVIPEGALLTT

SEQ ID NO: 77145 - protein, 375 aa, unidentified
MDKIYDICCGIDVHKKLIVACLNHKRKKELREFGATTRELMELAEWLQKNECEIVAMESTGSYWKPLYNIMESYGLHAIVVNPAHMKAVPGRKTDVKDAEWIAELLQHGLLQPSYIPSKDQRELRELVQYRKSLVGERTRELNRLQKMLEGANIKLSGTVTNINGKSARKILEYILSGNEIDEKKYDEMYEEKLIAHNLKASKEQILDDLKGFMSPLQRRMLKELLQHLDELNVHIENLNDEIDNFMKPEEKQASQVIQDVTGIGNTSAQTIIAVIGTDMERFPSDRHISSWAGLCPGDNVSAKKRKSGKIRKGNALLKSTLVLCAHAAVRHKSSYFHAQFKRISTHRGKKRAYVAVAHSILIAIYHILKDGVKY

SEQ ID NO: 77146 - protein, 365 aa, unidentified
MLHRLNSAATLIQRTTTEAPRGHMYYIGLDVHKKTISYCVKDASGRIQQEGKVGSTRRELDCWMKTLPRPWTVAMEATIFSGWIYDHLLPHATQIKVAHPLMLRAIAAAKKKNDQIDASKIADCLRCDFLPECHMMPAEIRDRRRTLRYRHLLVRQMVQMKNRVSGLLMETGVEYNKQRLHKVSYFRELLSANEEVPPSIRPLLKLSRETIERCQKTEYALISSLQRDPLLADRIKRLRTVPGVGPITALTWALEIGDVSRFRTIKQAISYCGLCGDERSSADKAMRMPLSKQRNKHIQRALVEAAKLAPRQSHELAVIYDRERQKGNGNRATLAVARKMVAYLLAVDRQQRDFTPAEERRTAAA

SEQ ID NO: 77147 - protein, 338 aa, unidentified
MGQYVGIDLHRRSTTIYRMAEDGEVLGIEKILSQPFELAQAMAAAGPEPEVVLESTYGWYWAADVLKDLGAHVHLAHALGNNWGNRRVKNDERDAQDLAAMLRLGRLAEGWIAPPEIRELRELVRYRHSLGRHRTSAKAQIHGVMAKNGILPVVAELWGPIGQAQLDSLELPEAYALRLRSLRDLLAHVEREVTKVDAQLHHRLKADPGYRALVRLPGVGKVLGAVFFAEIGDVTRFDSPRKLCSWAGLTPKHRESDTVVHRGSITKQGSGLVRWAAIEAVGNYRAKGNEKLRADYRQIAERRGKHKARVAVARKMVTFVFYALRDGEVRCLDTPAAA

SEQ ID NO: 77148 - protein, 367 aa, unidentified
MKKISTAATRQSKNFSQPQLTIGLDLGDRSSWYCLLDEVGEVLREQKLGTSPKAMREVFGAMPRCRIALETGMHSPWVSRILTELGHEVIVAHARNVRLIGESRKKDDRLDARTLARLARIDPQLLCPVKHRSARAQADLTVIRARAGLVRARTALVNTARGLAKSYGERLRGCNVRNMNPEKAEGLSPELQRALEPLLIALESLSEQIRECNQRIEELAQKSYPQVALLKQIKGVGTLIALTFLLTLEDPHRFRKSRDVGCYLGLQPGRRNSGQSEPQMHISKEGDPYLRTLLVQGAQHILGPFGVDCDLRRWGLKLAERGGKSGKKRAIVATARKLAVLLHRLWVSGEVYEPLRNSRHTPLAIAA

SEQ ID NO: 77149 - protein, 406 aa, unidentified
MEITPIYKRVIGLDVHQNKISACALIEQSDGTATVEQREFGGFKRDRRALAEWVRDIAPDVVVMESTGIYWKSPYAALETVGIAAWVVNARHVKTVPGRKTDVADAQWLATLARAGLVCASFIPPADIRHLRLIARQRQKLGGMLASEKNRLHKLLADAGIRLNVLVSDIHGQAGRAMVKALIAGKPMAEILDHAGRLRATRAELFEALQPEELSAKHLFVLTEVMAHIEYLETAMSRFEQTLLEGLKAWESQRVLLQTIPGIDRMGAAMLLVEIGTDRASFGSAERLASWVGICPGNNESAGKRKSGRTRKGNAWVRRLLCEFAQAAARSRCALKDKFAALSIRKGHKKSIVALAHKMLRIIHAMLANGTPYQDRTVDYEALVVQRNAPRWIKMLAKHGYLPAAA

SEQ ID NO: 77150 - protein, 315 aa, unidentified
MTFYLGIDVGCKSLDVAIFTPGAAAATHIGAYPNDSKGVKRLLRDLAKTPITHALLEATGGYENAALDWLSAHMPITRIASHRSAAYARSLGQYAKSDPVDARTLAQMAAGTTPRPHTAPTLERKALRGLVKVRDQLVQMRDDNRRRIKQADTVDAAAVLKRVNASIEREIKKLDGQLRDAAMACDAERVEQLTRVPGVGKVMVAMLIGYLPELGQCGNRQITALVGVAPYVKQSGKRDAPRQIMAGRPYVRRIMYMAALSSIRAKASPLRAYYKGLRARGKLAKVAIVACMRKLLIMLNAMVRNGTPWQKNAMA

SEQ ID NO: 77151 - protein, 427 aa, unidentified
MEVIHPRCAGIDVSKKDAKVCVRVQGRGRKATSSEVTTWTSMTSSILALREHLIAERVTCVVIESTAAYWKPFYFLLDDALNVMLVNARHVRNVPGRKTDVSDAAWLAELGAHGLVRASFVPPEPIRVLRDLTRARTTIAGARTKEIGRLETLLEDAGIKLSSVACEITGVSGRAMLEALIAGQRDPAVLADLAKRQLRKKIPALTEALQGRFNDHHAFMVRLYLDRIDAHEADIARLDARIEEEIRPFQPARDLLVSIPGWSQVVANVFIAETGADMSVFPTAAHLASWAGVSPGSDESAGRIKSAKTLPGNRHLKAALGVAALSASRSTNTYFGARFRRIAGRRPARPGTKKSRRQSAAGQTAVVALEHKMLTCAWHMLVNGTFYQDPGPDYYTRHHPAKTKASAIKQLQALGYNVTLEPRTQAA

SEQ ID NO: 77152 - protein, 356 aa, unidentified
MEYIAFDAHKHYTLASVAKDDGRLVREERIEHDRGALRHFLERCEPGSPVAVETVGNWYWIVDEIEAARCRPRLVHARKAKLMMGMINKTDKLDARGLNQLQRNGTLPTVWIPPGELRDQRDLPRTRMVLVRQRTQLKNRIHAALAKYALHNLEVSDLFGAQGRALLRQRLDLLPPHTAYTTQQLLEQVEELDHRVRAFEQRMRAVVKVTPTMQLLMTLPGVGFILAVVIALEVGDVARFPTAEKLAGYAGTTPRVHSSGGKTRFGRLRPDVNRYLKWAFVEAANSVCVMRGRKPHWHVSRLYERIARRKSHPKAIGAVARHLAEATYWMLSKQESYREPKAVGPFHPRGISAKTP

SEQ ID NO: 77153 - protein, 370 aa, unidentified
MAQPTPLFVGLDVHKDSIAVAHAQGQSADPPVFVGAIGPKQSDLDKLIRRLQGKTPELVFAYEAGPCGYGLHRYLTGQGFTCQVVAPSLIPKKPGDKVKTDRRDAVDLARLLRSGDLTRVYVPTVEDEALRDLCRARDAARLTLKNAKLRLKAFLLRLGLNYVGRADWNDAHRRYLAKVVCPTPTQQIVFQESVRAVDEQVDRMHRLEAELLERAPAWRLYPVVQALQALRGVQFLVALTVVAELGDLTRFDSPRQLAAFVGLVPSEYSTGPSRRLGAITKTGNGRARRALIEGAWAYRHPAKVSEHIQRRIDTLPKPMQDIGWKAQVRLCKRFRRLTARGKHPNVVVTAIARELIAFMWAIAKEVPIPT

SEQ ID NO: 77154 - protein, 425 aa, unidentified
MLGVGIDWSEEFHLVALGRPGEGVIDISRVEHSPTTVDTLVGRIAGLEPDPAEVRVVIETRHGLLVERLVDAGYVVVPVNPDLVARRRGPAKKKDDSEDARIACLIALDQHERLRPLIPHGEVAGELRSIARDDERAARDERRLGNRLRQDLIATFPAALQIGGDDLGAPTFLRLLERWPTANALAGASREELVAFARSCRHGWPERFADRVATSLAADHFRPKEYLVRAKADTIRLAATQLLAIARQRRAWERRMGELLLGAPRRGRDHQPRGDGLGNGFPDGEIYLSFPGLGDRLAARIAGEIGDHPEQFDSPSSLQCYAGKAPVTRRSGKSELVVACRLAHNRFLGAAVQQWAFCSLKRSDWAREFYDAQRARGKGHHAALRALGNRWLEILWHCVRRGVLYDETVHVANRNRALGRTAEAA

SEQ ID NO: 77155 - protein, 401 aa, unidentified
MEGPIISIDVSNGCSHFRCFIDRNKAFGKVHKIKHDVDGFQYLLDCMERLNEKTNEEVCVVYEATGVYTKPLIRFLKKHKVRHYMVNPLQAAKMRKTDLHSKKTDKNDPNSIAKVYYDKDLYEYADEEPIYHTLRVMNRNYEDQLDHLRKYKVTFQNILSIVFPGYGSLFKNPYCDIALAILKKYPHPDMIRNKKPETVANYIEKHTCHHKDSCLKWAVKVIEYANKTYPGCDKDEIEVIELLRIIKELEVCIASCDTQLNEMVQLAEQLPNYFLILSIDGIGPNLACRILAEIGDIKRFGNTKQLISYAGIDPHISQSGDVDGLHLSISKKGNKRLRCLLYLAVTCNLRLKKENDPIQQFYKKKKQQSIPLKPKAARVACTNKLLRIIYGMCNNGCSYQK

SEQ ID NO: 77156 - protein, 345 aa, unidentified
MKKVIAGMDLHSNNVVIGVMDLDGQRLASRKLPCELKEVVRFLAPFRKRLEQVAVESTYNWYWLVDGLRALNYPVVLANPAGMEQYSGIKHADDTNDAFFVAELLRLKILPTGHIYDAELRPVRDLLRRRLMLVHQRTALMLSFKSLYTRTTGQELTLSGLKNLEIKEAQDLYEHPANQLIAGMQIKHIEQLTESIEKIEKAVLGSARELPYYEKLATLPGVGRILGMTITMEVGDIKRFADPGHFASYCRTVEAKRMSNRKKKGENNSKCGNKYLAWAFVEAANFARRYDEQCRKWFERKVARTSNVIAIKALACKLAKAAWYLMAEVADYDPQRMFGQPAKAK

SEQ ID NO: 77157 - protein, 349 aa, unidentified
MKTYAGIDLHSSNNFIVVIDNDDKRLFEKRIPNNIENVLKALEPFKNSLDGVVVESTYNWYWLVDGLQKHSYPVVLANPAAIQQYNGLKHSDDKWDSFWLAHLLRLNILPKGYIYPKETRAIRDLLRRRMMYVQEKTKHFLSLQSLITRNLGNKITGNKIKKLKASDIEEMFESDYLAFTAKKNIETIDFLKNSIKEIEKKILTAAALKTEFELLKTIPGVGDILALTIMLEVGDIFRFEQVGNYSSYCRCVKSERHSNGKKKGENNKKNGNKYLSWAYIEAANFTIRYCPEAQRFYQRKMAKTNRVVALKALSNKLARASYYIMRDQVPYDANKLFNTQDEDGFRTPR

SEQ ID NO: 77158 - protein, 349 aa, unidentified
MILVGCDLHTRKQQVALLNTDTGELWDQELSHTGDDVERFYAALPPPVTVGIESTGYSLWFHALLQRLGHSLLVGEAAKIRAMVVRKTKTDRRDARHLRDLLKDDRFPLVWIPDPTTRDLRALIKHRLRLVRIRTMVKNGLHAIALNQRLALGPSLWSRQGLAQLQALVLLPHTRRRRDDSLDLLQWLNRHIDELDLQVATAAAADPDARRLMTHPGVGPVTALATVLVLGPVGRFPGSKHVVSYIGLAPTVNASADKCRLGHISKQGSALLRWVLGQAAPLATRGDAGLKRVYFAVLRRRGRPKAKVALARRLLVRLYVMLRDQIDYDEFCRRGRAQHGGLELARTPV

SEQ ID NO: 77159 - protein, 398 aa, unidentified
MDTSYAVFCGIDVGKGEHHAVGLDAAGARLFDKALPNDEARLRAVFADLAAHGPILVVVDQPNTIGTLPVTVARACGHDVAYLPGLSMRRVADLYPGQAKTDARDAFIIADTARTMPHTLRRVDVGDETLTELGVLVGFDDDLAGEATRISNRIRGLLTGIHPALERALGPRVAHPAVLEILSRFGGPAGIRQAGKRRITTLAVKHAPRMGARLAEEVFAALDAQTVTVPGSKAAEIMLPKLADSLKEVMQQRRSIAVDVERMLDDHPLSQVLTSMPGIGVRTAARILIEIGDGSGFATAGHLAAYAGIAPVTHRSGSSIRGEHPARSGNRKLKRALFLSAFAALHDPTSRAYYDRKRAEGKKHNAALICLARRRCDVLHAMLKNKALYRAPVSAEAA

SEQ ID NO: 77160 - protein, 310 aa, unidentified
MEQSYVGIDVAKDRLDVHVLPSGDSFAVARDGEAVEALAERLRGLGPRLIVLEATGGFEVTVAAALCASGLPLAVVNPRQIRDFARALGLLAKTDALDARAIALFAQRVQPEARPLADEATRALGDLVARRRQIVAMMTAERNRRSRLTSRRMLKSVDRLLAALQKELSALERELDDTVRGSPAWREAEDLLNSVPGIGDITARSLIAELPELGTLDRKKIAALVGLAPFNRDSGTLRGKRTIWGGRASVRATLYMAALVASRHNPTLKRFYQRLLLDGKPKKLALVAVMRKLLTILNAIIRDRTPWLAA

SEQ ID NO: 77161 - protein, 248 aa, unidentified
MSADEKELSHKSFDNTPEGIQSLLDWIAGYHLSLSKLLFCAENMGSYVTELSVSSVSMGFSLALICPLTIKKSIGLQRGKNDRIDAKRIANYAVLHYRKLELYKLPDKDLVRLRGWIIIRDNLVKQKVSSIKLLETFSQMAKLANVTEAISFLEEQLKSIKEKILEVEEDMEQLIAVSTSLYTNYLLLRSIKGIGIINAIVLLCVTDNFQRFDNPRKFACYCGVAPFEHTSGISIRGKRRLLHWLTKK

SEQ ID NO: 77162 - protein, 337 aa, unidentified
MEVAFVGIDLAKNVFQLHGEDAAGTPVLQKRVRRDRLMAEVEALAPCSIAIEACTGAFYWQRRFEGAGHRVRIIAPQYVKPFAKHQKNDRNDAAAICRASRQPDMKFVPGKTLKQQDIQALHRGRQRLVNHRTALVSQMRGLLLDRGVAFAQSITRARREIRSLLEEGAPELSELFRSMLDQLYSCFVALDEQIAWFDCEIEKVFKESTTCQRLAQIRGVGPKTATAIVAAVGDASEFNNGRHLAAWMGLVPRQHSSGNRQRLFGISKRGDRHLRTLLIHGARAVVRTSARRDDAQSVWIRDLQARRGAAKTIVAVANKNARIIFAMLKNETEFRAA

SEQ ID NO: 77163 - protein, 370 aa, unidentified
MLDTTTFIGLDVHARSIKAVSLDVMTGEVRAATFGYDAGAVAEWVRSVDPGARCVYESGVTGFDLQKRLSGLGVDCVVGAVSKMIKPSADRRRKNDRNDAEFLARMLSVGNVVEVWVPDDECEAARDLTRALEDARDDLSRSKQRLSKFLLRHGLVFDERTPTGRRKGNWTRAHWSWIESIRFAEGADNDVLAYYVDAVRRAAEEKARLEGLVEAEARKPRWRRRVDSLRCLKGVDTASAADLVFEAGEFSRFRNARSFAAWVGLTPSEHSSGESDRRGAITKAGNKHLRKTLVEAAWHYLTCSGRPKDLARGQAPDRGARRHAAKGVRRLVERREALLARGVHGNKANVATARELACWVWAVGLMAEEA

SEQ ID NO: 77164 - protein, 410 aa, unidentified
MELLHPHCAGLDLHKETVVACIRHMVDSKVTTDVKTFKTTTQELMELSDWLSSQGVTHIAMEATGVYWKPVWHILSDGDFSLVLANAAHVKNVPGRKTDVNDATWLADLMAHGLIRASFVPEEPTQQMRDLLRTRKQFVRERSSHTQRLQKTLEDANIKLDSVISDIVGLSGRRMIEALIAGETAPAALAALAHGRIRATAVDLEAALRGRVTPHHRFMLQLHLDHLDAVNLAIARIDKEVESSIEPFRVVTEMLTTIPGVSSLAAEVIVSEIGIDMSRFKTDGHLISWAGLCPKNDESAGKRRSTRMKKGAPWLKTMLIQCAWAASRAKGSYLQAQYLRIRAKRGSKKAIGAVAASMLTAAYHMLKDGTLYQDLGANHFNNQDKAKQALRLVNRLQSLGFAVQITSMAA

SEQ ID NO: 77165 - protein, 421 aa, unidentified
MNTATKQSSEMSSETPPPPKPPPRVIGLDAHPDSFTAAIVRGPTPAAAVVEKVFNQVPIARLQSWAQKHLTAEDLVLLEASGNSFQIVRSLAAVGHTARVLESCQLGKLKEAHAHNDKISAVRIAKAYLAGTAKIVWVPDAQTQERRDWFHAHRKATKRTTQVRNRLRSYLSDNGVRLPRHTRLTDPASLSPVLRKVRDWTPRQWQVLEGFVMELQHAEQQRQHWRRLIAQEVLEDPKLLSLVRLCGVRAMVAFALGAFIGDIERFAEPRKLVKYIGLNPAFDDSGEGHWQGGIGGHGRKDLRCLLIEAAQAILRSGQTAIARWGRKLLGRKGSVNLAVAAVARKLAVAVWYLMKGRWSAVEEIEAPLARKISKIISQVGEETLNQMGKRRQPYRQEIHQRLQQGRVYVLNRNKTFQPAAA

SEQ ID NO: 77166 - protein, 381 aa, unidentified
MPDVSSTAPAEVRTWVAIDQHKLSLVAATLPASAGQPEVVRLENTERAIRRFIERLGGAEGLAVAYEAGPGGYELHRLLSSMGVACDVIAPSLVPLRAGDRVKTDRRDAKKLARLYRAGELSFVAPPSRAQEGLRDLVRARDDLRCARTAARHRVVKALLRHGHIYRDGKAWTIRHRDWVGAQRLEDPLADAALGHMRAHLAALDAQIAAVDQQLEQVATTEPWVDPVSWLCCFRGISTRTALGLLAEIGDFRRFAHPRELMSYLGLTPSEYSSGEQQHRGHITKSGNRHARRLLVEAAWHYRHHPRTCARATSLAGHVPPEVGAHAWQAQVRLHHRHRVLGEHGKRSTVANVAVARELTGFIWATMTRAPLRREQERTAA

SEQ ID NO: 77167 - protein, 315 aa, unidentified
MPLYGGIDLHANNSVVVLLNAQDQVIYQKRLPNDLPTILEALAPHPGEIEGLVVESTYNWYWLVDGLMEAGYQVHLANPAAIQQYSGLKYSDDHSDARWLAHLLRLGVLPTGYIYPKAERAVRDLLRKRAHLVRQHTSNVLSVQNILVRNTGVRLSIKRIRELTKQEIEGLLPESAQVLAVTSSLAVLDCLSHQIKTLEQTVHKHLKHTPSYEQLLTVDGIGTILAQTITLESGDMGRFPTVGNYASYCRCVNSTKISNGKRKGQGNVKNGNPYLGWAYMEAAQFALRFNARAQRFYQRKLAKSNNNMVLESVMK

SEQ ID NO: 77168 - protein, 354 aa, unidentified
MKENLGSRKVISKGREVSIGVDVHKVSWHVTARAGGEEIFNSGIPGTYQALRGLLDQFKDGRMKVAYEAGPCGFWLHDKLTKDGIEVIVVPPSLIPIESGNRVKTDKRDSRKLARLLESQMLKRVYVLTEEDRADRELLRTRRQVLEHRSDVARQIKSKLLFHGITSPFSTKTWTQGYLRWLKELTFEREVLRISFDFLIELYEYLTTQLIQLRKRIVELSQSDKYRQKLKLLKSVPGIGTLIAMEILVELADIERFEKADELASYIGLTPSEFSTGEYVHQGRITRCGNKRVRTCLVESSWLLIQKDPWMRSKYDRLKGIKGEKRAIIAIARNLIIRIRRILLNNEPYVVGVC

SEQ ID NO: 77169 - protein, 311 aa, unidentified
MKSPECFVGIDVSKETLDVAIRPTGEGRGFAHNEEGLSQMAEWIQSLSPQLIVLEATGGFEVEPIRALISRGLLPVLMNPRQIRDFAKATGTLAKTDKIDAQIIARFAEAVRPEVRPLPTPEAQELGALNTRRRQLVEMLTAEKNRLCTAPPSIRKAIQTHIRWLEKSLDKVNKELRDRIKANPLWRDKDEILRSAAGVGPATSTTLLSDLPELGTVNGKEISALVGLAPLNRDSGSFRGRRMIWGGRAVVRSALYMSTLVAIRFNPVIRAFYERLRAAGKPFKVAITACMRKLLIILNTMLKTRTRWRTA

SEQ ID NO: 77170 - protein, 348 aa, unidentified
MRFYTGQHQHYCGIDLHARTLYLCILDAEGNVLFHKNLPCDRQIFLEAIEPFREDLVVASECIFNWYWLADLCAEHDIPFVLGHALYMKAIHGAKAKNDRIDSHKTASLLRGGLLPQAYAYPAEMRPTRDLLRRRTHFVRKRGQLTAHVQNTFHQYNLPRPPGLLVYKHQRALVPDAFQDPIVRKGIEADLALCETYDGLIRDLENTVLRQARSHDPNGLLCLNTIPGIGKILSLTFLYEIHDINRFESVQRFASYARLVKCEKTSAGKRTGSSGAKIGNAHLKWAFSEAAITVLSHFPESKKLHTRLKRKHGNGKALSILAHKIGRTVYFMLKRNHAFDPERFLMNA

SEQ ID NO: 77171 - protein, 422 aa, unidentified
MLVESHDEEQIIARVAALDIGKAEVVCCVRIPAEAGRKKRLQEVSTHSTMTRALTELANHLVELGVERVVMEATSDYWKPVFYLLEAHGLDPWLVNARDVKHLPGRPKTDVLDAVWLCKVAERQMLRPSFVPPWPIRRLRDLTRYRTDLVGARTAEKNRVEKLLESACIKLSVVASDIFGVSGRAMMDALIAGERDPKVLAQLARSRMRVKIARLEEAFNGHFDDHHAFLLARMLGRIDAIDADIAAVDEQIEAQLAPFGSAAARLDEIPGIGPVAAAAILAEVGVDMSRFPTAGHLCSWAKFSPGISSSAGKSKGNGATGHGNRYLARALGEVAVVAGRTDTFLGARYRRIARRRGKKRAIVAVGRSILVIVWHLFSDDHTTFHDLGPDHYTRHINPDTKKRNHIRQLEALGYTVTLTPAA

SEQ ID NO: 77172 - protein, 381 aa, unidentified
MEISIAHSSSFSSSNATLLVALELSKATWVVALSAPFSDRISHHSIAGGDAAALLKLIGQARSRAEAALGQPVRVVCCYEAGYDGFWLHRVLSANGIDNHVLDAASLLVNRRARRVKTDRIDVDGLIRALAALMRGEHHACRAVHVPSIEDEDRRRQTRERERLIAERTAHVNRIKGLLMAQGIRDFMPLRPNAAERLIELHTGDGRPLPPCLVAEIRRELRRLKLVEEMIDEVETERDSVGAGTVADQRIALLRQIKGIGPVAATVLGREVFHREFTNRRELASYLGLTPSPWASGSVQLDQGISKAGNARARTVLIEIAWLWTRYQPGSRLAGWFRERVGQTKGRLRRILIVALARKLVVALWRYLSTGVIPEGVELRA

SEQ ID NO: 77173 - protein, 458 aa, unidentified
MKEEESRLAREPLDLAVDLHRRRLAVVCADRAGNEQWRRRLSNDAEGEAQLLRSLAPGDRVVIEATTAVFRLANVLEGSGATVIIADPQSARLLGMRGKKSDWRDCQALLRHLRAGEIVAVWRPTAAVRALRQLTRERAAYHQSIVRLKNRIRALLWEEGVPAEADFFRQVSRQGLAGVELHGPARAILEREWQALSALEPLKAAQEAALAEWALALPEAQRLMQIPGFGMATAVMVLGEVGEFSRFGSAKQLVSYAGLDPKVDQSDGPPRLGQRISKAGRTELRWLMVEAAWAHVRAGGAEAGLFHRLVKRGKPQGVAIVALARRLLAVAWLVMTRQENYRGLKASTYEQKLRQLAGQRPWTGEAQPTNRRWAAATLEALLGEPAPSQQGEPKGKVFEWRRPPRRAGAHAPRAVCGSTASAGGSEFPALGRSDPSEPPALAGGRLDPSGRSNEREQR

SEQ ID NO: 77174 - protein, 355 aa, unidentified
MQKYKISFKGQNIYVGIDVHLKTWHVTTLTESGCKYSFAQHADAKELFDRLNKKFPEAHLKSAYEAGFCGFSAHYALTDLGIENIVVHAADIPTTGKEKAIKTDAVDSEKIAWALKRGELKGIYVKDKRYMDDANLMRLRQRFIADLSRQKSRTKHLLYTQGVTYPERFRTSRSHWSRNFMKWLREEVELLSEQKLSLLLLCEQVENTRKAILKVTREIRRLSTTERYKENYDLLTSVPGFGMIVSMSMLTELDNDIMRFSNERRFVSMLGLIPTCHDSGEKKVSGEKINRGNKHLGPMIVEASWVAIQRDLELGAYYSNCCQSMKPHKAIIKVTRKLACRAYAVLKTKTRYELP

SEQ ID NO: 77175 - protein, 325 aa, unidentified
MQGWDTKMAVQVWAAGIDVGKANLDIAIHRKPGETLRVSRDQAGFTQLIAWLRQHDVTRVGLEASGGYERDVMDALEDAGFMADLLNPLRVRRFAQAKGRLAKNDRVDADIIAAFTAQMLDAPPRRRDRALERLGEYLTVRRRILGWINDCDNAMEQARDPAMRKLLRAQRLGFEKLLAKQDAAIAGLIAGNADWDVLDRRLRTVPGVGPVLAAALIAWLPELGRLDRQQIAALVGLAPFDRDSGRYHGRREISGGREHVRHALYMPSLSAMRHNPVLAAFAKRLAGKPPKVIIVACMRRLLTFLNAMARDATDWRAPASVVKAG

SEQ ID NO: 77176 - protein, 430 aa, unidentified
MKSNTQNAKIEAITEKTLVLGINVGSETHYARAFDYRGIEYSKKPFKFSNTEAGFVTFKEWILDLKDRHEKEKVVPGMEPTGHYWFNLGKFLQDNEMKPVLVNPHHVKKTKELDDNNPTKNDRKDPKVIAGLVREGRYMIPYLPDGVYADLRTASNIRFQLQAELTRIQNRISRWFNIYFPEYKTVYGKPDAKSGMLILKAAPLPEDILTLGIDGVNQIWRDAKLRAVGKARAKTLIEAAGHSVGSKEGAVSARMEIRMLLEDYESRNMRLQEVMVLIEELVKGIPMAEKLLEIKGVGIRTVSGFLAEVGDISRFNNPKELQKLAGLALVENSSGKHKGETTISRRGRKRLRYLLFEAAMSLVAKNPEFRELHNYYTTRRRNPLKKMQSLMAVATKLIRVFYAMLTKGVDYDPKKMVSDIRRPEAYLQAA

SEQ ID NO: 77177 - protein, 373 aa, unidentified
MESTTIAVDLAKSVFEVAVSRRPGKVAERHRLSRGQFSRFLADHAPATVVMEACGTAHFWGREAEARGHRAVLLPPHAVRPYVLRNKTDGAEAKGLLEAVRNEAIRPVPVKSVDQHVLASLHRMRPAPMATRTARLNTMRGLLRELGVAIPVGARQVVAQVWALVSDADSGLPGALRPVLAEAAREIGELEGRIREVERSLERMSRRSELVVRLRTIPGVGLLTATALVAFVGDVHRFPSSRHFASYLGLTPRESSSGLRRRLGAISKRGDPYLRMLLIHGARSVLLYAKKKPAGEHDRLRTWALDRERARGHNKAPSRSRTSSRAWPGPSGAASSPSGPRAREERHDPPTTRLHRAHDGDGTSVRTGAGQCR

SEQ ID NO: 77178 - protein, 341 aa, unidentified
MYYVGLDIHKKTVSYCVKDAAGTVHGEGTIAATRDALDDWMKALPQPWTAAMEATIFTGWIYDHLAPQAAAVKAAHPLMLRVIAAAKKKNDQIDARKIADCLRCDFLPECYIAPKEMRERRRVLRYRNLLVRQAVQLKNKTAGLLMETGVTYNKQKLHQAGYFGQLLATNDEVEERLRPLLRLNREMLVRVERSERALLRALKHDHLLVERVQRLMSIPGIGPVTALSWVLEIGEVKRFSSVDKAVSYCGLCGDESSSAGVAQRTPLSKQRNRHLQTVLVEAAKLAPRWNPPLAEIYVREKAKSNSNCATLEVARRLVAYLLAVDRRQQPFVLAQKEAGAA

SEQ ID NO: 77179 - protein, 426 aa, unidentified
MEVLFPRCAGIDVHKRTVVACRIVLTDDGEWLRETRTYGTTTEDLLRLSDWLAAGGCTHVGLESTGEFWKPVFNILEGSFTVWLLNAQRVRAVPGRKTDVRDAEWIAELLRHGLVQPSFIPPRHQRELRELTRQRTNFVRGRATLVNRVQKVLESTNLKLTAVVSNVAGVSGRAILAALLAGEEDVSLLADLAKGKLRRKRDELERALRGRLQPHHRFLLTELLAQIDGLDETVARFDAEIARLCAVNGEEEVVALLDTIPGIGRAMGELLVAEIGVDMTKFPTPAHLAAWAGVAPGSNESAGRQRSGRTRKGNAWLKTALVQAAHGAARMKGTALAAKYKRVAARRGAKRAIMAVAHRLLVIAYHVIARREPYRELGADYLERRRPAVVADRLMQRLRQLGIEVTVTSCAPSGVPPAGGVLAATP

SEQ ID NO: 77180 - protein, 327 aa, unidentified
MNTAGIDVSAKTVTVVISREGRSGKPREFKNMPQGHTALSNVLRKAQVTRVCLEATGSYHLDLAVALDDAGLEVMVINPKAAKEFAGAMQTRSKTDAVDATLLAEFAQRMPFKPWERPDDLALGIRACARRIAALNKQRTQTKNQLHAAQQTALTPDFLLANLRHNIEYLDAQIEHLRQRVLDLIAADAHLQQSFDLLTSIAAASAIQLLGELLVLPPDMKAKQWVALAGLDPQVHDSGSSVHKKPRLSKAGNRYLRIALYMPALSAASHNPHVRGYYRHLIADRGLKKIQAVCAVMRKLLMAIHAMLKTRSTFDSRRFYSLTETTA

SEQ ID NO: 77181 - protein, 400 aa, unidentified
MLSIGIDVSKGKSTVCGMKPGGEIVYTPFEVQHTRKGMSELVSLLHNSGEEVRVVLESTGSYHCPVVAALLENGIFVSVVNSLRMKRFCSQSIRRVKTDQIDAMQIALYGLAYWQELQPTRLPENTYRELQLLARQYYQMTSLLIKAKVDFNALCDQVLPGMQELMSDHAGRHKLSDFVLRYHHTAHILKMGETRFRKDYCKWAEKKGYRNHERMAALIFATAQNGIPVLPNAPSTQIVITEAIRVLHTVEASRDAILTQMQALAKTLPEYSLVREMPCIGDTLAPRLIAEIGDVRRFHSKRALIAYAGIDAPPYQSGKFCANNRHISKRGNRYLRKTGYEVMQSYVMHKPANDPIFTFIEKKRSEGKSGKLAMVAGLNKFLRVYYGKVTELYRSLPAIE

SEQ ID NO: 77182 - protein, 463 aa, unidentified
MSVRLGIDIACRAAHQASLADEQGRFVWTGRRFRTTSLDLAKLWAMLPAGTKPADVLVVMEPTRNAWVPLAAWFRRRGATVVLVPPERSADLRRYYAKHAKSDRLDSRLLARLPMLHPDGLHAEDGLGPGDALKRAGKLHSTLTHRRTQSLARLDALLEILGPAWHTAIGGELGSRTVLTFLAAGYADPHVVRRLGRTRLARFCYRHSRGAWADPMAEAILAARAETLQLWADGDLDYPDLAEDIAIEARLALQLTEEIKDLDERTALLLRQADPHAILTSAPGVADITAAAILGRLGDPTRFTSLAGARAFTGLVPTLDASGLTGRHGAPTKRGDAVLRQALFMAAGQARRIDPTLAAKYHRLMVDAGKHHNSALCHIATTLLTRIIACWRAQQPYTLRDVDGTPVTPQQARAIIAERYTIPTDLRARRRTTAARTGRRNKKSHSAPSTGPSTTHATTHPTA

SEQ ID NO: 77183 - protein, 392 aa, unidentified
MVVSVGIDVSKDKHDCFIVNSEGEVLADVFIIPNNMDGFHYLLQRIQDCTNTQDKIKVGLEATGHYSYNLLGFLLDNGLSTYVLNPLRTNLYRKSLSLRKTKTDRVDARTIASMLLSDAGLKPYTDTAYHNEELKSLTRYRFDKVKARSKLKSSISRLVCILFPELEKLVPSLHLASVYALLEEFPGAKQVAGAHLTRLKTLLETVSNGRYKRDMALEIRNAARNSIGSRMPAKSLELQHTIRLIRELNAEITEIEEQIQSIMAELHSPITTIPGLGFRMAAMILAEVGDFTRFESPDKLLAYAGMSPSIYQSGQLKNCYPHMEKRGSRYLRYALYNATKYVCQWDPTFSDYLAKKRAEGKHYNVALSHAAKKLVRLIFAMEKSRTTYRLAA

SEQ ID NO: 77184 - protein, 334 aa, unidentified
MDKVTTVGIDLAKNTFSVHGVDAAGNVLLRKTVSRARLTALIAQLAPCVIGLEACSGAHEWARRFQVFGHTVKIMAPKFVVPYRRSGKNDGNDAEAICEAVQRPSMRFVPVKSVEQQSILSMHRVRQGFIEERTATINRIRGLMSEFGVVLPARAVEVKRGAGVAAAALPSMARSAIEDLISHLAVLDERIDAYDRQLQAIARSDETVKRLMTVPGVGPLGALATVATVGNAHEFRNGRQFAAWLGLVPRQWSTGGKARLGRITKHGDAYLRTLLIMGARAALQMASVRSDKMSRWAMALKERRGYHRAVVALAAKNARILWALLTRQSDFRTA

SEQ ID NO: 77185 - protein, 350 aa, unidentified
MKLTRVGVDLAKQVFQVHGVDRAERPIWCQRLKRGRWIAEFERNVEPGCEIGMEACGGAHHWARLLQSKGYVVKLIAPQFVKPYVKSNKNDANDAQAICEAMSRPSMRYVAVKTVEQQDIQAVHRVRGSLIGERTAKANQLRGLVYEYGLVAPRQLSSLRRAVPAWLEDATNGLSARFRALLAALYRDLRWLDERVHELDREIAVIVRENEAVRRIEQLRGIGPLTASALVAMVGDGRQFKNGRQLTVALGLTPRQHSSGGKEKLLGISKRGDKYIRTLLIHGARSALRTAPGKTDRLSRWVMALADAVTPECRSDRARQQDGTRGLGDAATRNELRTGAYGGLSTMRPN

SEQ ID NO: 77186 - protein, 340 aa, unidentified
MTEVTMIGVDLAKNVFQVHGASMTGELKFRKKLSRLSFGKFMAEQSPAVVVMEACGSAHYWAREMIRLGHEVKLIAPHYVKPFVKRQKNDAADAEAIVIAAQRPEMRFVDPKSAEQQSHAILFRARERLVHQRTELVNALRACLYEYGYVVPQGIHQIRRIAEILDAPNSDLPDLMREECRDLLEQIAEKTGRINARTAKIKALAAEADTARRLQTIPGVGPLTALAVEAFAPPMESFRCGRDFAAWLGLVPRQFSSGGKERLGRISKAGQADIRRLLIIGAMSRLNWLGRKSIPEGSWLARMAARKPRMLVAIALANKMARTIWAVLTKDEDYRAPAHA

SEQ ID NO: 77187 - protein, 387 aa, unidentified
MQSVTSATAVATTALANDITLFASLELSKSKWVVTINSPGSEKFSKHVVEGGDGARLLDLLSRSRAKAEQRCGVRVKAIVIQEAGLDGFWIHRLLLANGIESQVVDAASIAVDRRHRRAKTDSIDGETLLRTLMAWARGERRVCSMVRAPSPEEEDRRRLTRERGTLIKERIQHTNRIRGLLSGQGIRDYNPLRRDCFERLEALRTGDGRELPPLLKAEIRRELDRIAVAATQLAAVERARDALIRTNAEGRNNPAAHLLKLKGMGPEFASLLWLESLFRSFGNRRQVAAYAGLAPSPWQSGGVERDQGISKSGNRRLRHTMIELAWFWLRHQPDSALSRWFQARVGAGKGRVRRIAIVALARKLLVALWRYVTQGVVPEGAVFKTA

SEQ ID NO: 77188 - protein, 250 aa, unidentified
MMNADGSIVEESEYDNKLTEAEIFAYSLVKKYGKCIAVCESTSNLWLKTYQAFEKYGIGVKLANPLKTKAIAEARIKTDTLDARTLAHLLRSDLVAECYIAPKGIREDRSLLRLRTNFVQDRTRVMNRVHSLLDKYDVKCDYDNIFGVKGTRWLSSLKLSDNDQILLHEYIMQIEFLNTEIKNTESKISYQASKNESAKILMSMTGIDYFSAMLIALEIGDITRFNTPEKLVSWSGLCPSIHQSGNSLYM

SEQ ID NO: 77189 - protein, 353 aa, unidentified
MKKLFIGIDFAKEKFDAAIIEACGLKEFGNREYGTFTNDKKGYRQFFKWVKTNADKSVENEWLFCGEDTGSCSLGLSKWLYGKGLDIWIENAYSIKHSSGIQRVKSDKADSSMIAEYAWRHQDKAVLFEPLSESLSQLREVFLYRHKLVQQHIAMDVRKQDKEAAEPSKAISFIKRKSKHLMSEIYNAIKECDLMIDRIIESDAELKENYAIITSIKGVARQNGACLLIFTNNFRRFDLDARKIACYYGVAPFGKDSGTSIHSPAKTSHFANKLIKSLLGQAAHCAKKFNPEIREYYNRLIGRGKKPQVALNNVKNKLIRIIVALVRKKVYYDPKTYMFYNAKFTDVKKMLNS

SEQ ID NO: 77190 - protein, 383 aa, unidentified
MESARSTHIVANEIVLAVALELAQNSWKVALQDGQHDRPSIHSVSHVQACGRLEQVVELIRRMLEKWHLPADTRVVVNYEAGQDGFWLVRALARYGYEVLPIDAASIEVNRHQRRAKTDRIDAARLVNSLRGWLQGDRDRMRVLHVPSAEAEDQRQWMRDRGQIQKEINQHLDRMRKLLRTQGCWVDHKMDIAELVKSGELTDHSGAPLPESLNLRLLRECERLAQAEQQLAKLEAGMLAALPKATQDKVKALCMLKAIGPVGAQRLVTELYWRDFHNRREVGACVGLVPQPYDSGQSHVDQGISKQGNRRVRALLIEMAWFWLRYQPTSELAQWFIKRTSGTGENKRHRKITIVGVARKLAIALWRYLDTGEIPAGAQLKMS

SEQ ID NO: 77191 - protein, 367 aa, unidentified
MKKVSTAAVREAKNFSEQKLTIGLDLGDRSSWYCVLDEAGVILLEQRLSTTPKAMGEVFDGMPRSRIALETGMHSPWVSRVLNELGHEVIVAHARNVRLIGESRKKDDRLDAQRLARLARIDPQLLCPVKHRSARAQADLTVIRARAGLVRARTALVNTARGLAKSYGERLRGCNVRNMNPEKAEGLSPELQTALEPLLAGIESLSERIRECNERIEKLAQESYPQVALLKQVKGVGTLIALTYLLTLEDPHRFRKSRDVGCYLGLQPGRRNSGQSEPQMHISKEGDPYLRTLLVQGAHHILGPFGADSDLRRWGLKLAERGGKNGKKRAVIATARKLAVLLHRLWVSGEVYEPLRNSNQRAMRAAA

SEQ ID NO: 77192 - protein, 426 aa, unidentified
MKYNQNEKLKQMDLSTMVVGVDVGSELHYARAFDYRGVELSGILKISNDAAGFETFEKWKHELMKKHDKSKVVVGMEPTGHYWFNFGYSLQEKSTKVVLVNPMHVKRSKEFDDNSPTKNDRKDPKTIAMLVKDGRYLEPYMPEGVYRELRISMETRERYVKQLTVIDNKVQRWLSIYFPEFNTVFKDWTGKGAMLALKNFATPEKVLVKGIEGIVAVWKEQIKRAVGAKHAIRLVKAAEVSVGVKEGLKSAEYDLLSLIEEYEFSLKKLEATMGLIEELLFQVPNIKELLDIKGIGVVTVAGFIAEVGDIGRFEHSKQIQKLAGLNLKENSSGKHKGKTTLSKRGRKRLRRLLFQAVMILVAKNPEFRQLHLYYTNRVENPLKKKQSLMAISCKLIRVFYTLLTKGLTYDGEKMIKDIQRPQQKAG

SEQ ID NO: 77193 - protein, 323 aa, unidentified
MSESVKAVKVNAAIDVSKDYLDVHAGDVSFRRFPNNTRGLSTMKRMLSRFDISLVLLESTGGYENLAVMYLQGLGYDVCVVNPRHARDFAKAMGRMAKTDKIDAEMLCRFADLIDARPDRARFVKPLTDERREYLNALVRRRRQLVDLKVTERQHKSAPVVSSAGIADINEVIAFLDSRIDIIDREIAAHVSTCFSDVSEILCSFTGVGPATAGTLIGGLPELGKLTRRQISALTGVAPFNHDSGRMRGRRVISGGRADVRKVLFMAAMSAVRFNPVIKSFYARLINVGKPKKLALVACMRRIVCILNAMLRDGTRFNSVIPA

SEQ ID NO: 77194 - protein, 383 aa, unidentified
MARRSKAKGTRQRTKLHMIYTRAAGIDVGSTFHVVAVPPELSAEPVQTVQSFTGDLYRLATWLVEIGVTTVAMASTGISWIPVCDILEAHGLEVLLVNAQHVKTVPGRKTAVNDAQWLQQLHTYGLLRGSFHPAQDWSALRVYLRHRERFVEYAAAHIQHMQKALMQMHLQLHHVRSDITGTTGMKIMRAIVAGEHDSAVLATYRDARCKASEETIRAALTGHYRREHGFALRQALELYDSYQARIEACDQEIQSTLASLQNEEIAIDTLPAARHKKRQSHEPLFDVREALFRVLGVDLSQIDGFSAYTALKLVGECGMDMSRWPTEKHCTSWLTLAPGNKISGGKVLNTKTRRSANRAAAIFRLSAMNVGQTQTALGAFYRR

SEQ ID NO: 77195 - protein, 377 aa, unidentified
MDRTKYIGMDVPKEAITIAVLNSSGKLVMESLVETKAATIPEFIRGLRGELQVTLEEGTWAAWLYDLLRPPVAQLIVCNPRKNALLKSGHKSDRMDARKLAELLRNGSLWAVYHGENGPRTLRELSRSYLTVSKDLARVMNRLKALYRSGGIACAGAKVYAPQHRSEWLSKITEAGGRCRAEFICQQLDGLHALRQAVRRDLLVESRKHGATKLLRQIPSIGPIRAAVLIARRQTPDRFRTKRQLWADSGLAIETRSRGEYRYAEGPLRRSQKPVALRGLHKNHNHDLKWIFQSAAVRASSCAGPLHEFYEALLAKGMKPALARLTGARKMATIPWIVWKKGARFDAEHLKQQAAGASRIESPCDPPDHLRRCPSGS

SEQ ID NO: 77196 - protein, 347 aa, unidentified
MKHYIGIDFHSQFSSLAVMDETGNIMDERKLYHDNKIKLSNYFSKYKNDTSVSIEATRNWYWFVDLLQELNLNVKLVHPKKTRIIAENTIKTDKIDARILSHLDRCNFLPQAYIANKETRSSRELLRYYISLVKMQTTIKNKIHAILAKHNIQHQFSDLFGKSGILFLKTSQLPPIFQMELKSYMQLLENIRTHINNAKSKIKQLCYSSAYAQLLVSVPGIANMSALLLASEIADINRFKSYKKFCCYAGLVSSTHQSAETIYHGRIIKDSNKYIRYVLIEAVPKAIKKDYKLYCFYKAIKRKKGNVKAKIAVARKLAIAIFFMLKNNTTYHISNNDNAIIEVNPKS

SEQ ID NO: 77197 - protein, 424 aa, unidentified
MKSKAYRAVDVNRIEHTKLLEGRAETVVHAGLDVGKESILCVLRWGADDFDRPWRVRNPFDVARLAELLSVVGRGRVLIVALEPTGTYGDALRQALERAGLTVHRVSPKNASDYAEVFDGVPSQHDGKDAAVIAELAAQGRSWAWPMKTPTEEEQELAYQVEWLDGQRRQMMLWCGRVEALLSRHWPEATRIMRLSSGTLLRCLAKHGGPGGLTGADALEQVRSWGRRNLSAEKAQALVDSARQTAGVVMGRWDEKRLRRYAREIRKNQEKMRKAKRRLRELTCQHATILSMGEAVGVPTACVLWVELGDPSTYHCGAAYRKAMGLNLAEHSSGKWQGKLKISKRGSSKVRRWLYMAALRWVKDEPVRSWYLRQKAQRRGEGKPAVVAIMRKLALALYQVGGRGEAFDRTRLYKSLTESTTASA

SEQ ID NO: 77198 - protein, 370 aa, unidentified
MLDTTIFVGLDVHARSIKAVSLDVMTGEVRCATFGYDAGAVAGWVRSVDPRARCVYESGVTGFDLQKRLSGLGVDCVVGAVSKMIKPSADRRRKNDRNDAEFLARMLSVGNVVEVWVPDDECEAARDLTRALEDARDDLSRSKQRLSKFLLRHGLVFDERTPTGRRKGNWTRAHWSWIESIRFAEGADNDVLAYYVDAVRRAAEEKARLEGLVEAEARKPRWRRRVDSLRCLKGVDTATAADLVFEAGEFSRFRNARSFAAWVGLTPSEHSSGESDRRGAITKAGNKHLRKALVEAAWHYLTCSARPKEPARGQAPDPGARRHAAKGVRRLVERRGTLLARGVHNNKANVATARELACWVWAVGLMAEEA

SEQ ID NO: 77199 - protein, 369 aa, unidentified
MQRKQISFKGQKIFVGIDVHKDSWRVAIAPEMGVVKGHSQNPSAKELFDFLKKHYPDGDYHAVYESGFSGFSTYYALTDIGIDCIVMHAADVPTTQYEEFMKTDRVDAAKLVKSLKAGLLTGIYIHERDNIDARSVVRLRKTTQKMLGGCKSRVKHLLHCNGVVLPERFSRPGTHWSKAFIRWLKEEVRLISSTRDSLDILIEQVESLRKTLLGATRKVRRLSQSDRFKPQYDLLASVPGIGISVAMSILTEIGDISRFRNEREFASYLGLIPTSHSSGDKVSHGEKTFRGNKKLGPQLVEAAWISIYRDHGLGCAYMAYKKRMEPQKAIIRIARKLSNIIIAVLKTGEPYEPYQWIEKERHTDRKTTS

SEQ ID NO: 77200 - protein, 376 aa, unidentified
MAEATPRIRYVGLDVHKETITVAVAEQAGGRPEAWGTIASDPQAVRRLVRQLGREGHQLELAYEAGPTGYGLQRQLTRLGAECLVVAPSLIPKPASNRRVKTDKRDAEQLAKLLRSGDLVPIWVPDEEHEAFREVVRARFAVKKDVERHRHQLVKLLLRWGLRPPARVKRWSKPYRRWLTQLRHPLQDLQTVLDDYRSALWAAEARLAYLEKQMVEAALRRPQLALFVALQMLRGVGELTAATVVAEVGDFRRFARANGFMNCSGLTASEHSSGEKQLQGPITKAGNSNLRHVFIQAAHNARHQPQPRARLRARHEGAPADLVEMAARAQERLYHRYWYLARRIGREKAVVAVARELAGFVWAMGQRMSDPAQQAA

SEQ ID NO: 77201 - protein, 343 aa, unidentified
MNIITVGLDLAKSVFHVVCFNEQFKEVKKRMLRRNQVLQFFTQLPPCKVSMEACASSHYWGRELRALGHDVKLIPPQYVKPYLRGNKNDYNDARAIAEASTRPAMPCVAIKTVEEQDMQTIHRMRAQCIRDRTALSNSTRGLLGEFGIVLPRGLTTLRKSIPGLLEDAENGLSDRFRNLLARRYEQLAELDEHIAFYTNELEILSRQDDSCQRLQTIPGFGPIVSSAFRSVIGDGRAYAHGRDASASLGLVPRQHSSGGKNVLLGISKRGDRYLRSLLVHGARAVVVQAARKDDPLSRWINRIREERGWNKAVVAMANKLARIGWAILRYNTEYQPISAASAR

SEQ ID NO: 77202 - protein, 324 aa, unidentified
MHHSSKVHSPIIQASQLSITDYAGVDVSKLALDCFINNQYVRLPNDPKGFARLRALLPDNAHVVFEATASYHRKLMLDLHEHSIPLSVINPRRIREFARARGRLAKTDAIDARMLSLFGCAMAPEPASAPEPARCALAALNASRDQLVAIRTQLVNHIGHLDLPAALKPCKASLLAIERQIKNLDSAIAAFIKADKVLAGQYSLLTSHRGVGPVCASTLLASLPELGWISRQKIASLAGLAPFNRDSGSCRGLRRIQGGRSRVRRALYMAVLSAICSKADDPIKLFYQRLRLAGKPAKLALIAAARKLLVFLNSSLKNHLPNPA

SEQ ID NO: 77203 - protein, 344 aa, unidentified
MTYYAALDVSLRSVAICIIDEEGTVCLERAVPSEVADIVTCLRGFDHGIDVVGFEAGTLSQVLAHGLGAEGFEVICLEARQVNAALSAMRNKTDRNDARGIAQILRTGWYSRVHVKSRDSHYTRALLSSRKAVLRKCIDLENEIRGLFKIFGIKLPASLGHGPFDARVRPLIEEDVRLAEALLPLLDARLVLYRTYLVLDRRVKLAARNDAVCRQLMTVPGVGPVTAMTFKAAVDDPYRFRRSRTVGAHFGLTPRRYQSGEHDNPGRISKAGDADVRALLYAAANALMSRTQRWSSLKAWGMRLQRTRGRRRALVAVARKLAVIMHRMWIDGSKFQWGKEAAAQ

SEQ ID NO: 77204 - protein, 345 aa, unidentified
MTIFKQTVGIDISYKTFDARFGTITVAQQQSISPSKSFKNSPAGFKLFLRWIKKLMIAHDVPPIFVMEATGVYYEHLAHFLVQHGYQVAVILPNKIRNYAKSLDSKSKTDSIDAAVITRFALERQLPLWTPPSESLKTLRDLCREYYTLKTNITIIKNQLHALNVSFKPHKESFKRKQLLLKFLDRQVQLITKELRALVKADPALAQHLKNIKTAKGLGDITILTVLAETRCFEFVTKQKQLTSYAGLDIVFNDSGLKKGRTSISKKGNSFIRKALFMPALSACRANPQMKQLYLRLVAKGKNKKLAIIAVARKLLLLIYTLWKTNSPYIPEYKPVAHPAAAVAA

SEQ ID NO: 77205 - protein, 344 aa, unidentified
MDHFAGLDVSVKDTSVCIVDETGKIVREMKLASEPDALVAVLKNPSYHFKRIGLEAGPLSQWLFSALAEAGLPVICVETRHMRAVLKAQINKTDRNDARGMAQMMRVGLYRPVHVKTLRSQKLRMLLTHRQLLLSKAIALENDLRGTLRNFGLKVGMVGKVKFEARIRELVENLPDLAVLVEPMLIVRRVLREQIVILHRRLLAIVRDDEVCRRLMTTPGIGPVVSLTYRATVDIPARFRKSKSVGAVFGLTCAKYQSGEVDWDGRISRCGDEMMRTMLYEAAQAMMRSKTWSWLKAWAMQIARRRGMKKAIVALARRLAVIMHRMWVDGTEFRWTREQAAAAA

SEQ ID NO: 77206 - protein, 391 aa, unidentified
MTYFIGLDLAKFKHDCFIMNEHGEIIRNSFSFTNDQPGFNTLRDVLNSLDPSQEKRIGLEATGHYGSNLKIFLEDNNFSFMEFNPILISRFSKATTLRRTKTDKIDAHLIALYLSTVDYKPYPIKSYHIRNLKSLCRARDSLVKERSLQLVKLTNVLDLIFPEFKPFFNGNLKSSTALYILENYSSVNKITNMNIDSYNKMKSKLRKTISYARFTELKMLARNTIGNNDKILNFELRLYLELFKELDSKISDIESLILEEYLIVNSHIHSIPGIGMISAAGIYSEIGNFSRFNNPDQLLAFAGLDPSRCQSGESDFKGHMVKHGSSFLRQYLMNVAETSLIYNPKLYEYYLKKRNEGKPHRVALSHVAKRLVRIIFYLEKNNSDFDENKMR

SEQ ID NO: 77207 - protein, 346 aa, unidentified
MHYIGMDCHITTLDFAVVNEAGRLVKADRVATSVNGFMEFVKTVPPPRTIYMEESTLAAWALETCIRFREKLVITDAKKNHWIGSSGQKDDSIDALKLAQLARGGYIKEIHHPVGQRRRFRELMIAYHDAVRSTTRMKNKIKARFRQNGIQCTGATVYSEAHREEWKGKLPQEATLLLILDGLWRQLEQSEQTEKELLAAARAQAKLYPEIKHFEAIPGIGFIHAATISAILETPYRFADKRKVWMYAGLGIMTKSSGGKIYSEKLSTDYNRLLKYTLKQAAEAAIQAKDNPFRRKYLDMTLLRGIAPHRAKLTIARDMMATMWAMWRKGEKYSPEIRKKAACKQG

SEQ ID NO: 77208 - protein, 345 aa, unidentified
MPIVGGLDIHRKQITFDYLDTVTGEVKRGQIAPADREHVRAWLARFAGQDDAAFAVEGCCGWRYVAEELAAAGIAAHLGEPADTAALRGRKRHAKTDKTDARHLRALLAEGRLPECWIPPPHILEYRALLETYHDLRTEHTAWVQRIHAVFFHQGGPPLGEGVLRTEPGLEALQSAAAAHLSPAGQQQVATAVDMLAATEAQLGPLRHQLRQAAAHLVGAKVLAARLYGVGPVTGLALTCWLGGKDRFSSSRKAVRFTGLDITVHSSDRKGPPGRLSRQGPPVLRWAVYEAGKTHARASAPDHAYYAAVADRKNTKRAALSEARKIVRQACHILTELGDDALTAA

SEQ ID NO: 77209 - protein, 352 aa, unidentified
MKEHTTVCVGIDIGDRYSQIAVLDEEGEVNEQSRIRTTPSAFKHYFQGKSPMRVAMEVGTHSPWLVQLVDDLGHEALVANAFKLRLIHRNNRKSDEVDAELLARLCRFNPQLLYPIHHKGKEARNAWAVLRTRDALVRSRTALINHARGIVKPTGHRLPKCSSRYFGKLQDELPESLRPVLEPILHTVNQLTIQIQAYSQQIEHIGQDQYPQTILLRQVPGVGPITALAFVLTIGDPWRFVHNRDVGAYLGMVPRRSQTGQSDPDLPITKAGSRYLRTMLVQCSHYILGPFGPDSDLRRSGERIASRGGKNAKKRARVAVARRLAVMMLSMLKTGEAYDPLHGSHDDEVSAA

SEQ ID NO: 77210 - protein, 383 aa, unidentified
MAMKDDANTRAIVGGVDTHKDLHVAAVVDEQDRVLETRSFATTRQGYRQMLAWMRSFGDLQRIGIESTGSYGAGLLRFMQNAGVTVLEVTAPDRQDRRRRGKNDDLDAQNAAHAAFAGKRTVTPRSRDGMIEALRVLVACRKTAVMARRIALQMIQNTIVAAPDELRDLLRDMTRMQLVRTLAAWRPDLTSYREVEAAYRIAFKSLGRRYLELPDEIADLDTMIAAIVDELAPNLVTRNSIGHTGAAQLLLTAGGNPDRMRSEASFAALCGVSPVPASSGKTIRHRLNRGGDRAANTALHIIAIGRLRTDQKTKDYVARRVAEGHSKLDAIRAIKRYLAREVFSLICRSQNPVSSRPKSISRTKRHRTPLLPAQKPAPHPNTI

SEQ ID NO: 77211 - protein, 394 aa, unidentified
MIYAGVDIAKTDHVIGAVDERGAEMRPPMPFKNTEAGLERAVAWLEGLAGSPSDVVVGMEATGHYWMACYSFLVARGYSVAVINPMQVKAVRKLKGLDKVKNDRVDAGLIAEALRIGQYDETRLATDEMASLRSLSRYLQSLRGMVAELKTQCICLMDAHFPEYAGIFSDMFGAGSRAVLSKSPLPFELARRRADSLARDIAEASRRGGKSSGYAAKIKAAAKSSIGVRLGQEAASFQVKSLIRQIEFADSECAGVEARLRSLLDEVEPLVLTIPGVSYVTGAQIVSEIGDVSRFRNAPALVSYAGLNSSVSQSGQFDSGGGPITKHGSPYLRRALWLAANRARQYDPGLRAFYDRKRAEGKPHRVAVTAVARKLCHIVFAVMRDQVPYDPGRE

SEQ ID NO: 77212 - protein, 413 aa, unidentified
MTMLSVALDPATVVVAVDPGKVMNRVWVSNGAGLLEEPASLPVARSGIAALEKMLATHAGEHVIAIEATGSLHRAWAAELERLHPGAIRIFAPSETKSARTQLGSGRFKTDDRDCAALTYLARQGAGRPQAEESVIDTLRAAVRHRHGLVDDRKKAQQRLHDQLNSLCPGLSAPDGHAATLGRSLPIETPTGQAVLACAVAFAGRAPSTRSLVARAPGRLTKATADYWAARWRGCLPPPPDAEQRARRLGRDLERYQALRDDIAILNEELKALLAGTDGQILTSLPGVAVNRAAAFAVHSLPIARFPDAEHLYSATGLAPAMYESATLRRRGRISRQGLAEHRDALMGIAWGLSLFSPSFAQRDAEYRARGMAPIQARVAVARHACRLVYRLLLTQQPFDEEAYRRGRLSPGR

SEQ ID NO: 77213 - protein, 408 aa, unidentified
MKRYYLGVDWADEFHQVWVSDPGGKKVVEMRVEQHPAGMSEFGRWLRERRAEGIELWASIEKPHGFIVDFLLDHGVVIYPINPKALDRARDRFRMSQSKSDSFDAYVLAEFVRTDHAHLRALQPNSEQAQELKMLTRDHHRLVRQKTRLLNQIEVTLKEYYPRPLEVFSDLESKIALDFLVQYPTPQALSELSRRNWNRFAKRQHHLGEARCKELWEKLSQPQLAIPEHVIRAKAQLLAVLVVQLKILVQAVESYSQRVQRFFASMPAAKLVKTLPGGKSGTTVPMLWAELGDAKSRWESFKHLQAEAGGVPVTKASGKSRVVHFRFACNKLLRYASYWMSFNSLNRCEWANKYYRDQRTKGHSHHQALRALGAKWLKIIFVMWRDQVPYDENYHLANIARQRMRQAA

SEQ ID NO: 77214 - protein, 343 aa, unidentified
MQTVTTIGLDIAKSVFQVHGIDAAGNVIVRRKLKRRYVLAFFQKLPPCVVGIEACASSHHWSRELQALGHTVRLMPPAYVKPYIKRQKNDAADAEAICEAVTRPNMRFVATKTPEQQSCLMLHRTRHLFIRQQTSVINAIRAHLAEFGVVAPVGRNGVEQLLDVVADVSDKRLPEIARACLLALGAQLRTLKAQILNFDRQIMACHRSNTTSKRLDEIPGVGPALATALVASVADPKAFRSGRDFSAWIGLVPKQHSSGGRDKLGNISKRGDRYLRSLFTAGALAVIRYAKIHGTQHRPWLSALLARRPTKVAAIALANKIARMAWAMMARGERYKEPVALAA

SEQ ID NO: 77215 - protein, 339 aa, unidentified
MKKVFIGIDFSKLKFDAAIYSVDTKAIVSSEVFDNEQSGYVDFLQWVKENTRCQKSGMLFCGEHTGYYSGNLSVFLYESGYDMWLVSGLEMKLTQGIKRNKTDRVDACKIAEHAYRYQDKVVLFQPVSKALEEIRELLSYRERLVETRKVLTTSAKEMKRVKDNASCDYIFKDSLEYIKTLNASVRDCEKRIEALLKQDISLNTNYKLVSSVVGIGLVNAALILVATDNFTKFDNPRKFGCYCGVVPFEHSSGTSVRGKTRVSKMANRHLKTKLTLAAQNAVRFDPELREYYQRKRSEGKNNWLVLNNVKNKLIHRIFAVVRDGQMYEKQYVHPLKQAA

SEQ ID NO: 77216 - protein, 353 aa, unidentified
MRPPSRYMYHDNLFCLDLAKTTIQGCLLDKSHQARFNRTFSRKKLTEWLSRQQPMTVAMEACSTAHYWSRVIERLGHRPLLVPTRTANRYREGHKTNATDALAVGVAARQPTTRFVAPKTIEQQEMQSVERIREHISSDLTATSNMMRALLAEFGLEMAKGKAAFKRRVVELLEDAENDIPMVLRTELINEWMRYRQLELRLKEVEHARDLLCKQHESCQRLNQLGGVGPVNAIGLYLALGDRGSSFKNGRDASTCIGTTPKQYSTGDTVIMLGISKKCANKRLRSNLIQGARSVIKVLKKRDPKNAQEAWLKLLIERRGEGRAAVAWANKTIRVAWAMLHYGDEFKLHPSLA

SEQ ID NO: 77217 - protein, 449 aa, unidentified
MSNGNGVSRGDRNRNARLGRLRELVPLVNAIVGIDLADKKQMVVVTDHDSKVLARKTFRCRAWDLGAALDWAAERAAAKGFSGVTVACEPTGHRWRVLGQLAEQRNMPFVCVQPMQTSWARRSEDLTFDKTDEKDAVLIARLTAQLRCYVPEPVDETWGRLRHLGARRQQLLEDTGSQVQQMRALLECAWPAALGTAKHPFRSTTWAAAMMVILDRDSGDLARTRRLGLSRLEQAVRREIVRAGRQKPCLRIVRLLFSALTDSAGVTAHRVGAFERVALLLADWTETHRRLDDTESRMTTVLDELQLTTLATSITGLSPVGAAAILAETGDPRRFATARALVKHSGLAPREKLSGTFVGRTKLTGQGRPALRLAAWRAVWGAQRANPVYAARFTHLTKRDVNKLTVTQAQAVIAATILRHLHAVITTGQAWDPIIATHGTKNPPVTIAA

SEQ ID NO: 77218 - protein, 296 aa, unidentified
MDIAVFNPTDGLVHQARINNTLKDIRNFLRELKKYLKTEITEHLFCMEHTGKYGHAFLTASTLEKAKVWVELPIQIKRSQGLVRGKTDRWDAVRIAQYAHRFADKAVFWKPVDKTIQDLKELQVKRSLLVKVHSHLIQENKNDPLFKKPLLALKQSIQAIELKMEQLVEQDELANHQYELLKTVPGIGRQTAIALIVVTNGFTRLTESRKLSCYAGLAPFPYSSGSSVKGRTKVSKMGDMKLKVLLNLSAWNAIRSITAFKDYFKRKVSEGKHKNSLSSMQSEQIDCFGFSSDQKK

SEQ ID NO: 77219 - protein, 370 aa, unidentified
MAHTSPLFIGLDVHKETIAVAYGSEEREAEVVFLGTIGTRQCDLDKLMRKLQGKDKKLHLVYEAGPCGYWLYRYLTKKKLLCWVVAPSCIPKKASDRVKTDRRDAVQLARLLRSGDLTPVYIPSVDDEAIRDLVRAREDVLKDLKAAKVRLKAFLLRQDIRYEGRANWGAAHLRWLAEVVCPTPAQQIVFQEYVRAVSEQTERLQRLEAELQPLVQSWRWYPVVEAIQALRGVQFTTAVTLIAELGDLTRFDNPRQLMSYLGLTPSEHTSGERRRQGAITKTGNAHARRVLVEGAWAYRYPAKVSRHLQLRLEHVPKTIQDISWKAQVRLCKRYRRLVARGKNVNQVVVAIAREMAAFVWAIAREVAVAH

SEQ ID NO: 77220 - protein, 427 aa, unidentified
MPYRIAGIDVHKRILAVAMAEVEVYGEYDFVRRQFGTSPSQLRALAAWLVSQQVEEVVMESTAQYWRPVWGMLERYWQAPCRQREGAPATAGGLHLAQAKSNQGPRGRKNDFADAERLVKRLAANELRLSFVPEGEQRLWRTVMRTKHQWRRNQVQLQNRLEALLEEAQIKLSSLLSDLLGVSGRRILQALAAGETDPAALAALADPNLRATRQELGDALEACRDLPPLYRRLLSSALAEWQQIETRIQQLDEEMATLLRAHQDQVQRLAEIPGLGVDSAHQILAEVGSEAATFPSAGDLASWMGACPGDNESAGVNASRRSPKGNRHLRRILNQCANAAVKMQGSIFALLYRRYVPRQGHKKTVAIIAHRLCRLVWIILHRGRRYEERGPAVSKQSAQRRAARMIRELRSLGYHVELPLNPAAKPA

SEQ ID NO: 77221 - protein, 344 aa, unidentified
MGEVSRVGLDIAKSVFQVHGVDGGGAVLIRKRVGRAKVLEFFSALPPCLIGIEACPTAHHWSRKLQALGHTVKLMPPSYVKAYVKRSKNDANDAAAICEAVTRPSMRFVPTKSEQQQSGLMLHRSRQLLVRQRTMLSNAIRGHMAELGIVSAKGRNGTAELLTIIANTEDDRIPRDARFSLDVLARQYAALAMEIGAIEKRIHAWHRSCESSRRLEEIPGIGPIVATALIAEVGDWKTFSSGRNLAAWIGLVPKQHSTGGKERFGGISKQGNRYLRWLLVAGAMAVIRYARQHGTKRLWIARIMERRPIKVAAVALANKIARMAWAMMVSGERFKEPTLLPAAA

SEQ ID NO: 77222 - protein, 405 aa, unidentified
MSLQNPPPKRYIGLDIHKHYLIAIGVDADLNQVFGPQRVQMSRLAAWIHKTIMPFDAVVLEMTTNTWEVHDSLLPYAHSVTIVHPPHVSLITRAQVMTDKIAAATLARLHAKGLLVGLWVPPQDVRDRRALIAQRSKMTRLSTQAKNRLHAVLHRHHLSLPAGDPFLESQHAWWLSLPLNPLEMMRVQSDLNTLIFARSQIDLLDNTLTQIAAIDDRIMLLVQLPGISILSALTILAAIGRIDRFPSAKQLVGYAGLGARIHDSGQSTRTGRITKAGRKDLRTALVEAAHTAANTHPHWQSELARLEPRIGHNKAIVAIARKLLVAVWYILSKGEVDRHAEPERLARKFLQTALNLGKANRQPGVSPGAFTRHHLDRLDFAHEVTQVTWGKKRRPIPLPPSAQPD

SEQ ID NO: 77223 - protein, 402 aa, unidentified
MKHVLAFDVSMGKSTMVIYNHYKQCEFEGEITHNKSSFKALHEKICEITKLDGQAPEIVFEASGVYSRPLEYFFQTEGYTYHRVSPLEANLQTASMRRHKTDKSDAHELAKSHFRLERSTTYQEDNYYKQMRALTRYYGELDSEIINLYSRMHAILQLSFPELERLLSKRSALFLNIVQLYPHPDEVLACSKTVIRNRIKGNTKKNLSHARAEAKGLELLNAAKDSYPAISKEDVRCEQVRDYAKRITDLKEKKEQLIKQMGELSKERFEYKVLLSFPGIGEVTAVRLIGEIGDLKRFRNNKQLNAYVGIDIMRYQSGNTFYKDKINKRGNNKLRKILYFMVQTMIRLRKKTNNHIVEYYDKLKTQPQGKPHKVASIACVNKFLKVAFHLITHNITYNYEAA

SEQ ID NO: 77224 - protein, 499 aa, unidentified
MITIPVITERCAGIDVGKRGLAAAVAVGPADKEAEIITRWFGTTTPALQELRAWLNNYGCTTVAMESTGSYWIPVKNIIEQDVRITLVCPRKHHPKRGEKTDFRDAIDLAVHHRHGLLTGSYLPERGIVELRDFTRRRKKLLGNLRSEKNRIQKVLETANVKMGNVVSDVFGVSGQEILKALLTNTPVTADEMADMAKKRLRQKIPQLTEALEGQQMNDHHRWLIEQSIEHAKFLDCQIEELEKKIDLQLEPYRRAYELLMTIPGIKEAAAANILAEIGPHMEQFPTAADLSHWAGICPGNNRSAGKTRSSHIKKANKFLLAALVESSWGAARKEGSTFQRKFRRWIKKGPKVAGIAVCHALLRVIWSVLKNDRPYVEPDDMVLHNLERQKQIRHYGRKLSEMGADEQTIRTLVDKLLELPADTPPRAETPQTPSTRSSSCRKDRRRPPARGVLGFRIRTAPKKTYSVEKDLPDPPSGAAASVTTSSPPKEGRTRKPKT

SEQ ID NO: 77225 - protein, 368 aa, unidentified
MKQVTTYVGVDAHKKDLFVAMLIGRSPTPVAWTVPNEPNAVRRLVRKLEREAPGPVQMCYEAGPCGYALQRQVTTARVSCQVIAPALIPRKPGERIKTNRRDARKLAELFRAGLLTEVQPPTPEDEAVRDLCRARDDAREDLQRSHHRLGKLLLRRGLHFGGRNWTRAHRQWIDTLEWAQPAERVVVDDYLLAIDQLESRLIELDARLAEIAETEPYRERVGWLRCFRGIDTLTAILILAELHDFRRFQSPRALMAYIGLVPGEDSTGEKHRRGRITRTGNALVRRLLVETAWHYQHRSSIGVALTRRRKGQPGRVIAIADKAQQRLCRRFRRLIEQHKPAPKVAVAIARELAGFLWAALQPAPVPAS

SEQ ID NO: 77226 - protein, 459 aa, unidentified
MHETFATLRRRRHRGRYSLGAIKPDLKLDPGFLEHLRLSPRAVIGPGARFLEFFFTGPHADDATQEEEMELLHRRCCGLDVHKETVVACLRLVSDGQVTTEVRTFQTTTADLQRLSEWLAANECTHVAMEATGVYWKPVWHILDDGEFELVLANAAHVKNVPGRKTDVNDAMWLAELLAHGLIRASFVPDTQTQEMRNLLRTRKQLVREQSSHVLRVQKTLEDANIKLDSVLTDLMGKSGRAMMEGLIAGETNPTKLASLADPRAKASHEEFREALRGRVTKHHRFLLRLHLNQIDALDAAMATLDAQVEANLGPFRTAVDLIMSIPGIKNLSAHVIISEIGIDMSRFPSDAHLISWAGICPGNDESAGKRRSNRLRKGAPWLKTTLVQCAWAAVKKKNSYLQAQFYRIKVRRGPKKAIMAVVASILTAIYHMLKDGTMYQDLGCNHFDRRSTDQQKNA

SEQ ID NO: 77227 - protein, 331 aa, unidentified
MERAVLAGIDVSAKELVVALERGKGSRWNGTFTNDSAGHRKLIGVLTRRGARAQVCLEATGIYHLELALALVANDRIALMVANPRATKDFARARLQRSKTDRTDAISILEFLRRMPFEAWNAPDPAILDLQALSRRISALLVSRAQEKNRLHVEDQLATRTHAIRASIERHIDAINAEIDALTEAAVETLQKLPRLERRFALLTSVKGIGRASAIALLAELAVLPDDLSTRQWVAHAGLDPRHYESGSSVRSNTRISKVGNRHLRSALFMPAMVAVRSQPEVRAFYDKLIAKGKKPLQAIVAVMRKLLHAIHGMFRTETEFEGARFFALRA

SEQ ID NO: 77228 - protein, 313 aa, unidentified
MKTSFAKVVGVDVSKSTLDVAFENEVIKSKNTKSSIIKNVVKRIDRRSTIVVMEATGGYEGLLVTLLHQHDIPVAVVNPRRVRDFAKAIGADAKTDPIDAKVIAHYGSVAQPTPQPAKCESEKRLKALVERRRQLLGLITQEQNRLQQTFDMEIKQSIRETLRALKKQQKAIDQRLAKCVADDKQNQRKIEIMSSVKGVGPVATSTFLAELPELGKLNRGEIAKLVGVAPMNNDTGKKKGKRKTFGGRSYVRSVLYMATLVATRFNPQIKTFYQRLLKNGKQKKVALVAAMRKLLTIINTLIKKDQLWQPPVQ

SEQ ID NO: 77229 - protein, 315 aa, unidentified
MTKQLPSVNVGVDVSKDTLDLYLLERDLLLHVPNDEPHISSLIKRLARYRLERIVIEATGRLEHAFVTAALTRGLPVVVVAPLKVRRFAEAVGQLAKTDAIDARLIARFAATLKPEAPPIADANAHLIKDLVVRRRQLTSLRTIEKNRRSVMPSAITPSIDRIIESLDRELAALEQLIQSAVEQHAPWRHQRDLLTSMPGIGPGVASSLIGDLPELGSLSRRQIASLTGVAPFNRDSGAFRGKRRIRGGRAHSRTALFLSAMVAIRYNADIKRFYKRLLAAGKHKKVALTACIRKIVTALNAMLRDNQPWRPSFA

SEQ ID NO: 77230 - protein, 410 aa, unidentified
MGYETINRRVYVMTRKNTLKSLPTDTDFRVVGLDLAKSDVSVAAIPVDDNTPSLVDRMTYADLLDWAGKISPTLFAMEPCNGYSLLCLQLENLGHEIKVISGWTVSMWINTHLSGQKTDLNDAIALARLAVSDAELTPIRHKSITEIRIQTVQAVRQQLMSQRSKSIVSFKALAQQWGIPCAAGHRNLKKLRESIEAKVDLITRPVANAMLFLLDAVKSLDRQIGQLNQTLQELVMSDERGRLLQSVLGVGTQISARVITVVGNVERFNSPRSLVAYVGVAPRNFITGHKNLTKKKHGNCPDLSHKGQGKTRRRGDKLLRSLFIQGAACLYMQFCKDQLPECLLKCWILKQLAIQKPYGKLIVSLAVKLIRIVWAVLTYREKFNIQKAGMTRSMWSEMELEKPINKEVPA

SEQ ID NO: 77231 - protein, 411 aa, unidentified
MQTLVERGCGLDVHQATVVACLLIILKNGQVQKQVRTFGTTTRELLVLREWLLSQSCTHVAMESTGVYWKPVYAVLEGGGLEIVVANAQHVKKVPGRKTDVKDAEWIADLLCHGLLRSSFVPPKPIRELRDLTRYRRKLVESQAAERNRLLKLLESGNIKLASVATDVFGVSGRLMLRALTEGKATPQEMAELAKGLLRKKLPELELALEGKFEEHHRFLLLLQLKRVQAAEEDLAVLERRIQEKLKPYEAQLTLLQEVPGVDWTLAAVIIAELGVDMKVFGNVSQLASWAGVCPGNNESAGKRKSSRIPKGNVYLKTALVEAANAAAKAKGTYLRDKFYRLKARRGYKRAAVAVAHKILVAIYHMFSHQVCYNELGDLYLDKLNKHSLTRNLVHRLERLGYTLTLNQKAA

SEQ ID NO: 77232 - protein, 339 aa, unidentified
MKLYAAIDLHSNNSVLVILDEMDRTVLQRRLPNNREQICQALCAHREAIEGIAVESTYNWYWLVDGLMEAGYRVHLVNTAAVKQYEGLKHKEDVDDARWLAHLLRLGILPVGYICPKEARGVRDLMRKRNQLVGQRSRQILSIENVLSRDTGGRASANEIKRWQETDVDQLALGESSRLAVKSHVAVMHCLNEQIERLEAEILKKAKLRPDYQGLLTVSGVGKVLVALTIALETGEVSRFATVGDFSSYCRCVGSEHLSNGKKKGSGNVKNGNKHLAWALVEAANFAVRYEPAIKRFYQRKCARTMPVVAIKAVAHKLARACYHVMRDRVPFDVQRAFA

SEQ ID NO: 77233 - protein, 322 aa, unidentified
MITLGIDISKRDFHAALLSDDRTAKKSFPNSAKGFEQLAAWLRNRKVDNVVACMEATGSYWYALAKFLFKSGHSVAVINPRRIKSFAESELLRTKTDAVDAGLIARFAATQQLQFWTPLAPEIEELQGLYRHLEFLKVSRTQHVTREQTPDLPERVLQSAQTIIAQLDIQIDELERAIRDHIDRHPGLKSKRDLLTSIPGIGETSATAILSEMPAIEEFRSAQAVAAYAGLSPLIRQSGTSVRGKPRLCKTGNARLRKALYFPAIVGERYNPILQAFGRRLRAAGKATMVVIGAIMRKLLIIAYGVLKSGKPFNPSFLSSGA

SEQ ID NO: 77234 - protein, 411 aa, unidentified
MLFVGDDWAEAHHDIEIVDETGRRLARRRLPEGIVGIAGLHALVADHLGDGDEPERVLVGIETDRGPWVAALVATGYTVYPVNPLQVARYRERHSTSGSKSDPGDAHVLAEIVRLDRDHHRTLAGDSEVAEETKLLARTHQSLIWSRQRQTNQLRSLLREFYPAALAAFGEDLAGRDALAVLAVAPTPEQGKALRVPRVVTVLRRAGRRRNLTKRAEQMVAVLRSEQLGARPRLVAAYGASTAALVAVISELAGQTAVLEVEVEACFGRHPDAEIYLSQPGLGIVLGARVLAEFGDDPNRYADARARKNYSGMSPITRASGTRRVVLARYARNRRLGDAVYQQAFSALSSSPGARAYYDQHRARGATHHQALRALGNRLVGILHGCLHHHTAYNEQTAWGHRHDTETAAAA

SEQ ID NO: 77235 - protein, 427 aa, unidentified
MAVVMIGIDPHKASHTAVAINAAEQSLGQLRVRASAVQAERLLGWAQPWPERAWAVEGAGGIGHLLAQQLLSAGERVLDVPPKLAARVRLLATGDINKNDPNDARSVAVAALRSAEVREVRQDDHAAVLKVWSKRHQDLAQARTQVACRLHQVLCELIPGGVPGQITAGQAGRILAAITPAGAVAAARWELAAELTEDLRGVDTRIRETRKKTAAAVRAAGTSLTGLFGVGPVIAAAVIGDVRHVSRFPNRDHFAAYNGTAPIEVSSGGRKIYRLSRRGNRRLNHAIHMAAVTQIRYRHSPGRAYYDKKLAEGKTGKEALRCLKRQISDAIFACLQADARRAATAPEKSPGGQPGNHSSSRAAGSNPEHRRFGQATPGPATHPTTPTAPFPAPLPTRASGRPGQEPGAARPRSGARRASLRRPPGSR

SEQ ID NO: 77236 - protein, 325 aa, unidentified
MNHVSQPVLGIDVSKATFDVALVYHRQLHHKQFANQPTGFRALRAWLAKHTTAPLHACMEATGKYGQALAEFLNAHAIKVSVVNPLRIKAFARSELSRTKTDKQDAAVIARFCVAMRPPAWQPAPPELRQLKAYTRRLDALTALAQQEHNRLEGETGFVADDIRQHVKELQARIHRLKKVIAEHLKQHPTLCRQKALLLSIPGIGERTAAHLLTICGSIHQFSHAKQLAAFCGLSPRTHQSGSSVKGRGALSKMGHASLRKALFFPALVAMKYNPQLKAMRERLLAAGKPKMVVVGAVMRKLLHQIYGVLKTGVPFRPEIGARPA

SEQ ID NO: 77237 - protein, 466 aa, unidentified
MGKPRVVPDEDHEVVYERVAAVDVAKASGVVCLRAPDPARPGRFTSRIWDEVPAMRAQIAELGRELLRNQVQMVTLESTSDYWRIWYYVLEDAGLAVQLVSASQAKNLKGRPKTDRLDAMWLARLTQAGMLRPSFVPPAAIRRVRDFTRARTDLVAERTRCLQRLEKLLEDAMIKVTSVARDGMKAKSVAAMVAALAAGQRDPAALADLAKGPLRGKKDALAQALDGMFDSHHGVIARALLDQVAFLDRQVTVMEEQAIAALAGVPESWGVDADGQTGPQAGTSPGSPVLAAAHRLAEIPGISVWLALVIIAEIGLNMAVFPTPAHLVSWMGLCRSASQSGTRRGKGKPKKGNSYARAAAGQAAIGAARTATFLGERYARIARRRGKPIAQVAVARSIMIIVWHLLNDPQARYHDLGPDFLASRVNRDKKIRNHIRGLTALDLTAEDICAALGITAEDIPSGGHAA

SEQ ID NO: 77238 - protein, 348 aa, unidentified
MKITRIGLDLAKQVFQVHGVDEKGRKAVSRQLKRGQVEEYFRGLEPCLVGMEACGGAHHWARVLGALGHEVKLMAPQHVKPYVKGNKNDANDAEGICEAVGRPNMRFVALKTVEQQRLQALHRVRRTLMRNRTAAVNEIRGLLAEYGIVVSVGVGKLRASLPELLEETDNGLPMSFRPVLSGLKEDLEYLDRRIGEMDAAMLRVAQEDDRAHELMRLRGVGPTTATALLAALGDGRQFTRGRQASAWVGIVPGQHSSGGKERLLGISKRGDAYLRTLLIHGARSVVNSCKGKTDPLSRWVQELCARRNKNVAAVALANKTMRIAWVLMSRGGRYDPAYGVTQQAEQAA

SEQ ID NO: 77239 - protein, 467 aa, unidentified
MARFIGGELQAEFMGRLRGIDPDRCLVVPVDVGKSMAMSLVADHYGEVVTAPFEFDLTESGVANLIEAVAQAERSRSAVVVRVGVEAAGHYHRTVVARLRRAGLEVVELNPGAVKQARSQQLLRALKSDARDLGAMAELLTRGAGRPPEERDQALLTQVAWTAHRRRKVKARTALTNQVLAQLDLIFPGLQECFTAGVLSTKAGRVLVRDLVEPSRIKRLGDEGVRRFVARRGVQMSRPKAASITAAARNALSLSEEELVARTAVFSADIVLFDYLDTMIAEADQQLSEVLGATPAAVLTSLPGISVIRASNYGAEIGDPWRFRSAEAAYRFSGLVPASYESAKKARPGQHISKEGSVELREAILDLGKGLAQFDPDFAEYKRRLVSEGKKRSVAAVAVGHRAHRLAFSMLRSGHPYDRDQWARSVATGRSVMAKAPRETHQNDVTCPSPVLTFTEDLIGHKHALLR

SEQ ID NO: 77240 - protein, 396 aa, unidentified
MFYLGIDIAKTNHVASLLDQKGTVLIRAIRFTNSIEGFQKLLESISSITSDLSKIVVSMEATGLYWLSLYSSLIDKQFNVSVFNPYQIKSYRGAFNNRKQKNDVIDSIIIADYLRVFGTNTTYLPNEELLSLRQLTRYRSGLVENIASLKTQVIGILDKVFPEYHKVFSDTFGCTSKQILLQCPTPEDILKISSTKLLNLISKHSKSRLGNNTVQTLKSIAKVSFGVKFTNGACSFEIKQLINQLIFLEKQINELDVEIKELYDKLDTHLLSVPGIGKTLAPIILAEIGNINTFDKPSKLTAFAGIDPSENQSGNKQSSNNKTSKRGSPYLRHAIYTASLVAMSNDKTLRAYYDKKISEGKHHFIALSGISRKLLTIIFYILKEDRDYISYNQKRS

SEQ ID NO: 77241 - protein, 321 aa, unidentified
MPFEYTVQIAIELSLSSWVVAVRSPGVEKSRLHHIEGGDTTALLALIAAERLRPSARLGQTVDVACCFEAGRDGFWLHRLLTANGIHSFVLEPTSVLVNRRARRAKTDRLDAEGMLRVLAAWLAGDRQVCSMVRVPTPEEEDAKRPHRERELLVQERQRIENRIEALLFTQGIRKRPSLRLWARDMDELRTGDGRAIPPLMRAELDRLRRRLVMVLELIREVEAEQASALAAAADNETAQKIIALQRIRGIGENFSAVLVREVLYRSFANRRQLASYVGIAPMPYQSGGRRPRSKHQPGWQPTSPHDAHPTGLALASLPAR

SEQ ID NO: 77242 - protein, 417 aa, unidentified
MEEGEKSSSCRYIALDIHKYYSVVAGVDREGQEVLIACRVEHMDLEDWLKKHLLATDRVVIESTTNAWHVYDLLEPLVAEVLVANPIKVKQIACARVKTDKKDTFILARLLAANLVPTVWVPPKHVRELRQLVSHRRRMAGMHTQVVNRMHSVAHRHHLNHPKGKDFQAKNTLWQRDESLSRLEKMQLELDMETREHLEKQIERMTRELGRMSHEEPWASEMLYLMQIGGCGVVTGMTILAAIGDITRFETPKALASYSGLTPGLEQSGVKLRGKGITKEGRRELRWVMVEVAWRAVKADPYWKKYFEELKRRMHPNQAIVAIARHLLTMVWYVLTRHEPYSHYTPERIAYKYLTWSWVLDKDQRQGMTRPQFARYYLMRLGIGNELKRVALNPENPYKLASVEEVLALRPELLLPE

SEQ ID NO: 77243 - protein, 342 aa, unidentified
MKIIGCDFHPSFQQIAMVDIETGEHTEKRLTPAEAIGFYGQLPGPVLVGMEACGNTLWFERLLAQFGHELWLGDAGKIRALEVRKQKTDRRDAELLLQLLLEKRFPRIWVPSPEQRDLRQLLLHRHKLVGMRRQVKNQLQHLALNQGVQQKHKLWTAAGRKLLEELALTGWTAERREELLSMLDDLDPRIGKLDQAVKAAAEKDRVAQRLQTHPGVGPITALAYSLTLGEVGRFQHSRQVVSYLGLNPAEHSSGGRQRLGSISKQGNAMLRSLLVEAGQSAARLVPELKRAYQRLKHRKHSSVAKVMVARKLAVRLYWMWKNEQPHSATRMRGSPSHPVAEV

SEQ ID NO: 77244 - protein, 430 aa, unidentified
MWFRRVEVGRMEVAHDDEQIIERVAALDIGKAEVVCCVRVPGLGPRARRMQEVRTYTTMTRSLLAMSDWLSGLGVTRVVMEATGDYWKPPFYLLENTFETWLVNAKDVKHLPGRPKTDRLDAVWLCKVAERQMLQPSFVPPPAFRQLRDLTRYRADLITARTAEKQRVEKLLEDAQIKVSVVVSDVFGVSGRAMMRALIAGERDPKVLADLARGPMRGKTARLEEAFTGRFTDHHAFLLRTMLARVDGIDADIKLVQGRIDEQIAPFAKAVVRLDEIPGVGVTIAQVIIAEVGLDMSRFATPAHLASWAKFAPGVSESAGRKKGTSSTGHGNRYLARVLGEAAVGAGRTKTFLGERYRRIARRRGKKRAIVAVGRSILMIVWVLLNDEEQRFVDLGPGYYESRINRNRSTRNHVRELQAMGYNVILEPAA

SEQ ID NO: 77245 - protein, 370 aa, unidentified
MSVRRILAKTINTDLEYEAIGIDLAKNCVSVALLTTDGEVVCIDRLDYSELEKSAQVLCPTTFAMEPCTEMNYLVQKLEAWGHRCLVIGGKNVQNYVENHYSGQKTDLNDAQALAFLAQDTQLRTIKAKDMEQQKYASLTTLREQYIKQYRQTIVSLKGICQAWGVNISKGISGKARLKDLIENHAAFPEELKESLVDMVTHAQTAQKALNKITKTLELLAKNDKVCQLIQTIPGLGPICSCRLRATIGDIQRFKNLKDFPAYYGLVPRSIATGHNEKKGRITHRGDKTMRSLMVQGAGSVVNMATKGKLKSKQLTKWILKKQKEKMPWGKLVCAVAAKLLRIVRAVLISRKPYNPKIAGVAKCSLPKGT

SEQ ID NO: 77246 - protein, 344 aa, unidentified
MNSTTIAVDVAKSVFEVAVSEYPGQVRERHRLSRGRFSRFLAEHPPATVVMEACGSAHHWAREAQSRGHRVILLPPHAARPYVLRNKTDRTDAKGLLEAFRNDDLRPVPVKSETQQALAALHRLRSTWVATRTARLNTLRGILREFGVVIPTGAHHVVPHVRALLEDADAGVPGLLRVPLSEAIREIGELEERILAIERQLARTAEPALLIGRLRTIPGIGILTATALVAAVGDVQRFPSGRHFASYLGLTPREHSTGQRRHLGAISKQGDTYLRMLFIHGARSVLHHAKSKTAPATDRFRTWALQVERRRGHNKAAVALANKLARIAWAVWRSGNDFTAAAAV

SEQ ID NO: 77247 - protein, 466 aa, unidentified
MGKRKVHIQGARGEAFLELVRGVPREQVLAVGIDVHKYYHQVGIHNGYGEVVEPGFRVGIFNADFDELCEVIDRAVERTKAEVVFIGMEPTGHYYENLARHLLQRYPHVRLVNSYAVKQNRNQKMLSHEKTDEIDLCAIGDLVLRNECFSYQPLSGDYLHLQSWVRYRQAKDKARTALRNQIIGHLDRIFPGLVGHNQPTDSAPRPLFTTIWRSKMAQQLLRLCPDPHHLAAMEPAELVELFHQHSYRMGVTGAKRIVEFARQVLLPDPEVISARLPLLQCDLTLLDALDAAIEHATQQIVHYLTGTKGQVLTHIKGIDSLRAAAFIAGIGNPDHYEHAGQTFRRSGLVSGRHDSGIRQRGGVGSHITKEGDAHLRRGLIDITYGMCQWQPYFGQYRERLMARGKHKGVATVATARKINGVLFAIVRDQTEFKPVDKQGRSVPPLCSLRKRKEEAATNIDPGKTFV

SEQ ID NO: 77248 - protein, 341 aa, unidentified
MLYYTGIDVSLEASHLCVVDEAGTVIKEARVASEPEALVAWFSALGFAVKRIGLEAGPLSQWLYAGLKAAGLEVSLLETRHVRDAFRAMPVKTDRKDARGIAQLMRLGWYRQVHCKSVNAQDNRTLLAARKVLQCKYHDLEMSLRGLLRGYGLKVGETTRKTFEPRVRELAADVPGLAEVAEALLKARAVLFEQFRVLDARMIAHARKDERAGLLMTVPGVGALISLTFVSAIDDPGRFRSSRTVGAHFGLTQRKYQSGETDITGRISKCGDQEVRTALYEAANIILTRPVKGSQLKSWAAKVAQRSGMKKAKVALARKLCVVMHRMLVDGTCFDPALAAA

SEQ ID NO: 77249 - protein, 378 aa, unidentified
MHKDSVYLCILRENGEKIERVYGVLTPQLDSMRDFMAENKVSEVAMESTSVYWIPIWRVLVDSFELKLVNPYFIRQLPGRKSDVKDAQWIAECVMKELIRGSFIPSPLVQRLRLYDRRIFEINAELVRKYSKIDAILQRCNIRLSNYVSNTDCKSYKAVVKQISEGVTSPQELLRHVHKRIINKHGEDTILAALTGVVSDSEIDMLAQYVAESAILEDNKNKCIEKMREICNSEFKEQMKNLQEIPGVSERSALTVLAEIGPDVNAFPSAKHLVSWCGFNPRNDESNKKIKSNKITHGNRFIRIASVQCAWAASRTKDCYFSKFYAFHTQVRKKFKLKVVVAVARKVLVCIWHILKFNVPYKDFEPQKSVTKDCIQFA

SEQ ID NO: 77250 - protein, 355 aa, unidentified
MESVKYLGFDVHQSTISVAVVNADGKLVMQSVIATHAATILDFIHGLRGTLHLTFEEGTHSAWLYDLLARRVARVVVCNPRQNALLKAGNKSDTSDARKLAELLRAGLLAPVYHGEGSTRTLQELVRSYAALTEDTTRVMGRVKALYRSQAIACAGKKPYGRRHRREWLSKLSEAGLHRRAERLYEELDALQGLRRAAKRELVLESRKHAAAKLLRTVPLLGAIRAALLIGRVQTPHRFRSKRQFWAYCGLALETRSSADYRFEDGQLVRAKKPVFIRGLNRNHNHDLKNLFKSAATTASVIHGPFREFYEGLLAKGLQPAMARLTLARKIAAITLSVWKKGESFDAEQLKPQAA

SEQ ID NO: 77251 - protein, 354 aa, unidentified
MEKAEAVVAFVGIDAHSEHCSLKAVGRQGESLLAVEVATQERRLRAAVKGLPRPVWAMVESSSLAPLLKEWLESVVDRLIVCETRENRWIARSEDKSDPADADRLARLLRMGEFRPVHVPGRAGLERRELVRLYQKSVRDVTRLKNRLKAKYREHGVAVKGDKVYTVRHRASYLRQVKQPAVRAMLAVIYEQLDGAQAAHLKIWGQLFARLRTLPAYRLLKTIPGVGSRLGAMLAAGIDDPERFAGPNRKRKLWKYSGLGVRSQWSSHPEQARVSGSPSGNRLMKYAALSAAHNALRGKNRFSRHYAEMVEQGKDPAMAERTVGRQILATALSMLTSGTVYREPEPGRSPVEEV

SEQ ID NO: 77252 - protein, 398 aa, unidentified
MTKIYVLGLDIAKAGSMAQLDGPDGARCWRRSLSTDQTGWKELTEALRAQGVRFSQLRVLVEATGIYHFAWVERLHAEGAEVYVVNPLLASRLESTANALRSHKTDRVDVDRLCEIGRLYLDALDRFRYRPDPVRQGLKQLSSARATLRAQLTNLKKALGSQLELVFPALLAAAIDPCSERGAAILQRAATAGTWRAVPVKRRRELAGDAADALDRACKQTLADERLALACVPALRVLLAAALALAEQLEHCDRQIAPQLPAHRMQLLTSIPGIGERTAAVLAVYLPEDCTGWGAAKAVTARLQALFGCDPRLRQSGKWNGNVKISKRGIGAARTALFQCAFCSIVHDPENAAYYDQLRQRGKPHKQAIVDLMRKQLRRIVAVLRSNRPFVVQYHAAA

SEQ ID NO: 77253 - protein, 355 aa, unidentified
MQWKDTTKCFEKQNIYVGIDAHLKNWKVTILLERTSFKTFAQDANAAILGDYLRRNFPNANYFSAYEAGFCGFSVHRELEKQGINNIVVNPADIPTTDKERKQKEDKRDSRKIANSLRNGELQGIYIPSIVGMEFRTLVRCRKTLVKEINRNKTRIKSLLYFNGIQVPRELDSASRHWSSSFTHWLNEVKFHSTFGNKSLDVLIDTTLYFRQKLLEITRELRSISKSGPYSTQIQLLCSILGIGLITALTLLSEIENILRFKNLDTLCSFIGIVPSTNSSSDKEIIRGITPRANKPLRSVIIEAAWMAVRNDPSLAIRFNDLCKRMKANKAIVRIAKNLLSRIRYVLKNEIEYAC

SEQ ID NO: 77254 - protein, 396 aa, unidentified
MDAAVYLGVDIGKSGHYAVAVDDTGKTIYQTGVSNDEPALRKLVDWAKQRGAVVVVDQSTGAAALLLKLCWAGDVRIGYVHGLAMARARDFYAGASKTDPKDAFVLADVARAHPQRVVWLEPNREALAQLELLCGYDVDLRADANRITNRLRALLVTHWPALERALGDRLDSRGVLAVVEQYPSGPAIKEASVEQLTAAFKAQRVRRAQAFAEQLHQAALTQTVTISGSATATRLIRELAVQLGAVLQRRDELDQEIAVSFFDLPEAAILSSLPGIGPRLGARIAVEIGSISRFRTPGHLAAFAGLGPTVWKSGTSINASRPSRFGNHRLKNALFLVAFASLRHPPSRTYYDRKRAEGKRHNQALLCLARRRVDVLHAMLTQHALYRTPAPLPTAA

SEQ ID NO: 77255 - protein, 391 aa, unidentified
MDNAWVGIDAGKEFHWARVVGIEGETLLSRKVENDEADLRKLIGEVLPLAEEITWATDQPGGTAALLLALLWERNQKVIYIPGLTVDRARDTYRGESKTDAQDAYVIADQAPMRGDLSELQANEGELAELQLLISRRRDLVTDRSRTITRLREALLALFPALERTLDLNNSSALTLVAHYQTPTALRRAGYKRVATYLKNRGIKGADTLAKKALAAAESQSAVLPAQDVASAIVAELAREALVLKQRIERVDEELKHRFFIRPEASILTSLPGMGPVLGAEFLVAAGDLSAFSSADQLAAYAGLVPAAHDSGKRAGNDHRMRGGNKVLKRAFYQSAFASLRTSPVSRAYYDRKRREGKRHTQAVIALARRRVNVLWAMLRDGTTYKAPSAA

SEQ ID NO: 77256 - protein, 346 aa, unidentified
MNETTTIGLDIAKQVFQVHGVAIDGTVTVKRQLRRSEVIRFFDRLPRCRVGLEACGGAHFWARELTVLGHDVRLIPASYVKPYVKRGKTDAIDAEAICEAVSRPTMRFVPIKTVDCQAGVMLLKTRHLLVKQRTQSINSLRGHLSELGIIAARGTGKVETLIAIIRDKTDERIPAVARRALEMLAEQVEALVRRIATLENEIVSEVRRDDTMRRLATIPGVGPITAATIVALVPDPGAFNSGRHFAAWIGLTPKMHSTGGKERLGRISKMGNPVLRSLLVVGATAVSRHARRGATVSPWLTSLLARRPAKVAAIALANKMARVIWALLTKGGVFTRRPATAAQHAA

SEQ ID NO: 77257 - protein, 413 aa, unidentified
MHSGYRRLAAIDVHKRVLMVVVIGFDAPEVVVAQERFLTGRSELRRLAEWLGEHRVEEVVMESTAQYWWPVWVELEPHYRLHLAQARSNRAPRGRKTDFGDACRLARRFASGDLSLSFVPGQAQRSWRRLARTWKSLGEQTVEIRNEIEALLEEGQIKLSTVLSDLLGASGRRVLALLAEGETDPDQLVRAFDHRVRASEAQRRDAVDGRLPAAHRLVLRQHLERIQLLERQQQELEQELTAQLEAYAEPVRRLTEVPGINVVAAQQLIAELGPHVEAFATAGQCASWAGLCPGRTESAERSSSSRSAKGNRFVRALICQIAHAAVRTKGSYWESLYERWVRRMQPTKALWAVAHRLLRLIWKLLAHGVRYRERGPRQLDGARLAARMKRLRAEFRRYGYQVTFTPAPAPSTI

SEQ ID NO: 77258 - protein, 346 aa, unidentified
MQHYVGLDVSLKQTAVCVVDQAGKIRREGMVASEPKAIADFIATNAPQVIRIGFESGATSTWLWTELTKFGLPAICIDARHAKAALKMQINKSDRNDAVGIARIMQCGWYKEVRVKDLDSHAIRALLGSRALLVELKRDLENQIRGLLKNLGLVIGRCKLNTFTARATELIDGKPALAAAVEPLLKAREAIGQQIADLDRKVLRLARSTPQVRRFMTVPGVGPITALCYLATIDDPTRFKKSRSVGAYVGLTTRRYASGETDRTGRISKCGDGMLRSYLYEAANVLLTRVAKWSALKAWGMRIARRRSLSKARVAVARKLAVILHRMWIDGTEFSWSSEETAMQPA

SEQ ID NO: 77259 - protein, 378 aa, unidentified
MGQVNATEPKVVWAGLDVHKETVAVAVADSAEGPRIVATVANDGRQLPRLLRRLGEQGELRCAYEAGPCGYEIYRVCERMGISCIVVAPSLVPRKPGDRVKTDRRDALKLCRCLRSGDLTPIWVPDPEHEGLRDLVRGREDAIVDRMRIRHRIKKMLLRQGIRHPDGMRTWSKRWRVWLGSMEFAYSSQQVVWREYLGTLDEVDARVGRYNEALHEQAQTSSKAYLIAALQILKGIAEVNAVTLVAELGDLMRFARPAQLFSYSGMVPAEYSSGGERHQGGITKTGNRHVRRALTEAAWAYRYPPSFKGRLALQRQGTPQWLVDLSWRAQERLHRRYRAMIKAHKPTPVGLTAVARELLSFVWELAHELEQRDLKVAS

SEQ ID NO: 77260 - protein, 370 aa, unidentified
MNSITYIGLDVHKTTIAVAVAEGGRLGEVRQLGTFANRADVLRKMVERLARPGGQLSFCYEAGPCGYGLHRFLRGLGHACAVVAPSLIPIKAGDRIKTNRRDAVTLARLHRAGELTEVWVPDAAHEAMRDLVRARATAAKVLSKARQHLSGFLLRHGKIYSGVRTWTQAYRRWLTTVRFDHPAQQIVLQDYIDAVTDAEQRVGRLTRQITELIPDWSMAPVASAIQAMRGVALINAVTVVAEVGDFARFGNPRQLMAYLGLVPSEHSSGSRVRRGGITKAGNVQARRALIEGAWTYRMQARVSRKLHDRLEPLPQNIRDIAWKAQVRLCSRWRRLAAAGKPKVVVTTAIAREMAGFIWAIARQVQPQTIG

SEQ ID NO: 77261 - protein, 341 aa, unidentified
MDQFIGLDVSLKDTFISVREGGNRIWRGKCPSDPALIGETIRKRAPNVKRVVFETGPLSIWFYHAMKQDGLPAICIDARHAKAALDMAPNKTDANDADGLARLAEVGFYREVRVKTFDSMLIRTLVAARTQMLRTTTQMSNQIRGLMKTFGLVVPAGAGRVFEGHVRRLLASNAGLEKIILPVLEAWRGMRARAAELSRQLIASARASTQCQLLSSIPGVGAVTASSFVAAIEDPKNFPKSRAVGAWIGLTTRRYQSGEVDYDGHISRRGDNHLRGLLYEAAVVILTRATADSALRTWGLKLREKIGFKRAAVAVARKLAVIMHAMLKTGELFDQSIAAKA

SEQ ID NO: 77262 - protein, 347 aa, unidentified
MRFYTTQHKFYCGIDLHARTMYLCILNQEGRIVLHRDIKTNPEVFLKTIAPYREDIVVAVECIFTWYWIVDLCSQEHIPFVLGHALYMKAIHGGKAKNDKVDAYKIATLLRGGMMPMAYVYPADMRATRDLLRRRNHLAHKRAELIAHVQNTLHQYNLPEIGKNLGKKGNREGVAKRFPDMIVQKSIELDLGIIDHYDQLLHRIEHEISLIAKKCDADSYFRLRSIPGIGRILGLTILYEIHDINRFPRVQDFVSYCRLVKCTKESAGKITGTSGKKIGNVHLKWAFSEAAVLFLRRNPEAQKYRAKLERKHGKAKSLTILAHKLARAVYKILRQKEVFQPQTFFAK

SEQ ID NO: 77263 - protein, 356 aa, unidentified
MESIFVGVDLHKTQFTICILINEEVIDQGQKYPMNDKGYHEFASYMKDLSEIRGLPVSIAIESTANARFFRDLMVKQGFRVTVVNTLRFKVVNLSTKKTDKNDARTLAEFLSKGMLPESYLCSAKSEGLRRVLKSRALMVQNSVALKNQVHAVLLAYGKITKTAQFQSKASRKRLLDSLPPEIKDVVGVIFGTLDTVEQQKKDLERRLKEITSDDENVRLLMTIPGIGVVNACTICAYIDDIGRFQSFKQFSAYCGLVPWVQASNETYKIGRITKHGPPELRTAIIESVIAMVRMEEKTGKYVLMEQYKQMKAEKSSGKAIVATARKLSRIIYVMLTTKTPFNPKMLINRLEKSAG

SEQ ID NO: 77264 - protein, 391 aa, unidentified
MSMYFVGIDISKYKHDCCILSAADQNVVSKFTIKNDMSGFEQLITTLHSLSNPEDIKIGFESTAHYALNLELFLENAHHSFMEINPVLIKEYKKSTSLRRTKTDSVDCESIARWLMTVEYKPHPKGFYHAYSLKSLTRLRDKLVRQRSFYLVKITNVLDHTFPEFKPFFHERLSKTALYLLENYGSAEKMARMNSASYEKLRSLSRGKFSPQQFLRLKELASNTVGINNSIFDVELNCLLTLYKSLVKEIGALEAEIKKLIEEVHPHYMSVPGIGPISAAVIYSEYGDLSNFSTPAQMLAFAGIEPGINQSGTGSHGGKMVKHGSSQLRYTLINCCLPLIRFDMTFAAYYAKKRAEGKPHRVAITHVAKKLVRVIYALERQGTDFNAQKLR

SEQ ID NO: 77265 - protein, 304 aa, unidentified
MATAQLDMALRPSGERRAVANDASGVETLVDWVQTLHPTLIVLEATGGLERAVTSALAAAGLPVVVVNPRQARDFARATGQLAKTDALDARALAHFADVIRPTPRPLPDAQTQELRALLGRRQQLIVMRTAEQNRLAGTSERLTQDIVAHITWLNADIATLDNDLETTLRASPLWRENDDLLQSAKGIGPVCARTLLLELPELGTLTRQQIAALVGVAPLNCDSGILRGRRTIWGGRAHVRTVLYMGTLVATRYNPQIKAFYERLLAAGKVKKVALTACMHKFLTILNAMLKHRTPWQPQEVQS

SEQ ID NO: 77266 - protein, 422 aa, unidentified
MVMEEITEEPGALTERVAALDIGKASLTACIRVPHEDKPGARRQEVRTYATVTRALLELRDWLVCQGVTLVVMEATSAYWKPPFYLLEDDITCQVVNARDVKNVPGRPKTDKLDAVWLCKLAERGMLRASFIPSRPQRQLRDLTRYRRTLTQERTREKQRAEKLLEDAQIKLSVVISDIFGASGRAMLDALIAGHASPHELAALARGKMRAKTSALQEALTGHFTEHHAFMLGMMLDRIDALTTQIATLTARIEQAIAPLAAQVAQLDEIPGIGTTAAQDLIAEFGADMSRFPTPGHLVSWAKFAPRARQSAGRAKAATTGKGNPWLGGTLGEAAAGAARTKTFLASRYKRIVKRRGKKRALVAVGNSILTIAWHLLSDPAAHFTDLGPDWHDRLAPLRRKRQLIAELERLSGKKVTLHDAA

SEQ ID NO: 77267 - protein, 324 aa, unidentified
MINGILGIDVSKNTLDVSISSCTKVRTKSFANTSDGWHHLLDWLIAHKIRRVHACLESTGRYSLGIACALHEAGHVVSIINPAQIRDFVRTKLGRNKTDGVDASHIREYCELFKPQPWVPPSEAHRRLGELQTIRAGIIASLTAWKNRKNSGIVDAEAQALADATISHFTSQLGTVDQAIALTIENDSHLRSKRDLLLSINGVGETLAGVVLAELPGPDVLHSSAEVVAYAGLNPRQHQSGTSVDRATRISKIGNAVLRAALYMPALSAMRYNPAIVALVTRLKSRGRLKPKQIVVAAMRKLLVLCFGVLKTGKPFDPTIAMGC

SEQ ID NO: 77268 - protein, 348 aa, unidentified
MKSCFENKDIYVGIDVHKKRWVVTVRTYDLELKTFSMQPVAEELEKFLVANYKEALLHIVYECCFSGFWIYDYFHQKSYDIIVTPTNRIYRDGSVVKTDKIDSRKLAFQHSRGLLREVKVPEIKIREYRSLFRIYDKEKMRQGQILRQVRSILEAKNHPLKWDKWNKEMLEKLRAVKFQEEIFNKKFRSLLSEYDYVKEQIRDTEKRIEEISEEEELGKRIKRIEKINGIGTVSAVRLVVYLFDKKGRFESGEKLVHYVGLTPGEHSSGEEIIRQRTGLVGNKQLRSIIIQLAWVAVRKDGSLLDKFERVYKKSGSKQKAIVAVARKLMMKVYAITEKEEEYEINRAA

SEQ ID NO: 77269 - protein, 365 aa, unidentified
MKKIAYVGVDYHVKTITCAVIIEGEKDFLNTIRFKNNHKNIKKYMKKLSETYDIRTCYEASCNGYSFQRKMRSWGYHCDVIAPSLVPKKPGDRRKNDFRDARTLAQHYAQGMLAVVHPPTEQEESVRGVIRCRLAMKKNGKSVKQQINSLLLTQDLHWSKTKWTDQHRAWLSKLKLRDKYSQQVLDELLGLLGYLDSRIQYLDKQIEEIASSEVYAPSVKKLKAFKGIRTLTAMLLIAEITDFRRFPNPKALMAFLGLIPSEDTSDDNQKGGSITKAGNSRCRLQLIESVIHYIKKPVISTQMQKDLKEVDSHSANIAIKCMKRLHKRYWSLVLKGKNSNKAKTAIAREFVGFIWAMMQPEPATI

SEQ ID NO: 77270 - protein, 367 aa, unidentified
MKKVSTIAARASRNNSQPTLIIGFDLGDRNSWYCVLDESGQIQREQRVRTNAKALREVFGEMPRSRIALETGTHSPWISRLLSELGHQVIVANARKVRLIGESRKKDDRLDAQTLARLARIDPGLLCPVKHRSAPAQADLTVIRARAGLVRSRTALVNTARSLAKSYGQRLHGCNVRNMNPEKAESLSPELQAALEPLLNAIESLSERIVEYDDRIENLAQQNYPQVALLKQIKGVGTLIALTFLLTLEDPHRFRKSRDVGCYLGLQPGRRNSGQSEPQMHISKEGDPYLRTLLVQGAQHILGPFGVDCDLRRWGLKLAERGGRNAKKRAIVATARKLAVLLHHLWVSGEVYEPLHNSRRVIVAAAA

SEQ ID NO: 77271 - protein, 460 aa, unidentified
MKDRGRAQAWKAKNCRSSEPLGIVHPDAAGVDIGSRKHYVAVPADRDPEPVRCFGCLTPDLQAMAQWLKACGIKTVAMESTGVYWIPVMQVLEEYGMEVYLVDARQAKNMPGRKTDVKDCQWLQQLHVHGMLTRAFRPADAICVLRSYWRHRKDLVEMASMQIQLMQKSLEQMNLQLHKVLSDITGVTGMRIVRSILAGERNPVVLAQMRHPLVKSSEDTIAKALTGDWRPEHVFTLRQAVELYDVYQQKIQACDREIDKYMQSLDARGDPKDLQPRRRGTRRKNQAHFDLRSQLQRLTGVDLTSVDAIDAMTAQTVVSECGIDMSRFATEKHYSSWLGLCPNHQITGGKVRKRRTRKVRNRAAQALRVAAQSLHKSKTALGAYYRRMRGRLGPAKAITATAHKLAILIYRMLKYGMKYVDQGQQAYEKQYQQRTLQMLIKRAKHMGYAMVDLRSGEVVS

SEQ ID NO: 77272 - protein, 322 aa, unidentified
MDEAGNIVKEQQFKSDAKEIKRFVKSLKTQKIHAAIEATCTWYHVYETLDALGVETTLVNMRRTKTIAESKIKTDKLDAKTIAQCLRTGFIATAYIPPKTIMEQRNILRHRMSLRKEIARYKNKIHAILLRNGIQHSDYSDLFGVGGMKFLRSLTLSDSEQYSLTSYLNIIETLIHEKTQTAEKIETLCKNNQQAMLLTSIPGISYYSAMIILTEIGEIHRFPHPKKLCSYAGLVPRTIQSGNHVCHGRILKECNQNLKWILGQCTHIHIRHCPNSSITKLYYRVENKKGRNKAIVAASRKLLTCIWYMLMKSETFKYSNDD

SEQ ID NO: 77273 - protein, 316 aa, unidentified
MTFLHHPPCRCLGVDVAKDTIAIFDGRIATVIPNQRKQIRHFLRKCDVDLVICEPTGGYEIILMEECRGLKLPLHRADTRKLKAFIRSRGRLGKSDAIDAREMVAYGLERWATLPLWHAEDPCEARLKALVRRRADLVAMRVAEQNRAKAPSARELGGRDLAATFKALLTVLNRQIVLVDKAISALMRSASLVQRARTATAMKGIGETTAAALIAAIPELGKMDRKQAAALAGLAPHPNESGNKIGYRRMRGGRPAVRTILFMPAMQAAQGRGEFVEFYKRLIHNGKKPIVALAAVMRKIVITLNARFRDQLSQQS

SEQ ID NO: 77274 - protein, 364 aa, unidentified
MEDRITYVGLDVHKSTIMVAALYPGRREPEVWQIPHERAALARLGRQLQRKSESPVVCCYEAGQCGFTVQRQLQAVGLTCQVIAPSLIPVRPGDRIKTDRRDARQLAELLRAGLLREVIPPQPQDEAARDLTRAREAAQQDVLRCRHRLDKMLVRKGLIYSGGRWKTRHRSWLRSLRFEHAIERLVFEDAVVALELAEERVKRLTAAVEELSQQEPYRVPVGRLRCFRGIDTVTAMTLLTELHGFGRFRSARQLMGYVGLVQSEDSSGDKRRRGRITRTGNGHVRRLLVESAWNCRVPWQSPTVLRRRQGQPRDAIRIAERAQRRLAARYHHLVRCGKPKGKAVVAIARELTGFIWATLQQPSA

SEQ ID NO: 77275 - protein, 338 aa, unidentified
MTPFKYFVGIDIASATFTICAGTAPWELMAKPVTFDNHEDGFTSFLGWLQEHSLSPDQTVVCMEATGVYGEGLAYFLYASGYTVAVEPPLNIQRKFPVNTSKNDWQDSQNIAEYACRYTDKLSVWKPNDEILEQVKVLLTTRQQLSSQLTAQKNALHAVNRKKAPPELAKKVHADMIQQITKYIKSIDIEIRRLIDSNPTFKNALLLLLSIPGIGLQLAAHLIIIMQYSLDPRVLSAFVGICPYEHESGSSVYRTPTSRHYGPPAIRKLLYLAACSVSTHRKEFKQYFARKKAEGKPGKLVLNNIQNKLLKIACAVIRTQKPFIPNYVSVNPLVLINA

SEQ ID NO: 77276 - protein, 347 aa, unidentified
MRYFAGLDVSLEETTVCVVDDGGLIVREARAASEPEALVAFFRGCGLVMERVGLEACSLTAWLHQGLTEAGIVAICIEARQAKAAMGAMPNKTDRNDARGIAQIVRTGWYRAVHVKNPSCRSWRALLTARRMVLNKRRDVENGVRALLREAGLKVGTPSRKNFAARVGELVADDPVLAGLARSLLSVIEVMTQEVDRLTKRVLDEVRVEPTCRRLMTVQGVGPLTARAFRATIDRPDRFRRSRDVGAHLGLTPRRYQSGETDVQGRISRCGDELARTALYEAAHSLLIRSTKWSVLRAWGMNVAKRRGMARARVAVARKLAVILHRVWSDGSEFRWGKQVVTTTAAA

SEQ ID NO: 77277 - protein, 344 aa, unidentified
MMVVGVDSHKDTLVCAVVDEAGRAVGSESFQNTEAGHEAMLSWTRELGSGVRVGIEGSGSYGRGLAQLLVSHGASVVDVPPQMTARARRQQRTRTKTDHTDALGIARVAAREDGLPLVQPAGLFDDLRALTTYRSEQSDLLVQHAGRLHAELTKIRSGYQHNLRTRLTLKSSLDKAETLLNTDPSVRAELARQRITAMRLLINEIRDLDTRIRQTLKQTRTTLTQIRGIAHLGAADILAQVQHPHKYPTKAKFAMANGTAPIQASSGRTIRHRLNRGGNRRLNRIIHTAAITQIRQPGTEGHNYYQRLQDRGKTKKEAIRCLKRRISDRIWTHLQQTPTTNNLT

SEQ ID NO: 77278 - protein, 414 aa, unidentified
MLELSECTRFVGTDLHKHFAVVAAVDAHQQVLLRPSRQIRLDDWATWVEGHLTRQDAVVLEATGNAWWCYDIVAPLVGRCVVANALQIRWIASAAVKTDKHDALKLARLLAANLIPEVWVPPVAVRELRGLLAHRHALVKQRTAVKNRLHSILHRHHLKPPPGNLFTERNRTWWDEVSVSATERLRASHDLATLEHVQEQLDGVLRELGRLSMTSPWREQMPYLIQLPGFALLSAMTVLAAIGDVTRFAHARQLVGYAGLGAGVHDSGQSHRDGHITKAGRRGLRRVLIEAAWSAVNTHPYWRLTFEKLTRRKPQGVAIVAIARKLLVAVWHVLSRQEADLHAETLKVVRKFRSWYTQLDAEHRAGLSSPQFIRFGLLHLGLAEDVRRFTYGSQTFTVAAPEELVAQFPELCPA

SEQ ID NO: 77279 - protein, 382 aa, unidentified
MRPFGEIAAGPMEISHVESELKMLVKLMKSMNDEVKVVMEATGVYHLPVLTYLKDHGVFVAVINPYQMKQYRVQGLRRVKTDKSDSMTIAKYGLDNWDELNDFVGSEDKYRELTLLSRQYRHYMRIHVASLQELIHILDYTMPGVKKEFNSWDPENGKDKLSDFVEKYWHYDNIRRKSERQFVESYLAWAKKKGYHRNQNKAAKIYSMAKEGIPTLPADQTTKMLVIQAIEVLRRVDETLNTILARMQEIAKTLPEYPVVRSMGGVGDVLAPKLIADIGDVRRFHNSKALIAYAGIDAPPYQSGQFISTNRNISKRGSSAIRKTGYEVMRSLKSHPMPEDGAVYQFILKKEAEGKPKKVAKMAGLNKFLRIYYARVMEVYSC

SEQ ID NO: 77280 - protein, 442 aa, unidentified
MNPIPNDPNPASTLVAAPALPRPEPAFAAFIAIDWADEKHAVALQAAGHTQIERTTLEQKPEALTQWIAGLRQRFAGAKIALILEQKRGALLWALQPHEHLVLYPINPQMSAKFRQAFHPSGAKDDPLDADLQLDILLHHRARLTAWQPDEATTRQLSLLVEGRRRFVADQVRATNRLRDALKSYFPQALALVGEDLSSRMACAFLKKWPRLASVQAVKPAVLRQFYYAHHSRSAELLAERLQIQAQAQPLTTDEAILAAQSLLVQSLAQELATLHPVLARYDQQIAQLFATQADFAIWESFPGAGPALGPRLAVAWGTQRDRFADRQAMSAYSGIAPVKEASGKALWIHMRWACPKFLRQTFHEMAKCSLQRCAWALCYYRMQIERGKGHHAAIRALAFKWQRIMWRCWQDRTRYDDAKYVASLKRSASDLYARLSAAPAK

SEQ ID NO: 77281 - protein, 351 aa, unidentified
MLYTGLDLHKSFSYITTMNDRGEVIGQKKLPSNGEIVDFLKEFNDCMEVAIEATPSWYWLYDSLEGEGFDVKLSHPLKTKAIAYARVKTDKVDSATLAHLLRSDMLPLSYVPEKPVRLNRELLRYRASLVKVQTGIKNKIHTILAKNNISHGYSDLFGKEGMALLHSLSLPENYKIAIEGYLSVLDNVRREIRIASKRVQQLAEEDQDAVLLMTIPGVGYYSALMIESEIGDVKRFPSAKQLCSYAGLVPSTYASGNTCYHGHITKQGSRWLRWILIEAAIHAVKRPGPLRRFYFKVERKKGGKVAKVATARKLLEWIHHMMRDNKPFKEVERLAELQGKGEPVKKPGLVL

SEQ ID NO: 77282 - protein, 378 aa, unidentified
MRFYNRVHRFYCGVDLHARTMYLCILDHGGAVVLHREVPAEPGAFLEAIAPFREGLVVACECLFRWYWLADLCQAENIAFVLGHALYMKAIHGGKAADDKIDSSKIAHLLRGGNLPFAYAYPKGLRETRDLLRRRMYLVHKRAEVVAHVVNTNSQYNLPPFGKKLIYARNRQVLKIAQRFGDASVRKNIELDLALLDSLDELIGDVELYLDRTVKVDDADSFYRLRSIPGVGKILALVLFYEIHDIGRFASEGEFLSYARLVRPLKTSAGKVKGGGGAKIGNAHLKWAFSEAACLLARESGQAKRFLARKEKQHGKPKALGILAARLGRAVYHMLRQKRAFDAKRFWNGEPKVPPTPKGKSVMTPGRRRKGARCVLEA

SEQ ID NO: 77283 - protein, 310 aa, unidentified
MQELTRVAVDTSKSVFTLHGVDREGKVVIQRDLRRHQFEAFFAKLPPLEVAMEACGGAHHWARQLAAHGHQVRLIPPQYVKPFVKRGKTDRADAEAISEAAARPGMRFVPVKSAEQQASAVILSVRDLLVRQRTQLINALRGHAQEFGLVAAKKASGVAALLAAVRDDEALPAAARTMLDCRLLAEIPGIGPITALSLALRTDPTQFRSGRHFAAWIGLTPREHSSGGKQRLGGISRAGNETLRHLLVVGATAVIRVAKPGSRSASAWLLELLKRRPRKLAAVALANKMARIAWAMMTTGEAYRRTPATA

SEQ ID NO: 77284 - protein, 407 aa, unidentified
MRNYIGVDWADEEDAVWVVNDAGDKVLSRRVAHTVAARSEWARWLRERQAEGVELWAAIERPHGRIVDFLLDHGVVVYPINPKSLDRARDRFRVSGAKSDPFDAQVLALFLRSDHLQLRPLRPNSEAAQELKGLTRDYRRQVHLQTRLLNQLTATLKEYYPRALELCENLTAGWAQAFLARYPTPAAAATLTEADWGAFARAHRLGPTRTAALWETLQQPQLPLPAHVVRINARLLQALLRELAPTLSGVAEYRQAIDDFFSAMPMAEIARSLPVGKSGTTIPAVWAELGDNLDRWDSFRHVQGYAGSVPETERSGKHLVVKFRFACNTPLRDALHQLAFLSLSHSVWARAYYDGYRARNHTHHEALRALGAKWLKIIFVMWKRHVSYSETHHLATMARQHLRQMAA

SEQ ID NO: 77285 - protein, 335 aa, unidentified
MQYTYFIGVDVSKRQLDIACLLEDGSVNFYSCKNEEAFIATTFKKVVKELHLQMHHVLICAEHTGHYSNILTRCMVKQGYQFWLESPYQISRSQGIQRGKNDKMDAQRIALYAKRFSDRASLVKPGNNCIESLSYLASERDLLMTDLAKYKSQITDHKMFIDKPLFKAREKRLKKLIGLLHKQIKEIEQEMDRLVLEDETLKKQLTLLLSVDGVGKQVAFNMLIATKAFTKFSTARKFACHVGVAPFQYTSGTSIRSARRVSRQANKKLKSLIHMAALSIIQRKGELQDYYKRKVAEGKNKMSVINAIRAKLISRMFAVISSDREYEKNYAIMLV

SEQ ID NO: 77286 - protein, 421 aa, unidentified
MSDDRCRLGSDDVVIGLDLASAEHQAVVLTAAGQRLTRFRMPHTRAGLEELLRRTTPAALGRPGGARVFAFEATGHLWEAVAYVLRARGEPYVVVNPLATFRVREARQLSREKTDLTDAEQIAELCRTGLVTRTQLEARPYLALRRAWGEYARLREERARLKVLVAHQLYGLFPEFLRVWADLLQPGALAVLRTGLTHAAMAALPLTEFVAQARAHGAGHRLWRDTLAQVHRAAAQTMACPDGLDVLAREVQRAVARIDMLTAHMTAVAAEIDSMLAELEEVPSLRPIPGLGWTSVAGLLAPVGAITKYHHGRQLIKLAGTNPSRRDSGQTVGHGQRMSHRGRAGLREVLYLATISCLQHNPRIRAHDDRLIQRPDRPLPKMQALGACMNKLLLYAFAVMHRREAFQLDHDWPRTTMARVA

SEQ ID NO: 77287 - protein, 381 aa, unidentified
MLRAPCISDSCQESVGPARLTRAGPGAESPSDTLVRNRGEARRLRFIFTNPNGCKVTQTGLQGRDRKMAQMVIYAGVDVSKDWLDIALWPKRLTLQVSYDAMGLRELLAWLRHHNVVRVGLESSGNYERELMDALGEQSIEVIRFNAQRVRMFAKAMGRLAKNDQVDAHVIARLTAIGADEPATERRRDLEPLIEHLHMRSQYKEWITACDSRLEHTHDKALRRNIERQRAAFAEKIAVLDRKLASLIAEHEDWRRLEQRLRGVPGVGPVLAQTLIALLPELGSLSRRAIAALVGVAPFDDDSGNRRGERHIKGGRFDVRSVLYMAALVAIRRNPKIAAFAARLSGKKPKVIITACMRKLLVMLNAMVRDATDWQAKPAMA

SEQ ID NO: 77288 - protein, 299 aa, unidentified
MSEIITVGLDLAKNMFQAHGADVSGRAVLRKKLRRDQVLEFFGQLPACVVAMEASGGAHFWGREIGKLGHDVRLIPPAYVKPFVKRQKNDAADAEAICEAALRPTMRFVPVKSEQTQGAAMVFRVRELLIRQRTQAINSLRGHLAEFGEIVPQGAANASKLIALVKDPECTLPADALPTLKVLASTLTQLEEEITKLDAEIARRAKENDVARRLMTVPGIGPLIATAIATLAPPPETFRKARDFAAWLGLTPRQHSTGGKQRLGATTKMGERSLRRLLIIGANSVIIKRWTCRGLVPLL

SEQ ID NO: 77289 - protein, 337 aa, unidentified
MKLYCGIDLHSSNNVVAVSDEQDRPLYEKRLSNDLDTILDVLKPFKGELVGCVVESTYNWYWLVDGLMEAGFPVRLAHTGAMPQYTGLKYTNDFSDARYLAHLLRLGILPTGYIYPKQERALRDLLRRRLLLVRQKTLHHLSLQSLIARHSGQRLTANAIKALTNEQLATYLDAPILLGGQITHQARCWLDEAISRIERELQQRIQPRKDYQLLQSIPGVGPVLGTTIALETGTIQRFPGPGNYASYARCVKSEKISNGKRKGQGNKKNGNKYLAWAFMEAAHYSAIWNPRIKQYYQRKKAKVHVLVAKKAVANKLARACYHMLKRGEVFDVTRAFG

SEQ ID NO: 77290 - protein, 380 aa, unidentified
MKKDTRFVGLDVHAESIAVAVAEGGGEVRSLGGIPNKPESVRKLIKRLGPAGSLRVCYEAGPTGYVLYWQLTGLGVHCDVVAPTLVPVKAGDRVKTDRRDAEKLARSYRSGDLTPVWVPDAAHEALRDLVRAREAAKKDQLRARHRLQKFLLRHGRRAPDGVKPWTETQMAWVKREVRFEASAHQAVLLDYLTEVDHARDRIQRLERSIDEAVEVAPERMRAVVHALQALRGIAKVSAVTIVAEVGELSRFARPRQLMGYSGAVSSEDSSGGRTRRGAITKTGNAHLRRIIVEAAWAYRHRPAVGRALRIRQEGLSEEVKAIAWKAQHRLHHRYRRLVAKGKAKQQVVTAVAREMLGFIWAIGVDVERQLPTLGRKRRAA

SEQ ID NO: 77291 - protein, 406 aa, unidentified
MTLDQEPGQVCERVYGGVDTHEDTVHVAVISGDGRDLADREFPTSPAGYRRALAFIASYGEPIAVGIEGTSSYGAGITRAAIQDGIAVCEVVRPERAERRRLGKSDPIDAYQAARAAISNHRIAPAKDASIDGIRALHNARRSAMKARTAAMRQIHQQLVTAPAPIREKYRQLGGDKRVQVLAGLQVRSAPAPLQRAVLLALKSLARRCVDLQREHHRLGIELDQLVTAANPGLRAVYGVGPDTAAQLLLTAGGNPARLRTDAAFAALCGASPIQASSGKVTRHRLSRGGDRAANNALYRIAVVRMAGNQRTKDYVARQRQTGFSSKEIQRKLKRAIAREIFRNLTTPVTVPAIDDLRPLRQHKNITLTTAAHHLDVWPTTISELERGTRRNDQLATTYRQWLKTA

SEQ ID NO: 77292 - protein, 334 aa, unidentified
MNNVSLIGIDLGKNSFHVHCQDAAGKALSRKKFTRAKLFEFLANCPSATVVMEACAGAHYIARKVSDMGHKPKLISPQFVRPFVKSNKNDFVDAEAICEAASRPSMRFVAPRTESQQEILALHRVRESLVRDKVKTTNQMHAFLLEFGISMPKGLAVIRRLSVVLEENELPPYLAKLLVKLQSHYLYLVEQIRDIEHELELAAKQDDTTQRLMSIPSVGPITASVLMANLGNGQQYKQSRDFAAATGLVPRQYSTGGRPTLLGISKRGNKNLRRLLVQCARVYILHLEHQSGYLAEWVRNQLSKKNSCVVACALANKLARIAWAITTKQSIYMA

SEQ ID NO: 77293 - protein, 357 aa, unidentified
MNKYIGFDMDSNKTVACVIEAGKRDRYQTIGSDIVSMRKFLKSEKQGGCRVELVFEISGRAGFIYDSLIDCVDNIKVANPSKMTWIYRTAKKNDRIDARKMAVLLSIGEIPEVYMPSREVRQWRETILHRKKIIDRFVQVKNRIRATFKGHGFSKPANRGGWWNKLNRIWMQSICQQQAGRIFSLWSIQTGSLFDELELLEKQLKDITEYLDKYLSSKAGGTLLMSIPGVGRRTAEAILAYTDDVRRFGNYKQYCSYFGVTPKLDESGSTRRMGHISRRGPSVVRWVLCESSWKVIRHSKGMRQFYERVMAAQNGRKKIAIVAVARKLLSIMRAMMLTGELFNESMISGFDKLTEAA

SEQ ID NO: 77294 - protein, 359 aa, unidentified
MLSQSNKIDFKGQHIYVGIDVHLKSWNATVMTEELTIKTFSQNPSPEILHQFLTRNFPNANYHTAYEAGFCGYWIHNRLSALGIDSIVVNPADIPTTDKERVNKTDKRDSKKIARTLRSGHLKGIHVPSLKTLEDRTLLRTRGILVRDLTRNKNRIKSFLYFHGIEIPERFKSKSTHWSKRFMNWLKSIEMSEKSAQKSLNLIIKSSENLRLTILEATREIRELSQSGAYAGQVLLLRSIPGIGSLTAMTILTEIETINRFSNFDQLCSFVGLIPSTNSSGDKENIGELTHRGNNFLRCIIVECAWIAARRDLALNRSYHEYCKRMEASKAIIRIARKLLNRIRFVLKNNQPYECSVVK

SEQ ID NO: 77295 - protein, 347 aa, unidentified
MLALHQDLDVVIGVDTHKDTHTAAAVSATGAVMEHLTVPADPAGYRQLIAFGRRHGATLWAIEGTGSFGAGLTTALLSRCARIVEVDRPQRPARRGGVKSDDIDAVRAARQALAGVGLSEPRRRGDREAIRVLLATRAQAVTFRTRAISALHALVASAPDGLRERLRTLPLGQLLQTCAGLRDSSRRSVEESATVLAMRSTARRALACEREAADLEVQLDRLVRRLAPELLGKLGIGPVVAGQVIASWSHHGRVRSEAAFAKLGGAAPIEASSGIITRHRLNRSGDRQLNRALHTIVLVRMRQDGATKDYVQRRLAQGKTIRDIKRCLKRYIARQLFRQLEALSSTT

SEQ ID NO: 77296 - protein, 486 aa, unidentified
MAKQKKSTFERLRSGTMNRQQRRDLARRLAANDPGLTIVHPHAGGIDVGNESHFVAVPPDRDPNSVQEFGCWTADLKRMAAWLSACRIDTVAMQATGVYSIPLYDILTGHGIRVVLVNAQHTKNVPGRKSDVQECQWLMKLHTYGLLRDSFRLEEKMEGVRTIWRLRDRHVKDASRAVQHMQKALTKMNIQLANVISDITGVSGQAIITEILRGERDPWKLADLKHELVRASREEVARSLEGNWRADLLFELRQAVDSYHFAHQQMRECDRKLKGFLASLPTHTLERPNRSGAASATAPREKKTRKKPNPKRNEPTIDLKAELKRICGVDLTSIDGINVITAQTILSEVGTDMSGFPTENHFTSWLGLTPSKDISGGKIIGLGKRRVQNRVAMAFRMAATTLLNSKTYLGSRYRHLRKQLPSHASAIKAMARYLAVLVYRLLTRGEAWVDRGAATFERRHTERELAILKSRALAHGLKLIPVTPAK

SEQ ID NO: 77297 - protein, 403 aa, unidentified
MNNVVGIDVSKGKSMVSVLRPFGEVVAKPFSVGHTGSELKELADYLKSLDGETRVVMEHTGRYYEPVARFLHDEGVFVSAVNPKLIKDYGNNTLRKVKTDKADSRKIARYGIDNWAELRQHTPMDTIRMQLKTLNRQQSLYTKTKTMMKNNLIALLDQTYPGVNALFDSPVREDGSQKWVDFATTFWHVDCVRNMSLTAFAERYRKWCKRHGYNFSQSKAVEVHAGAQDLIAMLPRDALTKTMVRQAIDALNAISASLERLKAEMQALAAQLPEYPVVMTMHGVGDSLGPQLMAELGDVTRFTHRNAITAFAGVDPGADQSGTHEAKSTRVSKSGPPELRRALFLVMDCLLKTQPQDDPVYRFMDKKRAEGKPYLVYMTAGANKFLRIYYGRVKEYLASLEGN

SEQ ID NO: 77298 - protein, 316 aa, unidentified
MPVEHFGCDADKAFLTVACHERPGHLQRIGNDVGPIDEWLSGLAPDSVLAVEATGTCHQVLLERAVRHSLTIYLLNPRDVRHYAESLRRRAKTDRVDAQVIARYVAREKDNLRPYVPPSAASARLQVLLRRRASVVQNFTGLKLSLSDLEMPEKDHLYTGYAALLKALDEQVDAVIAQEERGVRQREQLRTIPGVGPLSSAALVSLFWRLPGITADGLIAFVGLDPRPRESGSFRGQRKLSKRGDPELRRLTYMAAKTFGRHELGRALYERYRQRGLSAIATYVILARKILRLAHALITKDTFFDPERFAAACVRT

SEQ ID NO: 77299 - protein, 359 aa, unidentified
MNYMGIDYHKNFSHVTVVDEGGQVIKRSRIFNDRDSLSSLFGELEGEVKVVMEAAWNTLVMYDLLEEFSDDIKLAHPTKVKAIASAKIKTDEIDSRVLADLLRANLIPEAHIPSVDVRVARRVLRQRMFFVRMQTMVKNRIHSLVDRHPDIARYPGMKSDIFGKSGKEWLREVELPVEERKLLDGELKLLDVLFDLIKKSDRWLGELAKDNEAVELLRTIPGIGLFFAVLLWSEIDGIERFSNPKKIAAYAGLVPSTYSSGGKTFHGRITKQGNKWLRWAMVEAALPATRNDFWLRSHYEHIKARKGSNTAKVAIARRLLTIVYRVLKEKRSYRSAKEQMQDNIKRSMEGKGLAAPTYF

SEQ ID NO: 77300 - protein, 408 aa, unidentified
MQVLYPRCAGLDVHKDTIVACVRCVSPPMHQEVRSFGSTTTELLALADWLAEHDCSHVAMEATGVYWKPVWHVLEGEFELVLANAAHIRNVPGRKSDVNDAMWIADLLAHGLIRSSFVPPQAIQQLRDLTRTRKQLVREVSQHSLRIQKVLEDANLKLGSVLSDVLGKSGRAMLDAIVAGQSDPAQLAELAQGTARHKTAELREALRGRITEHHRTMLRLHLQVVDALQRTLAELDAAVGKALAPIRQRARLLTTMPGVSDLTASVLVAEIGVDMSRFPSAGHLISWAGLCPRSDESAGKRRSTRVRKSGTWIKTTLVTAAWAAVRVKTSYLRAQFLRIKARRGAKKAILAVAASMLTAAFHMLRDGTEYNDLGSDHFDRHDRSKTIRRLLKRLQDLGCDVPAVAHAT

SEQ ID NO: 77301 - protein, 404 aa, unidentified
MNIVYERCAGIDVHKRSVVVCTITPDQQGQRHKQRDTFSTMMPDLLRMRQWFQSLGVTHVAMESTGSFWKPIFNVLEGHVEVLVVNAQHLKAVPGRKIADLLQHGLLRPSFVPPAFQRELRELTRYRGSVVEERSRTINRLQKILEDTNLKLSAVATDLMGLSAREMLAALLAGETNPTALAELARGKMRAKRDLLVQALQGQFKPHHRLLISEQLTHIDALDEEIERLSTDIAQRLLPYEAQLKRLGTIPGIKRRLAEVILAEIGPDMQRFPSARHLASWAGMCPGNRESAGKRLSGKTRKGDPWLRTALVEAAHAATHCKDSYLSAQYHRLVLRRGGKKATIAVGHTLLVIVYHVLADEKDYQELGGNYFDDYDRQAVQKRLVHRLEKLGYEVILAPTSPAP

SEQ ID NO: 77302 - protein, 337 aa, unidentified
MLIIGCDYHPGFQQIAFVDTETGEFGERRLTHRDEAEQFYDTLRERSVRVGMEASGHARWFERLLRDLQFELWIGDASEIRTKRVRKQKTDRQDAQLLLRLMIEDRFPRIWVGGAENRDLRQLLWHRHRLVQMRTRVMNQLHVVALNEGLRRKKALWRPAGRNELESLILAPWASRRRRDLLDLLDQLTPKIQELTRALEDEVEKRPVTRRLMTHPGVGPLTALAFELVIGTPERFHCGKQIASYVGLVPSEESSGDRRRLGHISKQGNSLLRYLLVEAAQVTVRSQPHWRSKFFHLAMRRGCTGCGAKAAIMPISKSSVRTRESPEIAMVWSKSPT

SEQ ID NO: 77303 - protein, 343 aa, unidentified
MKITTIGIDLAKNVFQVHGVDERGKVGLKKQLKRAQVLPFFANREPCLIGMEACAGAHFWARKLQALGHTVKLMAPQYVKPYVKSNKNDAADAEAICEAVGRPNMRFVAVKNGEQQAILAVHRARQGLVKARTAQANQIRGLLGEFGVVLPQGISHIAKRLPEILEDGENELPGSFRHLLARLGEHLQHLARQVAELEGEILRWHRDSEGSRRLAQIPGIGPLGASALLATVGDARTFANGRQVSAWMGMVPRQASSGGKSTLLGMSKRGDSYLRTLLIHGARSVLLQVERHPERAAPWLKQLLARRPKNVVAVALANKNARIAWALLTHGRAYERHYTPAAT

SEQ ID NO: 77304 - protein, 346 aa, unidentified
MVLIGCDYHPSWQQVCWFDRATGETGDEKLVHASGDAEEFYRRFSSPVRVGIEATGNCQWFLELLNRLGHEVWVGDAAKIRASDSRQQKHDKRDARLLLQLLREDRFPRIWTPTREQKDLRQLLIHRYKLVGLRARVKNELQHLAMNQGVTKKQKLWSKAGEQVLRELALAPWASQRRKDLFRVREMLNEQIDLLDRAVVEVAEKNEKARLLMTQPGVGPITSMAFVLTMGDVKRFPRGKQVASYLGLIPREYSSGGKQHLGPISKQGNRFLRMLLVEAAQAAVRYDPGFRNEYLHRCHKKAKGVAKVAAARKLAIRLYWMLRTNTGYPEVVRVESSSRVALVSAS

SEQ ID NO: 77305 - protein, 354 aa, unidentified
MPRKTTSLEAVTTIGIDIGKNTFHLIGLDKMGAIVLRQKLSRGQVDTRLANMPPCLIGMEACVGAHHLSRQLKALGHDARLMPARYVRPYSRGQKNDFRDAEAIAEAVLRPTMKFVAIKTVEQLDLQALHRVRERLVCQRTSVINQIRAFLLERGIAVRQGLRALRTEMPIVLAMTDKLSPRMIRMIEDLCTDWRHLDARIATVSNEIKTLSEQDDGAKRLMTVPGIGPIISTATVAAIGSGDVFSKGRDFGAWLGLVPRQMSTGGRTVLGPISKRGNRYLRMLFVQAARAVLLRPQSWEKYGLRSWIEAAARRLNRFKLAIALANKIARVAWGVLHGGRNFEVRSMRTAPQAA

SEQ ID NO: 77306 - protein, 400 aa, unidentified
MSALWAGIDAGKKAHHAVVMDATGTVVLTRRVDNDEHQLLDLIAQVLDLAGPGQVTWGTDLNAGGAALLIGLLEAHDQALLYIPGRIVHHAAATYRGDGKTDAKDARIIADQARMRSDLQPVHGADQNAVDLRLLTSARTDLTYDRVRMINRLRALLGEYCPALEAAFDYSKKAPLVLLTGYATPDALRRMGTTRLAAWLRARHCRNSAAMADKALTAAHAQHTTLRTQATGAALVADLAAKILALDEDVAALDAQIAERVHEHADAELIISMPGFGPLLAATFIAATGGDLTMFGSVNRLACFAGVAPVPRDSGRIAGNHHRPRRYNRRLMRTCYLAALSSLKNSTASRAFYDRKRAEGKSHKQALIALARRRLDTLWTMLRDRTPYRESAPGGLAPAA

SEQ ID NO: 77307 - protein, 347 aa, unidentified
MEKITRIGMDTSKHIFQLHGIDASERTVLKKKLSRVQMLSFFEKQPATVIGIEACGAAHYWARTLDALGHKVLLLPPQYVKPYVKRGKNDAADAEALCEAMSRPSMRFVPVKSVESQAALMLATTRERLVRSRTQIANAIRGNAAELGLIAAQGLDKIEPLLMRIAENETLPALAREVFAELAQDYAYVERQLMKADAKLMAWHKGSACSRRLTAIPGIGPIGASLLVMKAPDPRLFKSARHFAAWMGLTPKDHSTAGKQRLGVITRAGDEMLRSILVVGATAAIQQAKRRPERASPWLRNLLARKAPKLAAVALANKNARIAWKMMVSGETYNANRSQSAGLADAA

SEQ ID NO: 77308 - protein, 369 aa, unidentified
MADYREAFVGIDVAKLKNAIAIAEAGREGEVRFFGEVDASATSMRRVIGRIASRFDHVHFCYEAGPTGYGLYRLIRSLGHECTVVAPSLIPRKPGDRVKTNRRDAISLARLLRAGELTAVWVPDEGHESIRDLVRARAAAVETLRVHRQQVSAFMLKHGRSYPRKKSWTMRYLRWLQEQRFDHPAHQIALQEMVEAVRVSKERVERLERVIEEFVPTWSLAPIVLALQTLRGVDLIVAVTFVTEVGDASRFESPRQLMGYLGLVPGERSTGETVRRGGITKAGNGRVRHMLVESAWTYRHPPKVGKAKLYRLEQAPPKVREIAWKAQSRLTARYRMLSARGKRTTVVCTAIARELVGFMWAVAREARAT

SEQ ID NO: 77309 - protein, 475 aa, unidentified
MNVKGTKKKNQVVTENIFEQQELLKKAEVIKENLTASTWRELETNGKFDKNEKLSFISDDMLILGCDVGSETHYMRAIDTRGRELSKSAFPFNNDSEGFQSAKEWAVKIAAEHDKSQIVLGFEPTGHYWFCLATWMISNGISVVQVNPYAVKQTKEVEDNSQLKDDRKDPKLIANLVKDGNFGMPYLPEKLYAELRRLSMFRDQLNEDRIRTINRMHREMKIYFPEYKDALGKVDGAFSLELLKQAPFPDDLIALGEDGIRQIWHDAKLRGRGYSRAGEILQYAKASVGIKDGAIAGKAAVKWFVQKIMELDAELIVIEKQINQKCQEIPHAGNILEISGIGENTLSGILAEMGDISRFDDVKEIQKLSGLGLVACSSGKHKGETKISHRGRKRLRYWLFQAAKSAVAHAEEFKELHVYYTTRPDNPLKKMQSLIVIACKLLRIIYTILKKGTVYDPKKMLMDIRRPEKKEAIAA

SEQ ID NO: 77310 - protein, 404 aa, unidentified
MNSVGTDVSKGKSMVAVMRQFGEVVAEPVEYSHTIDGLKELVAFLKSIDGEIKVVMEHTGKYYEPIAQELYNSGFFVSVVNAVLIHNYGNNTIRKVKTDKKDAVKIVNYALSNWSNLIRYRPDEDVRQLLKTYNRQYNKYVNMKVSLINNLMSITEQTFPDVRRLFTSPPRRKDGHEKWVDFLGKFWHCRYISGMTETNFYERYTKWCRKNGYLTSKTKAAKIYAAANEHVGVLPENESTKLLITQSVAQLNSICETLTVIRTEMHMLSTQLPEYPVVMAMCGVGETLGPQLMAEIGDVTRFHRKQSLVAFAGVDVPPYQSGKYESKHRGISKKGPPLLRKSLFQVMACLLQTSPAEDKVYQFLDKKRREGKHFYVYMMAGTNKFLRIYYARVIEYLRASEISV

SEQ ID NO: 77311 - protein, 369 aa, unidentified
MKEITTYVGVDAHKKDLFIAMLIGNERTPVAWTVPNEPNAVRRLVRKLEREAPGPVRMCYEAGPCGYALQRQVATARVSCQVIAPSLVPRKPGERIKTNRRDAKKLAELFRAGLLTEVRPPTPEEEAVRDLCRARDDAREDLQRSRHRLGKLLLRRGLHYSAGRNWTRGHRRWIASLQWAHPSERVVVDDYLLAIDHLEARLIELDARLVEIADTEPYRERVGWLRCFRGIDTLTAILMLAELHDFQRFPSAPALMAYVGLVPGEDSSGEKQRRGRITRMGNALVRRLLVETAWHYQHRPGTGVALRRRRKGQPSRVIAIADKAQQRLCRRFRRLAEHHKPAPKIAVAIARELAGFLWAALQPAPAGTN

SEQ ID NO: 77312 - protein, 412 aa, unidentified
MQDILTCAMGLDVHRDIIVACLVKGAVDAEPEAETRTFSTLIPEMQKLRDWVIESECRNIAMESTGIYWQPIYEMLESCFDGEISILVVNARHMKNVPGRKTDMKDAQWIATLLRAGLLKGSFIPDKAFRELRHLTRYRKSVVHDITAQKNRIDKFLQSSGFRFTAFLSDTFGASGRNIIRHLIEHGSIDREALDKCLKTKTRNRIDEILVALNGSLSEHQRRFLNMVFRHLEDLEAHKHTVEDEITEEVLKHTDTLNLLCSIPGIDVTAAAAIIAEIGTDMSSFPDSQHICSWAGLSPGNNESAGKRKSVHINKGNPYLKSMLCEVAWIMASHRKLYLSGWYWKVKQRKGAKRATIALARKILSIIYTMLKTGTPYNEECFEQRRLRCERKRANRLVNELQKLGYVVVAPD

SEQ ID NO: 77313 - protein, 330 aa, unidentified
MNNIEGCGVEVSARELVVARKGKAGVQLRRFANTAAGHRQLLRALTRGGQRVRVVLEATGLYALDLALLLSAQEQVQLMVANPRAVRHFAQAMMQRSKNDQLDAVVLLEFAERMPFTPWVRPQENALALWAIARRLQALTRLCTAEKNRAHAMGLSEAIPATVRRDIARSLQFHQRAMKKLRQQALQCIAADAQLQQRYQLLRSVPGLGEISAVQTLAELLLLPEDRDVRQWVAYAGLDPREYSSGTSVRKYTRISKVGNAHLRRALYMPALVASRVEPHMRGFYEHLLARGKSKRQALVAVARKLLHAIYGMFRSRQSYDGTRVYLLPA

SEQ ID NO: 77314 - protein, 446 aa, unidentified
MRALPEEIPDEEYEQILERVCAVDVAKESGMVCTRLPGGAGGRRTSRVWQVAATTNAVSDLAAQLVDQGVEKVTVESTSDYWRIWYYLLEAAGLDVQLVNARDVKNVPGRPKTDKLDAVWLAKLTEKGMLRPSFVPPAPIRVLRDYTRMRVDLTRDRTRNWQRLEKLLEDALIKVTSVASKLQTLSTRDMVEALIAGQRDPQALAGLARGRLRGKHAALVEALTGRFDAHHGELARILLDQIDRLDSQITQLTGRIEELVGEIDRAALPSPSDSTDNGQDAPAVSALRRLSEIPGLSVETAQLIIAEIGLDMTRFPTAAHLVSWARLCPRTIQSGTSTSAGKIGKGNPYLKGVLGLAAATAARGGTTFLAERYRRIVKRRGKGKALVAVARSILVIIWHLLADPTARYHDLGLDYYDTRVNTNRKVNSLVRQLESLGHTVTLQPAA

SEQ ID NO: 77315 - protein, 343 aa, unidentified
MTEVITIGVDLAKNVFQVHGVDASGKPAIRRQLRRGQVLPFFKKQPPCLVGMEACATAHHWGRELEALGHRVRLMPPRYVKPYVKRNKNDAADAEAICEAVTRPTMRFVAIKSAEQQSVLMLHRTRELLVRQRTMVVNAMRAHLAEFGVVARVGLPQVKRLLAVISDSGDDRIPPLARTCLQGLATQFMSLEGEIGAAEQRLHAWHRSNEVSRRLETIPGIGPITASALAASITDPHVFKSGREMAAWIGLVPRQTSTGGKQRLGRISKQGDHYLRWLLVAGAMTIIRHAKRRGTSNRPGLIGLIARRPTKVAAVALANKNARIAWAILRHGGTYERPTMRAA

SEQ ID NO: 77316 - protein, 458 aa, unidentified
MPRFVGLDLGRKSFQVAIVDEHGHLLENTKLPLGQPELLHFARTKLLPTDQLALEATSNTWAVVDLLSPFVARVVVSNPLRTKAIAAAKIKTDKIDARTLAELLRSNFLPEVFQPDPTTRALRERIHHRAGLVGQRTAIKNRIHALLAKRLIPVPTSDLFGKKGLAWLNAAELDPLARDVLNTELRLLAALDAEIAQEDAFLAHYAWKNPQVRLLMTLPGVSLVVAVALLAAWGDVTRFPSAAKAAAYLGLVPSTYQTGTSCYHGPITKQGASRARWLLVQAAQHLDRHPGPLGHFFRRLCRRKNRNVAVVAAARKLACIAWHMLRAGEPYRYAQPGATQNKLAALRVAATGARRPRGVPKGSPRPQRLSSGTPHRTVPSLPAVLESEGLPKARTLEELPPGELRTLKRTHTLAHARAIQSPTTKPRTPQPKHKLNAKTHPPETPPQPTETKKLPPAT

SEQ ID NO: 77317 - protein, 404 aa, unidentified
MELTAIYRCVAALDVHQSKLTVCILYENESGEIITELKEFGGFKRDRRAMADWVESFQPELVVMESTGIYWKSPYAALEKQGLTIWVVNARHVKQVPGRKTDFADAQWLAILARNGLLRGGFVPPAVFRELRLIARQMQKLTGILSGEKNRLHKILSDGGIRLGVVVSDIHGKSAKAMIKGLLAGESPEQVLKYASNRLKASEEELLDALAGDLSPSHQFVLTELMAHIDELEARIETFRQALLQGLAPYQAILRSLQTIPGLDEAGAALLLVEIGDDMSAFGTPERLASWAGVCPGNNESAGKKKTGKTRKGNPYVRRILCEASNAASRTQCRLQDMFKGLLIRRGRKRAIFALAHKILKIVFLLIERGDYYRDATVDYEKLSVQRNAPRWIKTLKKYGYIAG

SEQ ID NO: 77318 - protein, 340 aa, unidentified
MNATTYGLDIAKRVFQMYWVDAETGEIANRKFGRDDLIAFLSQRPAGRVALEACGSAHWWARKIRALGHEVVLLHAQFIRPFVQTNKTDAADARAIWTAVQQPGMRTVAAKTEDQQVMLSLHRMRSLLVKFRTMQINQLRGLLYEFGVTFRAGRVAGLDEIRDRMAELEDTLPRSIPLNLLEQLRRINGFEEDINQIEKRIGAWQKQEAACRAISEVPGIGRLTATALVATIGDAKTFRSGREFAAFLGLVPRQNGTGGKIRLGAISRRGDPYLRTLLIHGTRSVLCHTKVPTAWQKAIQVRRPANVATVALANKMARIAWAILAHGTSYEAHHVSIRPA

SEQ ID NO: 77319 - protein, 336 aa, unidentified
MSYYCGIDLHSNNHVVVVIDEEDNKLVDKRIDNDLDTTIALLSPYKKELKAVAVESTFNWYWLVDGLIENGFKVELVNTTAVKQYDGLKYSGDHQDAFHLAHLMRLDILPTGYIYPPEYRQVRDLLRRRRQLVRHASTHALSIQNQIWRSLGYKQTCNVIRRKGFVLPFEKDGYLYHSANSNLVLMRTLDTQIKLVEQQVLEGVSLKNEYKLLTSVTGIGPILGLTIMLETGNIQRFDSPGNYASYCRCVNSIRESNGKKKGTGNRKAGNKYLSWAFSEAAHYMVRFNNQAKGFYERKRQKRNGIVAIRAVAHKLSRAVFHMLKNNEAFDIDRVFH

SEQ ID NO: 77320 - protein, 339 aa, unidentified
MKLYTGLDLHSSNSYLGIIDESGKRVYKQKLPNDRERILSALNPYKNDIAGIVVESTYNWYWLVDLLMGERYNVHLANPSAIKKYTGLKFADDQHDAFWLAEMLRLGILPEGYIYPKEDRPIRDLLRKRMHLVRLRTSLIVSLQNILSRNNGFKLKTSDVKILTEDRVAPHLTGSEDLALAGMVSKESIDFLTRQIKKIEAVIEDKVELKPPYEKLQSVFGIGKILALTIMLETGPITRFAKVGNYVSYCRKVSSKWLSNDKVKGKGNKKSGNKYLAWAYSEAAEHARRSYTQARAYYNRKMQKTNFMAAHNALAHKLARASYYVMRDEVNFMPEKIFV

SEQ ID NO: 77321 - protein, 340 aa, unidentified
MEHATIIGIDLAKRSFQLHGARADGSVAFRKKLNRDKVLHFVASHPPCVVAMEACASAHHWGREIGKLGHEVKLVPPIYVKPFVKRQKNDAADAEAICEAASRPTMRFVAVKTREQQSQGMLFRTRDLLVRQRTQTINALRGHFAEFGVVAPQGPAHVDRLADAIEDADSGLPGPVRDLGALLFVQLSELDEKIAELEQELRERAREDEQTVRLMSIPGIGPLSAMAIQAFAPPMESFRRGRDFAAWLGLVPRQSSTGGKPKLGKISKMGQRDLRRLLVVGAMATVGWAARRGTKDPWLARMLARKPRMLVAVALANRMARIAWALMTNNQHYRAPAATA

SEQ ID NO: 77322 - protein, 322 aa, unidentified
MQHESSIQPVAGIDVSKSTLDCFIDVIDKSFSVVNDQRGIAELIEQLRAANVRLVLIEATGRYHRRCAAELLDAGIEVAVVNPQRAREFARSMGSLEKSDPIDSRLLAAFARASNAHRRLVKPSANQAQIDDLVSRRRALVQMRIAEKNRLHDDLPRLARNQGNKLLRLIEQQIEDLDRAIAKLIESDDDWQNKSNLISSVPGVGQSSAHQLIADLPELGKLNRQQIAKLVGVAPLNCDSGQHRGQRRIAGGRGPVRTTLYMAAFNAIHYCDRFRGYAARLKQAGKPFKVIMTACMRKLLITLNQMIKTNTAFNASLTPSIA

SEQ ID NO: 77323 - protein, 406 aa, unidentified
MRLFVGDDWAEDHHDVEVMDEAGRVLARRRLPEGVAGMSLLHELVGGFLGEHAGEPEVKVGIETDRGPWVAALAAAGYAVYPVNPLQSARFRERLRVSGAKSDAGDAHVLADMVRTDSHQLRRAAGDSPLAEAVKVTARMHKTMIWERTRQVQRLRHQLREYFPAALEAFGDLDAAEALELLGRAPEPARAARLTRAQVSAALKRAGRRNVTERATAVLAALRGDQLGQPEVLTTACAAAARSLIAVITVLNEQVKVLQGQVEEHFGRHPDAEIITSQPGLGMILGARVLAEFGDDPRRYADGRARRNYAATSPVTRASGKKKVVAARFVHNDRLVDALNAQAFAALTASPGARAFYDQQRASGHGHNDALRRLANRLVGILHGCLKTRTRYDEDIAWGHRQRQAA

SEQ ID NO: 77324 - protein, 402 aa, unidentified
MNAVGIDVSKGKSMIAVMRPGKEVVIEPFEVSHTDSELINLAKVIQSLNGETRVVMEATGNYHLPVAWMLHDAGIYVSVVNAMLIRNYGNNTIRKGKTDKKDAQKIANYAIDNWTELPQYFPEEDVRLMLKNCYRQYEHFSKIRTMMKNNLISLLDVTFPDANRLFNSPRRADGSEKWLDFVGTFWHCQCVCELTTAAFSKKYQKWCRKHSYNFSEDKALDIYASACGHICIMPKTDATEFMMKQAVAQLQTVSKTLAALQQQMQALAEKLPEYPVVMQMFGVGPILGPQLMAEIGDVRRFHSKKALVAFAGIDAPPYQSGTIDVRSRSISKRGSSSLRRTIFLIMTIYLQQKPLDEPVYQYMDKKRAEGKPYKVYMMASANKFLRIYYATVKAYLDALEAD

SEQ ID NO: 77325 - protein, 361 aa, unidentified
MSRRETAITTIAHPEPSRVSVGVDTHGQIHVACALDQLGRQLATGQAATTPVGYRALLDWAKRLGEVEAWGVEGTGCYGAGLARFLTAHDQVVLEVNRPDRSARRRRGKSDPVDAEAAARAVLAGQATAIPKTGSHLVEMVRCLRVARATAVKARTQAANALRALVVTAPAELREQLRGLPTGRLVGTVARLRPGPILTTGAATKLALRVLGQRYQALDAELAAVDAELDRLTVQAAPGLRQLCGVGPEIAGALLVAAGDNPQRLRSEAAFSMLCGASPIPASSGKTVRHRLNRGGNRQANTALYRIVVVRLRWHQPTRDYLARRTKEGLSKREIIRCLKRYVAREVFAALQPPTVLPDAA

SEQ ID NO: 77326 - protein, 346 aa, unidentified
MRFYTTQHPFYCGIDLHARTMYVCILDQNSEILVHRNMTTSPEAFLNVIAPYRPGIVVAVECMFTWYWLADLCADEGIPCVLGYALSMKAIHGGKAKNDQIDSQKLAALLRGGMLPQAYVSPAAMRATRDLLRRRMPLAHKRAELLAHVQNTNSQYNLPAIGKNLAYKAHRDGVAERFAAPAVHKSIEVDLALITSDDELLRDVELTIVTTARHHDAHTLYLLQTVPGIGKILSLVLLYDIHDIARFPRVQDFLSSCRLVKGARESAGKRYGTSGTTIGNAHLKWAFAEAAVLFLRDHPAAQKYLARLEKKHGKGKALTLLAQTLARAVYDLRKRNVAFDRETFLQ

SEQ ID NO: 77327 - protein, 322 aa, unidentified
MSLPNPLCVGIDVSKATLDIATTSEFAQFTTGNDADGFDAIVAELRKHSVALILMEATGGLEAAVACSFQAEGFDVAVVNPRQARDFARAMGYLAKTDRIDARVLAQMAEFINRHPERERFIRALPDAERQVLAAMVVRRRQLITMLVAERNRLHPAHPQSRKSINIIIQALENELARIDEDMNRHIQSHFKELTERLSSIKGVGTMTAAALLAEVPELGNLSRREISALIGVAPVNRDSGTMRGRRTIFGGRAGARAALYMAALVATRFNPVIKAFYMRLLAAGKAKKVALVACMRKLLTILNAMLRKNEEWNESFHHVAP

SEQ ID NO: 77328 - protein, 318 aa, unidentified
MNNNSTSVGRVIGLDAHPDSFTVAVLRGETPAQAFVEKTFHKVPMAQLQNWAKKHTQNDDLLILEASGNSFQVVRTLRAIGRRALVLESRHLGKLKEAHANNDKMSAVRIGKAYLAGTAREVWVPDEKTQERRDWFHAHRKATKRSTQMRARLRSYLSDNGVRLKKGTTLVQERVVEAQLRKAKEWSVRQWQVIEGMLMELRHAEEQRKHWRSLIAQEVIADPLLLSLVRLCGVRDVVAFALGAIIGDIHRFASPAKLVKYVGLDPALDESGEGRWEGGIGRHGRKDLRALLIEAAQAIYRSKEALAKWGRKLFARKS

SEQ ID NO: 77329 - protein, 484 aa, unidentified
MKGCPSRRRVSTKPSWVALRSQPWGRTVPPPLGEERSGLLRMSCRWGRRWSRPGAEHCYWGVRTLLGLAKRLEQEVCAVVFVGIDWSEQQHEVELQAGSGKVLKRLRVSADIAGLSRLQEAITDAAEEPSQVVIGIESNHGLLVNALVASGYRVYPINPLTSARAREGEAPSRSKSDPGDAHVLANLVRTKRQDLRPLAGDSEQAQALQVRARSHLRAIRVQQRLRSQLRSALAKFFVGALPLLGDESEDLRDALAVLSLAVSPEQGRGLSQNKIRSSLARHGRQRNLEVKAAEIQAQLRAPQLELNAPKVVSAYADEVSHLVRSLLQARSEVAQLEAQLAADFREHPDAEILLSQPGLGLVLSARVLGESGDDPTRYVNAKARKNYAGNAPVTKRSGKWKMVSRRLARNRLLADAGFLWANSALSASPGARRYYDQLRARGKTHNQASRALANRLVGILHGCLRRRCLYDEAVAWLQPLKEAA

SEQ ID NO: 77330 - protein, 342 aa, unidentified
MNYKYAGVDLHKRSFTVCWISENGRKKTVEYKTDAAGYARFKKCLNKECEVAVESSGNTGYFYDQIAGLVKAVKVINTHKFKVISESVNKTDKRDAETISEFLKKDMIPEIRMKTKEERAVQNLINTRDKIVKCRSTLKNQLHGILNSEGIVTERESFGSNKQLEELKSIKGISETNRFVVGNIVDTIYSLNEQIKKLDGEIGKKGQEMKGYKNLISITGIGTLSATILLNTIGNIKNFANEKKLFAYFGIVPRGYDSGGKQKRGHITKFGNKIARTTLVQVTLIAMKFSPHIKEFYKRIKLKRGAGKAIIATARKMLGIIYKTLKNNWEFENFKKFELKKA

SEQ ID NO: 77331 - protein, 344 aa, unidentified
MDHFAGLDVSVKETSICIVDDTGKIVREVKAASEPQALLKVLGNPTYRFKRIGLEAGPLSQWLFSGLAEAGLPVVCVETRHMQAVLKAQINKTDRNDARGIAQMIRAGLYRPVHVKTLRSQKLRMLLTHRKLLQSKAIAIENDLRGTLRNFGLKVGMVGKVRFEARIKELVESLPDLAELVEPLLIVRRTLREQIVILHRRLLAIVRDDEVCQRLMTTPGVGPVVALTYRATVDVPARFRKSKAVGAVFGLTCARYQSGEIDWSGRISRCGDEMMRVMLYEAAQSMMRSKKWSWLKAWAMQIARRRGMKKAIVALARRLAVIMHRIWVDGTEFRWTREQAAAAA

SEQ ID NO: 77332 - protein, 375 aa, unidentified
MKKVSRQLPKMEAGIAKPKMTVGLDLGDRFSHYCLLNGDGEVVEEGRVQSTEAALRRHFEGEDRLRIALECGTHSPWASRLLNALGHQVIVANARKIPAITGSESKNDRNDAEKLARFAAYDPKLLSPLEHRSQTRQVDLNLIHARATLVRARTMIVNALRGLIKSAGGRLPACSTESLPARAPAAVPPALLEVATPLIEQIALLNAQIDGMSKQIDKLADKYPEIALLRTAPGVGPIVAAAYVLTLDRPDTASNRSAGAFLGLRPGQSQSGGADPQRRISKTGDSCLRSLLVQSAQYILGRFGPDSELRRWGLKLAATGGKRGKKRAIVAVARKLAVMLHSMWRNGQPFQPFPQTGVPGNPTLGAGVQQAAVVA

SEQ ID NO: 77333 - protein, 372 aa, unidentified
MNESRAPIARAGVDLAKQVIQVHAVDASGRRVVARAFKRDQFFAWCAQLPAGCLVAMEACSSAHYWGRKLRTLGLDARLIAANFVTPYRMEGQSGKNDATDAAAICEAASRPSMRFVPIKTCEQQGVMSLHRVRESLKEERTACINQIRGVLTEFGLAFGRSPKVLRSVLTDVIEDASNELSPTARLVMQRAFEHWRELDEHMHWCDRQIGQHVRSSSAAKRAAKIIGIGELCASAFTAGVGDFKQFKSGHQFGAWLGIVPRQDTSGGKIRLGRITKRGDDYLRTVLIQGAKAAVMTADKRDDPNSRWLAQLTARVGWQKACVAMANKNARILWAVMTREEGFDPNHVSVKPQAKQTGLQHAPEPPGAACTT

SEQ ID NO: 77334 - protein, 365 aa, unidentified
MQFVGVDIHTNKFTCCYRNEVKEKKETVTFELNAYGIADFIGTLTKEAYVLVEATITTFAFVRILQPLVKEVIVANTYELKQISLARKNTDKIDADILCRVLKMQVLSGEQTISPVTVPPVGIQELRGLFTTYRLYRKQTTQIKNRIHSLLKEKLYGFTQEEIFSQKSRKMIRELEKGTILSFQINELMDMLENMETRVETLEDKVKEHAEPYMREIEILTSMKGIGVFTAIAIIADIISVTRFKNSKSFTSYLRSAPKVSNSNTSEKTKGTNKKGRKVAATLITQSLIHVLSASIKLNRWYEEKSKNKKPGLVRTALRRRVFAEMFQMLKKGEYHYGRNERLHEAKILQYKRFLKKRKNLLETA

SEQ ID NO: 77335 - protein, 358 aa, unidentified
MRQRQSNEISFKGQNIYVGIDVHLKSWSVTVLSENSVLKRFVQPPDPDALHKFLTRSYPEAEYHSVYEAGFCGFWIHERLIALGIDNIVINPADVPTTAGERIQKTDAVDSAKLARSLRSKELTGIYVPDSTSLEIRSLIRLRSTITKDVTRQKNRIKSHLRFLGYEIPAEYCNRYWPKRFIVWLRELDMKTQSGRQSLDFMLDMLDNLRKEKLDMTRALRALSRTEQYEKRLELVMSVPGIGQQVGMALLAEIVDIKRFKDAEHLAKFVGLVPMCHSSGESEGVGDITIRKHAFLRTLIVEAGWQAIRQDPAMTLAFETYCKRMKPSKAIIKIARKLVNRIYFVMKWQTPYVTSVVS

SEQ ID NO: 77336 - protein, 313 aa, unidentified
MSQESVFVGIDVSKAQLDVALYPSQEGMVFAHTEEGLGRLVDRLKPLWPTLVVLEATGGLEMDVVAALLTGELPVVVANPRQVRDFAKATGQLAKTDALDAQILARFAESVRPEIRPRKSAETQDLSALVARRRQVLNMITAETNRLRTAPSCTRKNLEAHIAWLKKCLKELDKELGQTIRKSPVWREKDEILKSTPGVGRVLSTTLLADVPELGLVTGKEVSALVGVAPMNCDSGQFRGRRIVWGGRAHVRTVLYMSTLSGIRCNPVLRAFYQRLRLAGKEHKVAMTACMRKLVVTLNAMMKNHSYWSPTHA

SEQ ID NO: 77337 - protein, 419 aa, unidentified
MTMSKDSRILSVVHPICCGLDVHKKVIVACFVSINESGEDTTIIEEFGTFTDDLQKLRDWLLEHECPIIAMESTGVYWRPVHNVLEGDVEVILVNARHIKNVPGRKTDIADSRWLAGLLQHGLLRGSFIPVKEVRQWRELSRVRRKNRDTISDYKRRIHKLFESANIKIDSVVSDLFGVTGRNMILLLATGPEDISLDDIEYCARGTLRDKVTELHRSIVGFFEDHHRFQLVSLTHILETLEKENEKIDQRMKKLMQEHEDLLSRMDEVPGINELSAQYILSELGPELCTFSNAASLASWAGLCPGNNESAGKRKSGRSPVKKHHLKTIMVEVAWAAVKKKGSYYRDKYWRLKYRLGPKKAIIAIAHKIIKALYAIIKNGEKYKELGEEYLAKRSEKQKMTKIRKAAKELGFKLVSIAV

SEQ ID NO: 77338 - protein, 423 aa, unidentified
MEQIYRTGPLAGTVREESGMVNVGIDLHKTQFTVCVRWLGVEENEFFKYPTTEEGYATFLKRVSVWQECGEVVRVGVESTGNTRYFKERMETAGIEVKVINTLKMKVVNESVNKTDKHDAATIAQFLEKDMLPECQLCSRESEQLRRLLKVRTTLVRAVVVIKNQIYALLTAEGIGRAKGSLQSKKGRKQALDTLNQCTNGLVVQPLLETIDRLEENVKSVEKQLRILTDGDRVVELLLTIPGCGEICAWTIRAYMDDINRFSSAKKFCSYAGLAPWVQNSNETIRHGKITKRGPQELRTALVQVVMGLRRMKAKTLTWRLMQRYEMMKATKGSGKSIIATARKIAVIIWRMLSADAAFDLEKMVDQKLAKKSESMSKQARAEESEIIEERNISLLTKNETMLTVDKGSKKTGVARQKLLKAG

SEQ ID NO: 77339 - protein, 315 aa, unidentified
MTTSSGKFVGVDVAKEKLDIAVLGEIKASQVTNDAKGIASLIKEMTALRPELIVVEATGGYQRAVVLGLYEAGLPVAVVNPARVRQYARACGLLAKTDKLDAFNLAEFGKQVRPREFEAKSEAGRYLSALLVRRRQVEEMLKAEKSRLRTVHVDMRVSLERMIEILKEEIKRLEKDLDRFMKEHADWQEQEEILCSAKGVGRVTAATLLAELPELGKLDRKKIAALVGLAPMNLDSGKKRGYRKTKGGRIEVRSVLYMATLVATRYNPLIQVQYQELLRRGKVKKVALTACMRKFLTILNAMMRDRVPFRQTVAA

SEQ ID NO: 77340 - protein, 315 aa, unidentified
MQTPLDIGADISKDYVRVSCATGSLPSIGLANRRASLLAWLKRLPAGTRIGMEATGTYHELLATLAHRLGLVVYVLNAKHVHHYAQATAQRGKTDRVDAELIARYVAKEHSHLHIWHPASPAQRQLQRLMRRRGKLTRARAALRSTLQGVPSLRTDVRVLLKHFDALIAKLDTQARALLKASVEREQAFQRLDAIPSVGSAVGIGLLAALERWSLPRADSFVAFIGLDPRPDDSGKRSGRGRLSKDGDPELRRLLYTAAMSASRTRVWAPVYQRALARGLSRIQALVILARHIARTAWSVYTHKTQFDPARVHSS

SEQ ID NO: 77341 - protein, 344 aa, unidentified
MIIIGIDPHKRSVTAVALDAHSQPLGTLRVAMTDRAGAQLLAWAVPWSARRWAVEGATGLGHTVAQQLVGAGELVVDVPAKLAARVRLLGAGSARKSDRTDAASVAAVALHHRRLRQVAVEDHTMVLRLLTDRRDDLVAERTRMVSRLHVLLRDLRPGGADRDLTAGRAAALLGQLRPLLVVDIQRKRIARELLADVRRQDRRIAAATTAIGEAVTASGTTLTEVFGLGPVLAAKILGHAGDIARFPDGDHFASYTGTAPIEASSGDVRRHRLNRGGNRQLNTALHIMAVCQIRDPSPGQTYYQRKLRQAKTPEEARRALKRKLSNVVYRHLVADHRRRNTHPT

SEQ ID NO: 77342 - protein, 338 aa, unidentified
MVLIGIDPHKGSHTAVAIDGHETQLGELRLRSSKQQCDRLLEWASMFPQRRWAVESAGGLGYLLAQQLVAAGEDVVDVPPTLSSRVRVLGSGQSQKNDPNDALSTAIAALRGRRLRQVALDDHVAIIRMLANRQHDLAAHHTQALCRLHAQLANLIPGGVAGRLSPTRAQAMLATIRPLDGVVAARKQQCLELLDDVVRLRGSLADIKARITVAVLASKTSVTDIHGVGPIVAAIIIGHSGDVSRFASRNHYASYNATAPIEASSGPTKRHRLNQRGNRQLNHAMHLVAVTQIGHDTPGRVYYQRKIASGKSTKEAMRGVITRSCGSARGVPKVVRAS

SEQ ID NO: 77343 - protein, 412 aa, unidentified
MEGETVIAGVDTHKDVHVLCLLDGLGRKIWSGSFGADPEGYDRLAEAIGDPGSCAVVGVEGTASYGAGLTRRLVELGYNVVEVLRPKRDKVRPGEGKSDPLDAERAARKAASGKGCSVPKSQDGWVEAVRQLYVARRLAVATSTSCVACAKSMLTTAPSALRERFRGRERPKDLMPLLARGRKAGDALEESVLASLRSVAAVWKEARSQVESLDERIRALLEANAPALLGVEGCGTTTAAALVVAAGDNPGRLRGEAAFSMMCGASPIPASSGKTDRHRLNRGGNRQANWALYEIAIKRMAYDERTRRYVARRTSEGKSRREAVRCLKRYIAREVYRVLMDPNPDGAAPEGPELAKMRKAMRVTQKKAAAELGLSAATLGHLEHGRRRSTKLERRYYELLCELERALPQTAS

SEQ ID NO: 77344 - protein, 366 aa, unidentified
MKKTSTVRVNGNMIFKGHKLTIGLDLGDHWSCYCVLDEAGEILLEQKVAMTPEAMKQTFAKIPQSLIALETGTHSPWVSRLLTELGYKVIVAHAQKVQLITKSNRKDDRHDARTLARLARIDPELLGPVRHRSAQAQIHLTVIRARAELVRARTALVNAARGLVKSYGQRLPKCGTQQVNRELAAGLHAELREVLEPLLQEVESLNERIQEYEVRMEKIAKENYPHVELLKQVKGVGTQIALTYVLTLDDPHRFPKSREVGCFLGLRPGRRDSGESQPEMNISKEGDRYLRTMLVQGAHYILGPFGEDSDLRRWGLKLAARGGKNAKKRAIVAVARKLAVLLHRLWVSGEVYEPLRNSQKAMRAAG

SEQ ID NO: 77345 - protein, 388 aa, unidentified
MPQTPNDLSRSLTALEQTTTLVAVVEMSQASWLVAGMIPGLERQPLKKIAPNEAALLSLLQRWQEEAIKICQTIRRITVAYEAGRDGFWLARWLCSRGIEAHVIHPTSVAVSREHKRAKTDRLDTAMLIRVFLGWLRGERGHCGMVAVPTLEEEDAKRPSRERENLVGERTRIINRMKSALVRLGIRGFKPELRRAPQHLEKLRTPEDVPIPLRTLEELRRDMARLAMVRAQIEAIEQIRLQRLEQAPQDGAHAMVRMLANIIGVGVETADMLVREILAKELRDRRALARYAGLTGSPNESGSKRREKGLAKSGNARVRRGLIQLAWRFLRFQKDSALAQWYRTRTEGAKGARKTSLIVALARKLLIALWRLVTIGEVPQGIVLRQAT

SEQ ID NO: 77346 - protein, 373 aa, unidentified
MNNHTTVYIGMDVHKESFTLCCFTLGEKEPGHVQTIPPDHILVVKYVKGLRKLYGEETEFVCGYEAGCLGYTLYHQLKGCGQECVILAPTTMMEQKGKKRVKTDKRDAKKIAQCLAYHTYSPVHIPTEEDDQVKEYIRMRDDIKANLKRTKQQILSFCLRHGLVYTQTKTTWTQAHLKWLRDQKLDGLYQEILDEYVLQLTKLMETMERLDKRIEELSNRETYRKSVNHLTCLIGIKRPTALAVIAEIGDFKRFATACHFSSFLGLTPGEDSSGGDQNRLGITKAGNTHVRRLLVEAAQSYGRGKAGYKSKALKDRQEDNPPQVIAYADRANERLRRKYYNMLFRGKKANVAKVALARELACFIWGMMNEKLA

SEQ ID NO: 77347 - protein, 414 aa, unidentified
MRNIYRKVKKFKGKILIVTIDIGKNSHTGYWRCYNGIDCCPFEFSNTRSGFDIFMQKILAIKNKYAAESIIVGYESTGPYGKPLIHYLRNCPVRQVLVNPMHTKRLKELGDNSPLKTDKKDPRVLADIIELGHWLSVVVPTGFAAELRELANSRESLISLRSSDYNRFQNLLSVLFPEFLTVMKSVRTKSALFILDRYPSTDAIIEAGCDNVAKILHTISRGQLGIERSIMLVKAAEHSVGVREGKESMAAEIRFIIQRILLYNRQIKKKEEMIKSYLSQIPVSRNLLSMKGIGIITVGVIIGEVGDFNAFSSPRALIKFTGLNLYEISSGEHIGKRRISKRGRHLLRKVLFFAAINVIRKDGILHDYYHRLIDNGMLRMKALIAVMRKLLKIIFALARDKSYYIPEYSLKNVA

SEQ ID NO: 77348 - protein, 375 aa, unidentified
MKVYVGIDAHTTNYTLATADTFEKPVFNVNSYSPKISNIVAYCKDIKKHFGNETEIITGYEAGTLGYSLRRDLEKHGITCIVMAPSTIAGTELNRKRRRKTDKRDAAAIAKALLTHSYSEVHMLDEEDEAVRDYIRLREDIKQEQKRVKQQIGALCHRHGFHYNDGNYWTKKHIAWLRTLPVEGYLKETLDGYIRTFDYYTDRINECDIRISEIAETDRYRESVHKLICFKGIRTLTALALIVEIGDFTRFLKAKNFAAFLGLVSGEDSSSDGQQLLGITKQGNRFLRRLLTEAAQCFSRSAASTKSKEFLRRQRGNTEEIIAYADKANIRLRKRYYHLVNRNKKCANKANTAVARELACFVWGMMTGNTHTVLA

SEQ ID NO: 77349 - protein, 407 aa, unidentified
MEVVNPRCAGLDVHSRRISACARIVTDRGVSREVCSFGTSTHELRAMADWLESKGCTHVAMESTGVYWKPVWHVLEGRFELVLANASQVRNMPGRKSDVSDATWIGELLAHGLIRPSFVPPAPVQEMRDLTRTRKQLVREISRHTLRIQKTLEDANIKLAEVVSSVLGMSGRAILAGLVRGETDPERLADLAATGRLKASRDQIVEALRGTVTDHHRFMLKVHLDQIDQLERAVREVEERARAGPFRAAIELLSTIPGVSETTATVIVAEIGDDMRRFPTAGHLLSWAGLCPRMDESAGKRLSNRTRRGAPWLKTVLVQAAWSASKKRDSHFRARFLRLKSRRGPKKAVVAIAASILTAAYQMLKTGAEYQDLGPKHYDHIDRVRAADRLRRRLQALGYRVTMEPAA

SEQ ID NO: 77350 - protein, 348 aa, unidentified
MNNLHYIGFDVHKKTISFCVKTAAGEIVEEGSMPARRAEVRQWAGARSQPWRGAMEATLFSGWIYDTLQPYGEQLEMAHPAKMKAISAGKKKSDTIDARTIADLVRCNLLPACYVAAPRIRELRRLLRYRSLVVSEAVRMKNKMAGLLMETGALYVKEKLHRKKYFATLLEELEEVPPSLIDLLRLSRSALEMFESTQKRLVRELLADPELTQRVERLMTIPAVGEITALTWALEVGDPQRFRCNSDAMSYCGLTAALKSSAGKQQRGPISKQRNRWLQTTLIEAAKLAPRWNPQLAALHARELECGHRNRATLAVARKLVAYLLAVDKTGQPFQVRAAAEAPTQKAA

SEQ ID NO: 77351 - protein, 346 aa, unidentified
MLHVGLDLSRKRVDVCLISDQGELLGHFPAPADRDGLYGLVRRVGVYNEPVRGVIESMNGARFVHDELVGHGWEVLIADAQRVKGLAPLACKTDKIDSRVLAELSFRDLVPAIWLPTPGLRRERERSRWRLHLVKHRSTLKNRVHSTLIAFGHQVPMSDLFGLAGRRLVTELEIPQPWRGHVDASLQLIDDLERRISEIETELARCGADHRYVPILMSAPGFGWVVSFTVASEIGDINRFSTPVKLTGYTGLCPRVSQSGDMDRRGPLSKHGPKYLRWGLMEAAIHAAAHPLYKERYQRTKRRLGRQRGAKVAQIDLARKLTEAIWYMLTRNQPFAPAGALHHLAA

SEQ ID NO: 77352 - protein, 482 aa, unidentified
MKKRNIYQNQSQELLSLFEQAANNAKVMCVPIDYAKKDHVVMFCNGYGDILRKPFSVKNSPQGVDYLTDQVIRSCHQRSISQKHVFFGGEQVGSFADNFISSLRNQGWLVAGVNAHEAKTQRENLQASTDRLDLMGIAKSMLNRRANCSPAQSGIYLNMRTLVRHRRKLVGITTEVRNRIHAVVDRLFPGFLNESKSGITPFSNSSLWLMKERFSAPQIRRRRRSTLIESLRRLGTKKPEDTADTLQQYATQVLKPPQDYVHILQLSLAQHVKHFCCLQESIGQLETEIALNLAQTQGAFLTSVRGIGIVLAAGVSAEIGNPFEQKPLNNLVSYCGIIPRVKQTGGPQGETKTGKVAKRCNRILKDYAVQSASHLGLHGPADLMSDYKRRDAAGQHADFGMARRYLRMAMCLMRTSQIYLPSRLRKAQAQVKQRADYYLMSWPYLRDKWQKLGTLETAFKADHPLGQWRTIVQQFYGIKLTL

SEQ ID NO: 77353 - protein, 351 aa, unidentified
MWIIGVDYHPSVQQIAFVNTDTGECGERRLSHSDREAEKFYRGLKAEGCKVRVGMEATGYARWFERLLAELGFELWIGDPAKIKAKRVRKQKTDRLDAELLLQLLLEDRFPRVWVPSPENRDLRQLLWHRHRLVQMRTRITNQLQAVAMNEGVRRKKALWSKPGRAQLESLPLAPWAARRRQDLLELLDRLNPTIEELSAAVEQQVKHRPEVLRLMTHPGVGPITALAFVLIIDSAERFACGKQIASYVGLIPGEDSSSDRRRLGHITKQGNSLLRFLLVEAAQAVVRRDPDWRRRYTHLAMRRDKRIAKVAMARKLAVRLYWMMRKEWNYEQLKKFGSYAGESEHGHGVQ

SEQ ID NO: 77354 - protein, 352 aa, unidentified
MENSSKVASRWVVGMDLGDRFSQVCRLDWDKGAIQEERRLSMTASSLQRYFSVLEPSRVILEAGTHSAWVRRLLESLGHEVITANPAKLQAITSSQQKTDERDARCLAQLGRVDPALLSPVHVRSELAQEALAVVRAREGLIKVRTALVNQVRGTVKAFGARLPGCSAKSFARKVREVLPDGLKAALEPLLAMIGDATDHIQAFDRDVEAWARRLEVTQRLRQIRGVGPLTALTFVLILDDPHRFAHSRAVGAYLGLVPASRSSGRSTPQLSITKQGDRLLRTLLVQAAHYILGPFGADSDLRSFGLELSRRGGKNGKKRAVVAVARKLAVVLHRLWVSGADYEPHRQPVAA

SEQ ID NO: 77355 - protein, 435 aa, unidentified
MCYVDDIRLEQFRQLKKEIRGSEEYLIIGIDVAKEKHRAFFGTAQGKTLLKNVVFDNTIEGFEKLDAFVDRVKVQYSLQKVVFGIEPTADYHKPLAEHLLKCGLMVVFVGGTAVKNNRQLLNGRWDKNDDKDSANIADLIAQGKCMFYEYPLMTLQNVRVLNAVKRRLKKREHGISAYIRNHILAQYFPELDKYYGSSETLAVVRECLDPSAIAGMEYDDFCRTVAPGKMTLARERRVGAIWRTAVNSVGCTMGEAAFHEAQIAVDSLKRVRQEIKTVEDKLEDACLEFPEYTYLLSIPGFGPDVSAKVLGAIGDPHRFTSGKQVLRLAGLDLCAKRSGKTSNRATPIISKQGKADLRCALYQAAFIASIKSKDFIPYFTNKLAGRAKEKGIGTKMRVKLAAKLLIIAWTLMKKKECFDPKYLKLGNRVEQKTAA

SEQ ID NO: 77356 - protein, 369 aa, unidentified
MNDITYVGLDVHKATVCVAIAESGRGGEVREVGVFENRPDVLRKMVARIGKHRRRLNFCYEAGPCGYGLHRLLTGLGHDCVVVAPSLIPMKVGDRVKTDRRDALMLAKLHRAGELTPIWIPDAAHEAMRDLVRARATAVRALSKARQHLQGFLLRHDRIYHGARAWTLAYRRWLTTVRFDHPAQQIVLQDYIHAVEDAESRRDRLTRQIEELMPSWSMAPVAVALQAMRGVALVAAVTVVAEVGDFRRFTNARQLMAYLGLVPSEHSSGSTVRRAGITKAGNALARRVLIEGAWTYRMSARVSRKLHDRLEPLSAAIRDIAWKAQVRLCARYRRLAAIGKPKVVVTTAIAREMVGFIWAIARVAQPELI

SEQ ID NO: 77357 - protein, 354 aa, unidentified
MQIVSALDVHRRQITYKTVDLESGQVWRGRISPGARGAVREWLARFDGRADVHVALEGTTGWRFVVAEIERAGHRAHLADPAETAAKRGRKRRAKTDHADCDLQLKLLLSGELPESWIPPAHLLEPRTRVRMRKTLVDQRTAWQQRLQAQLFHQGVPAGLRPRTRVGREALARVELSPAGRALVLLALRMVDTIDRELAPLDRELRAYARRQPGCRALMARLYGVGPVSATAILAELGDPRRFARSDDAVRHSGLDITVYQSDSKRAPGHLSHEGPEPLRWALFEAAQQAARAGSPVHGYYRQVAGRIDHNRACLSVARKLCRRAYHILRELGEEALAAVEGGPYAEEAIAAAA

SEQ ID NO: 77358 - protein, 399 aa, unidentified
MEKHVSLELRVSVDVGCRSHNVAIGLSSGEVLDEFSITHEPEGFRQFFSRIEKQERRFGCPVAVAMEGYNGYARPLDTLVRARDYRLFNINNLKLARFKEIFPGAAKTDAIDARKGLELFQICDHLPMAKDVLQEVRKTPRDNEILKRLSRRRRRLVDERVRVLNNLQSDLHATCPGLLEITGEADNLWFLNFLTSTDDLRKLARMREATIRKIPGIGKTYASVIINWQKRAQFSHDVEWVGAMIQEDAARVLELRDKIEALEAKMEDVALGSNIAKTLATIPGFGAICTAELAGEIGTIDRFNNEASLALYLGMANLDNSSGKQKGSKPPRQVNARAKAAMMIAVDRHRKKVLQSQRYYEKKRAEGKKHNQAVRALGRHLCRVIFKMLKEDRGYISSQ

SEQ ID NO: 77359 - protein, 412 aa, unidentified
MNAVGIDVSKGKSMVSVLRPFGELVAKPFEVRHTSSELSELAKRLKSLEGETRVVLEHTGRYYEPVAQLLHDAGVFVSAVNPLLIKEYGNNSLRKVKTDRADSLKIARYGLDNWTELRQHTPMDTIRYQLKSMNRQYGLYTKNKTAMKNNLIALLDQTYPGVNTLFGSPVREDGSQKWVDFAASFWHVDCVRGIGQAAFVERYRKWCKRHGYNLRADKAAQIHTGAKELIAMLPKNSLSKVMVQEAIAQLNTVSKTVEVFRAEMNRLAKELPEYETVMSLYGAGKSLGPQLMAEIGDIRRFAHKGSLTAFAGVDPGANQSGTYDAKSTRSSKRGSPELRKTLFVLMTVLLQSAPPDDPVFQFLDKKRAEGKPYYVYMTAGCNKFLRIYYGRVKEFMNTLDMPVDMDSTALCQ

SEQ ID NO: 77360 - protein, 410 aa, unidentified
MALFCGIDWATDHHDVAVVDDDGRVVARGRVGNDAAGFAQLLMLLAEAGDTATQPMPVGIETDRGLWVAALRETGRVLYPINPLAASRYRARYGVSGAKSDATDAVLLANIVRTDARAHRPLPADTGLAQAIRVLARAQQDAVWSRQQIGNQIRDLLGDFYPAALIAFAELPSGGLARADARAILAAAPTPTQAAKLSPARLRKLLIKAGRRRDLDRDVERLRQIFTDTYLHQPPVVENAMGIQLDALLRQFDAACAAADELAEAASAHFELHPDAAIITSFPGLGNLTGARVLAEIGDDRSRFADARGLKAFAGSAPITRASGKKTVVLHRHIKNRRLAAVGSIWALASLRSSPGARRHFDARRAAGDWNRQAQRHLFNKFLGQLHHCLQTGQLYDEHRAFPPPLPHAA

SEQ ID NO: 77361 - protein, 353 aa, unidentified
MVVVGTDAHKYSHTFVATDEVGRQLGEKTVEATTAGHATAIMWAREQFGLELIWGIEDCRNMSARLERDLLAAGQQVVRVPTKLMAQTRKSARSRGKSDPIDALAVARAVLRETDLPLATHDETSRELKLLTDRRDVLVAQRTSAINRLRWLVHELDPERAPAARSLDAAKHQQALRTWLDTQPGLVAELARAELTDIIRLTGEINTLAQRISARVHQVAPALLEIPGCAELTAAKIVGEAAGVTRFKSEAAFACHAAVAPIPVWSGNTAGQMRLSRSGNRQLNAALHRIALTQIRMTDSRGQAYYQRLQDAGKTKRAALRCLKRRLARTVFQALRTVHQPSSEHTQPAGRLP

SEQ ID NO: 77362 - protein, 341 aa, unidentified
MEQYVGLDVSMRETSVAVRQNGKRVWRGKCPSDPKALADVIRQRAPDAVRVVLETGPLSTWLYHALKAEALPVVCIDARHAKAALDMAPNKTDANDADGLAQIAEVGFYREVRVKGYAPMLARTLVGARGQLLRISIQLSNQIRGVMKTFGLIVPKGAGRVFETHARALLGTNEAVARVVLPLLEAWRAVRARAAELDRQLIAAARTSPACRRLMTIPGVGAVTAASFVAAVEAPENFGTSRAVGAWLGLTPRRYQSGEADYDGHISRRGDGHLRALVYEAAAAVLTRTRTDSALRSWGLELKEKVGFKRAAVAVARKLAVIMHAMLKTGAAFDPAPNTTA

SEQ ID NO: 77363 - protein, 360 aa, unidentified
MKKDTKVESGLTVGVDLGDRWSRYCVLDAKGQILEEDTIASTGRAFRSLFGERPAARVVIEVGTHSPWVQRLLQELGHETITANPRYVRLIYSSRNKNDRLDAERLARLARVDTKLLHPIQHRGGTTQADRALLRSRNELVECRTKLVNHARGIVKSIGGRLPSCSTTCFHKRVRQDLPDELKPALTPVLDTIAVLTKKIQCLESRIERLASKRYPETGLLRQVSGVGPLTSLSFVLTLEDPARFKSSRAVGPYLGLRPRQSQSGDKDPELRITKAGDTDLRRLLVGSAHYILGPFGPDTDLRRWGLALAARGKKSAKKRAVVAVARKLAVLLHRLWVTAEVYEPLRSDRSAIVPQAASM

SEQ ID NO: 77364 - protein, 467 aa, unidentified
MAKKAKKIRKDKRLELKVVNPDAAGIDVSSTEMQVCVPLDREADNNRKFGVFTEDLDKISDWLVSCRITTVAMESTGVYWVPLYMHLVSRGIEVYLVNAASVKNFVEEKTDEVDAESLMLMHAYGLLKPSYQVNNFAREIRNLSRHRDNLTRTAAKEVQHMQKSMELMNIKLDIVLSDITGKSGQDIIFAIISGERDAEKLACMADHRCKTPTDIIAKSLVGNWNEDLLFALKQSYELYHFIQKQIIECEQKIQTLAHKYSVNLPTQSSELIRSKKQIHPKTKVAFDVEAYGYKIFGVNLMRIPGINQGSLLKLVGELGHDFTEKFETYKKFCRWQNLAPNNKITGGRIISSKLPKRKNPVGQIFRELAVSMSSAKGPFGDYYRRIRSRKGPMGAIVATANKISKVVYTMVKNKTEYDESLIKMNDIDFVTRKLKSMQNGVAKLQAQIVEYQKEKASHAVNYMPVTV

SEQ ID NO: 77365 - protein, 387 aa, unidentified
MNVQTVNNLPPAAADDAIVRCLLAIELSKKSWIVAVNTPLSEKISRYTLKGCDWKGLLELIEKIRTRVARELNRPVEIISCYEAGYDGFWLHRLLEAHGVRNHVIDPASVQVDRRARRAKTDNIDVAQLLRSLMAYLRGDPKVWSVVRVPSVAEEDDRRLHRERHRLITERVQHVNRIKGLCAVHGIYDYQPIRSDRMLRLAQLRTGDGRKLPPHLKAEIVRELQRLELVLAMIKTIEAERKAIISAKTPHVNVTKIQDLIKIKSIGPGIATVLTGEVFYRKFNNRQQLGSYVGLAPSHFQSGPMSRDQGISKAGNPKARTVMIELAWIWLRYQPNSPLSVWFHERVGTAKGRIRRITIVAVARKLLIALWRYLETGLVPTGAVVRG

SEQ ID NO: 77366 - protein, 322 aa, unidentified
MEVTHGNYVGIDVAKDRLDVVLRPTGEYLGTTNDERGIRAVVLHLRKQEEEIALVVLEATGGLEQPAAAALALAGVPVAIVNPRQVRDFAKAVGRLAKTDRIDAAVLAHFAEAIRPEARPLANEQARELAAVLLRRRQLLAMITAEGNRVRTAPKTVGKRIEAHLRWLRKELTRANEDLARTVRESPVWREKDDLLRSVPGVGPTLSATLLAELPELEHLDRRQLAALLVGVAPLNRDSGTLRGIRTVWGGRSGVRTTLYMATLSATRHNPAIREFYGRLCAKGKPKKVALTACMRKLLTILGAVLRNRTPWDAEHLTQETT

SEQ ID NO: 77367 - protein, 358 aa, unidentified
MQTSGKNIFEGQLTIGLDLGDRSSAYCVLNAAGEIVLEHRLATTPEAMKQVFGSLPRCRIAMETGTHSPWVSRLLMALGHEVIVGHAQKVRLITKSRKDDRLDARTLARLARIDPELLSPVKHRSAQAQLHLTEIRARAALVSTRTALVNAARGLVKSYGERLRKCHTQQVGREMTRELSMGLREALKPLLQEVESLNERIKEYDRRIEKMAKEMYPETALLKQVKGVGDLIATAYVLTIEDPHRFRKSRDAGCFLGLQPGRRNSGESEPQMRISKEGDEYLRTLLVQGAHYILGPFGEDSDLRRWGQKLSARGGKNAKKRAVVAVARKLAVLLHRLWVSGEVYEPLRNSQKPMSTAA

SEQ ID NO: 77368 - protein, 371 aa, unidentified
MNASPERIMYMAMELSNKEWKLVFTTTGGKLRLRTMAARQLTRLLAEIATAKEKLGLPKEARVRSCFEAGRDGFWIHRFLTQQGVENLVVDPASIEVDRRLRRAKTDRLDAQSLAGRLVRYWENPAEGRTWRVVRVPSEEDEDARRPRRETERLTEEQTGHLARIRSLLVLHGVSVKRVTRAMVTSVKDWADRELPAGLRAELIREMDRLEQVREQLKALTASQEKALAKPTTAGGKAAAKLIRLKSLGVATAATLGYEFFGWRNFRNRRQVGACAGLTGTPYDSGGQRREQGISKAGNRRVRQMMVEQAWRWLHWQPNSELARWFRERFGTGGGRLRRVGIVALARKLLVAFWKYVAFDLVPAGAVLKTA

SEQ ID NO: 77369 - protein, 317 aa, unidentified
MTAKNDEIFVGIDVAKATLDIAVHGDPAVTQQPNDADGIAAVVATLAKLAPTLIVVEASGGWEMGLVAALAAAGLPVAVVNPTRVRYFAKAMGQYAKTDKLDARLLARFAERVRPEVRPLKQGDQALLSQVISRRQQLVKMLTMEKNRRSTTQGEMRTQLNSHIQWLKAEIKALNDKLHQLIDASPQWQAKEQVLRSMPGVGPVTALTLLADLPELGELNRQKIAALVGLAPINKDSGNKQGKRRIFGGRVSVRCVLYMAALSAAKTNPVISTFYERLVAKGKAKKVALTACMRKLLVMLNAMIRDMQPWQIEAKIA

SEQ ID NO: 77370 - protein, 432 aa, unidentified
MDHRLQVGIDFSQKRADFCLLFPDGRPLESHTAVDNSYLGYSLAKRLLLDALDSYSFDGVDVSGEATGYLWLPFFLQLAADPELELHDLKLYLLNPRWVKWFKKCFAQDHKTDERDPFYIAERTRTRRPDVTWSAYPDILALRFYTRLRFHLVQNLAREKCYFSTFLFLKASSYRRLKPFSDVFGVTSRLVLTQQPGLDELAELPVEDLALQLHEMSGHHLRDPFNNARKLKQVGQQSFPLDERLALPVQRILDLTLEHIRFLEGQVEQVNRWIATELQAHPSITQLATIPGVGPVFSSGIGAEIGDTQRFLQGFKWDKKHKRHRSRNLRDAEDAVAKIAGLWWPRSSSGDFEAEDRRMAKTGNRYLRYYLIQAANLMRKRIPEYTKFYDRKYYEASKHHHKRALVLTARKSVGLVVGLLHRNEPYRSLEHR

SEQ ID NO: 77371 - protein, 313 aa, unidentified
MSTHPLVVGIDVSKTHLDVALGSTGPLFQVPYTQEGLQTLANRLQGATLVVMEATGGLETRLIQFLTLAGFPTARINPRRVREFANATGTLAKTDRIDAHILAWYGEALHPPVTPVPDENRQRLEALITRRRQLIEMRVAEENRLASAPDVIRPSIQQHLEWLQEQISALDEEICQLLQSVPDWAEKVEILQSVPGVGIVTAATLLAELPVLGQASHKEIAALAGVAPMNRDSGRRKGKRHITGGRPSVRQVLYMATIAAIRCNPVIRAFYRRLLAAGKEKKVALVACMRKLLTILNALLRKRQRWNPASAAY

SEQ ID NO: 77372 - protein, 376 aa, unidentified
MDKASASCPITWVGMDAHKETIEVARLVGMSSQVETWRLEYTPQAVRRLARKLRRDAGESEVRCCYEAGPVGFTLKRLIEASDQGLVCEVVAPSLIPVKPGERVKTDRRDARKLASLFRACTLTEVHPPTPDQEAVRDLCRCREDAKQDLLRARHRLSKFLLRRGLIWRDGRAWTRRHWSWIRSLEIGHPADRQTFDSYLLFIEQIIARVGDLERAIAAAGQHESYRGAVNALRCFRGIDTITAVTLAAELHDISRFQKPRELMAYLGLTPSVHASGGQTHRGKITKAGNAHVRRVLVEAAWNQRHTPGIGVALRRRRDGQPRWAIAQADRAMRRLYGRYARMLHRGKPQGTIVVAIARELAGFVWATLQTSAAAV

SEQ ID NO: 77373 - protein, 352 aa, unidentified
MIIGVDYHPSFQTIAFLMEETGEYDERELSHNDGEAERFYRDLQQRGIRARLGMEATGYSRWFERLLSELRFELWIGDPAEIKAKRVRKPKTDREDARLLLRLMREDRFPRIWVPSPENRDLRQLLWHRHRLVQMRTRIMNQLQALAMNEGMRWKKKLWGERGRSELEKLVLAPWASRRRQELLELLDQLNPTIGELTAAAEQEANKRPEALRLMTHPGVGPITALAYVLIIGTPQRFPRGKQIGTYIGMIPSEDSSAGKQRLGHISKQGNSLLRYLLVEAAQAAARINPEWRRRYIHLAMRRHKSIAKVAIGRRLAVRLYWMWRNGCDYSPSLEFGSYAGQLEKRQGQTPR

SEQ ID NO: 77374 - protein, 342 aa, unidentified
MEQVSIIGIDLAKRVFQAHGAAANGSVVFRKKLSRSQFLAFLAAQPRCTVAMEACATAHGWGREIGKLGHEVRLIPPIYVKPFVKRQKNDAADAEAIAEAASRPTMRFVAVKSEEQQARSMIFRTRDLLVRQRTQLINALRGHLAEHGVVAPQGTAHVKRLADVIGDETAALPATVRQIGRLYLEQIDVLNGRIDALGKKLRAEAGQGEATRRLQTMPGVGPITAVAIESFAPPMETFRRGRDFAAWVGLVPRQNSTGGKQRLGRTAKMGQRDIRRLLIIGAMAVVNSAARHGAPEGSWLERMLAKKPKMLVAIALANKMARAVWAMMTKQEDYRYPAAVAA

SEQ ID NO: 77375 - protein, 341 aa, unidentified
MEYIGIDVHQRESQVCIVAEDGRVLLERRVRTRGERFTALLEGRDRARVVLEAATESEWVAQALEALGHEVIVADPNCAPMDATRSRRVKTDRRDARTLADACRLGAYRVTHRTAAAPRTVRAQLAVREALVRTRTRYISVLRAVLRRDGVRVPSGGAATFGQRVQTLPLSATQARLVAPLVAWLKPLNRQLAALEAQLARGVAAHAAARRLCTVPGVGPVTAAAVVATLDDVSRFASADQVAAYVGLVPRERSSGEQQRRGPLTKAGNSRVRWRLVQAAWAYWRSRATVRTVLRRWVERLAERRGKLRAVVARARRLTRILFAVWRDASVYEPARVGAAA

SEQ ID NO: 77376 - protein, 345 aa, unidentified
MEKITRIGMDTSKQIFQLHGVNAAEEVVLRRKLRRKEMVAFLEKLAPTVIAIEACGGSHHWARLLGSFGHEVKLIAPQLVKPYVKRGKNDAADAEALCEAMSRPTMRFVPVKTAEQQAALMLIGVRDQLIRNSTQLSNAIRGYAMEFGLTAARGKAHLGPLLERIQADESLPKLARELFAIQGEDYRLLQVQIDNIDAKLAAWQKADDCSQRLMKIPGVGPISAALLKMKTPAPELFKSGRQYAAWIGLTPRDHSTAGKVRLGVITRAGDETLRSVLVVGATAAIKNAQRSGKTSAWLAGLLKRKPPKLAAVALANKMARVAWKLMVTGQSYAAKSAPAAMHSAA

SEQ ID NO: 77377 - protein, 365 aa, unidentified
MNFIGADLHKKSITLCVMDERLKILARKTVPCGQPDQIVESFRQFRPFKVVVEATASYLWFVELLEPLAEEIVLANPKKLRVIAESTKKTDRLDAQVLAEFLARDMIPRAYMPTPRQRQHRALVRHRQYLRGRMTSVRCKIRHVLADYNADRKDLFSARCGKSYFKQVALSDADGFVLKQLWSEWEDHQARLLATTRKIKAFIAKAPAREKEARAILKSAPGVGFVTAEVVLSEIGDVSRFGNAKKICAYAGLVPAVRQTGGKRSKDLHITKQGSGLLRWALVESAWRLVKSSPKWSALYSRLRKRCGSKRAIVAVARKLLCVLYAMLKTSTPYKIIPAATPAEPPEPTRKRLVRVSTAAQAVTP

SEQ ID NO: 77378 - protein, 350 aa, unidentified
MSPRNAPRPAAVYGVDIGKNIFHVVGLDSDGKPVQRVRFRRDTLMKFFERAAPAIVGMESCAGSQWIARRLQALGHKVRLIPAQFVKPYVKSNKSDIIDAEAIAEAATRPTMRFAAIKSEEQADLEAVHRVRDQMIGTRTRLINQMRAFCLEYGIALRQGAGLFKLDLPLVLDDLSNDLSPAMRKLLVDLFADLRQLEQRINDVTREIAAIADREDVARRLMTIPGIGALGATALLAAVGTGCQFQKARDLAAWLGLVPREYSTGGKQKLLGISKRGNRYVRKLLVHGARSCFRHLDRNRDRLGSWLDGLQSRTHPNKAVVALAAKMARIVWVVLTKPGALYERRDPAFA

SEQ ID NO: 77379 - protein, 360 aa, unidentified
MQLQDAFSIPKIFIGLDIHKKSWTVSIQTDLFFHKTYSMPSNAEDLYHYVERTFPDHAVDLVYEAGCCGFSVARYFLNLGWNVLVVNPSDVKRGDKERYQKTDALDSKNLSNQLKSGVLKGIFIPTEEHEQFTTLARHRTQVTKKLRQTKSHIKSMLLFHGIKVPDEFDNSNWSKAFITWLENIKFSSSCGDLALQGKIRMFKFIKSEYLEIANQMRAHCRKNNKKDYNLLKSIPGIGGYLASVILAECGDLRRFNNESQFSSYIGLVPGMYNSGESEKCLGITPRSRSQLRSYLVEAAWIAIRKDTEMQNYYRKHQGKNVKSVIIKVAHKMARRILSVIKTETAYQINRNIVPIAIGVE

SEQ ID NO: 77380 - protein, 386 aa, unidentified
MDESGKRLGSRRLPEGLTGIGQLHELIAQHAEEPDQVVVGIETDRGLWVGALTAAGYQVYAVNPLAVARYRDRHHLSGAKSDASDAKLLADLVRTDRHNHRPVAGDSADAEAIKVLARAHQSLVWTRTRHTNALRNALREYYPAALAAFEDLAHGDALGVLDRAPSPIQGARLPLTAIQSALKRGGRQRNIAARAREIAAALRTQQLAAPAPVAAAFAATTRATVGIIAELNRQIGELETTLAEHFETHPDADIYRSLPGLGVVLGARVLGEFGDDPNRYTDAKSRKNYAGTSPLTIASGKKRAVLARHVRNRRLYDALDRWAFCALSTSPGARLFYDQRRAAENTHHQALRALGNRLVGILHGCLRHHTDYDENTAWAHRTPVAA

SEQ ID NO: 77381 - protein, 470 aa, unidentified
MNHRRLVGIDLGVATAHTVRVLDGEGNVVAKRKAWPTVESLTAVEAAALAGCMEETRLEVVIEPTGPAWLPIAVFFTARGHRVFRVSSQKAADLRRFLSRHAKSNGIDADTLARLPLFDPGGLRPLVLPGAERAALDRRVRATDRLTRAGAEHKTRIKDLARQLLPTSPLAGDLGAADLAVLERYADPRALLRLGAARLTALIAKASRNHQGAERARQWLHAAQASLELYAGHPAVDFTGLAAEVATEVRLLRATCAELAAHAAERETHYQQEDPAALARSLPGLADVGGPALTACMGDPARFATGKRFRSFTGLTPKASETGETDRKGQPMSKAGSSLLRTTLVRAADTARKQDPQLAAIYYLQMTERGKDHLGALCVVAASLAERAWTVMRRGTPYVTRDTDGRPVTTAQATAIIAERWTVPPEIRARRRSKKTRKAPQKVLEGQYARGSLPRPTTSSPRRRSVKPVS

SEQ ID NO: 77382 - protein, 352 aa, unidentified
MQIVSALDVHRRQITYKTLDRETGEVQRGRIAPAARSDVRGWLARFAGCEAEFVLEGTTGWRFVVEEIERAGHRVHLADPAETAAKRGRKRRAKTDNADCDLQLRLLLAGELPESWIPPAHILELRTRVRMRKTLVDQRSAWQQRLQAQLFHQGVPAGLRPRTRAGREALTRVELSAAGRELVALALRMLDVIDLELAPLDRELGSFARRQPGCRALIAQLYGVGVVTATAILAELGDCRRFTSSDDAVRHTGLDVTVYQSDSKRAPGHLSHEGPEVLRWALFEAAQSAARRSSPDHAYFGQVRERIDYNRACLSVARKLCRRAYHILRELGEQALAPVEFDQAEEAIQAAA

SEQ ID NO: 77383 - protein, 355 aa, unidentified
MSEDKYIGLDVHQASVSVAVLDRRGKLTMECVLETKASAIVDFIQGVRGSLAVTFEEGTCAAWLHDLLQPHVNRLVVCDPRKNALLQDGSKSDRIDARKLAELLRGDQLSPVYHGDHGLRTLKELARSYLTLTQDLTRVMTRIKALYRSWAIPCSGAGVYAARHRSEWLAKLSQAGVGQRAKYLYQELDLLRPLHQQARCALVEESRRHPAVKRLRQIPSIGPIRAALLMALVQTPHRFRTKRQLWAYSGFAVETHDSGEYRYVRGKVQRNRERMRVRGLSGNYNRDLKNIFKSTAVSASTRPGPLRDFYLVLLAKGMRPSMARLTLARKIAAITLTIWKKGVDFDAKQLGRQAA

SEQ ID NO: 77384 - protein, 402 aa, unidentified
MDFESTKPIASFAVPNNEPGAEEMVTRIYEYLTPKSGLDRLVIALESTSFYGVHIANYLSTCPRLMPFHTEVYCLNPKSIANYKKSYIGLSKNDYIDAFVIADFARVGRITTKPWRGCQYLALQRLTRHRLHLVKALSREKTYMLSNIFLKFSEFNLLDDDEQPFSDEFGATASAVLTEFLSTEEIVDMPIEKLVEFICEKSRNRFPNPQKTAQLLQAAARNSYRLDKCLCEPLTVAIASSFTMISTYYAEIKKVNKAIENTIKGLNPNAFQSLMSIPGIGPVMAAGIMAEIGDITVFKSQESLAKYAGLVWRENQSGQFRADDTSMSKAGNSYLRYYLLEATSHIRLHCQEYSEFYYKKYAEVKTHQHKRALALTARKAIKLIFGLLAKNQLYSENRVGQS

SEQ ID NO: 77385 - protein, 361 aa, unidentified
MTGMVTYAGLDVHARSTHAAAIDVSTGELVRARFGPGVEEPVAWLAGLPGTVRACYEAGPTGFGLYRAAVAAGVSVEVIAPGKTPRGPSDRVKTDRKDAELLARLLLAGSLTSVVVPPVEVEAARELMRSHDACRRDLMTARHRVSKMLLRHGRVYPEPSTWTTRHRSWLARQQFDEPASELVSADLIAATDGISARKAAIAERLSRLAEDEQWWPTVARLRCFRGIDTLTAFALHLELGGDWQRFEHATALSAWLGLTPSLHQSGESSRQGSITKTGSTFARRLLVESAWHYGRDPRIGATLQNRQQGQPDHVLQIANRAQQRLHRVYHRMRSRGKPHNVTVVACARELACFLWAAATID

SEQ ID NO: 77386 - protein, 373 aa, unidentified
MPKYSTAFRMDVHLRSTTVCALDADTGEAVTRRFPGNPWGEIAGWMDGFPGPSLAAYESGYLGFAPQRELAGLGVECVVAAVSKIPRSAADSASKNDRNDAARMAKAILAHDISPAWVPSPEVEGIRDLAGAYDGAAARLATAKQRLLAFLGKRGFVYGGTTPAGNPRKYWTYDFLRWLDKVRPEDDGGVRTLAALRNEAEAAAGARADLLSEYRAAADASPIAAEVAALQSIKGCAFALAAAFSAEVGDFTRFRSGRQVTAYFGLAPSQRSSGGSVRLGGISGAGNALVRKLAVEGSWCYAAARHQPKLMPRDTGVPLEIRMHGRKGSERLLRRREEMLARGVPAAKANAATAAELVRWLWALGMMCREGAE

SEQ ID NO: 77387 - protein, 440 aa, unidentified
MAMRKRNEEVFPNAAGIDVGASSHWVAVPPHVAEDSVREFGTMTDDLNGMADWLLACGVDTVALESTGVYWIPVHEVLEQRGLKVWLVDARQLKYVPGRKSDVQDCQWLQKLMSLGLLRAAWRPAGEVCVVRAIVRQREVLLTEQARWVQRMQKALVQMNLQLTEVLSDIMGMTGEAIIRAIVAGERDPQVLARLRHRRVKASSEDVVKALTGNWREEHLFVLGQALAMYDDIARRLTECDAKLQTLLAERGQTQLDLGQAPRSGSKLATAFGLRQALANWAGVDLTRINGLGVTVVMKLLSEIGPDLSRFASVKHFCSWLGLCPGTKISGGKVLASSTKRSANRARHALKMAAMTLSHSNSALGAFYHRLCARMDKPRANTAVAHKLARLVYFMLTRGEQFVDQGQQRYEEQQRQRSIAALKRRAAAFGFQLQPTAVAA

SEQ ID NO: 77388 - protein, 445 aa, unidentified
MHYKRLLTLIDSVSSYLSVGLDVGADFTWMSIALPNGAFIGKPFKIVHSDPRSRDLAVTKIKEAQETYSLKSRCFLESTGIYHIPLLCFLRDKGFDCSVINPIITKNSTNINIRKLHNDKFDSKKAALVGLNVSLKTSIIPEDSIVDLRNLVRDYYYFKDLQSAVALKLTAELKMSFPAYAKVFSKVTTQSSLKLLSSYPLAGDMLEASKDDIVETIRSTARFGEAYALRKYDAVIAAAQDASVFGRALPSNAVRIRLYIDTYQEYQKHLDALLKALHETVERLQDTLIYDQICLLQSLRGIGFLSAVVLIAEMGDFKLFPSPKKLYAYFGLDPAVKQSGKLNGDKVHMSKRGSSLARRVLHMVALNNVKVDKGSGTPVNPVIYDYYTRKCSGKKKPVAMGAVMHKICNIIFAMLRDNKPFEIITPEEHCQRFAAEYPDKIRKAA

SEQ ID NO: 77389 - protein, 363 aa, unidentified
MKSMIWLGLDVHAASITIARYDGDATKGSVTTIVNTPTAVRRFVQRLPASPPVRACYEAGPCGYVLQRQLTALGIACDVVAPALIPRRPGERIKTDRRDADKLARYYRAGDLTRITVPTVAQEAVRDLIRARDDARCDRTAARQRLVKFLLRQGQRHPGRQWTKQFRAWVRAQRFAGPTQVVFEYYCAQVATLDERLTQLERAILELAATPELAPVITRLSCLRGFAPLSAMVVMAELYDLRRFATPRELMAFVGLVPSEHTSGPRHRRGHITKTGNSLARRLLIEAAWSYRHTARNTDRARRLLRTQPPAVRAITERALHRLTRRYRRLLGRGKPSTVAVTAVARELCGFVWALARTEAAAA

SEQ ID NO: 77390 - protein, 452 aa, unidentified
MIAAVVERCAGIDVGKKFLKVCVMVGPLHEEPRYEIRKIDCSDSGYQQLREWLKREGVTHVVMESTGPYWVPVFNILERDVKVVLANPAEVKNRKGHKTDDMDAWWLAHLLRHGMIRASFIPEKSTRELRELTRRRKKLIGQVAQERNRVQKQLEYGNVKLGNELSDVFGLSGQLMLKALVDQEQTPEQIAELAQGSLKKKKPQIADSIRGQCLSETQKELIRSSMRHMVFLELEIEQLDTLIGGLIERSKQKPQYELLQTIPGIKREAAANVLAEVGPEMKQFPNAAHMSSWGGICPGNNESAGKHKSRQTTHGNPWFRATLIESAWSASRTKGTAFQSKYDRLKPQIGHKRALIAVAHVMVKVIYYVLATGEAYRETTPEVLTAVQHQRLIRHHTRRLRRLTSWLPAEKLTPLQEWYVTHCVPSLDPPPPKRRGRKPKTSEPLDSAADQG

SEQ ID NO: 77391 - protein, 317 aa, unidentified
MLFSRLTERARKRAGEEFPIIAIQEAGLDGFSIHRALKQEGIESHIVDAASIMTSRRRRRAKTDRIDGEALLRALMAYKRGEPRVCAMVRVPTPEDEDRRRISRERNVLIGERVAHVNRIKGLLFSQGIRYEPLRRDRRARLEELRTGNRRVLPEQMKRQISRELDRLEVLLAQIKAVEAERNTMLAKTNDANLAPAKMLMGFKGIGAEFAMALWSDGLFRHFDNRRQVGAHAGFAPTPWQSGMTDREQGIAKSGNPRLRTTMIQLAWLWLRHQPDSLLSHWFQERVAGKGRRKLLIALWKYVTAGVVIERAVMKTA

SEQ ID NO: 77392 - protein, 329 aa, unidentified
MNYVGMDVHKHFTYAVVKDSQGNRLAEDKFTNDSVNFELFLEPYKPEETKIVMESTGVWEYIYEILEAMNYEVKLANPVKTKAIAYAKVKTDAVDASTLADLLRANLVAESYIPAKEIRKLREITRLRKMAAKQRIQTENRLHALLTKRGIFLPKKTLCKKSFEFLTELNDPSISEYLDLIELQRQKENSVEKRIEALAENNIEAKILMSFPGIGPIRAMEILAEVGDITRFPTADKLCSYAGLVPSIKQSGSSLRFGRLMKQASKSLKHVFVQTAWALTRTKESNCFQEFYKKLAKKKGKQKAICAAARKVCCTIHAMLRKKEEFRYS

SEQ ID NO: 77393 - protein, 355 aa, unidentified
MKRSTKYVALDVHQATTVASVREQSGRVIARCILPTEQAALVEFFGGMRGSVQVAFEEGTQAQWLHDLLVPLVDRVVVCDRRGQSRRGNKGDQGDADQLSHELRSGGLRATYHAGGAGRATLKELTRAYRGLVDDSTRVMLRLKALYRARAIRTPGERVYGVKDRLAWLEQLADRGARAHAEILYAELDVLRALRPKAKAAMVAEARRDPAWSVLRSIPLLGPVRVALLLATMQTPWRFRTKRNLWAYAGLSVVTHTSAEHEFIAGRPVRRRRAPLTRGLNPNHNRVLKDIFKGAALAAIGRPGSLQDFYRGMVARGMRPELARVTLARKLAALTLRLWKRGERFDPTKLTLQAT

SEQ ID NO: 77394 - protein, 346 aa, unidentified
MNSGKILEIVRKTSNGKIERFKTGTNADGETKLINWLKSGDTVVMEAGNQAFRIAKKLKALGYETIVLNPGEVATIYASLRKTDKEDALKLARLAERHPREELPEVSIPTDAEEDSRRLSTEQAFWTQSSTKAKNRLHSLFTQAGFTDITKKHLSTHKNREEYIKLLPERYQNEAKRLVKSLLECDFNLSEIASEMTEILKQNKGYAEIAMSMPGIGPVTTLAFLSYIGDCSRFSKGQQVSYYVGLVPRVDQSGDTIHYGKIIKRGCVPIRRVIIQAAWALVKSEYGGSLKQFYERLYPRIGKKKAIVAVARKMMETFYAMITNGELYRGVPQVFIDKKIKSYGLT

SEQ ID NO: 77395 - protein, 316 aa, unidentified
MNRQPHNEINVGIDTGQTMLDIYIRPLGEYQSFENNAEGIRAAVRFIRKFKPTRVLIEATGRLEMAFFCAAHKAELPVCVCNPIQVRKFAQSCGRLAKTDKLDAQDIAYYGETMKPNLSRLKPEKLRLLSDLLTVRGQCLDMSTMQKNRLQRMPKNVHKPIRNVLNSIAKEIARIDQKLDQLVAEIPHYQERVDQLTSVKGVGKVLAYTLLSDLPELGNLNRKEIAALVGIAPMNRDSGKHKGKRKIRAGRHKVRTVLFVSMLSAIQCHPTIKPMYQRLVAAGKPKKVAIIACMRKQLVILNTMVKNGTYWDENMV

SEQ ID NO: 77396 - protein, 347 aa, unidentified
MLHLGLDLSRKRLDVCVLDERGEKLAVTAAPPDTDGLRELVRRTATYGGPVHAVIESMTGARFVHDTLELAGWEVDIADAQKVKGLAPLACKTDKIDAWVLAELSRRDLVPAIWLPDPAVRGERERARFRLHLVRHRVMLKNRIHASLMSFGKPCPVSDLFGRQGRATLAGLDLPEPWTQNITTALRMIDDLGEEIGGIERELRTQGAQHPYVSLLQSVPGVAWILGYTIASEIGDISRFSSPKQLVGYTGLCPRVIQSGEKDWRGPLAKNGPKYLRWALIEAAVHAAQHPIYAEHYQRTKSRLGRQRGAKVARVEVARKLAEAIWHMLQTGSFFSPARSHYESGRI

SEQ ID NO: 77397 - protein, 350 aa, unidentified
MKIIGCDIHTRYQQIAMLDDATGELTERRLEHESGEADAFYRSLAGPVRVGIEATGPIQWFQRLLAELGQELWIGDSAQIRASAVRQQKTDQRDAALILDLLLANRFPRIWVPSPAERDLRQLLWHRHKLVRMRTMVGNQLHALALGQGLCRKAKLFTKKGRAELGGLSLGPWASRRRQELLTLLDQLTPSISELDRAVMEEAQRREEAVRLMTHPGIGPVNALAFVLTIGPISRFRRSKQIASYLGLNPSERSSGGKQRLGAISKQGNSMVRWLLIEAAQHASRFDPALRQDYQRLKFRRGSAVARVAIARKLAVRMFWMLRSGADYAQLVRMQGSPAATLVSRTTPLG

SEQ ID NO: 77398 - protein, 340 aa, unidentified
MAVIIGIDPHKLLHAAYAIDEHEQDLATVEVRADARQCDRLLEWAGAFECRSWAIESASGLGALLAQQLVDAGECVVDVPATLSARVRLLGTGKSNKNDRNDARAVAIAALRAPALAAVRPEDDATVLRLLTKAHLDAGRHRSQTCARLHALVAELIPGGIRKEVVVSQAEAILEAIEPTTIAGEQRLELAYDLLDDVRRLDAKLKRSKARIACAVEAADTGLTGIYGVGPIIAAGLIGYSGDVRRFPTAGHYAAYNGTAPIQIASALKNINRLSRRGNRTLNHLIHMAAVTQIRHTDTEGRRYYETKLEAGKTRRETLRALKRKLSDRIYRALIEDTKR

SEQ ID NO: 77399 - protein, 343 aa, unidentified
MKHYIGLDVSMKRTFICVINEHGKIIREGSENTYPHLIADYLEKLGLEEMTVGFESGSLTPYLLTGFKERAIDAICMDARKLSPILALKVNKTDKNDARGIAEALRSGMYTRVHCKPEESINRAVLLTSRRALVEQQTHLKNTVRGLLKSYGIRLGAISAKKFSAAVMNQIENCQEIIILSIKCLLDAFDKLVEETGKLDKKMLEIAHCDKVVQRFMTVPGVGPVTALTYKAEIFDATRFIKSRSVGAYLGMTPTQYASGEIQRQGKTSKCGSKELRFLLVEAGIVILTRSKKWSKLKAWGLKIMRKKGLKKAAVAIGRKLAVIMHRMMLEEKDFIYGEPKAA

SEQ ID NO: 77400 - protein, 391 aa, unidentified
MIYVGIDVAKDKHDCFITNSDGEVLFNVFTIANNLDGFNDLCQKIASVMEDVTKVKVGLEATGHYSYNLLGYLIDKGLPTYVINPLHTNLYRKSLSLRQTKTDKVDARTIASMLMSDVNLKSYSDTSYHNEELKSLTRYRFDKVKQRAKLKSSVSRLVCILFPELEKLVPTLHMASVYAMLSEFPGAKQVANAHLTRFTNLLSKVSKGRYGKETAIAFRNAARTSIGSNMPAKSLELKHTIKLIQELTSEIDEIENEIKLIMDEINSPILSIPGINYRMGAMIIAEIGDFNRFDSPDKILAYAGFSPSTYQSGQLDGAYSHMEKRGSRYLRYALYNAAKYVCNWDPTFAEYLAKKRAEGKHYNVAISHAVKKLIRVIYHLEKTNQQYIKAV

SEQ ID NO: 77401 - protein, 309 aa, unidentified
MATSSYVGIDVSKDRLDVAVLGEERGGQVDNTPNGIAKLVHQMENLQPELIVVEATGGYQRAVVEALFQAGLCVAVVNPARVRQFARACGLLAKTDKLDARVLAMFGQRVQPKPYTGKSEAEKHLGALLVRRRQLEEMLKAEQNRLRTTSPRLKSSVEQVIFCLKEQKKILDEQIRNFLTEQEAWQEQTDILSSAPGVGPVTTATLLADLPELGKMDRKKIAGLVGVAPMNYDSGKKRGYRKTKGGRTDVRSVLYMSTLVATRYNPLIRTHYQHLLKRGKVKKVALTACMRKFLTILNAMVRDQQPFRM

SEQ ID NO: 77402 - protein, 377 aa, unidentified
MSNLRFIGLDVHAETIAVAAAEPSGALRSLGVIPNRIESIRKLVKKLGSVKSLRVCYEAGPTGYVVYWQLTALGVKCEVVAPTLVPVKAGDRVKTDRRDALKLARSYRAGDLTPVWVPDAAHEALRDLVRTREAAKKDQLRARQRLGKFLLRHGRRPPAAMKAWTQAHVAWVKSAVRFDHAAQEATLLDYIHEVDHMTARIERLEAAIHAAVESAPARLRAVIEALQALRGVALVTAVTIAAEVGELSRFAKPRQLMGYSGAVASEDSSGPRTRRGGITKAGNAHLRRVIVEAAWAYRHRPTVGPTLRKRQATVSAEVKEIAWKAQHRLHGRYRALTARGKCKQQVVTAIGRELLGFIWAIGVHVESHTADGTPLAA

SEQ ID NO: 77403 - protein, 411 aa, unidentified
MSDQKSVEIRVSVDVGYRRHSVAIGLPSGEVLEEFEIAHRPEGFAEFFSRIEKQQKIRGCEVAVAMEGFNGCARPLDAMVRRRGYRLYNINNLKLARFKEIFPGAAKSDRIDARKGLELFQLSDHLPLAKEVLQEVKGTPRENEVLKRLTRRRRRLVDERVRVISNLQTDMQAVCAGLLEITKNAGNQWFLNFLVSAPTLSQLARLRPATLRKIPAVGRKYAGLIEDWQKRAHFSEEVEWVGEMIQEDAKRCLELDEKIKALRAKIKEVAKDSKIAKTLLSIPGFGTICTAELAGEIGTIERFSKEGSLALYLGMSTLDNSSGKYQGSKQPKHVNTRAKAAMMVALDRHRKYVPESQRYYEKKRSEGKKHNQAIRALGRHLCRIIYKLLKEEREYEIRPEKGNTTRSVRDR

SEQ ID NO: 77404 - protein, 338 aa, unidentified
MNLSRIGLDLAKQVFQVHGVDRHEHVVCRRQLKRAQVRDFFRQLPPCLVAMEACGSAHYWARELRELGHTVRLIAPQFVKPYVKGDKHDAHDAEAICEAASRPSMRYVPVKSAEQQAVQSVHRVRSRLVRARTALCNEVRGLLGEFGLIATRRGRAATMALLETVMATEPASLPAPMGELLRELKDELQTLEARIARLERQTQAHVRGDARIQRLLAVEGIGPISASAVAASAGDARQFRTGRQFAAWLGLVPRQHSTGGQQRLGNISKRGDTYLRTLLIHGARAVVRCCANKTDARSRWLQGLLQRRPANVVAVALANKNARILWALLSRETCYRPG

SEQ ID NO: 77405 - protein, 400 aa, unidentified
MTDISNVDVFLGLDVGKSAHHGHGLTPTGKKVFDKLLPNSEPKLRAVFDKLREKFGTVLVVVDQPASIGALPLAVARDAGCEVAYLPGLAMRRIADLYPGEAKTDAKDATVIADAARTMPHTLRTLELTDEITAELTVLVGFDQDLAAEATRTSNRIRGLLTQFHPSLERVLGPRLDHPAVTWLLERYGSPAALRKAGRRRLIEVIRPRAPRMAERLIDDVFAALDEQTVVVPGTGTLDVIVPSLAKSLAAVHEQRGALEAQIEALLEAHPLSTVLTSMPGVGVRTAAVLLVTIGDGSSFPTAAHLASYAGLAPATKSSGTSIHGEHAPRAGNRQLKRAMFLSAFAALHDPASRSYYDRCRARGKTHTQALLRLARHRTSVIFAMLRDSTFYEPRTPATA

SEQ ID NO: 77406 - protein, 338 aa, unidentified
MTMYAGLDVSDKLTHICVVDVEGMVLRRDVVASDPDMLARWLKRHCPGVVRVVLETGPLSTFLYHGLVERECAVTCICARHAKRALSARVHKSDVNDAESLAQLARTGWFKAVHMKAGATHIDRAALKIREQLVTARNAMANQLRGMLKLFGLRMGNVTTPGKRRERLDALFTQRPDLRCVFASLIESIEALDGQIARSAKLLAARAEADPVCQRLISVPGVGPITALTFKSSIEDPGRFARSSDASAYAGLVPRRSQSGERDYKGHISKAGDAMLRSALYEAANSVMVRLKRRCALQDWGRKLAETKGPKRAKVALARKLAALLHHLWQSDTDFCWN

SEQ ID NO: 77407 - protein, 356 aa, unidentified
MTIVAYSHPFVVGVDTHARKHVYSILAAPSGERIDTRDFPATGAGIDRAIAWVARLTGADPATLWVIEGAASYGAVLAGAVAAAGYQVAEAARMDAKTRRGIGKSDPLDAHRIASTVLSLEEDKLRRPRLNEGVRAALRVLVSARQSMTTDRTRTVNALTALLRVNDLGADARKPLTGTQILEISRWRAREEPLALSVARSEAVRLAKRINDLDADIKTNGNRITELVEISEAAPLLQEPGFGPVTAAICLTAWSHRGRVRSEAAFASLAGANPIPASSGNTVRHRLNRGGDRTLNKALHMAALSRMAFDPETINYTAKREAEGRTKKEIRRCVKRYLARRIYRTLNANSPMPSFR

SEQ ID NO: 77408 - protein, 386 aa, unidentified
MLAELVGKLKEKLDRKKVAARSAGEEHPGGELRPNLDRLTVGVDLGDQGSHYCILGLEGETLAEGQLRTTQEDLATFFQGLNAARVVVEVGTHSAWVQEVISGCGHEVLVANPRLMDGSKRRKRKNDRIDANKLARLGRVDPESLHPIQPRSREVRQDLVMLRARDALVAARTELINTTRGLVKSMGTRLPKCSSRSFAQKGEETVPVEIREALLPLVRLAAALSADIKEYDKKIETLGPEKYGHTALLRQVKGVGPITALAYVLTLENPQRFVKSRDVGPYLGLVPKQEDSGESQPQLGISKAGDTMVRKLLVGSAQYILGPFGPDTDLRRYGLRLCERGGKNAKKRAAIAVARKLAVLLHRLWVSGEVYEPLHNAMSAPIAAAA

SEQ ID NO: 77409 - protein, 417 aa, unidentified
MQHAPTTLPDAPANGVTAGIDWARDDHAVAVVDSAGRQVRRFTVAHSGAGLRELVAELTAARAAEVAIERPDGPVVDALLGAGISVVVISPNQLKNLRGRYGSAGNKDDRFDAYVLADTLRTDRARLRPLTPDSPATTALRATCRARRDLVAHRVALANQLRAHLQKVFPAAVGLFAELDSPIGLRFLARFDCQDRADWLSARRLSAWLRSVGYSGRVDPEVLHARLTGAPRGLTGDPGLAAAHITHAMLATLTTLVEQIKTLSEQISEQLAAHPDAHIFTSLPRSGRIRAARLLAEIGDCRARFPTPEALFCLAGAAPSTRQSGKTRIVSFRWAADKQLRDAVCDFAADSRRANPWAAQLYNDAIARGHDHPHAVRILARAWLYIIWHCWQNGVAYDPAKHKALQMLLARQQATAA

SEQ ID NO: 77410 - protein, 297 aa, unidentified
MRKLIAGMDLHSNNVVIGLIDMDGKRVAHQKVECRLSEVVRFLAPYKKRLEQVAVESTYNWYWLVDGLQALRYPVVLANPAGMEQYSGIKHADDTNDAFFLAELLRLKILPTGYIYDPQLRPVRDLLRRRLTLVHQRTALMLSFKSLYTRTTGQEMTLSRLKELEIKEAQDLYDHPANQLIAGMQIKHIEQLTESIEKVEKVVLDCARELPFYSKLTTLPGVGKILGMTITMEVGEINRFAEPGRFASYCRTVEAKRTSNNKKKAEQLQMRQQVFGLGVCGRGQFCAALRPAVPQVV

SEQ ID NO: 77411 - protein, 466 aa, unidentified
MKPFYMGIDVSKGYADFMILNSKKQPVAQNFQLDDTFEGHQSLYKLLDRFLGEHPESVLFAGVESTGGYENNWYNSLIEFQGSLNIQTARLNPLGVMHNSKADLKKNKTDKISAQNIAEYLIAHPEKVVYQKDDQLAGLRKQWGFIKMLTKQSTQFLNQLNTLLYTANPELLSYCQDGVPGWMLTLLVHHPSAAGLKNAHVKTVANIPYVSQMRAQQLIANAKRSVASATDPTTEQLIVATTRQILHLKKTIAEQMKLMITECSLSEIELLKTFPGISDTSAIGLIIEIQTVKRFAGVKKLASFFGVHPVYKVSGDGVSGFKMSKQGRKEPRQILYMVALSAIRYNPLIKETYEKHQQQGKHNMAAIGICMHKILRILYGMLKHNKAFDPQIDIRNRQRKVRVKSDTPVKDMNRRFQDYDQNAPVTRRQRKKRLERERPHNADDIKSGVTAPVPLADIIADILPQL

SEQ ID NO: 77412 - protein, 345 aa, unidentified
MEIRTIGIDLGKTVFHLVGVNARGEVVVRKKCSRTQLLRFTSNVPECLIGMEACAGSHFLDRALREQGHDVRLMPAQYVKPYVKTNKNDFIDAEACAEAVPRPTMRFVPIKTDDQLDLQSLHRVRERWVVRRTAVINQIRGMLLERGITVRKGRRHIEESLPGILEDPDNKLSGALRVMLHELRLEMQYLHRQVGECDKLIVRIAGELEDCNRLVAIPGIGPIIATATIAAIGNGAAFKKGRGFSAWLGVVPGEHSTGGKQKLTGTSRRGNKYLRKLFLQGAHAVLQCRTKQDPVLSAWLERLATRKRPQVAAVALANKMARMAWAVLSKGEAYRPPLATQTAAA

SEQ ID NO: 77413 - protein, 479 aa, unidentified
MGKGSGGSGMTRGDRRRNARRERLREMLPRDGAVIGIDLGDEKQAVAVVDHDVRVVARKTVRVKAFRLGEVLGWAVGQARAKGHAAVAVACEPTGARWLQVQRLCAERGLPLVCIQPLVSHIARQQQDYTTHNSDESDCVMIARLAIELHCYIPEELDEARAQLRHLGRRRAQLITAATASVRRVRDFLSVAWPVAAEACAHPFTSVTWLAAVQVVTSRCGGQPEKLAATGLAEFTALVRQAVAGWGGQRPASLVCRAVFAATASTEGVVISHRRALLRRCADELGDLQRTRAQLRAVEAGMAAVLGELGLSRLADIPGLTAAGAAAILAETGDPRRYDSSSSLDGHAGLSPSGNASGAFEGQAHISRRGRPGLRLTVWRAIWPLLIHNSVMAAKYTAMIAAADAAATAQAAQAQPGTGSRQASAAAAAQARRATARVACAASLLRWIYSIAGCDTGWDPDVASGTASQPAPRDQAEAA

SEQ ID NO: 77414 - protein, 492 aa, unidentified
MKPKPKRNSVYQSQNASLRALFERAGDPRKILCVALDYAKRKHVALICDGHGDILKSAFPVENNPDGIAFLIEQISATARHRKIPKNQIFLGGEDEPAYVANFTAALREANYLVMRVNAREAKENRENIIASTDQLDLIGIAKTLLSRRARVSGDKSPDNPAYHHLRELTRSRRTLVRQQTATANRIHAIVDQLFPGFLDDSKSGLTAFSAASIELMKDRFSATQIAKRKPTALAKTLRRLRVHHPDEASTKIIHLARNALPPAPHRIATLQRTLASAVDLHQCLTRNALELRTETALTLATTPYAMLTSIRGIGFVLAAGVAGELGDPANLGTADSLCCYAGIVPKTLQSGGPDSPPVQGHVSPRCNRILKDWIVQSAQKIHLYGVPELKDRITRWNAAGSHGLYAGARHYLRLLRTLVKNQVPYLPPSVRVRGASHDEFAAAAQDTWKVIQNKWRTIPSGLDLILDEAYPLGFWRRVIKETHDIQLPTRL

SEQ ID NO: 77415 - protein, 342 aa, unidentified
MEITTVGIDLAKSIFQVHAVDAVGHVVVRKALRRAQVVPFFAKLPRCLIGMEACGTAHHWARELMSLGHDVRLMPPAYVKPYVKRGKTDANDAAAICEAVTRPSMRFVPVKATEQQAALALHRTRDLLVKQRTQLVNMIRGLLAEFGIEMARGLRHALELATRLSAGDAAEVPPLAQRVVTGLADQIGALQIQLTRLEKELLAWHRDSDLSQRLATIPGVGIVSATALAASVSEPERFRSGRQFAASLGLTPLQNCSGGKERLGRISRMGDRYLRRLLVVGMTSLIRRAKTTPTSVDPRLPALLQRKPVRVVTVAAANRTARVAWAIMARGGTYRAPAATAA

SEQ ID NO: 77416 - protein, 359 aa, unidentified
MQVQSNKLNFEGQNIYVGIDVHKKDWTVCVFSEHLEHKKFSQPPSVDALKTYLHRHFPGATYYSVYEAGFCGFHVHTKLQAAGINNIVVYAGDVPTTHKEKVNKTDKRDSRKLGSSLRAKELKGIHIPSRKTQEDRSLVRMRHTVRKDLTRLKSRVKSLLNFYGIEHPEQFSLPGKHWSSRYMAWLETIVMEEESGRSALLTLISEVEEIRKIQLTVTRQIRALSRTTSYQKDYELISGIPGIALITGMTFLTEIEDINRFSNVDQFAGYVGLIPSCRSSGERENNGEITPRANKLMRNMVVESAWIAARKDPALHLAFCKLCKRMEPNKAIIRIARKLLNRIYHVLKTKTKYVCGKVE

SEQ ID NO: 77417 - protein, 332 aa, unidentified
MSSFTLGIDISKDKFDVALIDVALLDDERYQLGTFDNSKKGCLSLAKWLKKRQAKSAHVCIEASGRYGDGVATFLHEGGYAVSVVNPARIKAYGESRLKRIKTDPEDAKDIAHFCATQKPRLWTPPPPEIQELQALTRRLDSLKEDRTRELNRKKSGISSEAVLQNIEEHITFLDEQIALLEQQIDGLIKGQPDLRQKHGLLTTIKGVGDITAAKFLAEVPDISHFGSAPELAAYAGLTPKVHRSGSSVRRRAHLSKTGNKHIRTAFFMPALSAMRFNPIVRALAQRLEDRGKERMTIVAAAMRKLVHLAFGVLKTGLPFDPNYLVNMRETA

SEQ ID NO: 77418 - protein, 355 aa, unidentified
MAALADKVDGVIGVDTHRDTLSAAAVTAVGGLLGQLVVAADAVGYRRLLAFARIHVPGRRCFAIEGAGSYGAGLARMLVDGGEWVVEVDRPTRPARRSGKTDALDAVRAAREVLVQERPAVPRRRGDREAPRVLLATRHGALVARTCAINQLKALIVGAPEELRAELRSRSTSGQVAYCAALRDRPARSLEHRMTARALRATAQRTRALAIEAAELHDDIGRLVQAVAPWLLELPGLGPISAARVLVIWSHAGRLRSEAAFAALAGVSPIPASSGQVTRHRLNRGGDRRLNRALHTVALVRLRDDPTTRAYAARRRAEGKSPREIRRCVKRAVARHLFKLLCRYDRPEVEIVRTC

SEQ ID NO: 77419 - protein, 329 aa, unidentified
MTTNPPQIVFNHIVAFEVSKEKLVVHTLPDDGQWTIDNKPQAVRRLIKAEIKRNRKKQLGQMLVICEATGGYERHVLDVALEMNLSVHRAHGTRVRHFGHYCGLLAKTDPIDARLIGQYGLKTENIRLYSPPPPDTTALRALHARRTEIQQMLIAETSRLDHAQHKSVLKSLKAHIASLKAALAAIEADIAQLVEGSEMLRKKVALMQTVIGIGPISAMVVLAYLPDIGQLTKGQAARLAGLAPINNDSGKKRGARHVEAGRTAIRRALYMAAGVAMRANPILKAFSDRLRGKGYPFKYVVTAVMRKLIVILNAVLRDGESWKGAQMVA

SEQ ID NO: 77420 - protein, 412 aa, unidentified
MDILHPSCCGLDVHKEIVVACVRRIIGGKAHEQVRTFRTETNALLDMADWLTDEQVTIVAMESTGVYWKPIWNLFEGVFELMLVNPEHIKKVPGRKTDVKDAQWIADLLQHGLLKPSFVPDKPLRQLRDLTRQRVQLVRQKVQVGNRIHKTLEDCNIKLGSVASDVLGASGRDMIRAIVNGESDPVKLAEMARQRLRKKIPQLQEALCGEVESHHRFLLGMLMDQVTFLEGQIDKLSGRIEEVLTPPFQEVIERLDTIPGVDRRAAQNIVAEVGADMKPFASAAQLASWVGICPGNHESAGKRRSGRTTKGNKWLRVILVQCAWAASRAKGTYLQAIYRRLAARGGKKRALVAVAHRILEIVYNVVKKGQSYRELGADYLDKQEDKERLTQRLLKRLQKLGLKVTVEPVAVA

SEQ ID NO: 77421 - protein, 355 aa, unidentified
MEGTKYIGMDVHKDSISIAVLNSSGKLVMESIIETKAITILEFVHGLRGSLHLTFEEGTWAAWLYDLLKPHVTKLVVCDPRRNGYLKQGSKSDRIDARKLAELLYSNMLRPVYHGEHGVRSLKELARSYLTITKDQARVMTRVKAVYRSWAIPCAGKQVYGQRHRLEWLGKIQEAGVRRRAEFYYVQLDALRSLRLVVRRELLLESRKHGASKLLSQIPSIGPIRAALLIALLQTPDRFRTKRQLWAYSGLAIETHDSAENQYVNGQLQRSRKQASIRGLNQNHNHDLKNLFKSASAVAAAKAGPLQKFYDAQIGKGLKPEMARLTLARKIAAITLIVWKKGVSFDARYLNPQTA

SEQ ID NO: 77422 - protein, 342 aa, unidentified
MDEYDGRQFVGIDLHRQRSVIVRQSESGEQLSAVRIVNDPVALELQLEEAGADPEVVLEATYGWYWAVDVLQACGARVHLAHPLGVKGFRYRRVKNDVRDAADLADLLRMGRLPEAWIAPPETRELRELVRYRAKLVAIRSGLKAQIHAVLAKAGVLIAVSDLFGVTGRQRLAKVPLGPAYAQRIGSLLELIDILDGHEARFAAMIAERLDTHRGYQAIQQVPGIGPTLAAVFVAEIGDVHRFTDPAHLCSWAGLTPRHRESDTVVHRGHITKQGSKAVRWAAIEAVQRHPTTAKIAADKQRIEARRGKNIAKVAAARKLLTLVYYGLRDGQIRALDRARAA

SEQ ID NO: 77423 - protein, 371 aa, unidentified
MKSIIYIGMDVHKKTYSLCALLKETGEIIGETKIPADVSLIIKFIENAKKSVDSDDVQIKTGYEAGCLGYSLYWQLAAKGIECDILAPSTIHRSAKNKVVKNDRRDAKNIAANLANGTYKSVYVPTDEDVEIKEYIRMMHDFKIELKKVKQHINAFLLRFGHHYPGKSKWIPAHIKWLKELELSDMYREILDEYLSQLEILTEKIERFKHRLEELSQKETYNEKIGQLRCIKGIDTTAAMTMHAETSDFDRFPTANAFASYCGLTPGEDSSGESYHRLGITKQGNSMIRTTMVEAAQVLVRGTIGKKGKKVKSKQKDQDVKVIDYADKAVVRLQKKYHRMIFRGVKRNIAITAVARELACFVWGIETGHIS

SEQ ID NO: 77424 - protein, 347 aa, unidentified
MKDVSTIGLDLAKNVFQVHGVDGSGETVIRRQLRRGQVLPFFKRLPPCLVGMEACATSHYWAREITALGHEVRMMPARYVKPYVKRNKNDVADAEAICEAVTRPTMRFVPIKTPAQQSILMLHRTRELFVRQRIMLVNALRAHLAEFGIVAGVGRNGLEKLLEVIADDRDERVPPEARGCLLALRDQLVLAKQQILEADRRILAWHRASELSRRLDDIPGVGPLIATALVASIPDPQAFRSGRDMSAWIGLVPKQNSTGGKERLGHISKAGNRYLRKLLVVGALSVIRRAKQTGASRHPWLVALMARRSTKVAAIALANKIARIAWAMMVRGTRYQEPQCEPGPQTA

SEQ ID NO: 77425 - protein, 401 aa, unidentified
MRAVFGIDVSKASSEVAILVNGEKVHGYTMSNDAIGFARLLGDLRTVHKPEIIFEATGVYSRRLQTFLEDNGYAYTRLNPLEAKKQLDSLRVRKTDQLDAEKLAQSQFVLNRKTTYVQEEVYQNLRDLSRFYQNLTEDIVRAKNRLHKALQVTFPELENILSTPTGEQYWNLVIAFPCKDFVLKLSKDKLSKSIRLSTSKRISDKRVAYLAEKLIALANQSYCAVKKTSPILEEVRYYAKELLRLSEQRQVVLDEMVELAQPLPEYDILLSIPGIAETTATSIIGELGDIRRFQSANQINAFIGIDLRHYESGNFLAKEHITKRGNPYARKILFKCIHNIASASHTNPCHIADFYEKRKRQSQTTSTKPHTIASINRLIRTMYYLIMHNKLYDYASTQNRV

SEQ ID NO: 77426 - protein, 315 aa, unidentified
MYIGIDVSKGKLDVGCTTWESVEQYTNSSKGVAKLLKRISTATPELVVMESTGGYERLVSKALVGSGIRVAVMNPWQTHNFAKSLGLRAKTDVIDASMLAKFAEVVKPRASEIMSDQEFALKQLVLRRSQLVCQKTQEMNRLEHASPIVAKSIRKMIRSLRLEIKHITKNIELFLAKNEIMTKRAQALQSAKGVGLITAYSLCTLLPERGTLNRKQIAALVGVAPFNHDSGNKTGQRSISGGRPEVRSALYMATLTATRSNPKIKAFYKKLVSRGKKKKVALVACMRKFLVCLNAMLKAEQTWNDRPKSATTAKS

SEQ ID NO: 77427 - protein, 443 aa, unidentified
MAKTLYLGIDVAMAENVCCPLLEDGTEARRRFTVPNNLPGAEQLVKEILTLMDRYHLDHLLVGLESTNLYWWHLSCFLNSCSQLAHFHHSVYAFNPRLVRGFKKALPKTGRSDINDAYAVAERLRFGRLPAPFMPNELYQPLQRLTRFRCHLARQITREKNYFLTFLFLKFSEYQNLDPLSNTFGAASKAVLTDYLTVDEIVAAPLEELVSLLMKEGKNHFPAPEAIAAAIKKAARDSYRPHPSLKEPLNLILSATLENIRTFSQQVKKLDSAIEREERKFPNPLKSIPGLGPVFAAGILAEIQDVHRFPDQAATAKFSGLFWRTNESGSFQAEETSLDKSGNDYLRYYLIEGANSVRMHTVEYGRYYRTKYNESTKHKHKRAVVLTARKLVRMVDAMLRHNQLYIPQPLNPIEEVIPVLTRSRPAKQHHYRLPGSPVPTLSN

SEQ ID NO: 77428 - protein, 447 aa, unidentified
MPVIHQNAAGIDIGSQFHVVAVPPDRTDKPVRTFKSFTGELHAMAKWLKKCRVDTIAMESTGVYWIPAFEILESYGFEVFLVNARAAKTVPGRKTDVNDAQWLQKLHQFGLLQASFQPSQKIAGLRAYLRQREKLLEYKAAHIQHMQKAMMQMNIQLQHVVTDVTGKTGLAIIRAIVQGQNDPNELVKLRDPHCKNSLEVMTAALTGSYKPEHLFALTQALELIDFYVEKIEACDRVIESTLKQLQQENDSTSPPPTLQKARGRESSKNNPSFDVRQSLFSFIGIDLTQIHGIGSSVALKLIAECGTDMTKWPTSKHFTSWLCLAPCNKISGGKILSSRTRRSSSKVATMLRLAAVVVGKTNTALGAAYRRYAARIGKAKAVTAIARKLAILFYNALRYGMAYVDKGANYYEEQYQKKVINNLHRKADALGYTLQKKALSISAAGVS

SEQ ID NO: 77429 - protein, 338 aa, unidentified
MNNCIGFDISKSTINVHIPQGSLDLEIENTNKAIKSLYSKLKKRYKKEVNNLIFIYEPTGSYSYQLDLFCSLKNIKAFKINPKQSHNFAKAMGQRGKSDKVDARMLSRSLHVARVDEIRVPALNPVEKEIKELIGYYKFTTRRRVQASNHLEALTIKDGSVYAAKDLKKEIKNLSTKEKEIISKIKELIQNNETLNKKFINIKSIVGIGDIGAIALMHLFIKFPHANQREIISLAGLDPVERTSGSSIRGKSRISKAGSRLYRGALFMSAMVAVRFNDEIKVFYNRLKDNGKHTTVAQVAVIKKLIIIAHSLYKNDCTYDADFYNKQCGKITETVLLA

SEQ ID NO: 77430 - protein, 482 aa, unidentified
MKKKSIYTNQSQELLHLFEDAGNSSKIMCVPMDYAKKDHVVMLCNGYGRILRKPFSVKNSPEGVKYLTDQVSRSCRKRRIKLNHVFFGGEDVNSYAENFVNTLRAKGWLVAGVNAHDAKEQRANLQASTDRIDLMGIASMLLNRRANCSPAQSGIYRNMRTLVRHRRKLVAMSTTVRNQVHTVVDRLFPGFLDEKKSGIVPFTNSSLYLMETRFSAPQMARRKRDKLIEILRRYSTSKPEQTAAQLQDYAKTVLITPDEYRSTLQLSLAHQVKLLRCLGENIDQLEKEIAIWLTQTQGAFLTTVRGIGIVLAAGVTAEIGDPHQQKPVNNLVSYAGIIPRIKQTGGPEGHTFTGKVAKRCNRILKDYVTRSAFHLGLHGPEDLMADYKRRDAAGQHADFGMGRRYIRMAMCLMRNSQIYLPKGLRNKKVKPEERASYYAMIWPKLIEKWQRLGALEAAFDGNRPLGQWRNMVQDLYGIKLTL

SEQ ID NO: 77431 - protein, 476 aa, unidentified
MNQARLQHKKEMVAGKFIIGIDPAKNFHQAAVIDANGTQLGKSFSFPVTNEGYTALLWRNIDKCLGPCNSDTVVFAVETSCNLWQTIVYFLHGRGFAVAMVSPLSTYHQRPILDHDFSRTDPKDAFHIATLAQRGSFDLYEQFSPHSNAMHSLGIAYDKLRKNLAQNRARLRALLERLFPEFLTVLEPDTDSAMYLLKRYLFPDEFLAMDIEKEAASLETISRHQHGRETLLRLVSLAKESIGIVKRAEERLAERLVLNSWMALIDSLKEQMKLVMGELVHLAGDLPSFDRLTSLSGVGEKLAALFLAEVRDLSRFPQFKTLEKYAGLNLRLSQSGQYTGARHISHIGNKRLLWILYRMTEETAKRVPEVRMKYLARQLKRRKHRKSIVASTPQLLQLIVALEREQRMYEPRKESLTKLSTLEEQYRNLSTPRRRTSTTPQAASTHRSLTAPRNRPGALTKTSEPVLPSTASALLP

SEQ ID NO: 77432 - protein, 387 aa, unidentified
MPQLNDLSRSLIALDQNSTIIAVVELSHSSWLVGGVVPGIERQPHKKLEPSPERLLALLHRWRDEAVRAGSTITRIALAFEAGRDGFWLARWLAARGVEAHVIHASSLAVSREHRRAKTDRLDTELLKRGFLGWLRGERGHCSMARVPTIAEEDAKRPNRERDCLVGERTRIVNRIKSTLARLGIRNFKPTLRKAADRLATVHTPEGMPLPPNTLAELQRDMARLGLVVSQIREIEEARQKRLEQQHETGPHAMVRLLARIVGVGVETADMLVHEVLSRPMRDRRAVARYAGLTGSPDESGVQRREQGLARAGNARVRRGMIQLAWRFLMFQKESALTLWYRARTADRRSGTRKTMIVALARKLIIALWRFVTTGEPLEGVVLRPAT

SEQ ID NO: 77433 - protein, 353 aa, unidentified
MDNGSRYVGLDVHRDTISVAVLDSRGKLMLERVIPTSAAAVLELLELLRGKLHVTFEEGTSAQWLAGLLQPRVAQVLVCDARKNDRRGSKNDRIDARELADLLRCGRLWPVFHQDCGLTSLQELARTYLVLTKDQTRVMNRIKALYRSWAIPCAGQSCYSPKQREAFLSQLPHAAVRGRAQIYYQQMDSLLILRQQVRQQLLREGRKQPALRLLCQIPYIGPMRATLLLVFIQSPHRFRTKRQLWAYCGLGIETRDSGEYRFRQGQLERKRQPTVMGLNRNHHHLLKYVLKSVAARCCSGSGPIRDFAQTLLDQGMRPEMIRLTVARKIAAIILVLWKKGVSFDAHYLKPQAA

SEQ ID NO: 77434 - protein, 353 aa, unidentified
MAHPGTPRITVGVDTHLDVHVAHANDQLGRRVDTVQVPTTPTGYHDLLAWARGLGEPVAWGVEGTGSYGAALARFLVAGGQVVLEVNRPDRSARRRRGKSDPVDAQAAARAVQAGEVTVVPKAGDGHVEMIRSLRVARQTAMRARTQTINALKALLVTAPTGLREQLRGLSASRLVRAAAELEPGKITSPLAAAMLALRTLAHRHQALSAEISSLTTELDRLTAKAAPKLVALFGVGQDSAGALLVAAGDNPDRLRSDAAFSMLCGVSPIEASSGKTTRHRLNRGGDRQANAALYRIVMVRLCYDPATKDYMARRLKQGKSKKEIIRCLKRYVAREVFAVLHQMGHDTPTAAA

SEQ ID NO: 77435 - protein, 410 aa, unidentified
MELLFDRVAGLDIGKASLTVCVRTSGPNGRRVSEVRTYPTMTRSLQAMRDWLLERGVTIAAMESTSTYWKAPFYCLEEVMDTWLLNAAHIKAVPGRKTDVKDAEWIAQLLEHGLLSPSFVPPPDIRRLRMLTRYRVQLMGDRTRDTIRLELMLEDASIKLSSVASSLTTASARAMLGALIAGEQDPQVLAELAKGRMRIKIPALVEALTGHFNADHAQLAGSMLHRLERVEAALAELDAVIAEACRPWAHQLELLQTIPGVGEKVAQVILAETGGDMSRFPSAAHLAAWAGVAPAIYESAGKRRPSGTRHGNKWLTAMLVEAAGSVGRMKGSNYLSTQHARLTARRGMGRAAVAVAHSILVSAYYILLRDEPYQELGADWLARRDDAAHTRRLVAQLERLGHTVVLDPVA

SEQ ID NO: 77436 - protein, 412 aa, unidentified
MDVVVERCAGLDVHQATVTACVRLPGRKGERAQVIQTFGTTTPDLLTLRDWLAAHQVTHVAMESTGVYWKPVYYVLEDACTLLLVNAAHMANVPGRKTDVQDCAWIAQLLECGLLRGSFVPPPAIRELRDLTRYRKALIQDRTREANRLHKVLEDAGVKLATVASDILGVSGRAMLTALVAGTTDPTVLADLARGRLRAKLPALRQALTGRFQGHHAFLVTQLLAHLDYLDEAIATLSAEIEGHLAPFAPAVARVQTIPGVKQRTVENLVAEIGVDMTRFPTAGHLTSWAGVCPGNNESAGKRRRGRTRKGDRWLKITLIEAALAAIRVKGSALGARYRRICRHRGHKIAIVAVARAILEIVWHLLTHGTTYAELGADYIDRRDKEQVTRRYVRLLENLGHRVTLEPAPIAA

SEQ ID NO: 77437 - protein, 387 aa, unidentified
MVVIGVDPHKSSHTAAALDPGSDATLDTVRIDAALPEYRKLLVWARRFGQRRWAVENAWGLGRHLAQWLTARGETVVDVPATATARVRQLSRGRRKNDALDAAAAASVAALQGDGTPVTAEGLSTVLGMLDERRTNLTRQRTRTVNQLHALLRELMPGGAPADLTAGQAAAMLARVRPASPAEQARKDLARDLVADIRALDTRVKTNQKRMQQAVADSGSSLPDVVGIGPVVAARLIGRTGRASRFPTAAAFAVHAGAAPIEIASAGTARHRLSRQGDRKLNNALHTIALTQVRMSGTRGRLYYDRKIAEGKTHKEAMRCLKRRLADHVWRVMIADQRRQTRAAGPGGHAGATLTSSATSPTPTAGSSDKSLPGPANHNSTTPNPAA

SEQ ID NO: 77438 - protein, 356 aa, unidentified
MLHLGTDQHARQLTISRRDDNGDVLQARQVSTRPEKVQEFFAKLTGDCVRDGESFIAVVEVCGFNDWLIRLLRDFRCHKVILIQPEERKKCKTDRRDAAALSELLWVNRDRFLLGKPVCGLRQVDIASATDQENRRLTTLRKEASQVRTRIINKIKHILRRYNLQWDIPTKTFPTQRAVAWLKQLALPEMDRLEMNYLLLDLEQSQRRVDELEKLITERCGDSEDAQLLRSMPGVSCFTATTLACRVGRVGRFPRARSLANYWGLTPGCRNSGENNQRLGRITKAGSNLARWLLAQVAHQALRKDAQLREWYKRIKRRRGSTVARVAVMRKLATVIWHMLSKRQTYAECRAIAAAC

SEQ ID NO: 77439 - protein, 338 aa, unidentified
MKEITTLAIDLAKRVFQLYGVDTHGVVVLQRRVSRAQLLAVVAQIPRCRVVMEACGGGHYWAREFQALGHETQLIAGHYVKAFSRGQKNDRNDAQAIACAARQPDLPRVALKSEEQQAIMALHRMRERLVKERIQLTNQLHGLLGEFGIVLPRGIVSLRRTLAALLEEARLPPLLQVPLTDQLEHLKQIEQRLQALTAQLEALARASEPCQRLMQHRGVGPIIATAFVGEIADPSVFKNGRHASAWLGLVPRQDSSGDRERLLGITKRGNTYLRKLLIQGARSALLTAARHKDPVSRWSMAVQERRGGNRAAVALANKMARRLWATLRYEVDALPANT

SEQ ID NO: 77440 - protein, 348 aa, unidentified
MLIIGCDYHPGLQQIAFVDTETGEFGERRLTHREEAEEFYDTLKERKVRVGMEASGHARWFERFLNGLQFELWIGDAAEIRTKRVRKQKTDRQDAQLLLRLMVEDRFPRIWVADAANRDLRQLLWHRHRLVQMRTRIMNQLHGVALNEGVRRKKALWRPAGRSELESLNLGPWASRRRQDLLDLLDQLTPKIQESTRGLEEEAEKRPVARRLMTHPGVGVLTALAFELVIGTPDRFHCGKQIASYVGLVPSEESSGDRRRLGHISKQGNSLLRFLLVEAAQVTVRSQVQWRSKFFHLAMRRGRKIAKVAMARKLAVHLYWMWRQGWDYGQFEKLGSHAGEPGNRHGVP

SEQ ID NO: 77441 - protein, 361 aa, unidentified
MNATTAAIDLAKNVFQVALADANARVLEQHRLTRAQFERFFDNRNVARVVMEACGSAHHWARVFTARGIEVMLLPAHYVRAYVRRSKTDAADALALLEAARCADIVAVKVKSVEQQSLQALHRTRSLWMGTRTSRINALRGFCRELGLHVPVGARTGLEAMARAVADDQSPIPALLRPIMQQLLEEIRVLEVRIAQLERQLAQLARESSACRLLMSIPGVGLLSATAILAATSGNVAHFKSARHFASWFGLTPKESSSGGTRRLGRISKMGDKYLRMLLTHGARSLLRAAKVAQMKGIELIGVRHWALALQARSNHNKSACALANKMARICYAVLRDQTPFGQPAARLAKKMQRQSFELAY

SEQ ID NO: 77442 - protein, 412 aa, unidentified
MEVVYECCCGLDVHAKMVVACLITRGRKEIRTFATMTDELLQLGDWLSGVGCTHVAIESTGVYWKPVFNILEGLVTVILVNARHIKAVPGRKTDVRDCEWLADLLRHGLLKASFIPPPEIRELRELVRYRHTVVGEHTAVANRITKLIESANIKLGQVASEVLGRSGQLMLRALAAGETNAENLAELAQGKLKNKKAELRRALTGSLTPVQRWVLTELLTRVEELEAARGRVETRINEAVAICTDPFVPEAVELLESIPGIGQRTAQTIVAEIGVDMSRFPSAKHLASWAGVCPGNHESAGKRKSGRPTKGNKSVRTILTEAAWTATRAKETFLHAKYHRLAKRMSKQKALGAIVHRLLVICYHLLKRRVPYAELGTAPLDEQQVARQRRRLVEQLVGLGVKVTIEEAGAVA

SEQ ID NO: 77443 - protein, 417 aa, unidentified
MADDLGWFAGVDWASETHQVTLLDALGTVIGEHAFLHGGAGLGALCEWLLAVTGAPAETIAVAIEVPHGPVVETLLERGFLVYAINPKQLDRFRDRFTVAGAKDDRLDSRVLGDSLRTDRHCFRPLHLADPVVVELREWSRMAEDLQQERTRLGNRVREQLWRYYPQAIQLTDDVAADWFLEFWALVPTPAKAVKVRKETIAKFLKAHRIRRIDAEEAQRILHQTPISVAGGTTEAATAHIRMVALRLKVVNRQLKEAHRRLDTLCVNLAGSEEPEPGQSQEQRDVTILRSLPGVGTIVLATLLAEAWEPLRQRDYHALRSLCGVAPVTKRSGKRCVVVMRQACHMRLRTAVYHWSRTAIQHDGLSHRRYAELRKRGHSHGRALRTVADRMLAVACAMLRTHTLFDPSRAGAEKAAA

SEQ ID NO: 77444 - protein, 345 aa, unidentified
MKQYVGLDVSQDQTSICVVDESGRVLWQGKCASTPEAIAATLSSKAPQAERIGLESGPLSIWLCHGLTALGLPMVCLDARHAKAALKLQLNKSDANDARGLAQIVRTGWYREVAVKSLDGQLVRALITARAQLVAQRVDLGNQIRGLLKPFGLLAGKGEGKTFAEKVRSLVPDGPLHDVVEALLRAWEAINKEVATLSRRLVTEARQDDTVRRLMTAPGVGVLVALTYVSTIGDPARFPHSASVGAYVGLTPRRFQSGETDYTGKISRCGDRLTRTYLYEAAGIILNRVSRWSTLKAWGTRLARKIGHKKATVAVARKLAVILHRMWRDGTEFRWSNTEAAVTAS

SEQ ID NO: 77445 - protein, 316 aa, unidentified
MDRTRQFVGIDISKTRLDLAIHPQDAVESATHDEPGILRVVNRLQALQPTSIVLEATGGLERGVVRAWAVAQLPVIVVNPRPVRDFAKATGQLAKTDTLDARVLARFAEAIRPALRPVSDAAMEEARALFARRRQLIDMLTAEKNRLERAASHVRPRIQSHITWLTAELKRVDADLDETIQRSPIWQTQNDLLQSVPGVGPVMSRTLLAELPELGTLTHKQIAALVGVAPLNHDSGTLRGRRHVWGGRASVRAALYMAALVATKWNPAIRRFYRHLREVGKAPKVALVACMRKLLTMLNAMLKHQTPWRAEPVLAS

SEQ ID NO: 77446 - protein, 339 aa, unidentified
MEYYSGLDVSLETTFISIIDEKGKIVSEANVKTGVESIYKYLAEQNLAYERIGLESGQLSISLCKGLVKKGLNVICVEARHMAAALSAKINKNDKNDARGIAQMMRVDLYKTVKIKSDESCQIKMLLGSRRQLVNTKQQVNGSIRGLLKIYGLKIGARTATKSFAEKVKESISKLDSYSKASIEALLVNSEQLEKSILKLDKLLIKLGKEDKACKLLMTVPGVGIITALSYKSSLDDPTRFEDSEVVGAYMGLTPKQYSSGEVDRHGHISKMGPKECRSMLYEAAQSILTVCKKSSKLKTWGLKIMKKKGMKKAAVAVARKLAVIMHRMLIDEKEFCYN

SEQ ID NO: 77447 - protein, 341 aa, unidentified
MQITTIGLDIAKNVFQVHGIDAEEKVVVRKQLRRGQIIGFFQGLSPCLVGLEACATSHYWARELTKLGHEVRLMPAKDVKAYVKRNKNDAADAEAICEAVRRPTMRFVQVKSAEQQAQLMQHRARDLLMHQRTQLINAMRSHLAELGIIAPQGREGVKELLAIVTKDANTHLPNDARASLIVLAAQLQALQTTIGAIEKRIVVQHRANKESKRLQTVPGIGPIGASAIAATVANPRIFRSGRDFAAWIGLTPRQMSTGGKPKLGPISKQGDRYLRRILVVGAVSTLRRAKLNPQRYPWVTRLLARRPFKVVAVALANKMARIAWALMISGKTCRSAWFAAA

SEQ ID NO: 77448 - protein, 341 aa, unidentified
MSNASTYIGVDLHKKTCFITIMDEAGKVKKQTEISTDTDKVAKFFSKHTKAEVAVESTMNWIPFYENLEGLGCSVVLSNPLQTKAIAAARIKNDKVDSRILADLLRTNLLPLSYVQPRDIRDLKELIRQRVAYVELRTRIKNKIHSVLFKNNLKHDFTCLYGKAGMIWLRQLELRDIYRQEMDRYLTTLDLLDKQIEELSMVIMETAKADYDCKLLMTVPGISYFTALTIKSEIGDIERFGSAKKLCSYAGLIPSTYASADKIRHGRITKRGSKWLRKALIDAITSGSRHPSKLTFLYRKLKKNKGTGKAKVATARKLCTIIFAILTDKQPFREFVSVKQR

SEQ ID NO: 77449 - protein, 486 aa, unidentified
MAKQKKHSPKPDGKLKGRAKAGSGKRGRKAKGMCLEDRPLLEPNAAGIDIGAREIFVAVPPDRSQTPVRIFTTLTEDLELMAQWLVVSRITTVAMESTGVYWSPMADVLEGYGLKVCVVDARGMKNVPGRRTDWHECQWIQYLHSVGLLRAAFRPEPAVRAVRALMRHRTEQVLMANPHIQHMHKALTQMNVQLHHEIRDITGVTGMAIVDAIIGGERDAAVLAKLRMPTVKASEETVRKSLEANWQDEHLFTLKQSRQSLTHYQKQIEACEEEIEKLLLQFEPRVDPENQPLPPDRKRKQRSRKKQAQMKNPKTGFDMRKEAYKLFGVDLTQVPGLMLMVLTLFSEIGRDMTRWPTAGQFVSWLGLCPDNDITGGKVRWRGMRRVKNRAGTLFRLAAQSLHREESPWGDYLRRMKGKLGPAGATTATAHKIAIVFYTMVKNQVEYDPAIWAKRDSQRAKRMERKLHRQAQQMGYKLVPVEEKPAA

SEQ ID NO: 77450 - protein, 436 aa, unidentified
MKKIRQNAAGIDIGAKKVFVYVEDRQVKSFFTFTEDFELLRDYLLKSGVETVAMEATGVYWGILYEILEEAGLDVWLVDGRQTKQAPGRKTDVKDCQWIQELHSYGILKRCFVAKEDVKELRSYQRLREDHIRSSSMHVNHMQKALTGMNIRLKEVLSQIHGASGMRMIEAILEGERNNEKLLRMCHVSIIKNKKAEVLKALNGRYTDSGLFALKQAYDAYHFYQKQIEQCDKEIERIIHKMGNKSQDKDLPSKRKPIRHNKPNVKDLGANMLDIFDGRDATLISGITDYTWMQLLSETGTDLRKWRTEKHFTSWLGLAPGQHWSGKMRKHKGKKGHPKAGQIFRQIAQGLIESKTIALGAFGRRLRARKGPATAIKAVARKLAEMYWRVMVKGLDFVEFGIKKYEEQQFKNKRKSLERLAKELNMQLNEKQPVVT

SEQ ID NO: 77451 - protein, 341 aa, unidentified
MNKYIRIGVDLGKGYFQVHALENEAGAAVNRKISRGKFFAFFSGISPCRVGMEACGSSNYWAREIAALGHEVVLIAPAYIKPYVKRGKNDAVDAEAICEAMSRPSMRFVPVKSAEQQAALMLHKDRELLVKQRTMSVNALRGHLAEFGIVVAKGIQHVDHLLELARKDAALPEMAEQAVERMASRLNELDQAIAATEKAIAAASAKHANSRLLDQVPGIGPLIASVIAASMPDPGAFRSGRDFSAWLGLTPSQNSSGGKEKLGPITKKGNRYIRKLLVVGSTSLLRVAHKRKGALADWINALAAKKLQKVAAVALANKLARICWAILSTGECFREETYAKA

SEQ ID NO: 77452 - protein, 345 aa, unidentified
MPVVAVGLDLAKTVFQAHGVDDAGQTVLRRRLGRSELLAFFAKLPPCLIAMEACSSAHHWARELVTIGHDVRLIPPQYVKPCVKRNKTDAADAEAICEAATRPNMRFVPIKTRDQQAVLALHRSRSLLVRQRTASINAVRGLVGEFGLIAAKGRYRMSELRQRTNAMTPDHLPAIACQAINTLFDHIDMLEEQIAAVERQIVEWHKNNEDSRRLATAPGVGPITASAIVAAVGDGCQFQSARHFAAWLGLTPRMHASGRKERIGRISKGGDRYLRALLIHGARAIVGTLFRKNVPPRPWLLALAARRPTNVTAVAVAHKTARALWAMLTRDEKYRKPIAATPSAA

SEQ ID NO: 77453 - protein, 343 aa, unidentified
MDHFAGLDVSVKETSVCIVDDTGRIVREVKVASEPEALLLVLKDPGYHFERIGLEAGPLSQWLFSALAEAGLPVICVETRHMRAVLQAQINKTDRNDARGMAQMMRAGLYRPVHVKTLRSQKLRMLLTHRKLLQSKAIAIENDLRGTLRNFGLKVGMVGAVKFETRIKELVENLPDLAVLVEPLLVVRRVLREQLGILHRRLLAIVRDDDVCRRLMTVPGVGPVVALTYRATVDVPARFKNSKAVGAVFGLTPSKYQSGEINRTGAISRCGDDMMRVMLYEAAQAMLTRTNKWSWLKAWAMKIARHRGMKKAIVALARRLAVIMHRIWVDGTEFRWTREVAAT

SEQ ID NO: 77454 - protein, 424 aa, unidentified
MKVTYQTCCGVDVHKSFLVATIVKTTGGIEPSYQKKRFSTFNSSILEFKQWLLDNDCHDVCMESTGKYWVPVFNLLEDKINVVIANPKWVKAVKGNKDDTKDSKWIGDLFRLGLVKGSYIPCKKVRILREYTRYRYKLVSCRSSEKNRYQNALTVCNVALDSVVSDIFGKSSMSIIDYLLEQSGTSINHEEIASKLLRSLKSKEDAVIESVEGYQMTDAQKYRVRLVRAHMDYITAEINDVDKMIENMISSNPDFENAVQFLCTIPGVKRDSAITIISEIGTDMSQFSGSKRLCCWAGLTPGSNESAGKKKSVRITRAGVYLKPALVQCAHAAVKSDKSPYYKKKYESLVKRRGKKRAIIAIARMILTAIYQMLSTGEQWNPSDLYKIDMPVALVEKQKAKAIKQAKKLLQREGLLPPDEPLAS

SEQ ID NO: 77455 - protein, 340 aa, unidentified
MTQYKRIGIDTSKAVFTLHCVDQQDRPVLRINLRRAQMNPFFAKLPPTEIAMEACGGAHHWARELAALGHEVRLIPPQYVKPYVKRGKNDRNDAEAICEAAGRPGMHFVPIKSVSQQAQGMVLKVRETLVGQRTLLVNTLRGHAAEFGMIAGKGLPQVGPLLTAIERETTIPPEARDMAALLGRQIEDLDTRIKELDAKLTAVHKANAVSQRLATIPGVGPVTALTLAIEIDPAAFESGRHLAAWAGLTPKEQSTGGKQRLGGISRAGNERLRVLLVAGATSVINAAMRPGSKQMTDWLRALLQRKPRKVAAVALANKMARVAWALMARGEVYRRPAAAA

SEQ ID NO: 77456 - protein, 360 aa, unidentified
MFSERTSVGLDVHARSVVAAAIDGQTGEVFKARLTPSHGEVLGWVGGLPGPCAVVYESGPTGFGLARALIGAGVRCEVAASSKLQRPAGDRVKTDARDALHLARLLRLDEVVPVRIPGPAEEAARDLVRAREASRQDLMRARHRVSKLLLRHGIVYSGGKAWTELHDRWLRQQRFDAVSTQAAFDDAYETVVLTTARRARLDEKIIALAEDSEFTAVARRLACLRGISTLTGFALAVEIGDWQRFTGASIGAYVGLVPSEHSSGQSRVLGAITKTGNAHVRRLLVEAAWHHRTTYHPGVVLRRRWDQAPAAARARGHAGNQRLHERWVNLNLRRKRPVIANVAVARELAGWCWSLAVLPD

SEQ ID NO: 77457 - protein, 369 aa, unidentified
MSKTITSFVGLDVHKDSTAIAEAEAGRENPRFIGTVGSDLGQLLKALKSLGKPETMLVVYEAGPCGYGVARQLRSRGYSCEVVAAGKIARRPNERIKTDRRDALTLARLARSGDLVKVRVPDERDEAMRDLSRAREDAVKARLKARQQLKALLLRHGHRYGGKSSWTLAHERYLATVGFAHPAQDIAFAEYRQAVREGHERVERVTQALRTQTEHWRLQPLVAALSSLRGIDFVAAVTLAAEIGDFSRFAHPTELMGFLGLVPSEYSTGDTRRQGDITKTGNGHARRVLVEAAWNYRFPARISRILQIRQEGQPKAVREIAWRAQLRLAHRYRRLSSRKLHPNKICVAIARELAGFLWDIARQVKVAQA

SEQ ID NO: 77458 - protein, 343 aa, unidentified
MVSHYIALDVHCGFSEIAVVTERGKLVRRERCETAIPSIVERLSAVRRPRRVTLEEGPLADWLSRELRPHADEVLVCEPRRNHWIARDADKDDPIDAFKLAELYRGGFLKKVHQADSLERSLLKQQVLLYHDRVRDRVRQGHQLVAVCRRHGAFVKAADLRDDAEWKQCLDRLPAGSLLRRAWESGREVYLLMIERERELWTELVGTARNIEVVRRFEALPGIGWIRGMTFYALIDTPHRFRGKPALWRYCGIGLERRHSGNGPVRTRVTRQGHRRLKDVLLGAAKSAVAQADNAFADKHRAWKEEGLHPANARRNVARAIASTMWSLWKTGQTYDPQKATSK

SEQ ID NO: 77459 - protein, 354 aa, unidentified
MKYYTSTTKYNCGIDLHAHQMYVCVMDREGKILVHTNIKNNDFSFFLKLVTPYRHDLTVVAECMFGWYWLADACQEAGITFVLAHALYLKAIHGGKNKNDRIDSEKLAHLLRSNLIPPAYVYPSAQRPLRALLRQRLTFVWHRSELLARIRAHQLAHNWEPFRSAPNRDRWEEQLLAHEAHPVRQLALQNELALIRHYDTQITTVEVQLKQATKACAQRDYALLQTVPGIGDSLGLTILYEIGDIQRFPTVKDFLSYCRLVKGTVASAGKIKGLRGAKLGNPYLRWAFGEAAIIAKRDQNLIGPAYQRLEARFNGNHFKANAVLAIKLARAVYYMLQQHTVFDPQRLIAALTRN

SEQ ID NO: 77460 - protein, 382 aa, unidentified
MNVLHPCCAGLDVHKKTVFACIRKVGPDGAVTSEVRKFGTTTAELLALADWLESQGVGPVAMESTGVYWKPVFNLLEGHFEVMLVNAQHIKRVPGRKTDVTDCQWIAQLLQYGLLSASFIPEPPIRELRDLTRQRTQLIRDKAAVANRIQKVLEDANIKLASVASDVLGVSGRSMIRAIIDGQEDPAKLADLARRQLRGKIPELTQALRGHVTEHHRFLLRALMDQLEALEGLIARYDAQIAAALEPMAGAAGLIQGVPGLGERATEVVVAELGVDMTPFPTPGHLSSWAGVCPGNDQSAGKRRSGKTTKGNQWLRTTLVQAAWAASRTKGTIFSACYQRWAKRMGRKKALVAVAHKILVVIWHLLKKGTAYREKAVPEPAI

SEQ ID NO: 77461 - protein, 374 aa, unidentified
MLSIIYVGMDVHKTNYTLCCYSMENDKIFSVVQMEPELKNVIKYLKRVEQNLGKDCEFLCGYEAGSLGYTLYQQLTHYGIDCVILAPSTMPRTNKREIKTDKRDAAKIAKCLAYHTYSAVYVPTDEDNAVKEYIRMRADEKSTQKRIKQRILAFCTRHGMHYKEGSNWTQKHMVWLKHLDFGNSILQEAFEEYLILYFQACDKIERYDSRIEEMADYDRYNENVKKLSCLIGIKTHTALATIVETGDFIRFKNARDYAAYLGLVPGENSSGDTKQNTGITKTGNTHVRKLLIESAQCYGRGKAGVKSKELARRQAGNNPNVIAYADKANERLRRKFYRIMFRSKRNIAATAVARELACFIWGMMTSKTSEVKHG

SEQ ID NO: 77462 - protein, 347 aa, unidentified
MAFIGVDLHSNSFTICRLEADGSEAFETFQLSDADIDRFCQSLDADDQVAVEATGNTAWFCDEIRACVGRIVVVNARKFQVIRRSVKKTDKNDARALAFFLSKDMLPETRLRSAAEAELGSLVQTRDMLVKQRTMLINKIHAVHLRHGVKLKKESLTSRKRLRAMDLVRFTPLERVELEALRDQALSLSETLARLDREIEKAASALKGFEEISSIKGIGARSAAILLAGIGNVDDFESADKLAAYFGIVPRVSQSNDTDTRGRITKRGDKLVRTTLVQCTLIAKRYSGYLNAFYQRIKARRGAGKAIIATARKLLSIIYDTLKNGWIFEDFPQFKIKEKQCPAGQSS

SEQ ID NO: 77463 - protein, 340 aa, unidentified
MNLTTLGIDLAKTSFSLVGMDQHGKVVLRKTLKRAQLLPFIAQCPASLIGMEACSGAHYWGREFAKLGHKVGIIASKFIAPFRKGGKNDNNDAEAICEAVGRSTIWFVPVKTAEQQAQLCVHRVRQGLISERTALINQLRGLLREFGIVMPKGRYPAQREIPQILEDADNGLPMLARQMITNLWERIKIASEQILFYDRELRKQAHHHPVAKRLLTIPGVGEQVASGIVASVPDPSLFKNSRQFAAWLGLVPRQYTTGGNVRLGRITKQGDRYLRMCLVHGARAVLANMKDKQDKISCWARELIARRGYLRAVVAMAARNARLIWTLMVKQEDYKVIAAS

SEQ ID NO: 77464 - protein, 349 aa, unidentified
MKVTTFGLDLAKLVFQLHWVDAETGEVCRRRLRREQLLPFFANRERGVVAMEACGSAHYWGRQLRALGHEVKLIAAQLVRPFVQTNKTDAADAQAIWEAVQRPKMRFVALKDEGQQSVLALHRMREQLVKLRTMQSNQVRGLLYEFGVVLPVGRERVLAELPKKLEQLETRLPAMLLTTLRRHQARLAELTRDIEAIELQLKGWAKTNTPSQRLQDIPGVGLLTATAAVATIGEAKHFRSGREFAACLGIVPRQIGTGGRVKLLGISKRGDVYLRTLLIHGARAVINRRQEPEPWLQKLLARRPPNVAAVALANKMARTIWALLAHDRTYANDHVSTRPVTGQPVPQGH

SEQ ID NO: 77465 - protein, 350 aa, unidentified
METAYDDRQVVGMDLHRRRSVLVRMTGDGRRLGTARITNSPAELRRAIAAAGKSPRVVLEATYGWYWAADVLQAAGAEVHLAHPLGVKAFAYRRVKNDEKDAADLADLLRMGRLPEAWIAPAEIRELRELTRYRLKLVQRRSGFKEQVHAVLAKLGVSVTCTDIFGVWGNTWLDGLALPQPYAGKVASLRTLIGELGSEIALLDAVIADLLAGHDGYRALQALPGIGPVLAAVIVAEIGDIHRFSCPGKLCSWAGLTPRHRESDLKVARGHITKQGSRVLRWAVVEAIQHQPASSPVRQVKDRIIARRGKEAKNIAKTAAARHLLTAVFYAMRDGQARSLATRSRTAEAA

SEQ ID NO: 77466 - protein, 371 aa, unidentified
MKSILSVGMDVHKNSFSLCSYDGYTGEIVSESTFASDVKLVIKFIEKLKSRYENDVEIKCGYEAGCLGYSLYKSLTSRGVDCVILAPTTMQVSAKNKMVKNDRMDALNIAKNLASGSYKAVYVPDEEDVEIKEYIRMIHDFKKELKRVKQEIYAFVLRHGYQYDGKSKWTIRYMNWIRELEMSEIQRETLDEYLAEMDNINDKIERFMNRIDEMYQSDRYNEKVSELRCFKGIDTFAAMTIQVETADFERYPNAKAYASYTGLTTGEHSSGDKNNRIGITKQGNTVIRKTLVECAQSLVKGNVYTPKSKRPKSRQKGMDVNIIAYADKATERLKKKYQKLIERNVPRNKAIVAVARELACFIWGMETGNIH

SEQ ID NO: 77467 - protein, 346 aa, unidentified
MTIVEERTAVTAGVDTHSEVHVAAALDSVGGLLGTREFPATAAGYASLLGWLGKFGDVALVGVEGTGSYGAGLARYLAAHGVRVVEVDRADRQERHRNGKSDPLDAVSAARAAQSGRASGMPKGRDGAVEAIRTLMVAKRSARHERTQAINQARALILTGPDELRARFAGLRAAALAEAIAALRPRPGDAAGYSLRVALRELGRRVEFLDDQVARLDELIIPLVAARAPGLLSLYGVGPDTAALLLIAAGDQPERLRSEAAWAHMCAVAPIPASSGKTRRHRLNRGGNREANHALWRIVITRMSAHPETRAYVRQRTAEGLSKKEIIRCLKRYVAREVYPYLRPGA

SEQ ID NO: 77468 - protein, 320 aa, unidentified
MTSKGAEKMQNDTIGVDISKDHLDAHRLSDGATRRFTNDKSGHRAFVKWLAHGSVERVVFEPTGPYHRAFERALGVAGIPFAKVNPRQARRFAEAIGRLAKTDRVDAAMLARMGAMLELKTRPPRSDALLVLKELHLAREALVKDRTAAKNRRKVLTESLLKRQNTQRLEQINRQIAAIEAAILEQIRADPDLAQRFAILTSIPGVSAVTAFALLIEMPELGALEAGQAASLAGLAPVARQSGRWTGRAFIRGGRAAVRQAVYMPALVAARFNPDMKAKYRQLIDAGKPAKVALTAVMRKLIVLANALLKANRSRTLNPA

SEQ ID NO: 77469 - protein, 400 aa, unidentified
MRTVFGIDVSKASSEVAILVNGERVHGYTMSNDIIGFSRLQKDLKTVRNPEIIFEATGVYSRRLQAFLEENSYDYTRLNPLEAKKQLDGLRVRKTDKIDAEKLASSQFVLNRKPTYVQEEVYQNLHDLSRFYQNLTEDIVRTKNRLHKVLQVAFPEIEILLSTPAGKQYWNLVSIFPTKHWVLELSEVELKETIRQSTSKHISENRVGNLAEKLVGLAKQSYSAISKTSPMIEEVKYNAQELIRLTNRREQVLEQLIELAKPLPEYEILLSIPGIAETTATSVIGELGDIRRFKSANQINAFIGIDLKHYESGDFLSQEHITKRGNPYARKILYKCIHNIASASHTNPCHIADFYEKRKRQSQTTSTKPHTIASIHRLIRTMYYLIMHNKLYDYTLAQSH

SEQ ID NO: 77470 - protein, 341 aa, unidentified
MQITTIGLDIAKNVFQVHGIDAAENVVVRKQLRRGQVIKFFAALPPCLVGMEACATAHYWTRELTRLGHEVRLMPAKDVKAYVKRNKNDAADAEAICEAVRRPTMRFVGVKSAEQQGRLMQHRTRDLLLRQRTQAINALRAHLAELGVVAAQGREGLKELLAIIADEKDDRLPVDARASLIVLAAQLQALQTLIGSIEKRIIAQHRASEESKRVATVPGIGTLGASAITATVTDPSAFRSGRDFAAWIGLVPRQDSTGGKPKLGPISKQGDRYLRRILVVGAHSVLRRAKQNPEKYPWLTQLLARRPFKVVAIALANKMARIAWALLAKGGTYRAPVLAAA

SEQ ID NO: 77471 - protein, 410 aa, unidentified
MDVVHERCCGLDVHKRTVVACVIVPGPDRVPAKQIRTFGTMTVDVLQLADWLGELHVTHVAMESTGAYWKPVWNLLEHSFELLLVNAQHMKAVPGRKTDVKDCEWIADLLRHGLLRASFVPDRFQRELRELTRYRRSLVEERAAEINRLQKTLEGANVKLASVASNVVGKSARAMIELLLAGSSDVARMAQLARGKLRLKIPQLEQALGGEVGPHQRFLIAQQLAHIDFLDDAVEHVNTEIQERMRPYEEELDRLDTIPGVGRKAAEEIIAQIGVDMSRFPTHRHLASWAGMCPGNNESAGKQKSGKTRKGNRALRAILTEVAQAAARTRGTYLAAQYHRLTPRRGKKKATVAVGHSILVIAYHLLIERSQYQDLGAHYFDTRDRAALERRLVRRLESLGNRVTLEPAAA

SEQ ID NO: 77472 - protein, 388 aa, unidentified
MRPADQYAEQDLTRVQSDPAILYASLELSQSSWLVTSLSPGSEKMSKYATSAGDGAALLALLARLQNRAMRSSDQSLRIVVIQEAGLDGFWVHRLLEVNGVESHVVDPASIAVSRRRRRAKTDVIDGETLLRTLLAWKRGEPRVCEMVAPPTPDQEDRRRLSREREILLRERVQHVNRIKGLLVGQGISDYDPLHKDRRKRLAEMITGDGRSLPARLKAALLRELDRIELLLQQIADVEAERDASVEVEVDGRPSPIALLLQLKAIGPQIASVLYNEGLYRSFANRRDVAAYAGLAPTPWRSGSIDKEQGISKAGNPRLRHIMIELAWLWVRHQPDSALTAWFRARVGHERGRVRRVTIVALARKLLIALWRCVTQGEIPEGAAMKAA

SEQ ID NO: 77473 - protein, 345 aa, unidentified
MELHTIGIDLGKTVFHLVGLNLRGEVVVRKKFSRTQLLRFTSNVHVRLIGMEACGGSHFLGRALREQGHEVRLIPAQYVKPYVKTNKSDYIDAEAIAEAVARPTMRFVPIKTDDQLDMQSLHRVRERWVMRRTAVINQIRGLLLERGITLRKGRCYVGAALPGILEDADAKLSGALRMLLAQLKLELDHLDMLIDEANALIKKTACENEACQRLVAIPGIGPVTATAVIVAIGNGGAFHKGREFAAWMGVVPREHSTGGQQKLLGISKRGNSYLRRLFVQGARAVLQQRTKQSSGLSAWLAQLTSRTHRNVAAVALANKLARIAWAVLAKNEPYRPSVVADVAAA

SEQ ID NO: 77474 - protein, 385 aa, unidentified
MGTQTFIPRDYDVFAGLDVDKKSISVTFSDHQGLLKSMRMPFNVEYLVNHVRKHYGDKKVAFGYEAGPTGYGLYDGLEAHAYKCLIASPSMIPKAPGQRVKTNRLDSVGISENLRGGQLKGIHVPTALYRELRHLTQLRDAMVSEMVGMKQRIKSLLLLEGLEFPPAPAGSQWSFLVKAKLRKLACSSVVRFKLDQLLDSLEFDEKQVLKASREIRRFCQNDPELSQCINYLTTLPGIGWIVASQLMARIGDWRQIKNIRQLPAFLGLVPTESSTGERTERGSITHTGDGRLRSKLIQASWSAIRQDDELREFFRAVAKRHPRHCASRVAIVAVAHKLCVRAAVVLMEQRPYEIRQKVQAAPLTQEETVPQGTTRRLAVPGETNS

SEQ ID NO: 77475 - protein, 345 aa, unidentified
MKEISVIGLDLAKNVFQVYGVNRNGERSASRRLRRKQVHHYFSQVPPCLIGMEACSSSHYWARELIALGHRVKLMNPRFVKPYLKGNKNDQNDAEAICEAVQRPNMRFVELKTTEQQSVLHLHKSRQLLIKERVGLSNHIRALLSEFGIVLAVGVKVFEAQVPVLLTEDDNALPALSRRTLNLMWTAYRDLRSLIHELDRELACWHKDNEVSCRLAEVPGIGVQTATALVAKLGAGRSFHNGREVAAFVGLVPKQASSGDREKLLGISKRGDGYLRRLLVQGAKSVIRHVRRRQMAGLAGGNPWVESLLERKHPNKVAIALANKMARVAWVLIAREEHYIKASTC

SEQ ID NO: 77476 - protein, 480 aa, unidentified
MAKRAAQRSEIKAVPQFLNESLYVGIDIGKGKHLAGFLSKTLLERHERFEACPALVFENSREGFRLLIDRIRSLTPLEHVFILMERTGHYHRALAQYLQELDLPVYVMHVQSRPGGMLKTDKRDALTLANQLYSQLELGVQVAHKLQLIRRVMPPTEAAAQLKGLIRHRYELIQESTQRKNKLTAICDEVFPELTRVVKDPNSLFALALREQFPTPQALAATSLTTLVEIRGGARSLSDAKLLELQRLAAQSIGVKEVARQRGLVLEQTQLIKELRLLREHVEQLEDEIVSIVEHAREGQILLSFPGIGPVMAATTIAAIGSIHNFPSASALKSYFGWAPVVVQSGSTLDHSRLTRGGTRTMKQMLFLAVFQAIRLPDNEWAKLYERLVKARCPFDEKTQSYVGKKRVIGRVAGQMTEAIYALLKRDAELLSKVLPGQDPPPPMLYDPEVHQRHRQGHYRPLKSTPLPNTITVLHPLPSE

SEQ ID NO: 77477 - protein, 354 aa, unidentified
MKRRIPVFVGLDYGSQAVQVAVLDARGQLLGSRRVNNATLEIVQYAERFGRVAGAAIEAGNGTAALADELIHRHGWPVRVAHPGYVRRMKQNPDKSDYSDARLLADLCRVGYVPPVWLAPPAIRELRRLVRHRQALVDQGRAVKLRVSALLRDHRLRRPEDMKRTWTQRHRAWLAGLATGGSLPPISRQLLADWLEDLAYLERRLARAETQLEQAVAEDPLVAWLLEQPCVGPVTACVLRAEVGCFGRFRTGKQLARYCGLTPRNASSGQRQADAGLIQAGNRVLKATLIELAHRLMTKVPHWMAFRARLRATGKAKCVVVAAVANRWVRRLVWEVQTAGLAAVAPPRAAEAVA

SEQ ID NO: 77478 - protein, 401 aa, unidentified
MLTSIMVNNSLIGKAGGGSASGAKPRAKRSAASRADTSGRREFDCVQVFKAVTKREPRRPRGISPNSRLNRRRPTRPASSHLQVREITMSEQVYVGIDVAKDTFCVAACPNVLETCLPNTPDGHRQLCQSLKPFTTALIVLEATGGYERPIAAELLNASLPVVVVNPRQVRDFARGMGQWAKTDPIDAQVLAKFAQIVKPTPKTHATPQTAELSELVRRRRQLNDLRTQESNRMGTILHPKVKKSIQKMIKTLNFQIDEIDQLVREHIDADDNFKNKDRILQSAPGVGPQTSAMLIANLPELGKLNRQEIAALAGLAPWDRSSGKYDGKAHIWGGRKDVRSVLYMAAFTASRFNPVIREFAGRLKQEGKAYKVVLTACMRKLLIILNTMIRNQSLWTPKIS

SEQ ID NO: 77479 - protein, 405 aa, unidentified
MAIVFGIDVSKATSNVAVINDDTTVWQSKINNDWFGFQELLKHLQEYREPQIVFEATGVYSQRLRRFLDDHQYRYSQLNPLAAKKQLDGLRTRKADKNDALHLAQTQLIFKRRLTYYQEPVYRDLMNLSRFYQEVNSDLVREKNRLHRSVQLTFPELEQLLSKPTGKMYWTIVQLYPHADCLNEQTPEDVYEQISSVVSHHGKAALKAIATKLLNLAKASYLAESIDSPMLEQTRYHAKQVTEREAHKDQIINQMVQLAKGLPEFEILMSIPGFAEKTVVRLIGELGDIRRFGSSNKLNAFVGIDLRHYESGNYIASDQISKRGNHIARAVLYRAITNISSAAKTKPNHINDFYQKRKKQLPVVNGKTVGSKKVAVAAMSRLLRTIYHLVTTSQLYQYGVQRQPI

SEQ ID NO: 77480 - protein, 371 aa, unidentified
MKKFSKYIGMDVHKATIAVSVAEADGGEVRYHGEIANTPEAIEKLVKHLRKGDASLSFCYEAGPCGYGIHRQLLDMGWDCQVVAPSLIPKKVGDRVKTDRRDSLMLARLHRAGELTSVWVPDGAQEALRDLTRAREDLKHLQRQAKQRLLAFLLRHGKRYDGQSRWTQAHYRWLETVTFAHPVQHIVFQEYIETVKAMTKRVEALDTQIASAAAESVFWPVIEGLMALRGVNLLTAATVVAEIGDLRRFANAPQLMAYLGVVPSEHSSGGSKSRGSITKTGNGHVRRVLVEAAWCYRFPARKTAVLQRRAERTSEAIQDIAWKAQTRLCGRYRAFEARGKLKVQTCMAIARELAGFIWAIGQALPAPVVKA

SEQ ID NO: 77481 - protein, 420 aa, unidentified
MNKEVRAWIGIDWADEKHDVSLYEVATGRQERLEVKQSPEALAEWIGQLRTRYGNAGQVAVVLEQGRGALLNVLMGCEFLVLYVINPKSLSCYREAFYGSGAKSDPVDAELMREMVRQNPERFRAWHPDDVLTRSLRLMTEGRRDLVNQATAVTNQLTALLKGYYPQALRWIGALDTHWACDFLDQWPTLQALQSSSRRQILRFYEKHPRHHLDLEQQIQQFHQTLPLTGDEAVLQYSILMVQALIPQLRALLDSIDEFDRKIAEVFRKHPDRPIFESFPGAGAALAPRLTAAFGADRDRYAAASEMQQFSGIAPVTEKSGKQHWVHWRMACPKFIRQTFHEFADHSRRWSAWAKAYYQLQIERGKKHNAAIRALAYKWIRILFRCWKQRVPYNEQLYLASLLKHQSALLSKSAPAVEKL

SEQ ID NO: 77482 - protein, 429 aa, unidentified
MGLIVPTTIHPEREDQPLPYEWFVGIDWGSQQHQVCILDRDRRLVGERTVDHDGASLAQRAAWLWTVSAGHPQRVAVALEVPRGAIVEGLVERGFHVFAINPKQLDRFRDRHSVAGAKDDRRDAFVLADSVRTDRPSFRRLQLDAPHLLLLRELSRVEETLLEEFRRSANRLREQLHRFYPQMLQLCSAADEPWLWDLLHLAPTPAHAMLLSEAQVQRVLKAHRLRRLKAPAVLACLQAPALPVAPGTAEAAQAHCGFLLPCLRVLAEQLQTCSQQVSALLSTLAEEPGEGESPSDVAMVLSLPGVGRKITAWLFAEAAQPLAERDYQVLRTHGGVAPVTKQSGKRRQVVMRHGCNPRLRHALYHMARVAMQRDAHFSSVYAALRAKGQRHGQALRNIGDRLLRILMAMLRHRTCYDASRIRCAPVAQM

SEQ ID NO: 77483 - protein, 335 aa, unidentified
MKPKNANIEFYLGIDISKADFHVALLRASDHKVIAQKTFPNHAKGYQALYDWLLKNTSADLPVHLCLEATGSYGDGVAFFFYGKAVKLSVVNPRAIKAHGASSLRRCKSDPADARLIADFCLEKQPAAWVAPTPAQQKVKAFSQRLTALKKSLAQEKNRRDTTTDKDILKDIKAHIRWIENHIEKLEAELVALTKADEQTARQLKLATSITGFGDKSAAHILAEIGDINIYQNARQLSAHAGITPAIFQSGKHERKYTRMTKAGNSHIRKMLFFPAMVAMQHNPICREFAARLEKQGKSKLAIIGAVMNKLLRILFGVLKHQKPFNPNQLKTAQN

SEQ ID NO: 77484 - protein, 387 aa, unidentified
MKKIYLNVACAGMDVHYKFSNVTFRDRSGKVVGRQRLDHRHRQELQERLNRWPTGLPVVMEASFGWGWLSDLLEEAGQEVQLSNCYKVEQMRKARGWVKTNKKDADLISLLSFEQSDWWKVWRAPPEVRNRREQMRFRGDLVGLQTMVKNRIHAIFHRHGIFHEFSDLFGGQGRKFLAELCLHNPTDLSYQALLALRGQIKLLDHLRRQLADVARILHKQLVKTPLTMRLKTIDGIGLILAHVMAAEIGMIERFRNQKALASYSLLAPRSNDTGQDDPRHSPLGRHLGVRGNRTLKWAFIEAAHGAVRSGGKWRAIFDRVTNGGKKDRNRGYIKVARELVKVVYAVWSKGVDYQPVPPARPGSDKNKKKSRSETGQLLHPMVHASTA

SEQ ID NO: 77485 - protein, 428 aa, unidentified
MENATSNSPVVAWIGLDWGDQRHEIRLQAAGSARVESFTVEQKPEALHAWVAQLRARFPQGMIALALEQARGAVIFALRNYDFFILYPVPPKALARYREAFATSGAKSDRADADLLLEMVRTHADRLRAWQPDDALTRQLRLLVEYRRKMVGDRTRLTNRLTDLLKTYFPQALDWAGDLRTLAAGEFLSAWPTLEALQGARRSAVRRFYHDHRRLSAQARDQLFDQIAHARPLTQDRALVEASALMTQTLIEQLRAVIAALARLDQKLKELFGQHPDQGLFADLPGAGEALAPRLAVAFGTDRHRYQSAEELQQFAGIAPVTAASGKTEWVHWRWACPKFLRQTFHEFADASRKKSLWAQAYYERQRHHGVAHHAAVRALAYKWIRVLYRCWKTSTPYQEASYLEALQRRHSPLWLAVASLSLQEANP

SEQ ID NO: 77486 - protein, 420 aa, unidentified
MKRYCGLDVHKDSVFVCIMDENGIVFQEKFGVLTFELEKLRETLYNYATTDVCMESTGVYWIPIWRVLEDYFNLKLVNPYFIKQLPGRKSDVKDAEWIATCLMKDLVRGSYVPDSVIQRLRQYNRRIFELNHNISYKLNKLDSCFQRCNIRISNYVSNINGKAFIEIARLISEGVVDADKLLKKVHGRTVNKYGRETIIAALTGVINDTDIDCIRQYLNEFEMLKQHRSECQSKMDTLCNEYFPRQIKNILTIPGISQRSATAIIAEAGVDMSNFENSGKMVSWCGLSPRNDESAGRIKSRKITHGNKFLRQTLVECSWSASKKQGCFFNRFSYHQTAIRKKSKIKVQVAIARKILVVVWNILVKDTQYINFNDIDMLKQAGMGVAMGNADPEVQKHAKFVTKSIDEDGVEYALKHFGLI

SEQ ID NO: 77487 - protein, 369 aa, unidentified
MPHVTSIGLDVHARSVAAAAFNPFTGEVVHRDFGTDAAEIAEWALGFEEPRACYESGPTGFHMARELRALGLDCAVAAVSKMQRPAADARRKNDRRDAEFIARMLATHNIVEVPLPDAAVEAARDLDRALDDATAEYRRARQRLNMFLIRLGHVWDERNADGTRKGSWTRAHWRWISGIRLEGPQRDVLEYYVTAARCAESDRRQLEKKVLALARTDRWRPAVEALSCIKGIDTLTAFRLAAEAGSFTRFRTAPAFASWCGLVPSERSSGETERRGGITKTGNRLARTALVESAWHYLTCTPRPKAPTPGADVPAAIRARADACTARLCRRREALAAAGKSSCKANAAVARELACWVWEIGRRAEGTLS

SEQ ID NO: 77488 - protein, 367 aa, unidentified
MIVNEVAKNVEKIISIDTAKNSFQVLVVNQKTGKKKNTKVQRSKFVEYILKQGPCLIFMESCSASQHWARLFESFGFTVKLIAAQHVKAFLRNRRVKNDERDAEAIYTCGIQTDTKFVRIKTVEEQTVALLHTLRKAAVSQRVELSNRIRGILAEFGIVVARGKGSFNSEIEALFNECEKIHDVYLRAAISSLFEDYHRLEQREKELSEKIESLNKDNELVKIALTCPGVGPLTASAIVAEVGDASQFRNGREMAAWNGVVPSQHSTGGRSTLGGITKTGNRYLRTLLAQCACAVIQKASRHLEQGKDTHLDRFALRLKLNGKPAKKIMIAVANKIIRILWAMLTQRKTFKNKADETSDISAELQLA

SEQ ID NO: 77489 - protein, 348 aa, unidentified
MSEAYDGQQVVGMDLHRRRSVLGRMTADGRKLETVRITNSPAGLRRVIARAGKRPKVVLEATYGWYWAADTLAAAGAQVHLAHPLGVKAFAYRRVKNDEKDAADLADLLRMGRLPEAWIAPAEIRELRELTRYRIKLVRLRTSCKDQVHAVLAKLGIEVTCSDIFGVAGSAWLDELPLPQPCAGKVASLRTLAGELTAEITLLEAAIADLLAHHDGYHAIRVLPGIGPVLAAVLVAEIGDITRFATPARLCSWAGLTPRHRESDVKVRRGHITKQGSPLVRWALVEAIQHVPAGHPLRQRKDDILARRGDQAKNIAKIAMARQLLTWVFYAMRDGQVRALAANSRKAA

SEQ ID NO: 77490 - protein, 482 aa, unidentified
MACKPKPPNQPSNAGAKARKGKRRRRTGMCLEDRPILEPNAAGIDIGSREIFVAVPPDRDPNPVRVFPTFTENLQELAAWLLQCGMTTAAMESTGVYWIPLYDILEQQGIKPCLVNARHMKNVPGRRTDWHECQWLQFLHSVGLLRSAFRPEAQVCAVRTLIRHRSELVQAASQHIQHMHKALTQMNLQIHHVISDITGATGLAILDAILEGQRDPVILAQFRDPRIKASEETIRKSLVGNWRREHLFTLKQSRELYRTYQQRIVACDQEIESLLTEFTPRVDPTKKPLPPDRKRNRAARKRRRKTGNPDATFDLRTEAYKLFGVDVTQIPGVETIALPLFSEIGRDLSMWPTSGHFASWLALCPDNDISGGRVLWRGMRKVNNQAGSLFRLAAYSLHHSLTPMGDYLRRMKSKIGPAAATTATAHKIAVVFYTIVKHQVEYDETIWATRDINRQKHLETKLKRQAKRLGYELVPIDAKPAA

SEQ ID NO: 77491 - protein, 341 aa, unidentified
MQAIGIDTHKATLAACLVDDLGMPLSERTFANDPAGHGALLAWARDAAPLVIIGVEGSASFGASAARFLIEAGREVREVPPQLSRRERAGTRRAGKSDPGDALTIARVTARERDLPPVRLADPSLELKLLVGAREDLVAEATRVRNRLHADLRVLLPGYGATAANLTAVRHQATVALRLRRLAGVQAELARGRLARLRTLAAEERSLAAQIAGRVEGHPLLALPGAGALVTAKLVGEVGDIGRFRSADAFAALSGVAPIPASSGQTQRMRLNRGGNRQLNRALHTIALTQASHHPPAIAYIARRRAEGKTWREALRALKRQLVRTVFRLLVVGARSGSIAA

SEQ ID NO: 77492 - protein, 370 aa, unidentified
MLDTTTFVGLDVHARSIKAVSLDVMTGEVRCATFGYDAGAVAEWVRSVDPKARCVYESGVTGFDLQKRLSGLGVDCVVGAVSKMIKPSADRRRKNDRNDAEFLARMLSVGNVVEVWVPDDECEAARDLTRALEDARDDLSRSKQRLSKFLLRHGLVFDERTPTGRRKGNWTRAHWSWIESIRFAEGADNDVLAYYVDAVRRAAEEKARLEGLVEAEARKPRWRRRVDSLRCLKGVDTATAADLVFEAGEFSRFRNARSFASWVGLTPSEHSSGESDRRGAITKAGNKHLRKALVEAAWHYLTCSGRPKEPARGQAPDRVARRHAAKGVRRLVERREALLARGVHNNKANVATARELACWVWAVGLMAEEA

SEQ ID NO: 77493 - protein, 466 aa, unidentified
MRTDKKLRRNRKARKELARRLQSENPGLEVVHAHAAGIDVGNGAHYVAVRPDRDPHPVRRFECFTADLYRLADWLQSCGVQTVAMQSTGVYWIPLYAILEERGLEVYLVNARHTKNLPGRKSDVQESQWLLKLHTYGLLNNSFQPSSKIRILRTYWRQRLQHVTGAATCVQRMQKALTQMNIQLANVISDLSGVTGQLIVRAMVAGERDPRKLAELSHPRIQASRAEIARSLEGTWRPELIFVLQQELEMYDTYQRRVAECDQELQKHLRAFGDTVPSPRKEEVPPKKQKKQNKNNPHFHLADELQRITGVDLTRIDGVDVIVAQTVISEVGLDMSPWKTEAHFASWLGVCPDNRISGDKVLGRRTRHVLNRAATALRLGASTLLKSQTYLGAQYRRLRSKLGAPKAITAMAHRLARLVYRMLKYGQQYVDKGAEYYELRHRQQQIEFLRKKAARLGLQLAPAHPS

SEQ ID NO: 77494 - protein, 371 aa, unidentified
MRKVALDLGVRKTSYCEVQDGQVILRETVSSVSSLESLLGPEQPSAQVAIEACREAWHVHDLLSSWGNHVVLVDTTRSRRLGIGQHGRKTDRIDAEVLALALERGGIPAAHVLSPHRRELRRWLSVRRALVESRAQLITTARGLAREQGVTLPRCAAPHFAGHARKRGQGELRVIAPLLTLLETANSELEIVEAKLAELCATEPVVELLMTTPGVGPTIAASFVSVVDDAKRFRSPHHVESYVGLVPTEDSSGGQRRLGAITKKGNSYLRSLLVQGAWAILRGTDRQDPLRLWADAVAARRGKKIAVIALARRLVGVLWAMWRDSKPYNPAVLASASSRGTHDSARTLDAQSQTMASVARKRAPKEVALQA

SEQ ID NO: 77495 - protein, 402 aa, unidentified
MEVVHERCCGLDVHKKIVVACLLTGRQKEVRTFSTMTRELLHLADWLAAAGCTQVAMESTGSYWKPVYNILEVSCTVLVVNAQHMKAVPGRKTDVKDAEWIADLLRHGLLRPSFIPDRASRDLRELTRYRTSVIRERTAEVNRIQKVLEGANIKLASVASNVVGVSGQAMLTAMIAGVDDPSVLADLARGRLREKRELLEAALEGRMTQHQRFLLGVQLQHLSDLDATITQVSEEIDVRLRPFAEVATRLQTIPGVGERTAQIVLAEVGADMSRFPNAGHLASWAGLCPGHHESAGKRMSGRTRKGSPWLRGALVEAAQSAGRSRTHLGQRYHRIAARRGKKRAAVATAHMILIAAYHILGGDRCFEDPGVDYIDRRRSQQTTRRLVRKLEGLGYRVSIEAA

SEQ ID NO: 77496 - protein, 376 aa, unidentified
MTKTIRYVGLDVHAETIAVAVAEASGEVRALGTIPNTPEAVRRLIKKLGAGGAALRVCYEAGPTGYVLYWQLTELGVTCEVVAPTLVPVKAGDRVKTDRRDALKLARSYRGGDLTPVWVPDAAHEALRDLVRAREAAKADQLRARHRLGKFLLRHGCRRPPKMKAWTARHRVWLDTVRFEHGAQTATLADYVAEVDHAAARLTRLEAAIDAGVQDAPATMRAVIEALQALRGIAALSAATIVTEVGQLSRFARPRQLMGYSGAVSREDSSGSRIRRGGITKAGNAHLRRIVIEAAWAYQHRPAIGTTLRVRQRGLSEEIKTIAWKAQHRLHTRYRRLVAKGKPKGQVVTAVGRELLGFIWAIGVQVERTHGTHQAA

SEQ ID NO: 77497 - protein, 373 aa, unidentified
MKTSITHVALDTHKKQHQVAWIHPETAEIQEFTVANTAQELGRMVKRIRKQAPGEVHVCYEAGLCGFVLQRRLEALGCVAQVIAPSLVWRKPGERVKTDRRDARKLLTQFAAGQLTEVYAPDPAQEADRELTRCRQSAQEDLKQARQRLNSFLIRNGYIYQDGSHWTDKHGRWLKALVFDQPKLRTVFEEYRSQIEHCTQRLESLDKQVQSLAQSDRYRAAVGVLRCLRGIDTLTAITLLTEIFDFGRFDSPRALMAYLGVTPSEDSSGESRRPGAITKTGNRRARRILTEAAWHYRHPYAVSKALKLRRQDQPAWATDLADQAAKRLYRRYHHLLERGKASPVAVMAVVRELAGFVWAMLRQLPQQTQSPSP

SEQ ID NO: 77498 - protein, 355 aa, unidentified
MLIIGVDFHPQFQQIAWIDRETGEFQEQRLQHREEAETFYRALAAAGQKVRVGMEASGHARWLERLLAELQFELWIGDATRIQSKRGRKQKTDRQDAQHILKLMLKDDFPKIWVPSWENRDLRQLLWHRHRMVQARTRIMNQLQAVALNEGLRCKKRLWRGGRREQLESFRLAPWASRRRHDLLELLDRLNPTIAELSQAVEQEAENHPEARRLMTHPGVGALTALAFVLVIGDADRFQCGKQVASYLGLVPLEKSSGNRRRLGHITKQGSSMMRFLLVEAAQVTVRSLPEWRSQYFRLMLRRGRKTAKVAMARRLAIRLYWMWREERDYEQCRSSVRTQDSPDILMVCTRTPRN

SEQ ID NO: 77499 - protein, 343 aa, unidentified
MNNTVIGIDIAKLVFQLYWVENKTGEVKNLKLKRDRFLAHFVNLSPCLIGMEACGGAHHWARELTKLGHTVKLVSGRLVKSFVMGNKNDAADARAIWTVTQQPDTREIAMKTVTQQAIITLHRMRENLKKMRTMQVNELRGFLTEFGEVMPQGQAGLNKGIADAIDRAAQTLPGVVAEALRDQWKRIGDLAEKMADIERKLQSWLKTNPDASRLMAIPGVGILTATAAVANMGDAHRFKSGRQFSASLGLVPAQTGTGGKVRLLGISKRGDTYLRTLLIHGARSAFIHSKNLPLWIQELKQRRPMNVVVVALANKMARMIWAILAHDRMYDAQWGSENIKAAK

SEQ ID NO: 77500 - protein, 337 aa, unidentified
MKKNDYKYFVGIDVSKKTLDMSLVVKEGMRVLDSTRIENCKSGLNRMGVWLKNYNLKLGDVVFCLEFTGVYNEPVLSYLSKVNAYVWLEMPIKIIKSSGLQRGKNDKVDSIKIAIYAAKNSENLQRWVQPSKTIQIVRDLISLRNRLIKALKMMLQPINELEDMEECDRAGILNQEIKSIYTKLEQKIKAVEKRIAAELKKEPEVENKVKLAVSVPGIGKWTALHLVLTTNNFERMLDGRQLACHCGCAPFEHTSGSSVRGKTRVSKMANKPLKSLLTMGAVSIINSKNDFGAYYQRKICEGKNKMSVINAVRNKMLHTVVAVIKRNSPYQLSPIIS

SEQ ID NO: 77501 - protein, 411 aa, unidentified
MVEHTRTRQGIKGQVIVVAVDIAKRGHWLLIQGPDGIREQPRRIANTAAGFAALLAQAAAARHRWPEAPLVVACEPTGHYWLPLAYWLQARGVPVVTVNPAHTKRAKELEDNSPAKTDRKDLRVIADLVAAGRSRPCHLRTGVYATLRALAMLRARVARDLTAVTNQLHQLVDQLFPELLPCFGDDLRRATCRRLLAVAPTPAAVQALGVARLTALLRGASRGRYGATLAERLLAAAQTSIGIREGTAPLVARLTYLLDEDARLRAYRRALERQQAAALEAVPYARALLAIRGLGVGTVATLLGEAGDLRGYRRARQLLKLAGLNLYEISSGEHQGQRRITKRGRPGLRRILYMAALRLLKRGAPYCGYYHRLRARVANTQAVVAVMRKLLRVVHALVHSGQAYDPVRLAA

SEQ ID NO: 77502 - protein, 346 aa, unidentified
MLHAGLDLSRKRLDFHLLDAGGVTVEVGATPPDADGLRGLTRRLERHGEPIRAAIESMNGARFVHDRLELAGWQVEIADAQKVKGLAPLACKTDRIDAWVLAELSRRELVPAIWLPDPAVRGERERARWRLHLVRHRSSLKQRVHATLLAHGKPCPVSDLFGVSGRSFLERLQLPEPWAGTLVASLHLIDELDGEINGCEAELRRLGVSHRYVPLLMTVPGIGWVLAYTIAAELGDISRFPSPRKLSGYTGLWPRVYQSGESDRRGPLAKQGPRYLRWALVEAATHACTHPLYRDRYQRTKTRLGRQRGAKVAQVDLARRLAEAIWHMLTRDQPFAPAGATDPLAA

SEQ ID NO: 77503 - protein, 355 aa, unidentified
MNSEKYIGLDVHQATIVIAVTDSTGKLIMESILETEAATILQFFAGLRGTLYVTFEEGTWSAWLYDLLHPHVDKLVVCNPRKNALLKDGNKSDRIDARKLAELLRGNQLKPVYHGETGVRMLRELSRSYLTIVKDLSRVMNRLKAVYRSWAIPCAGRDVYYPRNRAQWLAKIPEAGVRRRAERLYEQLDMLRHLRQQARRELLVESRKHAITAKLRQIPYLGPIRSALAVALIQTPHRFRTKRQLWAYSGLALETHISAEYRFVEGQVRRSKKVLSIRGLNKDHNHDLKGLFKGAATMASVRPGPFQDFYQTALAKGIKPTMARLTLARKIAAITLTLWKKGESFDAEKLKSQAA

SEQ ID NO: 77504 - protein, 351 aa, unidentified
MLIIGLDYHPSFQQIAFVNTETGECGERRLEHGDQEAERFYRKLKEGGVSVRVGMEATGHARWFERLMAELGFELWIGDPAQIKAKRVRKQKTDRQDAQLILTLLMENRFPKVWVPSVENRDLRQLLWHRHRLVQMRTRVMNQLQAVAMNEGLRRKKGLWSKSGRAQLESFLLAPWATRRRRDLLELLDQLTRSITELSTAIEQEGKKRPEVVRLMTHPGVGPLTGLAFVLIIGPPERFRCGKQIGSYLGLIPCEDSSAGKQRLGHISKQGNSLLRFLLVEAAQIAVRDDPNWRRKYVHLAMRRERRIAKVAMARKLAICLYWMLRKEWNYQQLLKFGSHAGQLETGHGVE

SEQ ID NO: 77505 - protein, 388 aa, unidentified
MNVGADKSEPLTAIHTDLGAIFVSLELSRSSWLITSLSPGGGEKMSKHSVPGGDFAGLMERFAQLQEKARLRTGQSFRIIVIQEAGLDGFWIHRALQNEGIESHVVDAASIATSRRRRRAKTDKIDGETLVRALLAYKRGEPRVCAMVKAPTPGEEDRRHLCRERKALTAERVRHVNRIKGLLFSQGISGYQPLRRDRRQRLEELQTGDGRAFPQHLKALVNRELDRLELLLKQIKTVEAARDALLAVGQTAKPAPAAMLLDIRGIGPEFAAILWSEGLFRHFENRRQIAAYAGLAPTPWQSGAVDREQGVSKAGNPRLRTTLIQLAWLWLRNQPRSALSLWFHERVSRNGGRLRKTTIVALARKLLVALWKYVTAGVVIEGVTMKVA

SEQ ID NO: 77506 - protein, 321 aa, unidentified
MAMPVVPIEAGVDVAKDELMIQTAPGTKPFAIPNTPKSIKTWLKSVPKGSALALEATSSYHMELAEQAYAADLNVYVIDGLRLSRYRDSLGVRAKTDANDATLLARFLNRERASLKAWVPPPPGHRQIQMLLRRRAKLVEIRGILRMSWSGEKLFASELEIIEQALKQLERLFEMRLRAAVKEAGLLDQLRRIQQVPGVGFLTAVGLVMSFMRGEFSNSDAFVAYLGMDVITAQSGKWVGRGRLSKRGDSEVRRLLHNAAMSGSRTETWKQFYAYHLARGKKTTQALVILSRRLARLAYGLMKSQTDWNPQVYAGGGKTAN

SEQ ID NO: 77507 - protein, 342 aa, unidentified
MKIIGCDFHPSFQQIAMVETETGEQTERRITPAEASSFYRSLAGPVRVGMEACGNTLWFERLLAELGHELWLGDAGRIRATEVRKQKTDRRDAELLLRLMLEGRFPRLWVPSPEQRDLRQLLLHRHKLVGMRRQVKNQLQHLALNQGVQRKAKLWNRAGRKLLAELPLSGWTARRREELLGLLDDLEQKIEELDVAVEEAAKKDAVAQLLKTHVGVGLITALAFALTIGDVHRFAHSRHVVSYLGLNPSEHSSGGRQRIGSISKQGNAMVRSLLVEAGQSAARLVPELKRAYQRLKRRKHSSVAKVMVARKLAVRLYWMWKTQQPSTATRMQGSPTGPVAER

SEQ ID NO: 77508 - protein, 317 aa, unidentified
MKENGPYIGIDVAKAYLDVTAHLSGEPWRVANDEAGISTIVTHLREVGPTLVVLEPTGGLEMPLTAALATAGLPLAVVNPRQVRDFAKATGRLAKTDRLDARVLAHFAHAVRPTPRPLPDAQTLELAALLARRHQLVQMLTAEKNRLAATRPPVRQRVQVHIRWLKQELADSDGLLSNTIQESPLWRVKDDLLQGVEGIGRVVSITLLAELPELGILDRRQIASLVGLAPFNRDSGMLRGKRRIWGGRARVRAALYMATLTATRFNPVIRAFYQRLLAAGKMKKVALTACMHKLLTILNAMVKHNRPWNPQLNLRSS

SEQ ID NO: 77509 - protein, 422 aa, unidentified
MLEETNDSEEIIARVAALDIGKAELVCCIRVPDAGKRGRRLQEVRTYPTMTRSLLVLADRLGELGVTRVVMEATSDYWRPAFYLLEAQGFEVWLVNAKDVKHLPGRPKTDRLDAVWLCKVAERQMLRPSFVPPPEIRRLRDLTRYRADLVGVRTAEKQRVEKLLEDAQIKLSVVASDIFGVSGRAMLAALIAGERDPKALAQLARTRLRAKRSQLEEAFTGHFSDHHAFLLQTMLARIDQASADIAELEAHIDQEVAPFAAAVDRLDEITGVGRTAAQVIIAEIGLDMGRFPTPGHLASWAKFAPGVKQSAGKTKGKATTGHGNPYLARVLGEAAVAAGRTDTFLGERYRRLAKRRGTKKAIVAVGRSILIIVWHLLADPTARFHDLGAGFYNTRINPERAKRNHVRQLEALGYKVTLEPAA

SEQ ID NO: 77510 - protein, 326 aa, unidentified
MKSMLWIGVDVSKDSFHAAYRQGTGFCEAEFLQNEAAMQAFVQWLPQAGKVQIVLESTGPYWQPLVAFLHSQPQPLHCAVVNPRRVRDFAKAKGQYSKTDPLDARLLVHFGETFPLPALESQKQAYHHLRAFSRHYLQLRNHYDTIRDQRDKALADPHAPVHLEVSYDTLLKALHSQMEGILGEIEQSFRQPALQEAAGLLQSIPGIGTKTTATLLGEYGSDALNYSIKQWESFAGLDVVLWESGTSVRKKPRISKQGNWRVRRALYFAAMVASRHNPTVRAYYQRLLNRGEEKKAALVACMRKLLQISHGVLKNQTPFREMPNSA

SEQ ID NO: 77511 - protein, 428 aa, unidentified
MNEEDRSRLEEFRQFRKEVRGSSEYLLVGIDIAKEKHYAFFGTARGKTLLRRLVFENNIEGFEKLLGQARALKDQNGLRRIVFGMEPTANYHKPLGEHLIRCGHLVVLVSGVAACENRKTLDGRWDTNDTRDAANVADLVSQGKCLFYEFPVGTLQDLRNLLSLKRRFKRVEHGYRVRIRNHLLAKYFPELDRYYEQSESTALAVVRWCLDPSEIVSLEYRQFAEMVSSTRWRSSQEKRLLAIWKLAVDSVGCEAGPVVEFEAKVMVEGLKQIRESLRQIEEKIQELCSPFPEYECLLSIPGFGPDISSKVLGAIGDPFRFQNGRQVLKMAGLDLSAKRSGKTSESVIPVISRKGKADLRFALYQAALIASVQNPDFIGYYTAKLRGREREPGIKIKVRVKLAAKLLLIAWTLMKKKEPFNPDHLVTE

SEQ ID NO: 77512 - protein, 356 aa, unidentified
MEYVGIDWGYGRAAWCARLPGGDIVAEGLVPADADGLLRLVHRLGPEVKGCVEMMSGAVWVRDQLAACGWQIEIADARKAKALAPLAAKTDKVDARLLAELARRDLVPALWVPSLSERELRERLRRRMHLVRLRTSAKGRIFGLLTQWGVRIKLTRLRQPDGLELLERRGVPEVWPRSVAEALGVIDELDRRVEPLDRELAPLADADRRVALLETIPGVGQLLGLTPTAEIGDIARFASARKLVGYSGLSPRVRQSGKSERTGALSKSGPKTLRWAAVEAAQSAWRQSNPWHRLYSDVASRQGSGQAKAAVARKVLVAAWHVLARNETFKPCRPHGGTVAGKLHRGSGHMKGPAGK

SEQ ID NO: 77513 - protein, 485 aa, unidentified
MVETQAEFVVGERRCIGLDVHREFAQVAVWQGGLVWQAGRFATTPDGVRAFAQELGPADEVALEATGNTWAIATVLASRAGRVVVSNPAKTRAIAEAKVKTDKVDAEILAQLLAADYLPAVWRPDPATAALRRQVLRRAHLVRQRTRLKNQVHAILHRNLIPRCPAADLFGHKGRRWLAEQDLPPDERAAATALLRQLDFHGQELREIDTDLGKVALGRPEVLRLMSVPGIDATVALSIVAAVGDFTRFRTPEKLVAYLGLNPRVRQSGGQPASHGRITKAGPAHARGMLVEAAWSASKAAGPLRAFYQRVQARRGMQVAVVATARKLTVLCWHLINKDEDYAYAQPSLVAHKRRKLELRAGAPAAHGQKGKAAGYSLKAMRAAERDLVTQAERAYQVTVAAWQPTRPTPRASAARSSAARSGVDVAATNGARLSRPSRATRRGRADSPSPCTSRRGRTTSTVEKTYAGPHRGQGRPRCAAGAPP

SEQ ID NO: 77514 - protein, 342 aa, unidentified
MSKVTVYVGLDYHKDSIQVCVMDHSGQVLANRACPNDAHALVLLVAFFGDHVRAAIEACTGAADLADELVHRHGWDLDLAHPGYVHRMKQSPDKSDYSDAKMLADLVRVGYLPRVWLAPQDVRQLRTTVRYRQQLVHQRRATKLRVTALLREARLVQPQGLRRWGRSWRDWLATAEGLGSEARFVLDCHLAELRGLDEQITHVEVRFATVTAEDPVILRLVAMRGVGLVTACALRAEIGRFDRFRTGKQLARYCGLSPRNASSGQRQADAGLIKAGSALLRSVLIEAAHRLIRFDARWSALAGAMRAAGKPACVVAAAVANRWVRWLFHQMEGGSITLKPAG

SEQ ID NO: 77515 - protein, 340 aa, unidentified
MEKSEQIQPHAWILGIDVSKQSIDVCLIRTSDGQLFESKFHNNLSGFRHLKRWCKELHCECDASTLCCMEHTGLYTRLVVHYLLSREVHVWLESSLQIKRSQGLIRGKSDKIDAQRIARYAHLFQDKARIMQLSILTLEKLKDLQANRKRLMKSLQSLRTSVQELKSFDSSIGKLLEQTNKEAIRGLEKSLDKVDEQILNFINEDQELKQKYDLMLTVKGVGKVLAAMLLVYTHGFNRLQDGRKLACYSGVAPFAYESGTSIRGKAGVSKFANNDLKQVLHMAAISSVQHNSELHHYYQRKVQEGKNKMSVINAVRNKLLHRIVAVVNRGTPYEVRENNN

SEQ ID NO: 77516 - protein, 340 aa, unidentified
MTVYAALDVSMDKAAICVMDASGRILLEAVAPSDPDAITRCLAPYGAELELVGFEAGPLSEWLYRGLQDAGMTVVLMETRQVRAALSAMVMKTDRNDARGMAQLLRSGWFRPVHVKAIPAREQRTLLTARSTLMRRQKDIENSVRGLLKGFGLRLGRLLRGRWDDAVREIVSGNATLASIIEPLLIARQALRDQLAVLDRQVRAVVRADAICRRLMTAPGVGAIVALTFRATVDDPACFRSSKSIGPCFGLTPRKYQSGEIDRNGGISRAGDPAVRVALFEAAHVLMTRVAKWSRIKAWAMNIAKRRGAKRAKVALARKLGVVLHRMWIDEADFQYGQPA

SEQ ID NO: 77517 - protein, 429 aa, unidentified
MEEVTDEPLYRDRVCGIDIGKAEMYATIRVPSDKDPARRAQETRGFATTRQGVLALADWMRSWQVPCAVMEATGDYWKGPFYRLEAEGLECVLADARQVKNLPGRPKRDPSDSRWLATCFERGSVTSCFVATPEFRIIREHTRYRRDLTAERTREKQRAEKLLESAAIKLSSVITDLHGVTGRDIMGHLIAGERDSMILARLARGRARSKIAALEAALEGAEFFTAELAALLARMLARIDRLGADIDEVTVVIEALLAPYEEQLQQAESMPGWGRRSAQDAIAGTGADMSRFRTGAHLASWAGRTPLDNQSGSRKGKAKSKKGNRYLGAVLGETAVSAGKTQTREGARYRRLSRRRGKAKACVALGSTQMKVYHKLLSNPGMRYEDLGADYYDQQADARRQLRALEKRARELGYALVPDLTGCPEIACP

SEQ ID NO: 77518 - protein, 414 aa, unidentified
MLKIVYRVCCGMDVHKSFVVACIASTNEYGVTTYKSKRFSTFTGDLRRCAVWLAENNCKDVCMESTGKYWIPIYNILESTCNIVLAHPKYVKAIRGKKTDKRDAKWIADIFKHDLVAGSFIPPADIRQLRDLFRYRWKLTSFTTGEKNRAQNCLTVSNFKLDDVFSDVFGKAASAITVRILDNPAKKITDVSGFRTKHMKATDEEILAAVDGVMCEEQAEKLRIIRSHMDSLELCKLNLESLILATAEKYLPQLNLVMTAPGIQSFAAIGIISEIGVDMSVFPTSKHLCSWAGLTPQNNESAGKKKTTRIGRAGAYIKPLLVQCALNAIRAKKFPEIRNRYLTLKKRRGHKKAIIAIARMLLTAIYNILKKNELYNPELYRSADRPPKNREVSVEEAVFILQRQGYLVTAPPTA

SEQ ID NO: 77519 - protein, 346 aa, unidentified
MAVTIVEDRRAITGGVDTHAEVHVAAALDPIGGLLGVKEFPVTAAGYASLLGWLAGFGTVALVGIEGTGSYGAGLARHMAAAGVRVVEVDRADRQDRRRQGKSDPLDAVSAARAAQSGRAAGAPKGRDGAVEAIRALMVAKRSARNERTQAINQARSLIVTGPDDLRARFAKHTVTALVSDLAALRPRPGDVPGYATRIALRELGRRAQFLDAQLERLDELISPLVAGRAPGLLALYGIGPDTAALLLIAAGDHPERLRSEAAWAHLCAVAPIPASSGKVRRHRLNPGGNREANHALWRIVITRMSAHPATRAYVERRTAEGLSKKDIIRCLKRYVAREVYPYLRG

SEQ ID NO: 77520 - protein, 348 aa, unidentified
MTKQLMAGIDLHGNNLLIGLVDQDGQRLKHQKLACDLKLVDAFLTPYKPQLKSLAVESTYNWYWLVDGLRALGYPVVLANPAAIEQYNGLKHADDQSDAYFLAELQRLNILPTGYIYDAHLRPVRDLLRRRLSLVHQRTALMLSFKSLYTRTTGQALSLSRLKGLAAAEARTLYAHPANGLIATLQKEHIAKLDESIALIEQTVLASARELPSYAPLQTLPGIGRILGMTITMEIGEIGRFKSAGDLASYCRTVNSQRLSNGKQKGANNRKCGNKYLAWAFVEAANFAKRYDEPCRQWFDRKAAKTSPVLATKALACKLAKAAWHVISEGGAYEPRRMFPELASRPHP

SEQ ID NO: 77521 - protein, 456 aa, unidentified
MKNYLGIDVSKGYADFALIDEQKQSIVTNFQLDDTIAGHSSLGEFIRELFKQHPDLTLLATTESTGGYENNWIECLKKLQRCYDIKVARLNPKGVHHHHEAKLNRAITDAISARIIAEYTISHEEIIRFDQPDESYALRKQWTLIKLLSKQKTQLLNKLDNLVYQSNTELMIYCRSSWPDWLLQLLVTFPTAKELAQANVDQLAKIPYLGTDKARKILDQARQSVASATDSVSGEMIKTVIAEVIHKEKLIAICKKSLIENCSLPDVELLASITGIGKFSAVGLIIEIGTWLRFASAAKMASFFGLHPILKQSGDKNWGARMSKQGSSEVRALLFMCAMVAIRHNPVIKDLYAHSLAKDKSKMSAMGICMHKLLRIIYGVLKSGKAFDPEIDQANRTKRPDQRKPKTQETRRFQPLDDNAPVSARKNKKRKEQNQSQGELVTICEIKVPTLSRCDT

SEQ ID NO: 77522 - protein, 419 aa, unidentified
MNFNRTKKVKIINKDTMIAALDIGKVAHFAYFRSPNGKDIKPFPFHNFKKGFDEFWMRLSQFKAKEGLQEIVIGFESTGPYAEPLLHYLRKKPVTLVQINPVHSKRLKDMTGNSPNKTDKKDPRVIADIISLGHALTLVVPEGSAAQLRRLTQARERAIRRRTAMVNQIQHLIFVIFPEFLRIFKNISTKSAMYVIKNHPTPESIISVGLEPLTVILRKVSRYQLTYGRIKELFEAAKSSIGIDEGKESIFMEIKHLVSTIENESCFIDDLEKQMAKHLDQIPYSHCILSIKGLGLITTAGLIGEVGDFKKFNTISEIMKLAGFDLFEVSSGKHRGNRRISKRGRSLMRKLLYFGAINVVKSHGIMHGRYQQMLDRGMPKMKALVAISRKLLGLIFALARDDTVYVENYSNIQHFKLAA

SEQ ID NO: 77523 - protein, 419 aa, unidentified
MTQKKDSKIIEVVHPICCGLDVHKETISACVIFPDKAGADQYDIEEFGTFTDDLQRLRSWLLEHECFVVAMESTGIYWRPVHNVLEDVVEVILVNARDIKNVPGRKTDISDSKWLAGLLRHGLLRGSFIPCKAVREWRDLTRLRKKYVQTVGDYKKRCHKLFESANIKIDSVVSDLFGVTGRNLVNLLVSDRQGLTLTDVEGCVRGKLKGKEQELYRSIQGFFSDHHRFILKRLLKTVVMLEAQIAEFDRQIQCLMKDQKDVLDRMKKAAGISDVSACGILAELGPDLSGFPTGAALVSWSGLCPGNNESAGKRKSGRSHVKKHHLKTIMVEVAWAAIKKKGSYFKDKYYRLKARRGAKRAIVAIAHRIMLGIYHVIKHGVEFRDLGADYLSQRNKSQKMSYLRKQAQLMGYDLVAQTT

SEQ ID NO: 77524 - protein, 350 aa, unidentified
MLEADEQTEEIIERIAALDIGKAELVCCARVPHEGRPGRRLQDVTTYSTMTRSLLGMSDHLRCLGVTRVVMEATWDYWKPVFYLLEAAGFQTWLVNARDVKHLPGRPKTDRLDAVWLCKVAERQMLRPSFVPPAEIRRLRDVTRYRVDLIEARTAEKQRVEKLLEDAQIKVSVVASDIFGVSGRQMMAALIAGQTNPKTLAQLARGRMRAKLTALEDAFTGYFTEHHGFLLSKMLGRVDALSTDIGELEDAIEEMVDPFGDAVERLVEVPGLGVISASAVIAEIGLDMTRFPTAAHLASWARFAPGVKESAGKKKGRGSTGHGNRYLARVLGEAAVAAARTDTFLGKRYR

SEQ ID NO: 77525 - protein, 339 aa, unidentified
MKYTTVGVDIAKSVFQLHWLDAETGEIVNRQLKRAVFLEHFANREPCLIGMEACGGAQHWARRLIEMGHQVKLMPAKFVKAFVIGNKNDPADARAIWMASQMPSKAVAVKTEAQQAVLALHRMRQQKIKFRTMQMNTLRGLMAEYGEVMARSRAALDKAIPIILARLAERLPAMLIDSLRELWSDLDRLDLQIAGIERRLQDWLKEDKACKAIAAIPGVGLLTATATVATMGDAKAFKSGREFAAWLGLVPKQVGTGGKVQLLGISRRGDTYVRTLLIHGARSVLFHGKHGGAWVEQLQKRRPSNVVTVALANKMARTIWAVLAHERPYEQSHVSAKPA

SEQ ID NO: 77526 - protein, 319 aa, unidentified
MIYVGCDISKKTLDVFFIQNGKHYHLQFSNTPMGIKALLKRLPPDAFIIFESTGAYTKLLYKTLCDNNVPCCCCNPLTIRRFAQGMGFLAKTDRIDSKVLYLYGEKTNPKKTQFKDDINLELNELLYVKDALLKEIQSLRNRLEQPFVCEDVGQILHDAIKALQEKLLLVEKKIEDFMKRNPVYAEKARRLTTIIGVGLTTAYAFLAYGPELGTLSRNQVKAIAGLAPKTRKSGSSHMRETIGGGRAHLRKACYMPALVAIKCDPFIRGYYEGYIKRGKAKKMGIVAVMAKLLVRANSLLKEPVNSEKQNTPILDQKVA

SEQ ID NO: 77527 - protein, 351 aa, unidentified
MKILAIDLGKFNCVSCLFDTETNTTEFETIKTYRIEFEGLLKRMCPQLVVMETCSITGWVHDLCVERGYEVLVADPSQEAWRWKHVKRKTDKDDALKLAKLAALDQINPVYVPAPQSRQYRQLVKYRKTVVNRVNRIQNNIRALFDQAGVKIPSGHRAWTVAGIEELSQHRKPLSECDTSNLWRGELDLELTMLDQLWEHLASIEQQLEELAKSQERVQLLQTIPGIGRRTAEVIVACLDDPKRFENGRQVSAYAGLIPQQHQSGQTNRLGKITKRGSRLLRTALVEAAWAMLRYNEWAAATYTRICGGQKTRKKTAITALARKLLVRCWAMLRHNQPWNTDLAQPTTAVR

SEQ ID NO: 77528 - protein, 386 aa, unidentified
MLNVHTLIPSDVMFKKFIISSKTTFIGGSTMQHTILNFINQHFFVGIDVHLKQWKITIRSNGIELKTFSMNPSPQELLQYLQKHYPGGTYHLVYEAGFCGFWIQRSFTALGVQCIVVHPADTPTSAKEKVYKSDPVDSRKLARELENGSLKALYVPQVASEQLRSLMRLRFRLVQQQTRTKNRIKGFLRVNGIAIPARHLTNPRWSGAFLLWLKSVHPSHDAGRYTLGNLILQLEQTREHLSNVLRQLRREAKSKNLASAFEAIDSAPGLAFITTMTLMTEIIDIRRFSRFEPLCSFVGLVPSVYSSGETSYTRGMTFRHNQYLRPLLIEAAWTAVRKDPAMTLRFNELCRTMSKQMAIIRIAKKLLRRIFHLWKQQDRYVYALVA

SEQ ID NO: 77529 - protein, 457 aa, unidentified
MSQRSQKKKSRKFQVTQLPAQLQHINLNAAGIDIGSERHLVAVPAGRADVSVREFGTFTADLEALADWLKKCGVTSVAMESTGVYWIPVFEVLERRGFEVKLVDARHVKNVSGRKSDVLDCQWLQQLHTYGLLAGAFRPPDEVCVLRSYLRQKEMLTQAASMHIQHMQKALQQMNLLLHNVVSDITGVTGMKIIKAILAGERDPKVLARNRHGLCKNSPSTIAKSLIGNYREEHLFALRQAVELYEMYQAKIADCEQAIIKQLEKQPNVSDDEPPAADKETQARSRMRAHVDVQELLYKKTGIDLFAIPGLAADTLLTLASEVGFDMSPWKTEKHFASWLGLCPGTRRSGGKVLNSKTKRNPNRATQAFRMAASSLSRSKTALGAFFRRLKMRTGGPQAITATAHKIARIYYAMLTKRTSYIELGQQAYEQRYQQRRINSLKNQAKLLGFQLVPYTT

SEQ ID NO: 77530 - protein, 427 aa, unidentified
MIETNKCTDFAALVGLDWGWDSHAIALAPADGPTQTSTLKHSAESLHQWLDQLEKAYEGRAVAVAVEASKGAVVAALLERPWITVYPIHPATSTRQRSAFRPSGAKDDTPDALVLLFILQHHRDRLRSLQPDDEATRTLAGLVEARRKAVDRRSLLANQLKSTLKNYFPQAMDLVGEDLAIPMALDFLDKWPRLTDVQASKDITLRNFYCRHNIRRAELIQSRIDFRRSARLLTRDSAIIEVNVRIVRMLVAELRVLAEHITGFEIAIEEAFAEHPEKSFFRELPGAGPVMAPRLLTAFGTARDLFPDAASMQRYFGVAPVTEKSGGRRWIHWRWNAPKFLRQTFVEWAGQTVIFCPWAKAYYEQQRNKRTGHHAILRALAFKWLRILWRCWQTRQGYDQEKYLQQLEKRRSPIAARARQLAVEMAG

SEQ ID NO: 77531 - protein, 417 aa, unidentified
MRKFRTFTSGLHRLADWLTQCRVKTVAMESTGVYWIPLYEILEQRGFEVLLVNARDVHNVRGRKTDVADCEWLRELHSVGLLRASFRPATAIVPLRSYLRQRETLVEEAATRIHRMQKALTEMNLKLHTVLTDLTGQTGLKIVRSILDGERDPERLAAHRDYRCHAAHAEIVAALTGNYRAEHLFALRQNFAAYEFLLQQIAQCDTEIEALLTTLAAQQPPPATTLPAPRRKTSSKHQPQFDIRSPLHRLTGGADLSQIASIGPQAALHLIAEIGTDMSCWPTAKHFTSWLALAPNNKVSGGRLLSSRTPPSTNRAAVILRRCAMSLGKTSTALGAFYRRLAARAGKAKAITATARKLALLVYRVLAGNFVYNDPGATAYHQLNRARELKSLRKRAKLLGFELLDHSTGEVLLQPIS

SEQ ID NO: 77532 - protein, 351 aa, unidentified
MDYFAGLDVSVKDTNVCIVDDTGKIIREVKVASEPDALLQVLRNATYRFKRIGLEAGPLSQWLFSALGEANLPVICVETRHMRAVLQAQINKTDRNDARGIAQMMRVGLYRPVHVKTLRSQKLRMLLTHRKLLQSKAIAIENDLRGTLRNFGLKVGMAGATKFEGRIKELIENLPDLAVLVEPLLVVRRVLREQIGVLHRRLLAVVRDDDVCRRLMTTPGVGPVVALTYRATVDVPARFRKSKAVGAVFGLTCAKYQSGEVDRNGRISRCGDEMMRVMLYEAAQSMLRSKKWSWLKAWAMQIARRRGMKKAIVALARRLAVIMHRIWVDGTEFRWTREQATAAAAAAAAAA

SEQ ID NO: 77533 - protein, 343 aa, unidentified
MQTVTTIGFDIAKSVFQVHGVDAAGQVVVRRQLKRRQVIALFQKLRPCLVGIEACASSHYWSRELQALGHSVRLMPPAYVRPYVKRQKNDMADAEAICEAVTRANMRFVPTKTPEQQSGLMLHRTRHLFMRQQTSVINAIGAHLAEFGIVAPVGRRSVEELLRVVADANDKRVPEVVRTCLAALGSQLLSLKQQILDFDRMIMAWHRSNQTSKRLNCIPGVGPLLATALVASVADPKTFRSGRNFSAWIGLVPKQRSSGGREKLGSISKQGDRYLRSLFVTGALAVIRYAKIHGAKHRPWLTALLARRPTKVAAIALANKLARMAWAMMATGARYNYPASLRV

SEQ ID NO: 77534 - protein, 420 aa, unidentified
MKFKQSAKQNQRIERITSHHLIIGIDIAKFTHVARATDYRGIERGTYLTFSNDLEGYARLYQWMQDLMAQFNKTDVIFGVEPTGHYWFNLALWLQEKPLELVLVNPLHVKRNKENRDNSPTKNDVKDALVIADMVKNGYYSDVYLHAEPYRALRQIVTTRDFITKQVSSVVNQIYRWTDIYFPEFQQVFKDITSKTALATLAEFAHPSDLRHLAVQDVIAGWKKRLKRAGSRKAAVALIHAAQQTVGTPDLVEEAKISLSLLLQQLQMYNDQLDQLKEKISQLLQCIPTVKILRTVKGINDITLAALYSEAGDLSRFSHGNQLLRLAGLHLSENSSGTYKGEAKITKRGRPRLRKLLFMTVLHMVSVHPEFRALHQYNKQIKKMNGMKSIMKLCGKLARILVAMARTDSDYDENKVRVAA

SEQ ID NO: 77535 - protein, 351 aa, unidentified
MRNLTIGMDLGDKNHVITILDKDGAIVKSCSLDNVRASIIKFFKKYKGSTVAIEASSHSPWISRELKALGCNVLVGNPRKLRSIWNSDDKTDVHDSEMLARIARFDSELLYPITHRSEQAQADLELLKARDMLVKTRTGLINHVRGAVKSFGERLPKCSAESFHKQCRDFLPEDLKAVLQIILEMIEHITSRIKEFGKRIEEINRDVYPETELLKAIGGVGPLTALAYVLILEEPKRFGKGRQVGKFLGLTPRLDQSGETDKQLRITKAGNRFLRRLLVGAAQYILGPFGSDCNLRRFGLRLTARGGKNAKKRAVVAVARKLAVLMHHLWRNGEVYDPFYKSHKVVMKNAA

SEQ ID NO: 77536 - protein, 357 aa, unidentified
MKYIGCDFHPSFQQIAMLDKETGELVERRLLHTEEARAFYEGLQGPVVIGIEASGNMDWFESLLVGLGQEMWIGDAAAVARQEGRKQKHDRRSAALILRLMVENRFPRIWVPTVAERDLRQLLIHRHHLVRMRARIKNQLQHIALNQGWQKKSKLWSRAGLELLGNLKLEPWAGQRRDTLLAMLKDLEEKIKPLDQAVAREAERNQMARLLATHPGVGPVTSLATVLTMGDVNRFADSRSWVSYVGLNPSEESSGQRRRLGSISKQGNPFLRQLLVEAALTAARGDKDLGRMNARLKARKHHGVAKVAVARKLAVRLYWMARTKRSYPDVVRMQGSQSHPVAEVKAEALNRPPASHQ

SEQ ID NO: 77537 - protein, 465 aa, unidentified
MNKNKGRQRRAKGQARLDTLGIVHANAAGIDIGSREIWVALPPDREGETVRCFGTFTPDLHALADWLVENRIDTVAMESTGVYWIPLFEILEARGIRVFLVNARHVKHVPGRKSDVLDCQWLQKLHSLGLLTGSFRPDAEMVVLRTYLRHRAELIQHRAPHILHLQKALQQMNLQLHHVLSDLTGVTGLQILRAIVAGERDPQVLAAFRQPGCKADEATIVKALTGSWREEYLFTLQQSLELFDFFTAQIAACDTEIEGQFSAIKPRWDAPDELPTLPPAKPNSRTKNKPAPSTRQELFRILGVDLVAVEGMSASLAQTILTEIGSDMSKWPGVKHFASWLGLAPHNDVSGGKVLRSRTLKTDNRAGQAFRQAAASVTRSHSAFGAFYRRKRAQLGPAQALVATAHKIARTVYFMLKYKVPFQDIGAEGYESQQRERELAYLQRKAAKLGFDLAPREQAPEPTAA

SEQ ID NO: 77538 - protein, 345 aa, unidentified
MNKRNVIAVDLAKQVFQVALLNRQDKLLSNKSMRPGRFSEYLAKQPRSLVAFEACGRAHHWARMAKSLGHEAVILPTKRVASFRQGQKTDGKDALAIGMAARQPQIRPVAPMTLDQQALQSDQRVAQHVSDEKTATGNMLRGLLAEFGLEIPRGDKALKREIPLILEDAENGLPLGVRESLDIAWQLWRQLDVQVKQLDKLLAQRAAAHEPCQRLMALAGVGPKNALGLYVTLGNGRHFKNGRNASACIGATPQQHSSGGRVRIGHISRQCGNKRLRANLITGAHAVIQVLEKRGPRTEKERWLAALIERRGKGRAAVALVNKTIRTAWAMLAHQEAYHATPRTV

SEQ ID NO: 77539 - protein, 343 aa, unidentified
MEYYVGLDVSLKQTSICVVDQTGSVVREGVVDSDPEAISVYVRSKAPDAVRIGLETGPTSTWLWTELKRLGLPVICIDARHAKAVLKMQINKSDRNDAIGIARIMQTGWFKEVHVKDIDSHSVRALLASRALLVKIKRDLENHVRGLLKNLGLVIGRAKFNGFAVRAEELIEGRPELVTAIRPLLEARNAVEQQVSELDRKVMKLARHDAQVRRFMTVPGVGPITALAFKATIDDPARFARSRSVGAYVGLTSRRHASGEVDWTGRISKCGDAMLRSYLFEAAGVLLTRVPKWSAVKAWGVRLAKRNGLRKAKVAVARKLAVILHRMWIDGTEFNWSKKEIAA

SEQ ID NO: 77540 - protein, 328 aa, unidentified
MQNLLLYPTDRVDQLTIGVDVSKKVLDISAAPGLPRSIPNTTTACRNFARRLRKISPRVVAVEATGGYERVLVQALWDQNVPVAVLQPNRVRAYARSSGQLAKTDLLDAGSITNFARSMTLRLAQRPSPEEERLRVLRDRREQIVQDRVREIGRLEAMQDTSMQREIKRQIKHLKKIEVDLDARIKELINGVEALRLKSEVLRQARGIGPVIVSTLLCRLPELGHVNRQSIAALGGLAPYANESGQRRGQRSIFAGRAEVRRALYLAAMSATRHEGPLRDRYRAMVGKGKVKKVALIAIARKILVGLNVRMAEHLQSIEGEEPASILT

SEQ ID NO: 77541 - protein, 316 aa, unidentified
MTKAERFVGIDVAQATLEIAVRPTGESWQVANDEVAFGALVDRLHELAPTLIVLEATGGIQMPVVGALAAAGLPVVAMNPRQVRDFAKATGKLAKTDRIDAQVLAHFADAVRPEVRPLPDAATQELAILVARRRQLLEMRVAEQNRSRGVPPRIRAQIREHIIWLNRCLADLDRELGQLVRSSPVWRERVDLLRSTPGVGPVLSATMLADLPELGTLSHKQIAALVGLAPLNQDSGKKRGKRVVWGGRASVRGALYMATLVATRRNPVISAFYQRLLGTHKPKKLALTACMHKLLTILNAMVRRQTRWAPPLALVA

SEQ ID NO: 77542 - protein, 341 aa, unidentified
MTFYRGIDLHSKKSHVCVIDKDGKKVKEENLNNDLALILQFLKPFGKDVHIAIESTINWYWIVDGLQEAGYDVKLAHTLGLYMITGAKVKTDRRDAFKLAKLLRMGEIPEAYIYPKEKRPLKDLLRRRAGLVQQRAECYSSLRVQFMKYNLNTMSGTEVKQLLPSDFDIMPIPQELKDYCTMILQRIELLSDQISELNTYLQKVTLEDPKFKILLTLPGVLYVLGLTIYYEIGDIGRFDGVRQFASYCRLVPGISQSSDKVKRGKGSNQGNHYLKWAFTKAASLAVRYYPTLRKFRDKHANRRKGNAATMVANCILAHKIAIATFHMMKEGVPFDEVKLFG

SEQ ID NO: 77543 - protein, 323 aa, unidentified
MTILGLDVSKDKLDACLLLPQPRTTTVPNTPAGHARLLAWAGPAGPLHLCLEATSTYGFAVARHVHHAGHTVSLLQPLAVARYAQATLSRNKTDRLDAALIADFGRTQQPRAWTPPSPGQAQLQAQSRLRDELVRQRQGLQNRLDTAHACVVPVLRRLVRSLMGQIAELDAALLVTLQQDPALRAQAELLRSIPAVGPVLCAGLLAELPADLRTARAATAYAGLNPRHRESGSSLRGRPCLSKLGNARLRRLLYVPALTGLRHNPVLRAQAERLAARGKNGRLRLAALMRKLLCLCVGVLRSQQPWNPTGRPASKIPPLSSSF

SEQ ID NO: 77544 - protein, 345 aa, unidentified
MEHFAGLDVSVKDTSVCIVDETGEIVREVRVASEPEALLAVLKSPAYHFKRLGLEAGPLSQWLFGALAEADLRVICVETRHMRAVLKAQINKTDRNDARGIAQMMRVGLYRPVHVKTLRSQKLRMLLTHRKLLQSKAIAIDNDLRATLRNFGLKVGLVGAVRFEARIRELVEDLPDLAALVEPLLIVRQALREQFGILHRRLLAAVRNDEVCRRLMTVPGVGPVVALTYRATVDVPVRFRKSKSVGAVFGLTPARDQSGERDCMGTISRCGDEMMRTALYEAAQVMLTHSAKWSWLKAWAMQIARRRGMKKAIVALARRLAVIMHRIWVDGTDFRWTREELATAA

SEQ ID NO: 77545 - protein, 367 aa, unidentified
MKKVSTAVAKQSRNISRQKLTIGLDLGDRNSWYCVLDEAGTIRLEQRVRTTAKALQEVFGAMPRSRIALEIGTHSPWISRLLSELGHEVIVANARKVRLIGESRKKDDRLDAQTLARLARIDPELLYPVKHRSAQAQADLMMIRARAGLVRARTGLVNTARGLAKSYGERLRGCNVRNMDPEKAEGLSPELQRALEPLLATIEEVSERIVEYNDRIEALAQTRYPQVELLKQIKGVGTLIALTFLLTLEDPHRFGKSRDVGGYLGLQPGRRKSGESEPQLHISKEGDPYLRTLLVQGAQHILGPFGIDCDLRRWGLKLAERGGRNGKKRAIVATARKLAVLLHHLWVSGEVYEPLHNSSRLTVAAAA

SEQ ID NO: 77546 - protein, 338 aa, unidentified
MKITTIGLDIAKSVFHAVGVDKAGKLIKKKMLRRKDLLPFIAKIEPCLIVMEACSGANYWTREFELLGHSVKLIAPQFVVPFRQGNKNDYNDALAIAEAAQRPNMRFVKPKSVEQQDVQLLHRMRERLTKQSTALINQVRGMLAEYGIVIAKSKSAFKVQFPEILTNETNALTTKGRTIFYQLYEEVTDIERRLKDCDTQVLTETKNNVICQRLETIPGIGPVTATAFYAAAGEGKDFSNGRHFSAWCGLVPKQHSSGGKDNLLGISKRGNAYLRTLFIHGARAVLQHSCHKQDKFSCWAIQLAERRGFNRACVAVANKLARMAWVIPAREEEYRLPV

SEQ ID NO: 77547 - protein, 391 aa, unidentified
MATTERVVIGMDPHKRSVTIEVMTADEGVLGGGRFGTDRDGYAEMRRYASQWPDRVWAIEGCAGIGQHIAVRLLADGEEVVDVPPKLSARARVFATGQGRKTDATDAHSVALVGTRMAGLRPVVADDQLTVLRMLADRRRSLGEEHTRKVSQLHALLLELLPGGAKKALSAAQAKALLAKVRPRDLVGKTRRRLAAELVGDLEQVYARKKAADKELKALVAATDTGLLDLHGIGPSGAARLLVEVGDITRFPDRNHFASWTGTAPIDASSGDHVRHRLSRGGNRQINRVLHIMATVQLRNPTDGRAYFDRKKTGGKSSNEAMRCLKRRLSDAVYRVMVDDLAKTVRTDPGGQPGNDSYSSATSSQPNAGSSEKPLPGPATTQPRASLPAAS

SEQ ID NO: 77548 - protein, 322 aa, unidentified
MEHYAGIDVSLELSSVCVVDATGRIVREAKVASEPEALIAWLRGLGLELARVGLEAGPLSQWLYAAMRDAGLPVELLETRHVRDAFKAMPVKTDRKDARGIAQLMRLGWFRPVHCKSASAQETRALLTARKLLQTKLHDVEMSLRGLLRGFGLKVGPTTSRSFAARIRELVEGHAVLTAVADALLAARETLAAQLRGLEKRLRDQARHEKRARLLMSVPGVGVIVALTFAAAVDDPSRFRSSKTVGAHFGLTPKRYQSGETDMTGRISKIGDAGVRAALYEAAHVILTRPVKGSTLKSWAARLAQRTGLRKARWHWRESSLW

SEQ ID NO: 77549 - protein, 374 aa, unidentified
MDQDSTIIAVVELSQSSWLVGGVLPGIERQPRKKLEPSPERLLGLLHRRRDEAVRAGKEVTRIALAFEAGRDGFWLARWLEARGVEAHVIHPSSVAVSREHRRAKTDRLDTELLKRGFLGWLRGERGHCTMARVPTIAEEDAKRPNRERECLVAERTRIVNRMKATLARLGVRNFKPTLRKAAERLATIHTPEGMPLPPNVLAELQRDMARLGFVVSQIRDIEKARQKRLEQEPETGSHAMVRQLARVVGVGIETADMLVHEVLSRPMRDRKAVARYAGLTGSPDESGAKRREQGLARAGNARVRRGMVQLAWRFLLFQKESALALWYRARTADSRVGPRKTMIVALARKLLIALWRFVTTGEALEGVILRPAG

SEQ ID NO: 77550 - protein, 354 aa, unidentified
MQPKTETFTVDLAVIGIDIGKDVFHLVGFCSDGKIAFRRKIKRLALAETFNKLPPCVVGLEACLSAHFVSRTLRNLGHEPRIIPAIYVKPFVKGQKNDYNDAEAIAEAALRPNLRVVREKTQDELDLQAYHRIRSRLVSRRTATINQIRAFLIEQGIAVRAGPRALRNSLFEILKNREDEISPRMADLIVGLYEDWLWLDQRIERISGKIEEIAQSQASCQRLMSVPGVGPMISTAMVAAIGDGEAFERGRDFGAWLGLIPRQYSTGGRTSLGRISKRGDKYLRTLFIQAAKVLLMRPHNWERFSFGAWLKAAAPRLHKNKLATALANKLARISWSVLRNGKPFDTHRHEVAAI

SEQ ID NO: 77551 - protein, 410 aa, unidentified
MFRRPVKGGQMVFVGIDWSDRFHSFCVLDADGNKLDGFEIPHGQEGFESAQARLRKHARCVEDIVIAIETKDSLIVDFFSEMGYVLHFLNPKQTDRFRDRHRMAHLGSDGFDAYVLADALRTDAHLFAALSPLDEQSLALRVLTRSRVNLVKRKVAVVNELKAALKRYFPLALELFDDLEQPGSMDFLLKYPTYAQARTVSAARIVSILVKAGAREKSAAKRAEQMRQKLRSAQPTTSKSAASAYPPAEEHRDRAGMPRSEIGTISRDHPNKELIQSLPGIGEALGPVFAAEIGADVARFSELKTLKAFCGSSPVTARSGKYQSVHFRRACNAHLRRALHLASAGAIITCAWARELYDRLKAKGKSHGRALRAVGDQLIEILYAVLRRRRPYDEAYHLRMKSLHGKPVQY

SEQ ID NO: 77552 - protein, 466 aa, unidentified
MNNVAYLGVDVSKGYADFILLNQKKEIIEKGFQLDDNHKGHSKIKELLKTFCANHQLGEIQCAVESTGGYENNWYNFFNGLTGELPVKVARLNPRGVKSNREATLSRNVTDELSSKYIAEYMISQPEKVSFNQKSINNFDSLRRQYKYIKLLIKQSTQLSNQLGKLLYSAFPEILFYSKNGLPVWAMHLLTKYPTAEKLSRATVKVVGKIKNITPQKAEKLIGKAKNSVGKVNDPYMVSLVSSLAKELIHKKQIIAGQKKLFENNAKGESIELLESIKGFGTYSSAALMIEIEDVGRFSSVKKLASHSGIHPEMKESGDKKGKARMSKKGRAGIRDILFNVAKTAVVHDKHIKSIYDRLRKTGMSYYGAIGAIMHKMLRIAYGVLKSGKKYDAEIDKKNQEISKKENMSLEELENIHIKFSRRHQALGSQAPVSGRNWKKRKVLLSSQSNNITENGIKETAPVAKI

SEQ ID NO: 77553 - protein, 342 aa, unidentified
MHYIGLDVHKKTISYCVKDVSGQIHSEGTVLATRADLDRWMQALPQPWAAAMEATIFTGWIYDYLQPHAAELKVAHPLMLRAIALAKKKNDRMDASKIADGLRCNFLPECHMASTAIRERRQTLRYRNLLVRQAVQLKNRISGLLMESGVSYNKQRLHKVGYFRELMATNKEITERVRPLLKLSREGVERLQKTEGALVRALCRDPELVERVERLRTVPAVGPITALTWALEIGDVKRFPSLKHVISYCGLCGDERSSADIAKRTPLSKQRNKYLQRVLVEAAKMAPRRSADLALVYEKEKLKGNANRATLAVARKMAAYLLAVDRRERAFVTLGEHRQAAA

SEQ ID NO: 77554 - protein, 343 aa, unidentified
MIYVGVDLHLRFCYMSAVDATGRELRAGRVANDGDSLRQFFMGLKRAFKEEEKISVAVEACGFWFAFVDCVEPLVDRLVLVHPARVKAIAHAKLKNDRVDAATLAQLLRTNYLPEAWKADRATRDLRELLRLRIALGKSRTRYKNQVHAVLSHEGQRSPVSDLFGSNGRAWLVELALRPAGRQAVDTLLRQIDQLEGELRRLDQDLTKQAQADVDARNLMSMPGIGAFSALVLKAEIGDIRRFRDKRSLFQYAGLVPVVRDSAGHRYRGGITRAGSPTLRWVLCEAAQTAVRYCPAAQGYFERLAKRKHPHVARVALARKLLGAVWALWTHGVCFDERVFAAM

SEQ ID NO: 77555 - protein, 340 aa, unidentified
MEKRYIGIDLHRNQFTCCVRLNNGRSYLSQWRLEDLPRFVKKLRPSDELAVEITGNTRLFVDAVALQVGRIAVVDTNQFRVISRSVKKTDANDARLLALYLSKDLLPEVRMKDKQHGQLASLTQTRETLVKLRTALKNKVNNILSARGINLQKEALSSEKKLNEILALPFDELVQIELRIIVEQIRSLNKSIVELEKIIAEEASKLEGHKSLISIKGIGKITSAILLSVIGDISDFPDESRLASYFGIVPRVANSNETERSGHIHKRGTKLGRTALIQSALIAANYSPYLKNFYARVKVRRGAGKAIIALARKFLGIIYRTLKNKWVFEDFTNFTLAEAA

SEQ ID NO: 77556 - protein, 370 aa, unidentified
MKKNSTRAQSPKRAAARSKGPITIGMDLGDKTSRYCVVGDHGEVVSEGSVATTRKAMGQKFAGMRRCRMAMEVGTHSPWLSRMLTGLGFEVIVANARQVQLISASSRKNDRLDARLLARLARVDPELLRPIRHRSEQAQADLMAIRIRAVLVEARTSLVNAARGFAKALGERLPACDADAMDVEKLEALPPEMRERLRPLLEPVEALTDQIKKLATTIEQIARTQYPETKLLTQVHGVGTLIAVTFVLTVEDRERFQKSRDVGCYVGLRPKQSESGESQPQLRITKEGDRYLRTLLVQGAHLILNRRGPDTDLKRWGLKLAERGGKNAKKRAIVAVARKLAVLLHRLWVGGEVYEPLRNPQPAAASNKAA

SEQ ID NO: 77557 - protein, 391 aa, unidentified
MIFMFFLGIDIGKNTHVASLLDEKAKIIFKAYSFANTLDAAEALLVKLEPYKDSLEIGMEATGHYWLSLYSFLAEHKFIVHVLNPIQTDGWRKGIEIRKRKTDVIDSVLIADLIRYGNFLETSLADEDILSLRNLSRFRVYLVNSVSDLKRKAIAVLDQIFPEYASVFSNVFGQTSKELLKSLSLPSDYENLSATKIEEVLSNITQKKKASKTISTLSDKASRSFGISFCKDSFAFQLKLIIEQICFIEEQIASVELEIDQLMSKLGTNIKTIPGVGSVIGAVILGEIGDIERFDNPSKLVAYAGLDASVSQSGEYEASSGKLSKRGSPYLRKALYMAAQRAEFCDPVFHAYYEKKRNEGKHHLVATNAVARKLCHTIYAILKKDIPYEIQ

SEQ ID NO: 77558 - protein, 359 aa, unidentified
MIVIGADSHKRTHTVVAVDQVGRRLGERTIQTTSDGHLELLRWSAQWSQVTFALEDCRHLTRRLEADLLTAGQPVVRVPTRLMATARRSGRQPGKSDPIDAEAVALAALRHPDLPVAELDGPTREVKLLVDYRRDLVRQRTRVANRLRWHLHELDPELCVPSRGLRRYKVIDDLTAQLAGMDGMVARLARQLLARCRELTAEINALEAELRPLVRRMAPRLLAVPGCGVLGAAMILGETAGVRRFRSKDAYARFTGTAPIPVWSGDRRGKVRLNRGGNRTVNTALHMIAVTQIRGVGPGQAYVERLMGRGKTRTEAVRLLRRRLSDVVFSALCADEQARSTATLTHSSAAAGAASARAA

SEQ ID NO: 77559 - protein, 360 aa, unidentified
MTDGSKQRPLMTAGLDIGDKYSYLCLIDSEDGQMIEEGRLRTTPEALRRRFASERPLRIAIEAGTHSPWVSRLLEECGHEVLVANARKLRLIYANKRKTDQIDAENLARLARLDPRLLYPLKRRGEDAQAHMALIRSRQALVDCRTQFVNHVRGAVKSFGHRLPKCPARSFHKRASEHIPEALWPALGPILEQIGSLTERIRQYDRKLETISKERYPETELLRQVEGIGPLTALTFVLTLEDPYRFEKSRSVGAYLGLVPATDRSGDSDPQKRISKEGDQMLRKLLVGSAHYVFGPFGSDSDLRRHGEKIASRGGKNSKKRAAVAVARKLAVLLHSLWISGEAYEPLRNAHRCGGREKAA

SEQ ID NO: 77560 - protein, 339 aa, unidentified
MFMIGIDPHKGSHTAAAVDRAEAVIDTIRVDADRHQRARLLAWAAPFSPRTWAIEGATGMGALLAQQLVAAGEHVVDVPPKLSSRVRLLERGKIDKTDPNDARSAAIVAWHNPLLNVVTGLDEHRVVLRLLADRDHQITANRTRTICRLHAMLCLLIEGGTGRSLTVTKAEQLLASVHIDGPVTSERVAAANELLDEIRDYDTARKDVRARTATVIKTTGSTITSVHGIGPLTAAIIIGRAGDIRRFPTAGHFARHNGTAPIEASSGPKKRHRLNPRGDRQLNHAIHMAAVTQVGHDTAGRVYYLRKQAEGKTRKEALRALKRQLSDAVYQRLINDTRN

SEQ ID NO: 77561 - protein, 424 aa, unidentified
MDAPSRTLWVGFDWADEEHQVCVVDGDGRKVAAFAVPHQAKALNDLPARLRSLGDVAGVAIETPRHLVARKLLAEGFAVYPINPDVSHGWCEALSTAGATSDPSQAFALADGLRHHHARLRRLAPDDGETRKLALLCETEEDLINQRTAFVNELQACLKEYYPAVFEWFDDWTSPSAWDFAVAFPTPGALATAPKKRLYGFLKGHRLKLSPKWQGRVERRGEAADWPRDLTAEAAMPLRVKALVAMLRTLKKQLDDLHRQIKAAFAEHRDGALFASLPRGGEKLAVRLLVHFGSERDRYESARSVERLAGCVPVTKQSGKTKRISFRRACQKPFRNTVHQYALASLQGSEWARACYDMLRERGQSNARALRAVGGRWIHIIYRMWMSGTTYNEGIYMASLVRHGSPIIDWMRSQEKLAESQKTP

SEQ ID NO: 77562 - protein, 343 aa, unidentified
MKLKKVTTWNAIITCPAIGIDVCKKHLDIAGLREGAGYSRRITNDSRAIAGFVKGLVGHNFQGTILCEATSHYHILLTVMLCEAGLDIRVINPLLSSKHAKSSIRKTKTDRVDARVLAVMVLTEPDLPPPLKLTRSQCAVRHTLGLIHSQEKHLQGMNRALASYRERMGQLGLATGKAHRQTVKAMEKLEHCHEKLLAELESYLLESRPEQQEVIGRVSAVPGITRRNAALFTYVLNPQVNSAKSWMAYAGLDVAIRESGTWRGRGRITKRGPAWLRKRLVQAAWGAAMTYPQGRCYYDFLKAKGRKHKEALVIIARKLLNIIYSLIVHGKTFDHAKAFQIVA

SEQ ID NO: 77563 - protein, 416 aa, unidentified
MKIVRPICCGMDVHKNIIVATIGITDKKTRITEYIQETFSTLNPDLLNLKQWLINHKCFDACMESTGKYWIPIFNILEDEINIYLTHPKYVKAIKGKKTDKKDSKWICDLFKHDLIKFSFIPPKEIRALREISRYRYKLVGMRSSERNRYQNCMTVSNIGIGSVFSDPFGKSAKAIMKEVLESDVIEDKKILKCIHGSCKNKDKILDSIKHCHIETDQRFKMNESMTHMKELQVHINNCEIEMIKRASPMFDQFMHITQLPGINTLSAILIISEIGVDMKQFESDKQLACWAGLAPANNESANKKKSVRISKAGQYLKPLLVQCALGAIKDKDSYFGIKYTRIKKRRGHKKAIIAIARMMLVSIYHMILTGEVFKPSDYETFKNPHPSIKQQELTEKSAIEFLKKSGFDVSKLTKL

SEQ ID NO: 77564 - protein, 315 aa, unidentified
MEQTFFTGIDVSKHRLDVALSQGDEILEFYSIPHTEDDISGLIEKFKKTSPKLIVVERSGGLERSLVAHLAEAGLPVVANNPRQIRDFARATGILAKTDKIDARTMARFAAVIKPPQRPIKDAERQQLADKVARRRQLVHILAQEKNRLSRAVGSVRADIEHHITYLQERLDKINKDIEQIIESTPVYQETVEILTTFPGVGRVTSAGLVADCPELGSLNRREIGALTGTAPFNRDSGTRSGPRCVWGGRKTVRVHLYMATISAIKWNYKIKAFYQRLIAAGKKPKVAITACMRKVITILNAMVKQQKPWQAGTV

SEQ ID NO: 77565 - protein, 388 aa, unidentified
MIYVGIDIAKLNHFASAISSDGEELIKPFKFTNDNDGFQLLISKLDPLDKDSLIIGLESTAHYGDNLVRYLVAKNYKVCVLNPIKTSTMRKNNIRKTKTDKVDTYIICKTLMMQESLRFVTFYDLDLMDLKALGRFRQKTIKQRTRLKIQLTSYVDEIFPELQYFFKSGLHQKSVYALLKEAPTPEAIASMHMTHLAHLLKVNSHGRFDKEMAQQLRVLAQKSVGASDSSLSIQVTHTIQQIELLDSQLERVEAEMTKIMKSNDSVIMTIPGIGYINGGMILGEIGDIHRFSSPNKLLAYAGLEPSVYQSGNFQAKKTRMSKRGSKILRYALVNAAHNVVKNNTTFKAYYDAKIAEGRTHYNALGHCAGKLVRIIWKMMTDNLEFNLD

SEQ ID NO: 77566 - protein, 389 aa, unidentified
MSSQFDTPAAGEKDGTLYVAFELSKSKWLIGLVLSGEQKMSRHVVSGGDTAAVWELLSQKRAAAEKKLCRSVRLVSCYEAGFDGFWLDRWLGEQGVENRVLDPSSIELPRRARQAKTDRLDLERLMRVLIRHDGGEPRVCSVVRPPSPEQEDARRLSRERERLVGERTAHGNRIKGLLHAQGVRDVAPQRKDFRERLAQARTGDGRALPARLVAEILREHNRLVLICGQIAEVEGAMKAEREARVPDSRARQVNQLIELRAIGPVGGETLASEVFWRDFRNRRQVGGYFGLTGTPYDSGASTHEQGISKSGNSRARTLAIELAWGWLRYQPDSALSRWFKQRVGEQKGRVKRIAIVALARKLMVALWRYLTQGVVPDGAIVRAAAPAGC

SEQ ID NO: 77567 - protein, 410 aa, unidentified
MLFIGDDWAEAHHDIEIEDEAGRLLVRKRLPEGLAGVTLLHELIAEHLDPSGEPDQVLVGIETDRGPWVQALLATGDLVYAINPLQVARYRERHSTSGAKSDPGDAHLLAEIVRLDRAHHRRIAGDSEIAEHVKVATRAHQTMIWSRVRQVNTLRSLLREYYPAALAVFGTDLASPDALAVLAAAPTPELGRRLSQARIETLLRKAGRQRNIAATAARIKTALGSDQLTARPGVVPAYAASASALVAVLTTMVTQTEVLAGQVEQGFGRHPDVEIYRSQPGLGVILGARVLAEFGDDSDRYADAKARKNYSGMSPITRASGTKRVVLARYARNRRLGDALFRQAYSALRASPGARACYDRQRARGASHYQALRTLANRLVGILHGCLSHHTLYDENQAWHTPDDKLTIAA

SEQ ID NO: 77568 - protein, 343 aa, unidentified
MGEITTIGVDIAKNVFQVHGVDAAGGVVVRRQLRRGQVLPFFKKQFPCLVGMEACATSHHWAREIAALGHEVRMMPARYVKPYVKRNKNDMADAEAICEAVTRPTMRFVPIKTPDQQSVLMLHRTRHLLVRQRTTLINAMRAHLAEFGIVAGVGRNGLERLLQVIEDGDEERVPPAARECLMALRDQLSLVKQQIVEADRRILAWHRASEVSQRLADIPGVGPLIATALVASVPDPHAFKSGRDLAAWIGLVPKQNSTGGKERLGHISKAGNRYLRTLLVVGALSVIRRAKQLGYTRRPWLTKLLQRRSTKIAAIALANKIARTAWAMMAHGTFYQEPAAQAV

SEQ ID NO: 77569 - protein, 345 aa, unidentified
MPIVGGLDIHRKQLTFDYLDTVTGEVKRGQIAPADRAHLRAWLARFAGRGDVAFAVEGCTGWRYVAEELAAAGVAAHLGEPADTAALRGRKRHAKTDKTDARHLRALLAEGRLPECWIPPAQILEYRALLETYHDLRAAHTAWVQRIHAVFFHQGAPPLGEGALRTEQGLAGLRAAAAAHLSAAGQLQVATALDMLAATEARMEVLRARLLDAARHLTGAKVLAARLYGVGPVTALALTCWLAGAGRFSSSRKAVRFTGLDITVWSSDSKGPPGRLSRQGPPMLRWAVYEAGKTHARASAPDHGYYATVKDRKNSKRAALSEARKIVRQACHILTELGDDALTAA

SEQ ID NO: 77570 - protein, 345 aa, unidentified
MEIDILGIDLAKQVFQLHGADRRGRVLHRAKVSRGSLFESVRTLKPRLVVMEACSSAHHWARRFQSLGTEVRLISPQYVAPFVKTNKNDRNDAEAIVEAASRPTMRFVPVKSVEQQDIQAAHRMRAILLRHRTALINQMRGLLGERGFAISRSPEEFKRAVPELLRANADELTSFCRTLLTELLVHLRAIEERIHFIEISIHSFMKRSALCAKIAQIPGIGPITATAIVAAVGDARQFRNGRHLAAWLGLEPRQYSSGGRSRLYHISRRGDTYLRTLLIHGARAVLRFVKTKTDVRSVWLQQLIARRGYNCTAVALANHNARVIQALLSSDASYVARGITGRFQG

SEQ ID NO: 77571 - protein, 361 aa, unidentified
MFYAGLDYHTKRSFVSVLNEQGDEVCANSLESQTELAGFLANLPDDCQVLFEAGYGWPRLVRILEGAGVELKMCQPNRNSRIVMDRRKSDFRDARNLAVYLKSNTYREAWMPDESVRDERQLARRRVSLQREMVGIKLHIYSLLAYAGVPKEPGDIFAVKRRDYLESVGLPRLTRRTLDALLSVYDEIRDRVKELGVVIRELNKADPRARLLKTIPGIGDIAAGLLLAEIGEISRFRTPKSLSCYTGLTPGQHQSGDVLRMTGLTKEGCANMRWILIQAAWVAVRRDPALGQKFEELCREKADVVAICAIARQLAEIIWHILTKEVPYQAQKPKGKSQPVVACGKPSADGSPLMAAASPKM

SEQ ID NO: 77572 - protein, 355 aa, unidentified
MADGITTSGITIGLDLGDRQTAGCVLDATGQVLTRWQVRTTRSGLQAAVAPWPGARVILEVGPQSPWVSRGLTAAGYAVVVANARRVRLIAESDAKSDRLDAEGLARLGRVDPALLAPIQHRREQTQRALGVIKARASLVRMRTLGINHVRGVAKALGHRLPACAAEAFPTRVRAHAAGPALPGIEELLAVLEQLTVSIRASARTLATLARTRYPVTELLQQVPGVRPLTALTDVLTLEDPTRFPRSRTVGASLGLRPRRRESGAQRPELSITKAGDALLRRYLVTAAQYILGPFGPDTDLRRRGLLLAGRGGKGAKKRAGVAVARKLAVLLHRLWLTGEVYDPVGYQTQVARAA

SEQ ID NO: 77573 - protein, 337 aa, unidentified
MTDVHILAIDLAKRSFQVCATAAGGAVLFNRMVSRAKLETVLREQTACIVAMEACATSHFWGRFAQGLGHEVRLIPPIYVKPFVKRQKNDAADAAAIAEAALRPNLHYVAVKSAEHQARAVAFRTHQSFIGQRTQLINALRGHLGEFGLVVAQGPTGLKTVAGVIDDDATDLPDAVRDIVRLYLDQIAVLTQKIDDLHFKLRAATKVDDAMRRLCTVPGVGPVTAGAIMAFAPDLRAFASGRNFAAWLGLVPRQRSTGGKTRLGGVSKMGQADIRKLLIVGAMSRIRWIIRRGVLPDNWLGRVLGRKPRMVAAVALANKMARMIWAMMTREQNYRMA

SEQ ID NO: 77574 - protein, 356 aa, unidentified
MEKTYYAGLDLHSNNVMIAIMDGDGKRIIDQKLACQLAVILKFLEPYRKQLKALAVESTYNWYWLVDGLRAHHYPVVLANPSKMSPYRGLKHSDDRSDAFFLAELLRLKILPEGYIYDPQWRSVRDLLRRRSTLVQQRTALLVSFKSQHTRMTGSTLTQSRVKTMSLAEAEGLYEHAADQLIARVHKTHINQLNESIQEIERLVEAQAKTLAGYERLLTVPGIGRILAMTIRLELGDISRFPEAGNFASYCRTVAAKRTSNDKKKGDNNRKCGNRYLGWALIETANFACRYDEQCRRWYDRKALRRGKIIARKALACKLAKACWHVLDQDVDYDAERVFGKAVESPVRGLEKANAP

SEQ ID NO: 77575 - protein, 355 aa, unidentified
MYYVGSDLHKEQTWFYVMDEQGNKILSKSIPNNPKFLHKFFKSLPYPFTLAVEATYNWYFFIDIAEQYAEKVYLANSYELKAFAKQHKKTDKIDARLIADILRKGFLPAVFIPSPEIRSLKELLRYRINLVRDRSRNIFRLKNMLDKIGIDSTGDYTTEKGLKSISFNCIEERYQYVVKGYIERLLFLTHKIYQMKIDLKNELFQDGDIQNLISIDGVDYFSAGVIKSEIADVNRFLSFNRLCAYAGLAPKVSQSGNKAAHHGALLANRRKLLQWILLEIVFHFIKASPERKSRYDYLKERKGSNTAKIIMARQMLKIIYHILKEKRPYYDNIQLGREANNIKFQSAAAVALQGV

SEQ ID NO: 77576 - protein, 279 aa, unidentified
MLYAGLDLSRHRVDVHLMDQAGEPVWVAAAPPDADGLGGLVRQTAKVGQPVVAAIESMNGARFVHDQLELGGWEVQIADAQKVKGLAPLACKTDRIDAWVLAELARRDLVPAIWLPTPAVRAERERARWRLHLVRHRVALKNRIHATLLGFGRPCPTSDLFGVGGRQVLDRLGLPQPWAGTTAAAVALIDDLDAQIHACEQDLRRLGADHSYVPLLMTAPGIAWVLGYTIAAELGDIDRFASPKKLCGYTGLCPRVYQSAAVIIGGRWPRMAPPTCGGR

SEQ ID NO: 77577 - protein, 398 aa, unidentified
MIYVGVDIGKDRHAAAAVNEAGESAMPPFYFTQDAGGFAALFGALEKLGGPGAVAVGMEATGHYWKVLRHALAKRGYRVDVINPLITSHEASADVRGRKSDKLDAIAIANVMRKGGYSPAPAAGATDALRTLARYRRTLVARRSDAKNRLAAALDVAFPEAAKTLGGLSGAAAMAAVRAFPSARLAAKADIRTVTSVFKKASGGRLGREDAKKFREAARHSLSLGMDTEGEEFVIPQTVDEIRALDSQIDRVERRMQEEPRPELAARLMSIKGAGKIQPLAIAAEIGDPARFAGADMAGKVLAYAGCDPRVRESGKWKGRTKMSKRGSPTLRNALYLMATTVRMHTPYFNEIYKKHTAKGKHHNVALSHVIRKIVDIMCGMYKTNTDFVSPETEVKPC

SEQ ID NO: 77578 - protein, 343 aa, unidentified
MEFYVGLDVSLKQTSICVVDQSGSVVREGVVDSDPEAISVYVRSKAPDAVRIGLETGPTSTWLWTELKQLGLPVICIDARHAKAVLKMQINKNDRNDAIGIARIMQTGWFKEVHVKDIDSHSIRALLASRALLVKIKRDLENHVRGLLKNLGLVIGRAKFNVFAVRTEELIEGRPELIAAIRPLLEARNAVGQQVSELDRRVMKLARHDAQVRRFMTAPGIGPITALAFKATIDDPARFARSRSVGAYVGLTSRRHASGEVDWTGRISKCGDAMLRSYLFEAAGVLLTRVPKWSAVKAWGLRLAKRNGLRKAKVAVARKLAVILHRMWIDGTEFNWSKQEIAA

SEQ ID NO: 77579 - protein, 451 aa, unidentified
MTKKKMELDIINPNCAGIDIGSKSHFVAVGQALEDVKEFGVYADDLTAICLHLKEYGITSVAMESTGNYWQNLYVELEKHDMEVTLCNGKFTKHAKGKKTDVKDCRWIQKLHALGLLTGSFLPDETTEQLRTYCRQRTNWIDLAAEASHKMQKYLRLLNFRLDVVVKDICGLTGLAIIADICKGNLDPEKLSMHRNGNCKKSQEEIAKALKGNNRTDFLFGLNQEYDSYLFFQKKIAACDTQINAFLKTQINSNPDKKKFKTDEKIHKRINKNSIKGIDLNQAAYQYFGGVDLMKIEGLSHSTILTIMSEVGPEGFTKFDSSKQFTSWLRLAPNNKISGGKILSNKIPKGSNRLKIALRHAANAIGNLKDTHLADFFKRVAYRKGRATAVSATARKLAVIIWNMISKGVQYKAPTEYLFLDQKRKNNVIQKIKKNIAKLEIKPEDLGFVTV

SEQ ID NO: 77580 - protein, 346 aa, unidentified
MDHYAGIDVSLEYSSVCVVDTSGKIVREAKVASEPEALIAWFGGQGLAVERIGLEAGPLSQWLYAAMREAGLAVELLETRHVRKAFEAMPVKSDRNDARGIAQLMRLGWFRPVHCKSMGAQETRTLLTARKLVQSKLRDVENSLRGILRGFGLKVGKTTDRSFAGRIRELVAGHQILETTAEALLAVHTVLLHEFSGFEKQVRSMARSDTRARLLMSTPCVGPIVALTYASAIDDPGRFKSSKRVGAHFGLTPKKYQSGETDYTGRISKIGDASVRTALYEAAHIMLTKPVKGCSELKSWAMRIARRAGMSKAKVALARRLAVIMHRMLLDGTPFNPAAKLTAATA

SEQ ID NO: 77581 - protein, 348 aa, unidentified
MLIIGCDYHPGFQQIAFVDTDTGEAAERRLTHREEAEQFYRTLQLRRVRIGMEASGHGRWFERLLNELQFELWIGDAAEIRTKRVRKQKTDRQDAQLLLKLLMEDRFPRIWVPDAENRDLRQLLWHRHRLVQMRTRLMNQLHVVALNEGVRRKKALWRPAGRSELESLVLAPWALRRRRDLLDLFDQLTPKIHDLTRALEEEVEKRPIARRLMTHPGVGVLTALAFELVIGTPERFHCGKQIASYVGLVPSEESSGDRRRLGHISKQGNALLRFLLVEAAQVTVRSQPQWRSKFFHLAMRRGRKIAKVAMARKLAVHLYWMWRQGLDYGQFERLGSHAGEPGNRHGVQ

SEQ ID NO: 77582 - protein, 407 aa, unidentified
MKHVIALDVSKGKSTIAIYDGYKQCEFEGELEHTSVDFEQLHQRIEEIAVLDGQAPEIVFEATGVYSKPVEKFLRDYGHTYCRMNPLEANLQMASMRRHKTDMSDAHELAKTHFKMERETTYVQDNYYEQMRAITRYYDEMDEEIILLRNRMHAILHISFPELERLITPSSALFLNIVQLYPHPALLMAHSKTIIKNRLKSNTRKHLSLERAEKKAIVLLEAAENSYPAIEPTDIRCDQVRDYARRIADVMEKKDQLVKQMVAMSEERKEYTVLRSFPGIGDTTACRLIGELGDIRRFKNAKQLNAYVGIDIMRYQSGNTQYSDRINKRGNKKLRKILFFMICAMLMAKGKPNHLVDYYYKLKTQPQRKPHKVAIVACINKFLKVTFQLLTHGILYDYESALPAQKS

SEQ ID NO: 77583 - protein, 349 aa, unidentified
MVVIGLDAHKRTHTVVAVDGTGRKLAERTVPTTRAGHLELLRWARRWRDRTWALEDCRHLTRRLEVDLLAVGERVVRVPPKLMAGTRRSNREPGKSDPIDALSVARAALREPDLPTARLDGVERELRLLVDHREDLVVDRTGYQERLRWFLVELGIDEPPARSLDRPIILDGLEADLASRTEPVARFARDLLARIRELTAAVNALEAEIRVLAARVAPSLLALVGCGHLTAAKLVGQTAGIGRFRSRAAFARHNGTAPVPVWSGNTVRHRLNRGGDRQLNVALHRIAITQLQREGPGREYLAKRMAAGDTKTEAIRALRRRLSDEVFRRLTTDELERNKASAASTAAAA

SEQ ID NO: 77584 - protein, 430 aa, unidentified
MEEVTDEPLYRDRVCGIDIGKAGMAVTIRVPSDRNPARRASETRMFPTTRRGVLELADWLRCWQVPVVVMEATSDYWKPVFFRLEAEGFECVLADARQVKNLPGRPKRDTTDSQWLACCFERGSVFPCFVATPEFRIIRLHTRRRRDLTGERTREKQRAEKLLEDAAIKVSSVLTDLHGVTGRDIMECLIAGERDPKALAECARTRARRKIPQLREALEGAEFFTAHHARLLKSILNRIDAITAEIGELSAVIEELLAPFEEQLQQAESMPGWGRRAAQDVIAETGTDMSRFPTGGHLASWCGRSPLDKQSGARQGQRRHKRGNKYITAVLGETAVAAGKTQTREGARHRKISRKRGKAKACVATGNTQMKVFHALLSRPGARYHDLGPDYYQRQRDHNRRLSRLAGELGELGYEVTLCRKPRPEDASAA

SEQ ID NO: 77585 - protein, 433 aa, unidentified
MQDAQDEPLFAERVAGLDIAKAEVEVTIRVPSDASAGGRQQETRTFGTTRRELDSLADWLRCWGVTKAGMEATGDYWKPVFFLLESRGFDCELYNAAQVKALPGRPRTDRADSIWLARITERGMISSSFVPPEPIHRLRTCTRYRRHLTQARTAEKQRVEKLLEDGHLKLSSVISDIHGVSGRDMLNAIATGQRDPRALAQLARGTMRGKIRRLEEALDCSFFTDQHAAVLAMMLAAIDHYTTQIAALTVTIEALAEPCLHQIAQLDAVHGIGPVCAQDVIAEIGSDMTVFPTAADLVSWARWSPQVRQSAGKSKGSNATGRGNPYLGAALGEAAMSAGRTQSLLGAKYRRLARRMPKKKALVATGNSMLTIIHVLLSDPAANYQDLGADYYEQRMHARRQVRNHVKSLERLGCKVTIQALNPDTGELPATAG

SEQ ID NO: 77586 - protein, 375 aa, unidentified
MSKVIMIGCDLHLRSILLQYCVGDSTPQQAAFVNDAPGRTKMIDMLLEFAEKHGAQRIVFAYEASSLGYGLCDQLHDRRIECHVLSPTHLPKSAKQAKQKTDAKDAMMLLEQVRGHILAGNSLPAVWTPPQRLRDDRELVRARIDASDETTKIKLQILSMFKRRGVVKPAWYTTRWTKRFLAWLREVVAGMDEFVAPVLENLIDRYELLVKHEAKLDKCLKTLSQTQRYQVAAEELRKLPGVGLLTSMTFLTEMGDLNRFHNRREIAAYLGLCPSSHESGETNDRKGHITRQGPSRVRKLLCQAAWVAIYRCRDTSQEYDRIRGDKKNRTKKALVAIMRLLAIKMWHKAQACGVDNQLEGRGGPHSPELSRKPAE

SEQ ID NO: 77587 - protein, 454 aa, unidentified
MRKPQVVPDEDHEVVYERVAAVDVAKASGVVCMRTPDLSRPGRFVNRIWDDVPATRARIAELGRELLRCQVQMVTLESTSDYWRVWYYVLEGIGLAVQLVSASQAKNLKGRPKTDRLDAQWLARLTQWGMLRPSLVPPAAIRRVRDFTRARTDLVRERTRVLQRLEKLLEDAMVKITSVAKDGLKAKSVVAMVQALIAGERDPRTIADLAKGPLRGKRDQLAEALDGMFDSHHGVIAQSLLDQVAFLDQRIKQMEDQAIAALAQVEESWGVDATGETGPGCGTGPDSQVLAAAYRLAEIPGISVWLAIVIIAEITLDMTLFPTAAHLVSWIGLCRSANQSGARHGKGKQKKGNSYARAAAGQAALGAAGTATFLGERYARIARRRGKAIAQVAVARSIMIIVWHLLSDPQARYRDLGPDWHARRTSRDKKIRTHIQGLQALGVTVAITDDEHAA

SEQ ID NO: 77588 - protein, 450 aa, unidentified
MGNGSGVSRGDRNRNARLVRLRELVPVANAIVGIDLADAKQMVVVTDHDSKVLARKTFRCRAWDLGVALDWARERAAAKGWAGVTVACEPTGHRWRVLGQLAAERSMAFVCVQPMLTSWARRSEDLTFDKTDEKDAVIIARLTAQLRCYLREPVDETWGRLRHLGARREQLVTEMVSEVQQMRALLECVWPAALEAAQQPFKSQTWAAALTVIIDRDGGDLDRSLRWGMARFEHAVRRQVIKQGRQKPCLRIVRRLFAALTDRTGVLAHRSGAFERIGFLLSDWQAAAAKLADTEARMVGVLDQLALTELATSIPGVSAVGAAAILAETGDPQRFASGRALVKHAGLAPREKLSGTFVGRTKLTGAGRPGLRLAAWRAVWGTQRGNTVYAARYQHLTSRENNRLTATQAQTVIAAALLRQLHAVITTGRAWDPLIATHGTPNTIAAPIAA

SEQ ID NO: 77589 - protein, 348 aa, unidentified
MESVAGLDVGVKHSSLCVVGRDDRSMKTVSRHRTVTTPLAIGEWLTAQGIDRVGLEAGAQSAWLARELERRGLEVTVMETRRQRAFGSYSKIKTDERDARLIGEALATGLYTKVHVRSAWSQEVRALLGARLQLKRQAQQSRQFVRGQLRAVGIELGRASGKKWLAAAEAAVAECGGILGLTLQAVLSTCAALAEQVAVLDKEIRRLVRQDAACRRMMTAPGAGPLSSLALRASLDDAERFQRSAEVGPYLGLTPARWQSGALDRRGGITKQGDGLVRAYLYEAAVSLLERQKRDCPLRRWGLQQQDRLGKRRTRVAVARKLAVLMHKLWRSGQVFDWNRGMEVAQTH

SEQ ID NO: 77590 - protein, 337 aa, unidentified
MEYFAGLDVSMEETHICVLDREGLLIREGKASSTPKAIAAFLAAGPTCTKVVFETGRMAPMLLHGLTELGVPIVCIESRQAYQALKSLAGHKTDRNDARGLAHLARTGFYKPTHVKSLSAHAIRSLIAARKKLVGQRVTIDNQIRGLVVVFGVRLPRALSPAFKDAALKVSDGVPGLHAALRGLFAAREAILTAVAAIDSDIKAMTRKSEVCTRLMTVPGVGPITALAFAAVIDDPARFKRSRDIGPYLGLVPKRHQSGEVDYTGSISKRGDVRVRTLLYEAANVMLTRYAAPLKLKSWALEIGRRSTMRKARVALARRLAIILHAMMRDQTDFQAV

SEQ ID NO: 77591 - protein, 412 aa, unidentified
MEILYRSCGGLDVHAQTVVACLIKDGRKETRTFSTMTDDLLGLLDWLMAEGCTHVAIESTGVYWRPVFNILEGNMEVILVNARHVKAVPGRKTDVKDCEWLADLLRHGLLKASFIPPLEIRELRELTRYRRTLVREQAAVANRVQRIIESGNIKLAQVATDALGVSGRQMLRALAKGESDGTKLAELARGRLRGKKVELRRALEGRLTAAQRFVLRELLDRYDELEAALFRATEQIKQEVAEGPDPFVREALQLLQTIPGVGERVAEALVSEIGVDMSRFPTDAHLASWAGMCPGNNESAGKRKSGKTTKGNIHLRAALTQAAWAATHTKQTYLAAQYRRLVKPKGKKRALVAVGHSLLVIAYHLLSRRASYQELGGDYFDQHNAEVQRTRLIRKLEALGVKVTIEALPVAA

SEQ ID NO: 77592 - protein, 370 aa, unidentified
MSPDNVAYIAIELSVTSWLVAARLPGAEKPRLHRIKGGDTAALLALIAELRSRASAKGGRPAKVVCCFEAGRDGFWLHRLLVAHDITAHILEPTSILVNRRARRAKTDRLDAEGMLRVLVAWLGGDRQVCSMVRVPTPDEEDAKRPHREREHLIQERMRIENRIEALLFTQGIRGRPSLRSWERDMAELRTGDGRALPPLLRTELDRLRRRLVLTLELIRELEAERATALEAAADDAMTHKIIALQCIRGIGENFAAVLAREVFYRSFTNRRQLASYVGIVPMPYRSGGMGRDQGHQPSRQPSCAHNLDPARLALAALSARQRARRVVPRPRRYAAGAHSAYRYRGNGQEAVDSPLALRGDRGNPRWHHA

SEQ ID NO: 77593 - protein, 479 aa, unidentified
MNGKAKRTKKQVNVENTVINIFKQEELVKKANEIMNDLKSSTWRDLETRGKFTKNDKLTFISDDMLILGCDIGSETHYVRAIDSRGRELSRNAFSFSNTGEGFQNAKSWAIELAAKNDKKQIVLGLEPTGHYWFCLATWMIANGISVVQVNPYAVKQTKELEDNSQLKDDRKDPKLIANLVKDGNYGMPYLPEGLYADLRRLSMFRDQLTEDRIRNINRLHREMKIYFPEYMDAFGKLEGAFTLEVLKKAPFPKDILALGTEGIRDIWHEAKLRGRGYSRASGIVRYAGESVGLTDGTDVGKITVKWFAEKTAELDKQLAEIEIILHQKCKEIPYVENILEISGIGENILAGIIAEMGDISRFDDVKEIQKLSGMGLVACSSGKHKGATKISHRGRKRLRYWLFQGAKSAVSHADEFKQIHAYYTTRADNPLKKMQSLIAIACKLLRIIYAILKTGTRYDPKKMLKDIKLPATGQVQAA

SEQ ID NO: 77594 - protein, 370 aa, unidentified
MEERIKFFVGLDAHKDTISIAACEAGREPARFVGTIGTNVQGLFKTLAKAGDPACVSVVYEAGPTGFGLYRELRRRGYRCEIIAPSLIPKRAGARVKNDRRDCLRLAELSRSGELKAIWVPDEAHEAMRNLCRAREDAVTLRQKSRQQLQAFLLRHDRRYPGKTTWTKSHTRWIAEQHFEHAGDRIALAEYQLAVQSAEQRVQRLTAALTEAISGWRFEPVVAALRALRGIDTVAAVGLVAEIGDISRFATAGQLMGYLGLVPSEHSSGNSIRRGSITKTGNSHARRLLTEAAWSYRFPARMSRALTDRSEALPEPIQRHAWKAQLRLSGRFARLRSRGVQHNKACVAVARELAGFVWAIVRQVAPAPTH

SEQ ID NO: 77595 - protein, 349 aa, unidentified
MSLKLNFGIAVIGIDIGKNSFHVVGLDRRGSIVLRQKWSRGQVETRLANLPPCLIGMEACVGAHHLSRKLTSLGHDARLMPAKYVRPYSRGQKNDFRDAEAIAEAVQRPTMKFVATKTAEQLDLQALHRVRQRLVSQRTGIINQIRAFLLERGVAVRQGLRFLHAELPRILAMPCDALSPRMLRVIEDLAGDWRRLDERIGSLSSEIEVLARRDAGCERLMSVPGIGPIISSAMVAAIGTGDAFTKGRDFAAWLGLVPKQISTGDRTILGKISKRGNRYLRVLFVQAAWVVLIKPKSWDRHGLKPWLEAAKKRLHHNVLAIALANKLARIAWSVLAHGRTFEASKIQAA

SEQ ID NO: 77596 - protein, 408 aa, unidentified
MNPLFVGIDVSSRNNVAYLMKPDGSKYSSFSVQNNLGGAKLLSERIVSALGSMQLSDVVIGLEATSIYGDSLVYALREDGRLGKFQRKIHVLNPKQVRKFKEAYPDLPKNDWVDAFVIADHLRFGRIAREVYMDDYRYKALQTLTRARFEVIQNLTREKQRFANYLFLKCSGMAQDKDIANSSSTTIALMERFETVDDLANSDLEELTAFVTETGRGRFADPAATAKAVRAAAKGSYRLPKTVNDTVNQAMSVSIASMRALKEQVKVLDKAIEQQFEIIPNTLTSIPGIGKVYSAGIIAEIGDIHRFDSQASVAKFAGLVWTQYQSGEFEAEHSRMIKSGNRYLRYYLLEAANSVRRCDSEFRRYYDLKFKEVNKYQHKRALALTARKLVRLVFRLLKDNRLYIPPES

SEQ ID NO: 77597 - protein, 348 aa, unidentified
MRGAVHMQITTIGLDIAKNVFQVHGIDSSEEVVVRKQLRRSQVLAFFKALPPCLVGIEACATAHYWARELTKLGHRVRLMPAKDVKAYVKRNKNDAADAEAICEAVRRPTMRFVQVKSVEQQGQLMLHRTRDLLMRQRTQVINALRAHMAELGIVAAQGREGIKELLKIIASEADARLPVDAHSSLVVLAAGLQALQTMIRSIEKRIVVQHRSNEASKRLETIPGIGVIGATAIAATVPDPKVFRSGRDLAAWIGLVPREGSTGGKQKLGPISKQGDQYLRRILVVGAHAVLKRARQQPEKYPWLTGLLARKPFRVVAVALANKMARIAWALLTKGGIYRAPALAAAA

SEQ ID NO: 77598 - protein, 408 aa, unidentified
MNPLYVGIDVSSKSNVIYLMLPDGAKHSCFSVANSQDGSSQMVKRILSAVTSRSLDTVVIGLEATSVYGDNLVFFLREDASLAPFNRKIHVLNPKQVKNFKEAYNDLPKNDYVDSFVIADCLRFGRINKEVYLGDYRHKALQNLTRARFFAVQNLVKEKQRFINVLFKKYSTMTQEKVFSDTFSTTALAVYEEFESAEALAAMDLQELTDFIMEKGKNRFPNPDAVAKAILKAARSSYRLPKTVNDSINQVLSISITSIKALDAQIKQFNKAIEAQMELLPNVLISIPGIGPVISAGIMAEIGDINRFPGQAQLGKYAGLAWTQNQSGDFEAENTKLIRSGNRFLKYYLCEGALSLVRCDTEYSSFYHSKYKEVNRHQHKRALALTARKFVRLVFRLLKDNRLYRAAE

SEQ ID NO: 77599 - protein, 401 aa, unidentified
MESPIVSIDVSNGNSHYMCFIKNNKRFGKVKKIDHDIEGFKRLLEDIQKLEAETNEKVCAVFEATGVYTKPLERFLSKNSIKTYIINPLESARKRKEEIHNKKTDKLDPISISKVYYDKEEMMELKKKDETYNWLRKKNRLYEDQLNHLRKYKVTFQNQLSICFPGYLDLFKDVYSDIPMTILKKYPHPDLLKNKKAETVARYLEKNTCHTHKISLEYALKIIGFAKKTYPGCEKDDVEVEIFKILLDKVIETQRECEKTLNEMITVASTLEEYRYISSIDGIGPNLAARIIAEIGDIEEFKSREALVAYAGLDPHIYQSGDQDGKHLKISKKGNKYLRCLLFLAVGCSIRGAKDNPVNRFYQKKKQQSNPLNSKAAKTACTAKLLKIIYGICKNKTTYER

SEQ ID NO: 77600 - protein, 399 aa, unidentified
MVSVGVDVSKEKSTVCFLTGYGEVLYKPFEISHTERDLSHLVDLISSSKEDVRAVMESTGSYHLPILNYLKKHGVFVSVINPLMMHKYANLTLRKEKTDALDSIKIAKYGLDNWNSLSNYVSGSEIYEELKLLNHQYNNYIVLRVRAKQSLTILLDRTMPGIKTMLWNYSKNPDRDKLCDFVRKYWHYDNITKMSEGAFVRSYNGWTKKKGYQSSERKAKQIYALASDGIPTLAASSPSTKMLLEEAVESLYHIDTTLAHILSRMKELASSLREYGVVLAMPGVGEILAPRIIAEIGNVTRFHSAKALVAYAGLDAPPFQSGNYIASKRSISKRGSASLRKTGYEIMKCLKTVKPKQDSAVYDFILKKESEGKPLKVAKIAGLNKFLHIYYARVTEVYQ

SEQ ID NO: 77601 - protein, 390 aa, unidentified
MLTSVMVKGSIVDAFSGKASVASRAAKRRRREIGRVLVREAVTKRDPRRHCGTNPNSRMNRRPMRPASSHLQDWEKTMAEPLFIGIDVAKETFHVASCPAAINISLPNCLSGTKQLIKTLQPHNISLIVLEATGGYERPIVAELLEADFKVVVASPRQVRDFARGIGEFAKTDPIDAAVLARFAQVVQPKPKPPVSPQTDELADLVRRRRQLTDLRTQELNRSETVRHPKVRKSVRKMIKTLDYQIAELDELIRQHIKSDDDFRKKDEILRSTPGVGPHTSATLLSQLPELGQLNRQQIAALVGVAPYNFSSGRFVGKSRIWGGRKNVRCVLYMAALTAIRCNPAIHRFAERLLEQGKVFKVVITACMRKLLIILNTMLRNQTLWRPEKN

SEQ ID NO: 77602 - protein, 330 aa, unidentified
MKNYEEVVGIDVSKKTLDAYCHQAQVHKVFTNEVVGYKSLLKWVLKVAKDSKVFYCFENTGYYSLKLALYLHGQSVVYVEESPLKIKRCSGIVKEKTDRIDAILLARYAWLYREELKPSTVKSMSHLELGRWLALRDQLVRNNAGLKGTLKEMKVLLSSSSTDVGCLSLKRSIDYLEKQVKSIETRIKDILASEASMNKNFELLTSLKGVGLVVACQLIYHTGNFTRFASWRAFSSYCGTAAVKHESGTSIHRRKQCHYLGDRKMKSLLSMASVSAIQHDNELRLYYKRKLAEGKDKMLAINNVRNKLIARAFAVVKRGTPYVILQQHAA

SEQ ID NO: 77603 - protein, 395 aa, unidentified
MQRDAKEVMAEVLGKLTGKLDAPTVSTSAQENRRGNTVGPNRDRLTVGVDLGDRWSQYCILGLEGETLAEGQLRTTQEDVGEFFRGLTTARVVVEVGTHSAWVRDVITECGHEVLVANPRLMEGSKRRKRKSDRIDANKLARLGRVDPQSLYPIRHRSREVRQDLVVLRARDALVSVRTELINTTRGLVKSMGTRLPRCSSPSFAEKVKDAIPVEVGEALQPLVQLVETVNECIERYDEKIEELGRKKYGHTTLLRQVKGVGPITSLAYVLTLEDPQRFASSREVGPYLGLVPKQEDSGDSQPQLGISKAGDRMLRRLLVGSSQYMLGAFGPDTDLRRYGLRLCERGGKNAKKRAVVAVARKLAVLLHHLWVTGDVYEPLHRTETGTGTAQATAA

SEQ ID NO: 77604 - protein, 415 aa, unidentified
MEGLQPLHRRVAGIDVHRMLHMVTVVIEQPDGSIEQTSREFGGFRRDCRALAAWLSELRVELVVMESTGIYWKSVHAHLEHAGIAAWVVNAHFIKHVPGRKTDMSDSQWLAVLARFGLVRASFIPPKDLRELRLVSRYRRKLTHMHSAELNRLHKVLDDAGIKLGGVVSDINGVSATAMVKGLIEGQPIDSLLGLARGALKLKRDDLQAALDGELSARHLFVLKHIHAHTLSLQRELAEIDAYLLAAMQPYALAHGLLQTIPGIDQMAAALILIEIGDDMERFGCAERLASWAALCPGNNESAGKRKSGRTRHGNGVIRYILCECANAARMTKSSLAAKYRSLMVRKSHKKAIVAVAHKMIRLIYVLLTRKQTYLDQRIDYAAMSARKNAPRWIKQLKLIGKWPAPKSAPATATT

SEQ ID NO: 77605 - protein, 372 aa, unidentified
MKERGLRSSWLPFMLGVLNANRFEEAPVSESYEGRQFVGIDLHRRRSVLVRKTETGETLETVRISNDPQYLRQVMARAGEAPEVVLEAAYGWYWAADTLAELGAQVHLAHPLGVKMFSYRRVKNDERDAGDLADLLRMGRLPEAWIAPPQTRELRGWVRHRAKLVALRSSVKSQVHAVLAGAGVQVRMSDLFGPGGLRLVAAAGLSVESRARVDSALRLIRNLDFEIELFGKLVTNRLRTHPGYRAIQQIPGVGPLLAAVFVAEIGDITRFPGPAQLASWAGLTPKHHESDTTVHRGRITKQGSRLVRWAAVEAVQRVGAHTHTGAVRERVAARRGRNIGAVAAARKLLELVYYGLRDGHIRRLTPPPPSPA

SEQ ID NO: 77606 - protein, 332 aa, unidentified
MAYDFVIGVDVGKYFHHACVLDPQGRQVLSKRINQHKGSLRKLFGQFLADNTSVLVIVDQPNNISRLTVAVAQHMGADDRYLPGLAMRQLSRIHVGNSKTDVRDAYVIAHAGLNLPDALRNVDRVEEVFTQPKVLNGIDEDLARAYTRQINQMRSALVGTNPAFEHVLRGQMIHRKWILHLLAKYGGPTKIRRIGKTRLAAFARSHKARNPEPVINAMLAAIHGQTMSIAGAEYAELGVAMSAKDALAKLEHRKEIEAQVLKLIQDIPQTEILLSMPGIGPRSAAQILMTVGDMSDLPDAAHLASYTGLSPRTNQSGTSIMPNSPNRAGNKN

SEQ ID NO: 77607 - protein, 744 aa, unidentified
MYIVGIDIAKRKHEAAVIDGDGAVIIKPFSFTNNCSGYNRLLAMLTKAKLPLDEVSFAMEATGHYWLALFTRLQKEGFRVQVINPVQTNSIRSFYIRQAKTDPRDALLIAEVIRFGHFSESTLHPENIYELRELCRGRHAIVSMQADVKRKVVALLDQVFPEYETAFTNLFGDTSMAILQTCPTPKELSEMPLEELCHLIEISSHKRFRMAKAQELQALARDSFGFAMAGDVFSTMIRLYAKHLDFLKQQVREMDRKIAEIMETLDTPITTITGIGPTLGAYILSEIGDISRFSSAAKLAAYAGIDPTMRQSGEYNGVRNRMPYQTNANLRKAINAGKVNYYDLHLSHVAQQVRAGFFTNVKGEHVTGPDFAVVEVCKIGPNGELYPTTAIGNSPVYVDTAKKVIVEVNTTQPLDLVGMADIYMRKNPPFCEPIPILHAGDRVGTPYIPCDPSKIVAIVPCDMPDVTRTLAPLDDDAEAMGNNLVDFLKNEVKHGRLPENLLPLQSGVGNVANAVIHGLVESDFRNLSVYTEVIQDGMFDLIDKDKIDMISGTSLSPSPDGLKRFYANIQKYNKKIVLRPQEISNNGEVVRRIGVIGMNTALEMDIYGHVNSTHITGTKLMNGIGGSGDFARNAFLSCFFCHSTTKGGKISAVVPMCSHVDHTEHDTHVFISEQGVADVRGLTPKERAKVIINNVAHPSYRDQLMDYYERACAACGNSQTPHLLKEAFKFHESLAETGDMHFKK

SEQ ID NO: 77608 - protein, 429 aa, unidentified
MRKRQAAAGADVAKEFSKICIMTPDMQVFKRLHVAHNKLEDFEKLFGLLDQVEEDFGCSTTVVLEATGHYHKILLRALVKRHIEVVVINPIQSDSISNLNIRKAKTDRIDAKKLAALFHVKEDDLRVVTQVDTQIDALKDLVRQYHAYQDEMTVHKLRLGSFVDRVMLGYDTILALSSASGLAVLKAYPSPRALLKARKSTVLRLLRESSRKGPTWAETKYEALMAMAKVMVKLGEPGLHLSEMVRREIAQIEYIQGLCAQIVADVEALVDESRRTDASDLAQHMDLLDSIPGIGFLTAAALIAELGDPNAFRSAQAMTAYAGLDPNVVQSGKFKGNRVSISKRGSRFLRRVLFYIASANIRKLRNGTYANPPIKDYYERKCQSKPKMVALVAVMHKMIYIIFAVMRDRKPFELCDPKKHAAALMGKVA

SEQ ID NO: 77609 - protein, 336 aa, unidentified
MNEMACVVGIDVAKRKFDIALLINNKIKTRVFDNTPAGHKAFEDWLVERSAIPGQTHLCMEATGPYSEVLATRLVTDGWQVSVVNPVRIKGFAQSELARNKTDRADATLLARFCMAMRPNLWTPPPIEWRELRGWVDRLQALKEMHQQESNRMEAHRASEQMQLVQDVQIHLDWLNKQIKGLERNINDHIDRHPDLKRDAELLGSISGIGDTTVAKVLAYAGNIRRFTNAKALAAFIGVTPRQRLSGSSVKGRTMMSRTGHSDLRRALYMPGMVARRHNPVLKIFGDRLSDAGLAPKAVIGAVMRKLAHLIYGVIKSERPFDANFNHSALAIQDGI

SEQ ID NO: 77610 - protein, 341 aa, unidentified
MMIIGCDFHPRFQQIAFVDQETGEYGEHRLSHPEEAERFYRTLSGRQVRIGAEATGNFRWFRHLMDELGHEFLLGDATTIRAACPRRQKTDKRDARHILNLLVEDRFPVVWQPSVENDHVRQLLLHRCRLVRMRTRVKNQLDSMAKNEGVLSSRVWSPKRRSEIEALPLPGWYAHRRADLLGLLDELDKRIRPLDQAVREAAEANHEACLLMTHPGVGPIVSLAYVLTIGDWRRFPRGKQVGSYLGLIPEEESSGSSRRLGHVSKQGSVLVRWLLVEAAAHAQRHDPSWHRQYVRLSMNKHHGVAKVAIAHKLAVRLYWMLRSGQDYSKVMERGSHAGQSE

SEQ ID NO: 77611 - protein, 312 aa, unidentified
MIEQCFGGIDVSQDRLDVLLLPQGTGFSVANNEAGWSTLIGRLRGLLLTAIGLEPSGGYERGVLRALLAAGLSVRRINPNRLRQFARARGALAKNDRIDARLIAEYVATMPTHVVRHDPAAARIAEIVTMRRQLCDEHVAIENQAAQLEDAMLRRLAKRRLARIETDIRLLEKRLTETIAAEADLARRYERLTSMPGVGPVLAFTLIALLPELGRMSRKQIAALVGLAPYDFDSGKLRGHRSIYGGRMPVRNVLYMAALSACRYNPALRAFHKRLAAAGKKPKVILVAVMRKMITTLNAMLRDGAGWQPQAA

SEQ ID NO: 77612 - protein, 370 aa, unidentified
MLNTTTFVGLDVHARSIKAVALDAMTGEVRSATFGYDAAEVAGWVSSVDPSAKCVYESGVTGFDLQKRLTALGVDCVVGAVSKMIKPPADRKRKNDRNDAEFLARMLSVGNVVEVWVPDDGCEAARDLSRALDDAREDLKRCKQRLSKFLLRHGYVFSETTPTGRRKGNWTAAHWAWIKSISFPEKADDDVLAYYVDAVRQAMEDKARLERLVEAEASKPRWKRRIDSIRCLKGIDVTSAADLVFEAGEFSRFKSARSFAAWLGLTPSEHSSGESVRQGGITKAGNKRLRRVLVESAWHYLGCSPHSKDLAKGQVPDPAARRHAAKGVRRLVERRRAMLERGVHKNKANVATARELACWCWAVGRMIENG

SEQ ID NO: 77613 - protein, 350 aa, unidentified
MKETSTIGIDIAKRIFQVHGVNTNGKTVLRKKLIRDQVLIFMANLPKCLVDMEACGSANYWAREISKLGHEVKLMAPQFVKPYVKTNKNDQADAEAICEAVSRPNMRFVPIKSVEQQDILSIHRVRSRLVKNRTALANEIRGLLYEFGIIIPQGINKITAKLTEVLDSEKLSPISQQTFCDLKEEFIENDKKIKDLENRLKIMASELDKYQQIIAIPGIGLITATALIASISNAGCFENGRQLSAWLGLVPRQASSGGKEKLFGISKRGDIYLRTLLIQGARSVLNAKLRFTTESQKAKKDYSKFTQWMFNLRDRSGHNKTVVAVANKLARVVFTVLSSGKDYVENKVCS

SEQ ID NO: 77614 - protein, 440 aa, unidentified
MSQELPTLDRLAAFVDVGSEHMHVSVGGNRPQVFGTVTSQLHALRDWLLEQGVHSVAMEATGVYWLPLYGVLESAGLEVRMVNGRQTRNLPGRKTDMADSQWGATLHMHGLLHAGFVPPADIRRLQDYLRLRAAHVAAAATCVQLMQKALDRMNIKLHDVISSLAGVSGMAVVRAIVAGERSPQALVALCDMQIRRKKEQAVIEALRGTWADEHIFALDQALQSWDHYQKLIADCDTRITAVLPPHDETQPPLPRSTKQTGINAPEISKLREILAQMCGGRDLTKLPALSQYGVLQLIGEVGTDLSVWPTEKHFTSWAGLAPGSDDSGKRKKRVRRGRNRTGRLFCMLAQSLVRSKDIALGGFYRRLAARRGGLVATKALARKLAGCFWRVMVKGDDYVEKGLARYEEQVRKTREQALRRLAKELGRQLVPLPTTDAMAS

SEQ ID NO: 77615 - protein, 408 aa, unidentified
MERLIERVCGLDVHKQTVAACVRVPGSKGTREHVQTFGTTAAELLALRDWLEAHEVTHVAMESTGVYWKPIYYVLEERFTCLLVNAAHVKQVPGRKTDVQDCVWIAQLLEHGLLRGSFVPPAPIRELRDLTRYRKVLIQDRTREANRLHKLLEDAGIKLASVATDILGVSGRAMLEALVRGTTDPEVLAELARGKLRAKLPALRQALRGRFRPHHAFLVSQLLAHLDYVDETITTLSERIEEVISPFADELARLDTIHGVARRTAEVLIAELGVDMSQFPSDRHLASWAGLCPGNNESAGKHKSGKTRRGNRWLRAALTEAALAAIRTSNSAFTARYRRIMRHRGHKKAVLAVAHAMLVTAYHVLARQTTYQELGADYFDRRHGERVTRRAVQLLERQGYRVTLERAA

SEQ ID NO: 77616 - protein, 348 aa, unidentified
MTVYIGVDFHARQQTISYLTTEDGEMHHLVLQHESLTEVRTFYEQFRGQQVVVGFESSGYAAWFEELLEELGYEIWIGHATYIRQFAKRRQKNDRRDADLILELLYSGDFPRIHRYSPATRQVLQQLRYRQRLVKMRTMVVNMLLFMASSRGATFRTQLQSKRGQARLAQLPLPQPLAHQRDELLQLLQELDSKIAKEEQGLEKQAAQDVAVQRLRTHPGIGLLTGICVRYTLESVDRFATTRKVSAFAGFDPMEDRSDERRHMGAISKQGSRWLRFFLVEAGQVAMRKDADLARLYKRISLRGGHAKAKVAVGRRLLVRAFIMLRDEIDYAEFQRRGVAARSSRGTA

SEQ ID NO: 77617 - protein, 313 aa, unidentified
MDDLLEICCGLDVHEKVVVACVLNGELNKKPSKEIKSFETNTEGLLNLLDWLEEKKCSHVVMESTGVYWKPVWNILETGNFELILANARQIKSLPGRKTDIKDAEWIAQLLRSGLVNKSFVPEEPIRDLRDLTRYRKKLINNISAEKNRIHKILQDCNIKITSQITDIFGQTGREILRCVIEGKNIDKVELEKMLSSRGKWRLQKKVDEIEKSLRGKIREHHRRMIKCHYEHILFLEGQLKELEEKIDEQLKPYVREIELLKTVPGINDNAAGVIIAEIGVNMDQFPTDKHLSSWSGLSPGNNESAGKKKEAQ

SEQ ID NO: 77618 - protein, 448 aa, unidentified
MSNGSGVSRGDRNRNARLARLREAVPVMNAIVGIDLADAKQMVVVTDHESRVLARRTFRRRAWELGAALDWAAARAAAAGFTGVSVAVEPTGHRWRVAGQLAAERGMAFVCVQPLMSAWARRAEDLTFDKTDDKDAVLIARLAAQLRCYLPEPADETWGRLRHLGIRRARLVAGSVSQVQQMRDLLECVWPAVLDAARQPFKPTTWRAALTVAWERAEGDLGRVTVLGRRRFGAAVRRQVARWDAVHPWQKIIDAVFGACADPAGVPALRRGALERVALLLAGWRDTQARLAGTGTRMIAVLAELGLTGLVTSVTGLSTAGAASILAETGGPSRFTSGRALVKHAALAPGEKNSGTCTGRSRTTGHGRPALRLAAWRAVWGALKSNPVYAARFTHLTSREHNQLSTGQAHAALAAALLRHLHAVITTGQRWDPAIAAGGRPGPALIAA

SEQ ID NO: 77619 - protein, 415 aa, unidentified
MKVVFPTCCGVDVHKTFLVATIITTPADSLQPHYQKKRFSTFNSDLNRFADWLLEHDCLDVCMESTGKYWVPVFNILEKRGIRVVIANPKWVKAVKGNKDDTKDSKWIGDLFRIGLVKSSFIPDLNIRILREFTRYRYKLVSMKSSEKNRFQNAFTVCNVALDSVVSDMFGKSATAITDYLTSDESFDPEHCVSLLQRSLKKKAEQVLESIEGFSIADEQKARIKIVREHYDFIEKMIAKVDTCVNEMVAKYEGEITLLCTIPGIDRNSAITIISEIGTNMGQFGSSKRLCCWAGLTPGNNESAGKKKSVRISRAGVYLKPALVQVAHAAVKDKVNPYYALKYERIAKRRGKKRAIIAIARMILTAIYSMFCTGEVWNPVDLYKIDMPDHLKEQQLAKAIKQATRFLEKQGLSVA

SEQ ID NO: 77620 - protein, 490 aa, unidentified
MALVLAVAVLIVEADMPRRQFPVPQPDPATAALLQTLNPHAAGIDLSDDEHWVCVPEGSVPTAPPRGHDPLPGHVRRFGACTADLRSLVAWLRQAHVDTVAMEATGVYWVPLYDLLEAEGFRVLLVDPHQTQAVPGRPKTDVKDCMWIQRLHSLGLLSAAFRPEEPIRVLRSYQRHRASLVEDASRFILRMQKALELMNVKLTEVLADVTGMTGMAIIKAILAGERDPAQLAQLRQRGCKYDAAGIARALEGTWRPEHLFALRQSLSLYEYYQQQIADCDRVIEAHLQTLARPAKPAPLPPRAKAHKRRGNEPHFDARQRLYEMAGVDLTAIEGIEAGTALVVLSEVGTDMSRWRSDKAFGSWLGLAPNPKKSGRKLKSAATRAGANRAAKALRLAARSLQRSKSALGAFFRRIAARRGVPKAITATAYKLARIIYALLKHGAAYVARGLAEYEAEYRERQLRQLKKKAQELGYELTERPAGEAVAVNLA

SEQ ID NO: 77621 - protein, 379 aa, unidentified
MTLDRFFRQCVGIDISKDKFTACLYMYDRASDAGCCTQSIDFANTKSGFNQLVRWSRKEAVKSHPLTYLMEPTGVYYERLVYHLHKIGQTVYVVLPNKARKFCEAEGIKTKTDAMDARCLALMGCVSRKLKPWSPPAPIYRELRQMTRFHADLCRIRTSVSNRMEALDHMESAEKSVRRNCEKLLDEIDRLMKNNGKTIMQKVAEDKELEQKVKRIATAKGLGETTVVCIIAETQGFHLIENRKQLVGYSGLDVKAEQSGKEDPRHHISKKGNAHIRAALYMPALVAVCHNRQIKQAYGRICQKHPNEKMIGVTAAMRRLLLLIYTLWKNGEEYDENRDKTHMARKEKTEQEYGSEDSIRNEQEPVSWNETDEDGKPPF

SEQ ID NO: 77622 - protein, 354 aa, unidentified
MKTTKIKFNGTAFVGIDVHKNSWKVCLLSEGGFKKEFRCNPETQVLISSLLKVLPEFQFKCTYEAGFSGFWLCDQLNNHEAFECIVVNPADIPSSNKDKSQKEDRRDARKIAAQLKAEALRGIYVPCEEDLGLREIQRIRYTVTSYLTRWKNRTKSFLFRHGITPPADLFPTSRSHWTGKFIKWLKSIEFSTPCLRFSLDQLIVSVEVLRDKKKEILSELELKIEESKYKDSYLKLTEMPGIGTIGSATIMTEVIDIKRFASYEKFHSFIGLIPSRNSSAETERVRGITKRSNKRIRSILVEASWVAIRHDTDLFNLYHQHKQRMNTNKAIVRIVKKLATRIRYELLTLETQTM

SEQ ID NO: 77623 - protein, 412 aa, unidentified
MGKAGQSIARSTALALPRVLTGLPPMLKKTGKVAMMANHHLLECFPGAFAPVGRPARTGSGEIVLTQGQSPVCSLIRRCPQDSIRTVAGATKPAWQGRMNPMEHYVGIDIAKNTFDVHVLPEKAARHFEYTEEGIQACRQWLVAFHPSLILMEATGGYEKQLARELFAAQFPVAVINPRQVRDFARAKGRLAKTDKIDAFIIAEYAQTMQPPAQEAMDELSEKIRALIARRRQLVNMCTQEKNRREHAFDDYISGSLSCFIASFEKALQEIDELIENHINGAPALKKKADLLVTAPGMGKSTAMFLVAELPELGKVNRREIAALIGTAPVNRDSGTFRGKRMTGGGRRHIRTQLYMPTLAAIRYNSVIRTYYQHLLKNGKVKMVAVVACMRKIITILNSMLMSNQPWNPDFA

SEQ ID NO: 77624 - protein, 658 aa, unidentified
MPASTSAARRLRLGVGIDTARYGHHVTFLGDDLQRVAPDLPVPESRVGYQRLERQLRRLCEKHPDAELHVRIDAAGQYAANLERFLRSLDLPLQVSVGEPKRNKDYHHAHSPKRQDDQTESWAMARYAVLERPAPSRETPPEFAVLRRIASRLEAQVRQTTRLTNQLHELLSAVFPELANLARDITVQWVLKLLERYPTAPRIAAARLDSLQGIPRLSPEKAQQLQTAARNSVGTLRGETCEALVRQLVRELRASLDDESRWKKLLTQAFDALPPGPHRRIATITGIGKVTAAAIVATAVSIERFQTPEKFVGFYGVFPRIVSSGVDKFGRSNPPGKKSMCAKGNDLVRGLLWNCAKSAALFNPAVRTLYQRLTSHSRPDGKLPLRGDVAFGHCMTKLLRLVFAVWKTDRDFNPQHYPWEPPANVCHLDHPDPATSDAATADEQTATLGATKAGDEGESVATPAQEITKATGHNEPHSSRDNVVTAATVSLSARTATDQHLPPSASCRSTAGSPQPFHGSVDFAALRRQVTLRQVLQHLGVLHRFRNSSGWGSQLRGPCPLHQSRSERGRTFSIDLQRNIFRCFNPSCAARGNVLDLWAAYHDLPLHAAALHLAETFGVIPPRLENGSQTQKQRRGTRNLSEAGSSTNKAGITPAHNT

SEQ ID NO: 77625 - protein, 327 aa, unidentified
MAKPTTICAGIDTGKRKLDIALDGSSEQLQVDNTPEGYKALLDWLRRHRVKRIGIEASGGYEQAVVAELRRQRFVVVVFQPAQVRAYAKFHLLRAKNDKIDAALIAACTAAVKKIHAPPDARLLPFAEHLTMIDQIGEDIARLKNRLETCRNPRFRQTWKEDIARLAKREKIELKALVAAIREHRDLAERLDLIESVDGIGLPTAVAILVRLPEIGRITREQAAALAGVAPYDDDSGDQVGIRHIDGGRERLRRALYTAALPASFRWNPQLMALYGRLIAAGKEHKRALIACARKLLIFANTVVARGTPWDHERPPIASITAVPQVG

SEQ ID NO: 77626 - protein, 379 aa, unidentified
MALYLEGKPSVDTNELSPKEATHMSHEIKYIGMDVHKEAIVIAVLNGSGKQIMENIVETKANSILEFLHGLRGELHVTLEEGTWAAWLYDLLQPHVQEVVVCNPRRNALLKEGSKSDKVDARKLADLLRTGMLRPVYHGENGLRTLRELARCYQTINKDLTRVMNRLKAAYRSWGIPCGGTQVYAPRYREEWLNKLPQAGVRRRAELLYQQLDGLQALRRGVRKEFVAESRKHQATKLLRKIPCIGPIRAGLLIALMQTPYRFRSKRQLWTYSGLGIETHDSAQYRFVRGQLQRSKKPQQLRGLNRNHNHAMKEIFKGAAMRASCCTGPFHDFYAALLAKGMKPEMARLTLARKIAAITLTLWKKGARFDAEQLKTQAA

SEQ ID NO: 77627 - protein, 347 aa, unidentified
MALATVSVLGVDLGKNVCSVVGLDGSGKVVMRRRVRRETLVGLAEKLPPCMVAMEACCGAHHLGRVFAAHGHDVRLMSPEYVRPYIKAQKNDDRDAEGIAEAATRPTMRFVDLKSQDQLDVQTLHRSRDRLVGERTALINQLRAILLERGMVVPKGRRNLEQFLIVLMDEQGGAGLSPRMILLVADARAQWAELDGRIAAFDAEFVRWTKENEDARRLGAIPGVGPIVASALVAAVGHAESFDHGRDLAAWLGLVPRQFTTGGKPKLLGISKRGNRYLRKQLIHGARAALPYVAEQDTPLGRWAKALMTRAPRNVAIVALANKLARIAWAVLRRGEPFVATGVSMAA

SEQ ID NO: 77628 - protein, 348 aa, unidentified
MNRKTIAIDLAKDVFELAINNGGVITRERLTRNRFLHYIAQLSPAHIVMEACGSAHHWARHLKARGHDVIMLPAQHVRPFRRGNKTDRADANALLQADRIGGIKPVPIKSVEQQNLQHLHRLREQWKTTRTARINALRGILREHGHAFPAATDTFLANAMEAVETDPALAMLRPALHALQAEITFLEDQMADVEQQLRELTRHHPEIRAMQTISGVGLLTATATLAAVGTPAHFRNGRQFSAWLGITPREHSSGNRRSLGSITRRGNVYLRTLFIHGARSALLAAKRVARVKPDQLTRLQRWALDLEQRVGHNKAAVGLANKMARIAWAVWHHAREFDGNWQPVPLAA

SEQ ID NO: 77629 - protein, 370 aa, unidentified
MSIKRILVNTIDTDLEYEVIGIDLAKNCVSAILLTTDGEIFGIDRLDYQELEKSAQELSPTIFAMEPCTEMNYMVQKLEDWGHHCIVISGKNVKDYVESHFSNQKTDLNDAQALAFLTKDTQLRTVKAKDPEQLKYASLTTLREQYVKQYRQTMVSLKGICQVWGLSISKGISGKARLKDMIENHAAFPAELRTALVGMVAHAQAVQKDLKSVTKILEELAKKDKACQLIQTVPGLGTICSCRLRATVGDIQRFKHPKDFPAYYGLVPRSMATGHNEKKGKITHRGDKTMRSLMVQGAGIVINQATKGNLHSKQLTKWILKKQKEKMPWGKLVCAVAAKLLRIVRAILISGKPYNPKIAGVAKCSLSKAS

SEQ ID NO: 77630 - protein, 482 aa, unidentified
MSVRKGQAGNRRGPKPPRPRGGRPGPATSAAELASLPVQHAHAAGIDVGDASHWVCVDATPDGSDTVREFPAHTPGLRELIAWLRSCGVTTVALEASGAYGHVLFLTLVEDGFAVVMTSPAFTRQIKGRPKTDRRDCQWIRRLHKHGLLPAVFQPDEATQTLRSYVRQRANLVRLSGQHVQRMQKALELMNLKLTKVLGDITGVTGLKIIRALLAGERDPQTLARLRDRRCKRAEPEIAEALDGRYRPEHLCELKGCLAMWEAYQDVIGELDTVIAGQLRTMRRGPSLPPLPAKPRVRGKKPHDPKFDVREALYYVTGVDLTAIEGIDEVHALTLVSELGMDFAKWPTVKHFASWLGLCPNWKKTGGKVKSSQTRKGKNRAAGALRLAAWSLIRSHSYLGAYLRRQRARLGAPKAITATAHKLARILYNLMRYGLAYMRREEDAYAEQVRQRLEKQLHRRAKELGFAVVRIAPPPVEQPTAV

SEQ ID NO: 77631 - protein, 391 aa, unidentified
MDPEGKTLGAQTFSNTLSGAEAIESWLLKIMKENDFSDLKIATESTSFLDLHLVDFLAQSTKLAPFHPSIYQLNPKLVRNFKRVYPDKEKTDKVDAFVIADRLRFGRLPEPYENHKPYLPLRRLTRYRYHIVQSISKEKAYFLTHLYLKFSGFSVEKPFTSLFGATSLTLITEFSPDELVNLPIEELTQLIIKTGKNRFEDPEGVVEAVRRAARESYRLRPALAPSIDLILGSILQTIRALQDSLKKVEQAIEKEFQAFPNTLQSIKGIGPVYSAGIFSEIGDIRRFPKEDALAKFSGLYWKRYQSGNFEAEETKMSKGGNEYLRYYLIEAANALRVHNAEYRAYYETKFKEVTKHQHKRALVLTARKLVRLVYALLKKGQLYKANYQQEA

SEQ ID NO: 77632 - protein, 345 aa, unidentified
MENMYYIGLDVHKKTISYCVKDASGRIHAEGTIPATRFDLDRWMKTLPQPWTVAMEATMFTGWIYDHLLPHAAAVKVAHPLMLRAIAAAKKKNDRIDAHKIADGLRCDFLPECYMASTKIRERRRTLRYRNLLVHQAVQLKNKISGLLMEAGVSYNKQKLHKVGYFKELLATNPDINEGLRPLLRLCRETLVRLQKTESALVRSLQRDSLLAERVERLMTIPAVGPITALTWALEVGDVKRFSSIKKAISYCGLCGAEKSSAETIKRTPISKQRNKHLQSVLVEAAKMAPRLSPELALIYDREKQKGHANRATLAVARKLVAYLVAIDRSQRDFLVVEKENRAAA

SEQ ID NO: 77633 - protein, 323 aa, unidentified
MTYIGIDISKDSFVAAFPTVSGYQTQTYPNTVKGIRKFIGSFSVTEHHCVKEATGNYGFLLLYLLDKQGIASSMVNPKQIKHFSRMMMTVTKTDPKDACMIAMYGEKMNPPVYKMPSEAVMLLKQKKTIIRQLKKQLTASKNLKSSLVVLPFQDKNGMKALDKTISFLASQIESLESELADLASSEFDRQVKLLTSIKGIGITLATALIVATGGFSYFNNAKQVSRFIGICPTYQQSGISVHIKGGINRNGDASLRSLLYVASWSALRGNTTCKECYARLKANGKLSKVALIAVANKLVRQAFAVIKSDTPYVDGFVSTHQTK

SEQ ID NO: 77634 - protein, 354 aa, unidentified
MLSVGLDLHKRYSQVEALGEDGERRSAARLVNEFEEIEGFFRSLREPCRVVLEAGWNWGSMYDWLERVENVVEVQLAHPYGVRAIAAAQVKTDRIDARMLGQLLRVGLIPRAYIPGKETRQLREAVRQRLFLVRVRTMLKNRVHALLDRHHVVPPPVSDIFGKRGRDYLSKVELPGCAQDLLRQDLRLLEMLGSEVRQAEVLLARALKGDRRVELLLTVPGLGVLLATVVALEIDSVERFVRPAKLVSYAGLVPTTYSSGGKTSHGGLMKMSNKWLRWALVEAAWIAVRHDPYFRHQFGLRCRTKGPKTAIIAVARRLAEVLWHVLTEDRPYQVRQPASKRREYGLTPAALIQD

SEQ ID NO: 77635 - protein, 408 aa, unidentified
MLLLVGDDWAEDHHDVELMDSSGRTLAKSRLPEGSSGIARLHALIAAQLGDDAGDDAEVRVGIETDRGPWVAALDAAGYVVYPVNPLQAARYRQRHAVSGAKSDAADAHSLADMVRTDAHQLRAMAGDSPDAEAVKVVARAHKTLIWERTRQTQRLRHALREYFPAALEAFDDLDAADTLELLGKAPGPTAAARLSRAQISAALRRARRRDIDTKTTRIRAALRTEQLGRPGVVTAAYAATTRAAVAVLGTLNEQITALEAQVDAHFRRHPDAEIVLSQPGLATVLGARVLAEFGDDPTRDATAKNRKNYAGTSPITRASGKRKLVAARYVHNDRLVDALMRQAQSALQTSPGARAYYDRQRARGLDHNPALRQLANRLVGILHGCLKTRTHYDETTAWSHHVDKPAA

SEQ ID NO: 77636 - protein, 344 aa, unidentified
MEIRRVGVDLAKNVFQLHGTDGKGKAVWKRQLSRDKWLVTLSSQVKPGAEVGMEACAGAHHWARILRDAGYQVKIIPPQFVKPFIKGNKNDANDAQAICEAMVRPNMHPVDIKTVEQQDIQAIHRVREEIKTHRTAKANQIRGLVAEYGLVAPKQLSSLRTAIPVWLEDASNGLTMVFRQLLHGLWDDLRALDKRMSELDKQIAIVAQENPVARRLQQLRGIGPLIATALVGTVGHAKQYRKGRDMAAAIGLTPRQHSSGGKHRLLGISKRGDAYLRCLLVHGARSAMRTAKDKDDRLSRWIRNLQERRHANVAAVAMANKLARIAWAIMSKEVDYDPEFASAT

SEQ ID NO: 77637 - protein, 530 aa, unidentified
MTDSMIRFVGLDVHKRVVEACIVDQAGNVVHRERFALNRHVLGLFATKVLRPGDHVALEASTNCWAVADLLRPHVARVVVSNPMTTKAIAQAKVKTDKVDAYVLAQLLRCDFLPEVWQPDEATRRLRELTGRRATLVGHRTAMRNRIHSVLAMRLVEAPERLFTTASLQWLDDVELDEQGQTLVDSDRRLLAFVQGEIDAIDLELARRGHDSPQVKLLITLPGVDVTTAEAVVAAWGDIRRFPDADHAASYLGLASSTKQSANRCYHGPITKQGNSQARWMLIEAAQHLDKHPGPLGHFFRRLLRKKCRNVAVVAGARKLAMIAWLMLAHEEPYRYAVPQSTEAKLAKLRVKATGKRRVGGVAKGQKVVATRPGHAGGTRRIRALSEVCEVEGLPAPKPLSSGEQRTVRSADCETFVKTIAEQQLVDRRSTRKSAQAGDHDSTAPQATAAPAGPASKAMAAGKEVTTGTPGASPTRAASCPVRIRTLRSGNPFRPHPACEQGDEAPPPAPPTLFSVPKQGRTKEKSQVRR

SEQ ID NO: 77638 - protein, 411 aa, unidentified
MRLFVGDDWAEDHHDVEVMSEAGKVLAKRRLPEGVAGIAQLHELIGRHLGEDADEAEVIAGIETDRGPWVTALVTAGYLVFPVNPLQASRYRERLGVSGAKSDAGDAHMLADMVRTDSHQLRPAAGDSAAAEGLKVLARTHKTLTWERTRAVQRLRHQLREYYPAALEAYDDLDAPDTLELLGKAPDPARAAKLTRAQVSAALKRARRRNITDKATAILAALRSPQLGQPAAVTAAYAATVRSLIAVITVLNEQVKILQRQVEENFGRHPDAEIYQSQPGMGAILGARVLAEFGDDPHRYADGKARRNYAATSPITRASGKKKVVAARFIHNDRLAGALNAQAFTALRASPGARALYDELRARGIEHNDALRRLANRLVGILHGCLKTRTLYDEATAWSHRQNLPQSSVAA

SEQ ID NO: 77639 - protein, 384 aa, unidentified
MLGVGIDWAGEVHLVALGRPDQGVIEVVRVDHHPAAVTALLGRIRRLEPDPAEVRVVIEARHGLLVEALVDAGFTVIPVNPDLVARRRGPARKKDDPEDARIACLLALDPHAGLKPLIPHGELAAELRSIARDDERAARDQTRLLNRLRSDLDAVFPAALTLARDSLGAPTVLRLLERYPSGELLRRAARDDLVALARAGKHRQPARFADNVAAALAAEAFTPRDYLARAKADTIRLTATQLLAIAAQRRIWERRMGALLGAPRRSRRPPRADERGQAFPGGEIYLSFPGLGDRLAARVAGEIGDSSQQFKTPNALACYAGTAPVTRRSGKRQFVVARRLAHNRFLGNAVHQWAFAALPAQPGRGRSTTPRSPRASPTIRRFGR

SEQ ID NO: 77640 - protein, 368 aa, unidentified
MAERFVGIDVALREHRIAVLDRDGEAVGQSFTIAASKDGVTTLLRTLDARAATAAQTLIGLEASGHLWENLEAALVGAGYHVIVLNPLQTRRYRDVVRRKAKTDDIDAHVIAGLLRSGAAQASYVPDEQIQSLRELARLRARLMADRQDYQRQLIAQLDVVLPEHHAVLGDLLTARARGILAQFPTAQHLAHANPRAIRRAAEEAGARGFSLDDATGVRDSARRSLYSGKAAAARAHVVRTLVSQLERLTSAIDEVDRAATTLLPPSEPGTGPSDAELLQTIPGIGPQTAATLLGELGAFTRFTDARALVAYVGFYPVINESGDRAAPPRLSPVGSRIARHSLYLAAVNAVRRSGEWRTIYLRKKAQG

SEQ ID NO: 77641 - protein, 315 aa, unidentified
MANIEVHIGVDVSKDTLDVFNPSDSSYSKIKNRRSAARGFIRKIKAKHPTAMICCESTGGYERTLMDACHEEGQPFCVMNAQQVRYYAKHLGFLEKNDKVDARIISKAANDKKPSPYVHPTPEQRERKELWTLRATLIVARNAVSSQMEHLKGKNSVAAVKRLVKAYDKEIEKLEGLCREFVKKNERDANLMERLEEVEGVGGLTSIGVITLLPELYTLDDKKLAKLTGVAPLCDQSGQIDGARHIQQGRTLVRQALYMAALSASRYNEILSKYYKKMVNAGKPKKVALVAVMHKLLRLFRRIAQDPGFKPLMST

SEQ ID NO: 77642 - protein, 351 aa, unidentified
MLIIGCDFHTRYQQIAMADDATGELLIERRLDHESGEALVFYRSLQGPVLVGIEATGPIHWFERLLAELGHELWIGDSAKIRASEVRKQKTDERDARLILDLLLAKRFPKIWVPTPAERDLRQLLWHRHKLVCLRTMLTNQLHFLAMSQGLCRKKKLFTKKGRSELIGLALGPWASRRREELLKLLGQLDPPIAELDRAVLEEAKRRDDAVLLMTHPGIGPVTSLAFVLAIGPITRFQRSKKIASYLGLNPSEASSGGRRRLGAISKQGNTMVRWLLIEAVYPAVRLDPELRQDYQRLKFRRGHAVAKVAIARKLAVRMYWMLRSGADYVQLVRRQGSPGATLMNASSSPG

SEQ ID NO: 77643 - protein, 344 aa, unidentified
MRIASIGIDLGKTTFHLVALGERTKVLVRKKFSRGQLLAYTANLPSSLIGLEACAGSHFLGAGLREQGHQVRLIPAQFVKPYRKSNKNDFLDAEAIAEAVTKENMRFVQIKSQDQLDLQAMHRVRDRLVQRRTALINEIRGFLLERGIIFAAHPIHLRNNLPGVIEDAEQNLSPRLRWLLDRLWQEWKQIESDVQAISQEIERISDEDVRCRQLRQIPGFGPLVSTATVAAIGNGAAFRRGRDFAAWVGVVPRQYSTGGNARLYGISKRGNIYLRRMLIHGARAVLFRIKHDTGGFGQWVHRLAQRAPRNKVIVAIANKLARIAWAVLSSGKDYRHQPLRPAAA

SEQ ID NO: 77644 - protein, 429 aa, unidentified
MRTESTPGARGPVFCGVDTHADSHWLCVLDWRGRKVLSRRFPADAAGYEALAGAIAAAGEPACVAMEGTSSYGAGLTRHLASLGMPVREALSPARTQRRRPGQGKCDEADAERAARAAMSGSKLGTPKSQDGWVDGVRCMLAARSGAVKARTSAINTARSLLTTAPEGLRSRFRGMGGPRLMEELPSVRAEGALGAALGALADLWAAARDAALDMERSIGASLEENCPALLAMYGCGPVSAAKLAVAAGDNPGRLRSEASFAAICGACPIPASSGKTVRHRLNRGGDRQANSALHEIARQRVMRDPETAEYAERARARGKSDREVMRCLKRYVAREAYRALMRPHEIRRPEDASELVAARRAARVSQVRAASILGTSEKYISMLERGQRELKPIRRAYEAWVEAGLPLDWDRQAFEAERKMDSKKHLAK

SEQ ID NO: 77645 - protein, 326 aa, unidentified
MHGVDADGQVVIRRKLKRRYLLAFFEKLPACLVGIEACATSHHWSRQLQALGHRVRLMPPAYVKPYVKRQKNDVADAEAICEAVTRANMRFVETKTVEQQSCLMLHRTRHLFIREQTAVINVIRAHLAEFGIVAPVGRKGVEELLRVIADPADRRIPEIARACLAALGTQLQRLKEQLLEFDRMIMAWHRSDETSRRLDEAPGIGPMLATAVVASVADPKAFRSGRNFSAWVGLVPKQHSSGGKDRLGHISKQGDRYLRGLFVAGALAVIRYAKIYGTRHRPWLTALLARRPTKVAAIALANKIARMTWAMMVKGERYKEPVALAA

SEQ ID NO: 77646 - protein, 270 aa, unidentified
MRFYTTQHPFYCGIDWHARSMDVCLVSHEGAILLHRHMQAAPEPFLQAVAPYRAGRVVAVECLFTWYWLADLCAAQGIPFVLGHALYMQAIHGGTAKNDKIDSQKIALLLRGGMLPQASVSPAAMRTTRDLLRRRTHLMRKRADLLAHGHHTNSQYHLPEIGQKIAYQANRAGGAERFDDAAVQQTIEVDLALLTSDDARRKALELSILTTAKHPDAHTLSLVHTVPGIGTILRLVLRYAIHDIRRLPRVQDFASYARLVQCSKESAGTR

SEQ ID NO: 77647 - protein, 466 aa, unidentified
MEKYYLGCDVSKGYCDFVILDQSKKVAEANFQLDDTAEGHTELCRIIHDFTLYHRDSIIYVGLESTGGYENNWYELFRKIQSIYNLQVARLNPLGVHNYAKAGLNRIGTDKISARNVAEYLIAHSEKVSYNQEEYYGALRRQWKFVRFLKKQKVGLLNQLESLLYNTHPHILTYCRAGVPEWVLRVAEKYPTASCLAGADAEAVAEVPYVTLKRAEELIGAARRSIAATTDPVTGQLVRVVTQQILQVGNTIKEQEKLMMSSCKIPEIDLLKSFTGIGNFSALGLMLEIGTVERFRSVKALASYFGLHPVYKESGDGIWGVRMSKMGRKEPRWILFMVATCAIIKNEMIRELYLEYLEKGKTKMQAIGIMMHKILRIIYGMLKSDTLYDPEIDRANRSKAVKQVMVQRTGKARRFQAQDHQAPISRRQNKKRKEQGESQNDNIIKNGIITPAQEKDNIILEEIPMR

SEQ ID NO: 77648 - protein, 338 aa, unidentified
MKLYAGIDLHSNNHVIVISDEEGKEMFRKRVSNDLEKTLSTLVPYQSQIEGVAVESTYNWYWLVDGLMDHGYRLHLVNTAAVRQYEGLKYADDNTDAYWLANMLRLGILPEGYIFPREDRAVRDLSRKRCQLVQMCTANILSIQNIAARNLGYKLSANRIKTLLAEDVERIFPQPQVALAVDTNRVVVRSLSEQIARLEKAMLAQARKCPEYRHLLTVPGIGKVLALTILLETGDINRFPGPGHYASYCRCVGSARISNGKSKGKGNTKSGNKYLAWAYIEAANFSTRFNDRIKGYHQRKLNDTHPIVARKTVAHKLARACFYIMRDRVDFDIDKAFG

SEQ ID NO: 77649 - protein, 455 aa, unidentified
MAQRNRSVSLKPDKSRAALTITHPNAAGIDIGNAVHYVAVPPDRDDEPVREFPSFTVDLNAIADWLKVCGVDTVAMESTGVYWIPLFELLESRGFTVLLVNARHVKNVSGRKSDVLDCQWLQQLMTYGLLSGAFRPTEQMCVLRSLWRQRVMLLRTQGRHVQHMQKALTQMNVQLANVISDVVGETGQQILRAIIAGERDGQILGAMKNARIRASIDEIAKSLQGNWRDEHLFALKQAVDAFDFIGKQLVECDREIEQQMHRLQAHEGEPAKGKQRGRTRNAPKFDLRSQLFKMCGVDLTRIDGIDVTTALAVISETGTDMSRFPKVGNFTSWLGLCPGTKITGGKVMSSKTKRVANRAAQALRLAAAALRSSQSALGAYFRRMCARMDKAKAVTATAHKLARLVYTMLTKGEEYTDQGQDYYEERYRARVLRQLSLRAQKLGMTLVATEQPEPA

SEQ ID NO: 77650 - protein, 391 aa, unidentified
MIFVGIDVAKDKHDCFILNSEGTVLADVFTIANNRIGFETLLSRIQSCSQGESKIKVGLEATGHYSYNLLGFLLDSGLATYVINPLHTNLYRKSLSLRKTKTDRIDARTIAMMLMSDVDLKSYSNTAYHNEELKSLTRYRFDKVKERAKLKSSVARLVNILFPELEKLVSSLHIAVVYALLSNYPGASYIANANTEELAEILCTASKGRYTKSKTAEIQVAAGVSIGSKMPAKSMELKHTIALIRELDKEISEVESAIDKITSQMDSPIFTIPGIGRHMGAMILAEVGDFSNFASADKLLAYAGLSPSTYQSGQLQNCYAHMEKRGSRYLRYALFNAAKYVCLWCPTFSAYLEKKRSEGKHYNVAISHAAKKLVRLIFAMQRSGKAFLADY

SEQ ID NO: 77651 - protein, 351 aa, unidentified
MLIMGCDWHPRYQIVAWVEEETGEVMSRRLEHENGEARKFYASLPPGAVVGIEATFPSHWFEGLLAECGHELWVGDAARIRASEVRRQKTDTRDAEHILDLLLAGRFPRIWVPSIKERDLRQLLVHRMKMVRTRTAVKNQLHYLAMSQGVCRKRKLWSARGRAELEGLRLLPWASRRRQELLGWLDQLDRSVEELDRAVEEAGRGRAEVALLRTHPGVGPVTGLAFVLTVGPIGRFANSRKLVSYLGLNSSEHSSGGRQRLGAISKQGNSMLRWLLVEAAQTAARLDPELHRTYQRLKFRRPSGVAKVAIARRLAVRLYWMLRAQADYAQLVRTSGSPSSAVVPSKSGSTV

SEQ ID NO: 77652 - protein, 420 aa, unidentified
MVYLERGYNLKELPWSKTVSNSFLFKEACMILVGVDVAKDKHDCYIMTSEGEVLFKSFTISNSMEGFDQLYEKILSVADNLDKVKIGLEATGHYSYNILSYLLDKGLTPFVINPLHTNLYRKSLSLRKTKTDKVDSRTIASMLMSDVSLKPYSDTLYHNEELKSLTRYRFDKVQQRARLKTSISRLVTILFPELEKLVPTLHMKSVYSLLYEFPNAKAISKVHLTKLTNLLYASSKGHYGKEKAVSIREAAINSIGSYMSAKSLELKHTIKLLEELTLEIDEIEKEIKSIIDKLNSPILTIPGIGNSLCAQIIAEIGDFKNFDSPDKILAFAGMSPSTYQSGKLYSSNAKMEKRGSKYLRSAFFTAAVCVCRFEPNFALYLAKKKAEGKHQYVAISHVVKKLVRLIFHLEKTGEHYVALT

SEQ ID NO: 77653 - protein, 406 aa, unidentified
MTAATSFKVIIGLDVGKTGHHACALSADGSRRYFDKPLPQDESKLRDLFTSLQAHGPVLLVVDQPNTIGALPVAVARDCSVAVAYLPGLAMRKAAALHPGTAKTDKRDAFIIAETARTIPATLRKVDHNDEALSTLKALAGFDEDITRDCSRTINRLRSALLQIHPALERVFAGGTITRSAVLDLLEHYGGPTKLRAAGKSRVTAWINRRCRGDHTDLVAAIFHALDQQTVVVPGTSAIERTIPLLASNIKMFKKQRDLIAAEVNEVVDALPLYEILTSIPGVGVGIATSILMAVGDCSDFPDAAHLASYAGIAPTTRRSGTSIRGEHPSRAGNKRLKNALFRSAWISTNCHEASRDYYQRKRREGKRHNAAVMCLARRRCNMIYAMLTRKEFFRDEPRTPILAAA

SEQ ID NO: 77654 - protein, 408 aa, unidentified
MAIIGMDIHRAFAEVVALEGKSRRRLGRIAMRRDRLAAFAAGLTKEDIVVVEATGNATAVAEVLAPHVGRVVIANPKQVRVIAHAKIKTDKIDAAVLAELYASGFLPEVWIPDKDTQALRRQVTRRNQIVRQRTRLKNIVQSILHAHLIPAYAAGNMFGRKGRAWLSAQKLPEDERMAIERHVREIDRLGEDLKVIQRDLAQYGLADLRVKQLMTVPGLDMIVATALVAAIGDVSRFGSPRKLVSYLGLNPSVRQSGSGPAYHGRISKQGPGRARGLLVEAAWAAARAPGPLRAFFLRIRSRRGQHVAAVATARKLAVLVWHVLTKEQDYLWVRPALHATKLRRLELTAGHAPVRGQRGSAYDYNIKATRDQERRRVQQAEKIYERFVAGWNRSGPRVRTSAAKEERQ

SEQ ID NO: 77655 - protein, 321 aa, unidentified
MTYIGIDVSKDTFVVAYSPDKNSKTKTFRNTTRGIHEFIRTISKEEHHCVMEATGNYSALLVYLLSEAGITTSLENPLKVKNFARAMLSTVKTDEIDARLIALYGEKMQPAPYKLRSDAILTLKQKRTVIRQLKKQLIATRNLKGSMEALPFFDAKCRKSVEKTIAFLEKQIKDLEEDLASLAKSEYKKQMDLLTSVKGIGITLAAALIMATGGFTYFDNAKQLTRHLGLSPTYQQSGTSVNFKGHINRNGDSSLRSQLYVAACSSIRCNTECRACYDRLRSNGKPGKVAVIAVANKLIRQAFAVVTQEKPYVDGYISSKK

SEQ ID NO: 77656 - protein, 356 aa, unidentified
MERYIGLDAHAPSCTIAVVSQAGKRLKDFPVETNGQALVEAIRMIPGHKHLVFEEGLQSAWLYETLRPHVDEVVVAGVTKSRGQKSDKRDAYGLAEKLRTGSLDKKIFKAPQQFTLLRELSRAHITATRDLVRVQARLKSLYRSRGIQTPGGSVYSSRRRVDWEKRLPASARGRAARLHEQLEFFKEQKKQVEADLLRESRKHAIVRILETAPGIGPIRAARLVPIVVTPHRFRTKRQFWSYCGLGIVTRSSSDWVQTADGGWIRARVPQTRGLSRQFNHVLKDIFKGAATLVITQRNKGPLYHRYERMLAGGTKPSLAKITLARIIAATVLRIWKDEEEYQPERYRRVSESDRNA

SEQ ID NO: 77657 - protein, 354 aa, unidentified
MRFHTSTTRYHCGIDLHSRQMYVCVMDSQGNKLLHMNIKNNDFDFFLRKIAPWRHDMTVCCECLFCWYWLADACQEAGLEFVLAHALYLKAIHGGKNKNDRIDSEKLAHLLRSNLIPPAYVYPAEKRPVRDLLRQRTSYVWQRVELLQRISTRQLARNQQPVSKFSNNREKWLEALLETTEDPRQRFALKRDVELIVGYDNAIKALEKELLTLTKRNEPRDFALLRSVPGVGKTLGLTLLYEIESIDRFPSVGNFLSYCRLVKGTVASAGKIKGLRGAKLGNPYLRWAFGEAAVLGKRHHDALDVFSRRLEKKHGKFKGNAILASKLGRAVYFMLKNGTGFDVEKLTGRSAKAA

SEQ ID NO: 77658 - protein, 412 aa, unidentified
MDTLVARCAGIDVGKAEVVVCLRVPGRRAGTHRTEVRTFGTTTRSLLELRDWLVAERVTRVGMESTGHYWRPVFYLLEDAVETWLVNPQHIKNVPGRKTDVSDAAWIAQMIEYGLVRPSFVPDKPMRRLRDLTRYRASLIHDRTRQVQRLHNVLEDAGIKLSLVASDILGVSGRAMITALVRGERDPQRLAELALGRLRPKIPALIEALTGRFDDHHALLCRLMLDQIEGLDAAVAHLDRQIAEEMAPFRVQLQRLRTIPGVGLRTAEVIIAEIGVDMSRFPTPGHLSSWAGLCPGQHESAGKRRSGRTRKGDSWLCGTLGEAAVAAARTKNTYLAERYRRLARRRGAKRAQLAVARSMLEAAWHVLTYDVDYRDLGADHFLKIARNPQARANRLVRDLTALGYQVQVTKAA

SEQ ID NO: 77659 - protein, 418 aa, unidentified
MQTDLSQFTAIIGMDWADKKHDVCIQAAASAQRQIYQVPHKVDKLDEWARSLYRQYGGPIAVALELSKGPIVSALQKYDFFVIFPIDPTTLANHRKTFTLSGAKDDPTDAEYALDLLLKHTEHFKALNPQSVEMRALMTLVEQRRRLMNDRVRLTNRLRNALKQYYPQALEWFDRIDTQLFCDFIKRWPSLAQARRARKATLEKFFREHNMNRKPLLERRMTAIKLAVPLTTDEAIIMPYRLQAMTLVAQLEVALVSIRRYDDEIAALAPQHPDYGLFSTLPGAGPSLAPRLLVAFGEQRERFANAAALQKYAGIAPVTERSGQKHWIHWRWQCPTFLRQTFVEWAAQTINKSYWAGLYYYQQRAKGGSHQAAVRALAFKWIRILYRCWVTRTPYDEAKYLKILQERGSPLLKMAQAA

SEQ ID NO: 77660 - protein, 348 aa, unidentified
MLIIGCDYHPGFQQIAFVDTETGEVSERRLTHREEAEQFYRTLKTRKVRIGMEASGHARWFERLLTELQFELWIGDAAEIRTKRVRKQKTDRQDAQLLLKLLMEDRFPRIWVPDAENRDLRQLLWHRHRLVQMRTRLMNQLHVVALNEGVRRKKALWRAAGRSELESLVLAPWALRRRRDLLDLFDQLTPKIQELTRALEEEVEKRPIARRLMTHPGVGVLTALAFELVIGTPERFGCGKQIASYVGLVPTEESSGDRRRLGHISKQGNALLRFLLVEAAQVTVRSNQEWRSKFFHLAMRRGRKIAKVAMARKLAVHLYWMWRQGLDYGQWQKLGSHAGEPGNRHGVQ

SEQ ID NO: 77661 - protein, 413 aa, unidentified
MDILYTCCAGLDVHKKTVVACIRRIDAKGNVQQQTRTFGTMTSQLLELADWLRAEKVSHVAMESTGVYWKPIWNLLEGEFELLLVNAQHIKMVPGRKTDVKDSEWIAQLLQHGLLRASFVPKTPQREVRELTRQRRQLIQAKASVANRIQKVLEDANIKLASVATDVLGVSGRDMLEALIQGQKDSRPLADLARGKLRAKIPQLQLALHGRVTDHHRFLLRLLLDELRHLEDLISRVNARITEVLPAPFAEAVARLATIPGIDVHAAENIVAEIGTEMKQFPTAEHLASWAGMSPGNRESAGKRQSGRTTKGNRWLRGTLVQVAWAATHTKKSYLAALYRRLAGRRGKKRALVAVGHSILVTIYNLLKNHSNYVDLGPSYLDQLQGKRLTQSLVRRLEQLGHEVTLKPKLTAA

SEQ ID NO: 77662 - protein, 425 aa, unidentified
MNLSVLKGVPMALKIVYKICCGIDVHKTFVVACVASTSDKGITSYESHRFSTYTSGLKTLLQWLIDRNCKDVCMESTSKYWIPVYNILESDCSIVLAHPKYVKAIRGKKTDKKDAKWIADLFKHDLVAGSFMPPSDIRQLRDLMRYRFKLTCFKSSEKNRLQNCLTVSNIQLGNVVSDTFGKSAQAILDKLLENPADTSFDLEPLVYKSLKKKLPELRDAIDGFITPEQAGKLKIIKAHYENLESRKAELEKLILALAAPYQQELTILQTAPGISSNFTAIGIISEIGTNMEAFPSAKHLCSWAGLTPTNNESAGKKKSVRVSKAGCYIKPLLVQCANAVVTSKKHPEMRNRYLRLRKRRGHKKAIITIARMLLTALYHMLKNGENYNAELYQKSDLPPVDREITVEQALIITRNQGYKIKSATI

SEQ ID NO: 77663 - protein, 330 aa, unidentified
MNSICSSTDRVTVAVPVLGLDVAKKSVQAELRNSSNKVRFGFANNAKGFAQLARILKEHDVPKVWAGLEASGPYSQALALWLYAQGHRVSLLNPRRVKHYARSAGNRNKTDLLDAAVIADFVCAHQPVAWQPPTLEVAQLQALVRRREELSLMLQAEKNRLEGIAPNVRSSLEHVIATLSTEKARLEKLITQHVLSHQQLSRDHQLLCTIKGIGSLTAAILLAEMARPGQVERARQAAAHAGLVPRREESGTSVRRNRGLGKEGNRYLRKALYMPALVAIKYNAPLRHFTSRLRTAGKPKMSIVCAVMRKLIHIAFGVLKHQKPFNPSLA

SEQ ID NO: 77664 - protein, 412 aa, unidentified
MFKIFRNNCCGLDVHKTWIYACIGITDPNGRTDYKQARFSSFSEGLRKLAAWLAKYSCTEVCMESTGKYWIPVFNILEKSCSVTLAHPKYTKPQKGNKTDRKDAKWICDLFMCDMIKPSFIPSPEIRQLRDLMRYRSKLTNMLTGEKNRAQNCLTVSNLKLDDVFSDVFGKSARSITNYILEHPGETFDVSPFVDPRCKTPVSEIQAAVDGAISPEQAVKLRQCLAHINELEAHRKEIESEILQIAEPFSAVLDLLSTLPGFDKNPMTAIAILSEIGPDMSVFPSSKHLISWAGCCPRNDQSNQKVKSRRISRAGSYLKPLLVQVANALIKSKKHPEFKERYHRIKSHRGHKKAIIAVCKMLLTAIWNMLSKLEPYNPEGFLEHRPVKQEKTLTLSQALELLRLRGYTITNQ

SEQ ID NO: 77665 - protein, 364 aa, unidentified
MRRVYYIGLDVHKDNTQMAVLEKKGKELVSIKMIDSDPMKVVKAILPYKEEGEVHVGYEAGCMGYTLYRVLTEKKIDCQIIAPNKVFRSGNNEKIKTDKRDATAIAWMLRREEGAEIAVPEREDEAARDLLRCREDIGDDLKRVKQRMLKFLLRHGHIYGNTRYWTGKHRKWMKTLVFEMPLDKIVFEQYMCTIENTEERIARIDVQIQEIAESPRYAERVSFFRAFKGIDYIIALSLICEIGDFRRFPTAASFMSYIGLVPSEYSSGKKRKQGGITKTGNGHIRKLLTEAAWHYARPVKVSIRLAKRRIGTPEPIISHADKALNRLHSKYFKLLHKGKSKQAAVIAVARELSGFLWGVMNTAA

SEQ ID NO: 77666 - protein, 341 aa, unidentified
MHPYFVGLDVHKQVIAYCVKQWDGQVVMEGKIKATRAALAEWVGSLPKPWVGGMEATMFSHWIYAALQPHAAELYMGHAARMKAISAGKKKSDKLDSRTIADLLRGNLFPKCFVIPPELGRLRQQLRFRQLVVKQQVSFMNKTAGLLMETGIEYQRRRLHGKQYFSELMASTHWVNQELKPLLKFGRQQIESLAAMDKRLIRTLENHPQLKARVAALRTIDGVGPILALSWALETGTPERFPSIKDAQSYCGLTSAFWESAGQQKRCPISKQRNKHLQTVLIEVGHLAPGYNEKLKALYEKEKAAGADSNQATLEVARKLVAYLLAVDRAFWKSAQSKPAA

SEQ ID NO: 77667 - protein, 345 aa, unidentified
MKHFAGLDVSLDETTVCVVDEEGRIAKEARVPSEPEALVTFFQGLGLAVERIGLEACSLAAWLHEGLAAAGLPVVCIETRRAKAAMGAMPNKTDRNDARGLAQIVRTGWYRAVHVKSPACRSWRALLAARRLVLNKLRDVENGLRALLREAGLKLGTPARKEFAARVRELVGADPVLSASAEPLLAIVAAMVGELARLTRRVLEIARAEPVCRRLMSVPGVGPLTALAFRATIDRPDRFRRSRDVGAHLGLTPKRYQSGETDIQGGISRCGDELARTALHEAAHSLLVRSRKWSALRAWGVQVAKRRGMARARVAVARKLACVLHRMWADGSEFRWGKQDAASAA

SEQ ID NO: 77668 - protein, 344 aa, unidentified
MLYVGLDLSRKRVDFDARRRDGELVERGSLPPDADGLRLLVRRLGDADVVAVIESMNGARFVHDQLELQGWDVRIADAAKAKGLAPLACKTDAIDARVLAELGRRDLVPEIWLPSPEVRAERERARFRLHLVKHRSALKNRVHAILIAYGIPSPSSDLFGEAGRRLLARLELPQPWCSTTAASIALIDVLDEQIAACERELRTLGADHRYVPLLMTTPGIGWILAYTIASEIGDIRRFATPAKLVGYSGLTPSVSQSGEHDRRGPLRKNGPNYLRWALVEAAHTASRNPVYQPTLERHRARHGRKKGTKTAALTIARKLAEATWHMLTKNQPFAPAGAPARLAA

SEQ ID NO: 77669 - protein, 335 aa, unidentified
MHYLYYVGLDVSKETFDASLVAFEDANEMAHRKFANSRKGICSCLHWVEKRHGIRLDDVIFCAEDMGSYISEMAVCASDRTLNFNFSLISPLVIKYSMGIARGKTDRVDARRIAEYAITHYRKIALYLPAEKELCQLRTWLILRAHLAKQRVAKLVLLEKLDYKEKFADVSIQRSMLQEEIAYAETHMKTIEREMKKLIAADSNICRNYKLLTSIKGVGPITAIVMLCSTLNFTKITDLRKFACYCGLAPFEHSSGTSVRGGCHTSSMANRDIKVQLNRSALIAIRCDPQLKAYYERKVAEGKHKFSVLNAVRAKIAARCFAVVRRGTPYVALQI

SEQ ID NO: 77670 - protein, 388 aa, unidentified
MIYCGIDVAKRKHAVSLLDEKGEVVKPVFMIENTRTGFDRLNLELEAVADSPLTVGLEATGHYWLALYEELSQRGHTLIVLNPLQVAAYRRSGVRKVKNDRHDALWIADFIRIADLPATSQNIPVILQMRELSRFRYHLSALIGDCKRKSLTILDRVFPEYEQLFSSVFLKSSRQVLKTAVSAQEFADYDLSELSFLLHKASQGRFGEAQAERMQTAARQSVGIGFLTNAVRVEMGCLLDQIDLLEEQRTQVDQVIEQLMQQIPQHITSIPGIGPVTGAAILSEIGDVQRFESPEKLVAYAGLDATVYQTGQFEATEAHISKRGSPYLRHAIWQAAMMAAQYDPDLIAFYQTKRQQGKHHNVAIGAVCRKLIARIFIVLKEQRPYIIR

SEQ ID NO: 77671 - protein, 350 aa, unidentified
MKQRSEDREVKVMGIDLAKNSLQVYGVDANGHKAVGKKFSRQKLKEYVVTLPVCTIAMEACASAHYWARLFKSFGHEVKLIAPQFVKPYVKSNKNDAADAEAICEAVQRPNMRFVPIKEIEQQDIQSIHRMRSLVVARRTAQINQIRGLLLEYGIAVPKGRSKLLKRLPEILEDAENGLTDLFREELFGLYEELHHLGERIAHYDEKITQMARSDERAQRLQTIPGIGPMIATALLAAIGDSQAFNNGRELAAWLGLVPRQHSTGGKPTLLGISKRGDVYLRQLIIHGARSVLSRVEGKTDRNSQWAAALEQRRHTNIAVVAMANKMVRIAYALLKNGERYCVDSTPANA

SEQ ID NO: 77672 - protein, 339 aa, unidentified
MQLYCGIDLHSNNNYVAILSDTLEQVACRRLRNDLGQVMGFLERYREDLVSVAVESTYNWYWLVDGLMEAAYDLRLVNTTKASKYSDMKYTDDKHDARWIARLLALGILPEGYIVPPQERRLRDLLRRRSFFVRKRTDHLLSVGTLLERSTGLRVGTTEIQTWSGKEVRALIDDSFVAESITVMLPVVRAFTRQIKSVEKQVLAEAKLRSDFQLLKTAPGIGDILALTIMYETVTIDRFPKVGNYVSYCRCAKSEHTSNNKRKGAGNRKNGNKYLSWAYSEAAHHATRLDPLARGYFARKKKRSHPMVAKRALAAKIARGCYYVLRDQTPFDPSRTFPK

SEQ ID NO: 77673 - protein, 336 aa, unidentified
MEHQEANTGKTRAYRLEHGTGAIRQALAGCARGTAVAVEATANWYWIIDEIEQASCVPKLVHPRKAKLMMGLINKTDKLDAHGFNTLQRNGTLPTVWIPPGVLRELRELTRTRLVLVAQRTRWKNRITATLAKWGLPPSEYSDPYGKKARAELEQQLERLPEQTRWATQQMLAQLDSLSEQAQQFEKRLEELVEVTPMMQWLMTLPGVGVILGATIALEIGEIERFANAERLASYSGTTPRVHSSGDRTRHGRTRPDVNRYLKWAFAEAANSVAVNHRRNPERHVSRLYTRLRASKGHARAVGAVARHLAEAAFHVLQRKEVYRDPSLNPRPERGV

SEQ ID NO: 77674 - protein, 390 aa, unidentified
MTDATSKASKRSEKPSMSRPTSDRLTPGTPSDAAEKRDRRRPRGTSPNSRQSGATKTSSASSHSRGRDISRSVPVEPVDVGIDVSKAKLDICLLPSGQTFVFDNDPAGIRQLVALLQKQPRVARCLLEATGRYERRCAADLMEAGFHVAVVNPRQARDFARAIGKLAKTDTIDARTLAEFAKLGHSRLSEKTPENQAILNDLVTRRRQVTQMLAAEKTRREGLTHKIPLASVNKVIRLLEQQREDLDREIAKLIESDDDWKNRRDLLASVPGIGNTTASQLVADLPELGKLNRQQIAALVGVAPLNRDSGTMRGHRSIFGGRASVRAGLYMATLAAMRFNAVIRPFGERLIAGGKAFKVAMIACMRKLVTILNVMVRNNEPWRAPVLQNA

SEQ ID NO: 77675 - protein, 365 aa, unidentified
MTTRQRSTSSSTDPPVRREVVLGVDTHGEVHVAAVISPLGKVLSTESFPATAVGYRRLLVWARKRGTVRRAGVEGTGTFGAGLSRYLLTRQIQVFEVNRPDRTARRLLGKSDPLDAQAAARAVLSGRTRAQAKSGDGPVHSARIYKLAKDSAVKARTQAINQLKAVLVIADPALRERLSSLGNAEMFRTCATLSPPDGGGDEDAVAQATHMTLRMLAERIEQLTGQINELNQRLTRLVERHAPQLLVPVGIGPDSAVTLLITMGDNPERLNTEASFAALCGVSPIEYSSGRRSTRRLNYGGDRQANAALHRIVFTRLRHDPRTQAYYERRTQEGKTRREIVRCLKRYAAREVFNLVRLVSRAPAL

SEQ ID NO: 77676 - protein, 404 aa, unidentified
MYNAVGIDVSKGKSTVAVLRPGGTVICKPFDVSHTSQNLNELADYLSSLDGTTKIVMECTGRYHEPMVKALSEAGLFVSIVNPHLIKNFGNNSLRKVKSDPADARKIARYTLDNWTELRQYSGMDNTRTQLKTLNSQFGFFMKQKVAAKANLIALLDNTYPGVNKLFDSPTREDGSEKWVDYAYSFWHADCVRKIGLKAFTERYKSFCKKHHYIFQQDKPEKLFNASKELVAVFPKEKTYKLLIQQSIQQLNLASEHVERLRREMNELASTLPEYSTVMGIYGVGKTYGPQLIAEIGDVSRFTHREALTAFAGVDPGVDESGQHKSKSNRASKVGSARLRKTLFQIMTTLLQNAPEADPVYRFLDKKRSQGKPYYVYMTAGANKFLRIYYGKVKECLRNLEQTE

SEQ ID NO: 77677 - protein, 412 aa, unidentified
MNPSVSASAPSAPCMFNPMSNESNVQGRVRAVRSVATSRANATAGPRPIAPRSTTTVAEQGPGRHRASSPEQPTEPLPPARSHSQGRERRMATDRLTRSLLVGIDVAKDKLDLARSDVDDLLTMTNDPPGIKQVVQLMRRIRATLIVIEATGGLEQPLLDALLEAALPVARVNPGQVRHLAKALGILAKTDAIDARVLVAFAAHAEPRLAEKRSKTRVELEALITCRRQLIQVRTEQTNRRATTRSKPALRAIDAVRKAIDKQIDALDEQIRQLIDSDDDLRGLDQLLRTVPGVGDVLSATLLAELTELGTTDRRQIGALVGVAPFNRDSGRFKGKRAIRGGRASVRAVLYMATLAAIRFNPVIRRFAQRLEAAGKLPKVVITACMRKLLTILNAMLRDRLEWSQLKLVQNA

SEQ ID NO: 77678 - protein, 317 aa, unidentified
MKKRPARFVGIDVSKDYLDLACRPENTRWRVANDTAGIAQCLAQLRQLKPTLIVLEATGGWQDSLVVALALSKLPFAVMNPRQIRDFAKATGELAKTDALDAGVIAHFAEAVRPTPRPLPDETTQQIDALLQRRRQLLAMLVAERHRVALAHPAVRDSLARHMDDLQGLINATDEEVAVLICTSPSWREKDDLLQSAPGIGPVLSATLQAALPELGILNQREIAKLVGVAPLNDDSGKRSGTRHIRGGRAAVRAVLYMATLTATRFNPVIKAFYQRLLGRGKPQKVAITAAMRKLLTILNAMVKTQTPWNAKLQNCA

SEQ ID NO: 77679 - protein, 379 aa, unidentified
MLLDDMGCQAGGEAASLTTMITDDKTETNKSYETIKLGIDAHAKWYYVARQLDGATPQPVQKMDFHGLLRFVVRQKDLAREVHTCYEAGAFGYHLHRKLERLGVHNLVVQPQDWDERGKGVKTDRIDVLALCQRLDRYVRGNRKAFSVVRVPSEEEERERAFSRQRQQLVRERQRLQAMGRSLLAMQGIHVRGKWWKGQTWAAICREAPAWVVERLEVFMKLIEPVEVEERKLTEGIQKVGRKSRIPKGVGPLSFEVLRREVGDWSRFNNRREVSSYTGLCPREHSSGGKRRGGSVNKSGNPRVRAMLVEMVWRMMRWQPGYHALRKWMAVLGDASRSAAVRKKAIVAVARQLAVDLWRLFTGQTTAEKLGLIYLPEAS

SEQ ID NO: 77680 - protein, 453 aa, unidentified
MAKIKRAPEEILDQEHEQVLQRVCAIDVAKGFGQVCVRTPRADGRRVSTVSAVDATTGDVLALGASLAEQGIEMVTLESTSDYWRIFYYLLEGCGLRVQLVNARDVKNVPGRPKSDKHDCVWLAKLTERGMLRPSFVPPAAQRVLRDYTRTRVDLTRDRTRHWQRLEKLLEDALIKVTTVASAITTVSVRDMIDALIRGERDPHRLADLARGTMRGKHADLIRALDGRFDHHHAELATIWLGQIDSLTTEINNLTQRIEQLLGDLPEPPPPTGPAGPTDPAGPTATRPDRRPPAQRLADIPGISLDGAQTILAEIGTDMTRFPTPHHLTAWARLTPQLKQSGTKRSGGKTSKGNPYLKGVLGNAAASASRSNTFLGERYRRIVKRRGSSKALVAVARSILVIIWHLLANPDTTYHDLGPDFYHTHIDKQRRQRHLIQQLEALGLQVTLTPAAA

SEQ ID NO: 77681 - protein, 442 aa, unidentified
MATNNYMGIDVSKGYADFIILNQEKKVVEDNFQLDDTFDGHKKLFEFLTDFFANNSGAKIFAAVESTGGYENNWFNTLHKLQYKMDVSVARVNPFGVNHSSKASLSRIITDKESAKYIAEYLINYPEKIDYQHEDYFATARRQWSLIKMFTKQKTQLLNQLESLLYIANPEILSYCRGGVRLWTLKMLEKYPTAKSIARAQPESLSKIPYLTKKRANEIIKNAKQSVASATDETIRITITTLVKQIISLRKITAQQIKILETNVDLPDEVKLLKTYKGIGTYSAVGLMIEILTIERFSSSKKLASFFGIHPVFKISGDGKHGFKMSKKGRKEPRVILFNVAMYSIGHNPFIKEIYANHLKKGMPKLAALGAIMHKILRIIYGMLKNNTPFDAQIDINNRKKFEEIKPSPKLSKIRRLQKHDVNAPISRRQNKMRKENEPIPK

SEQ ID NO: 77682 - protein, 432 aa, unidentified
MNRLQVGIDFSQKKADFCLLFPDGQPLESHVSFANSCSGYSSAKQLLLDALDTHAFDGVDISGEATGYLWLPFFLQLSADPDLTLRNMDLFLLNPRWVKWFKKCFAEDHKCDEKDPFYIAERTRTHRPDVAWSPPDCLPLRFYTRLRFHIVQNLAREKCYFSAFLFLKASSYRCIKPFSDVFGVTSRLILAQQPTLDELADLPVEDLASRLYEISGHHLSDSLNNARKLQRVAQESFPLNQALVLPVQRILDLTLDHIRFLEAQLKQADHWVAAELENHPVIAQLATIPGVGPVFSSGLGAEIGGVHRFLQGQKWDKKRKRYRPRNLRDAEDAIAKIAGLWWPRADSGDFAAQDRHMAKSGNRYLRYYIIQAANLMRLHIPEYTKFYARKYKEASKHHHKRALVLTARKSVGLVVGLLHRDEPYRSKEDQRT

SEQ ID NO: 77683 - protein, 318 aa, unidentified
MKMVKRSIVSAGIDTSKAKLDICVHGGTAFTVANNETGWKQAAAQLGEAGVVRIGIEATGGYERGVTWSLRQSGFIVVVMQPLQIKAFAQLLLKRAKNDRIDAVLIAACTHVLDAVNKFPPDARFEALGDHLTSIEQWEEDIVRLKTRLEHIHDSRLRRIVEGDITRLSKRRDAELLRLQSALSQYEDLTRRFDLVETVAGIGARTALSIVIRMPELGQVSREQIAALAGLAPFVHQSGKRKGEAHIGGGRERVRRAVYAASLAGAFHWNPQLKATYQRLRARGKCHKQALVACARKMLIFANTVVARDTAWEAKLAA

SEQ ID NO: 77684 - protein, 416 aa, unidentified
MGKKIRKYGLDLNEKTLLVTADVGKFENYCYARTLKGEELEPFKFHNTGLGFKMVYGIIEVFRKRHNLVKTVFGIESTGNYGEPLIHYMTKRGIKMVQVNPLHTKKVKEMRGNSPNKNDKKDPKVIADIISLNNALTIVMPEGPAAELDRLVHLREILLEDKKRAYNQLESTMVPIFPEFLHIFKDLQIKTVEYLLKYYPLPELIIKLGLEGLIKTLYTVSRGRFGRKKAEKLYEAALSSAGIKEGIDSTLLIIKNLYDKIRLLDKQLLQVEENIRIQLSEIPYSRFILSIKGIGPIITAAIIGEVGDLRKYNCARQLQKLAGINLYEISSGIQIGQRHITKRGRHLLRKMLYYAALNVTRKGRILHDTYHKHLMKGMTKTQALMAISRKIIGIIYALVRDNSEYIERVDVNKVAA

SEQ ID NO: 77685 - protein, 421 aa, unidentified
MQETNEPVEFVERVAAIDIGKSGLVVCIRVPSEDKPGRRRQEVREFTTLTASLLALADWLRCQSVSLVAMEATSDYWKPVYYLLEAEGFTCWLLNAKHVKNVPGRPKTDKLDAVWLAKVVERGMCRPSLVHPKPIRQLRDLTRYRRSLVRERTREKQRVEKLLEDAQIKLSSVISDVFGVSGREMLQALIDGQRDPKTLAQMARGPMRSKIPILQEALTGHFTDEHGFLCQMMTDRIDDLSARIEAVSRRIEDKIVPYAAAVDQLDEIIGVGAIAAQELIAEIGIDMSRFPTAGHLVSWAKFAPIDNNSAGKKKGGSTGKGNPWLAATLAEIVAVTSRSNTFLGERYRRLSRRRGRKRAIVALGNSVLTIVWHLLSDPDARYHDLGPDFYQSRLATRRRERDLIRQLERLTGKTVTLQPTA

SEQ ID NO: 77686 - protein, 346 aa, unidentified
MLIVGCDYHPRWQQVAWLDTETGESGEQKLVNGDGEAERWYRQLPPPSLIGLEATGNSQWFIDLLNQLGHEVWIGDAAEIRASYVRRQKNDRRDAGHILKLLREGRFPRLWVPSAEQRDLRQLLIHRHKLVQIRSRVKNELQHLAMNQGMQKKARLWSVPGQQAFRQLPLAGWSECRRHDLLQLLVYLDQQIAPLDRAAQQAAEQDRQARLLLTQPGVGPITALAFVLTIGDVTRFRRGKQIASYVGLIPREHSSGGRQRLGAISKQGNGFLRMLLVEAAQSVVRLDEGFRKQYAHRCHSKPKGIAKVAAARRLAVRLYWMLRSQTPYPEIVRIESSPRVPLAGKS

SEQ ID NO: 77687 - protein, 412 aa, unidentified
MEVLYTCCCGIDVHARMLVACLIKQGKKHLRTFSTMTDDLLCLLDWLKAEACTHVAIESTGVYWKPVFNILEGSMEVILTNARDSKGFKARKTDVIDAEWLADLLRHGLLKASFIPPLEIRELRELTRYRESLIRERTSLANRIQKLVESGNIKLGQVASDALGVSGKLMLRALAQGDTDAERMSNLARRSMKRKKPELKRALEGRLTKAQRWVLSELLDQYDQVEAAIKRVEEKLKQEVENSPDPFVGEAVRLLDTIPGVAETVAQIIVSEVGVDMSRFASDKHLSSWAGMCPGNNESAGKRKSGKTAKGSRYLRAALVQSAWVASHQKDTYLEAQYRRLVKRMGKKKALVAVGHSILVMTYHLLKNKASYEELGGDYFEQRNMDKQRKRLIRQLESLGLKVTVEEIGMAA

SEQ ID NO: 77688 - protein, 400 aa, unidentified
MISVGIDVSKGKSTVCILKPYGEIMCSPFEMLHGEKELNALDDLLNKLDGEIRIVMEATGIYHLPILTFFHEKGYFVSVINPFAMKKYAKDNSIRCAKTDKLDSIMIANYGIEKWFKLQRYKGDEEIYAELKLLGRRYRHYMELHVKALQELTHILDYVMPGIKKMFNSWNEANGKDKLSDFVEQFWHFDLITAMSLEKFTEEYLDWAKEKKYHRSRSKAEAVYELASNGISTLSSGTPSTKMLVQEAISVLRTVDSSLFLILTRMQELAKTLPEYSTVREMGGVGDVLAVKLIAEIGDIRRLHSAKALIAWAGIDPPPYESGQFIGSKRKITKRGSSTLRKVGYEVMRVLKSHPAPKDDAVYNYILKKESEGKSKKHAKIAGLNKFLRIYYARVMAVYQ

SEQ ID NO: 77689 - protein, 337 aa, unidentified
MDYFAGLDVSMEETHVCVVDRDGAVIHEVKVPSTPADIKTALAGAPACRRVVFETGRMAPMLHHGLTGCGVPVICIESRQARQALKSFATHKTDRNDARGLAHLARTGFFKPVHVKSLSAHAIRSLIIARKKLVGQRVTLENQIRGLAVVFGVRLPRALSSAFIAKALRASEGIDGLSAAMRGLVAARAAVLSAIAAIDADMKKLVRASDACRRLMTIPGVGHLTALAFAAAVDDPERFRRSRDLGAYLGLVPRRYQSGEVDYTGSISKCGDRRMRTLLYEAANVILTRYKQPLKLKDWALAIARRSTLRKARIALARRLAIIMHAMLRHGTEFKPA

SEQ ID NO: 77690 - protein, 423 aa, unidentified
MMKLKYSICCGLDVHKNVIVATIVTTNKDGISEYLQKSFSTINSDIQRFHNWLIENNCYHVCMESTGKYWIPIFNYLENDIDICLTHPKYVKAIKGKKTDKKDSKWIADLYKFDLVRCSFIPPKDFRQLRELARYRFKLVCMKSSEKNRIQNCMTISNVGIASVLSDPFGKTATEIMSYLLEHTADSMDEKAVRKLIKKGAKAKSDEIIEAIKGYTIETDQAKKLELARGHLEYLDDMITQTEVELYVRIKPYYEFVEFVSTMPGMTELSSTIVLAETGVDMDIFDDAKHLCSWCGLSPANNESAGKKKSVRIAKAGDYLKPMMVQCALAAIKSKKQPYFAIKYGRIKKRRGHKKAIIAIARMMMVCIYHMVSEKKPFTPTDYEELMNPQNHVERVVLNENNVFAYLESLGYDSSKLVKRNDN

SEQ ID NO: 77691 - protein, 449 aa, unidentified
MTPTPTLPVLDPLAAFVDVGSEQMHVSVAGGPPEVFGTVTSELHRLRDWLKERCVRSVAMEATGVYWLPLYSVLEAAGFEVVMVNGKYTRNLPGRKTDMKDCQWGATLHAHGLLRAGFVPPAQIRRLQDYLRLRTDHLTSAAACVQHQQKALERMNVKLHDVISSLVGASGQKVIEAILAGERDPDRLLALCDVQIQKKKAQRVKESLRGTWAEEHLFALGQAVEDWQHFQRQMAACDRQIEAVLRQISGPEDPPPGPREKTPVGKRSGVNAPQIEGLHGLLVKLCGGKDLTVLPAHTDYGLLQMIGEVGTDLTKWPTEKHFTAWCGLAPGSHQSGKRKGSVGRKRNRAGRLFCVMGRSLARSKHVALGGYYRRMAARRGGLVANIALARKLAEWFWRVMVKGVSYVEQGLANYEQQVLTTKRRALQRLAKQLGHVVLPSLAQLQSLQP

SEQ ID NO: 77692 - protein, 337 aa, unidentified
MTTRDASQEGSAAAATAAAVFVGIDVAKDKLDLARSDTPQAVVRTFANDAAGVDAIVRELSALGPALKLVVAEATGGFERALVGALLDAGLPAALANPGQVRHFAKGIGVLAKTDRVDARVLAEFARRGEPRLLAKRDAGRVELEALVTCRRQLVHVRTEQSNRRGATASSKAALRAIDAVLKTVDRQILELDRKIAKLIESDDDMSRGAKLLAGVPGVGAVLAATLLAELAELGTVGRRTVGALVGVAPYPDDSGPRTGRRRIRGGRASVRNVLYMATVTAMRFNPVIRAFAERLAAAGKVKKVAIVACMRKLLGILNAMLRDGLTWDQLNLVRNA

SEQ ID NO: 77693 - protein, 344 aa, unidentified
MGVAVGVDSHKESVAAATVDELGRTLEVRRFANDSTGHDEVLAWVQSNPDVTRIGIEGSGVYGAALARVLMAAGEDVREVPPTLTFRERRRNGSHGKSDPVDAVAIARVVVREGALSSPRRTAVWDDLKLLVDYRDQLVRVRTQLSNRIHRDLVVVHPGYQKHVPDLRSKKNVAQAAKLLRGDRSVRAELTRRRISQLRRFDQELTANKTEIASTVARSETTLTELPGIGVLIAAKILAETGDVTKIRSQSAFAMLAGTAPLQASSGATSRHRLNRGGNRQLNHALHYMALVQYRSHPAARAYIERKRAEGKSFKEAMRCLKRQLAKVVYRRLLQDALGLENAA

SEQ ID NO: 77694 - protein, 370 aa, unidentified
MIPVMIHEGVTDRRDRGLKKPWGSMGRHAIVLNEPEQLRGLLSPHLQGWANKEVGMSTVPVFVGIDVSKAQLDLALRPGEGCSFPHDEAGLTTIVERLRALSPTLIVLEATGGLEVALTGALAAAELPVVVVNPRQVRDFAKATGKLAKTDTLDAQLLAHFAEVMRPLPRPLLDEQAQVLGTIVARRRQLIEMLTAEKNRLSRASQPIRARLHVHIAWLEQEVDRTETDLAQAIRDSPVWSEKEDLLRSTPGVGPVLATTLLADLPELGTLNQKQIAALVGVAPLNRDSGTLRGRRTVWGGRAHVRATLYMSALVATRYNPVIQAFYRRLCTAGKSKKVALTACMRKLLIILNAMLKHRAPWRAELVQCA

SEQ ID NO: 77695 - protein, 391 aa, unidentified
MSMYFIGIDISKYKHDCCIISAADQKVVSKVTIKNNKAGFNELLTIIHSLANPADIRIGFESTAHYALNLELFLENSLLTFMEVNPVLISEYKKSKTLRRTKTDSVDCESIARWLMTVEYKPHSKGFYHAYSLKSLTRLRDKLIRQRSFYLVKITNVLDHTFPEFKPFFNERLSKTALYLLENYGSAEKMARMNSASYEKLRSVSRGKFSPQQFLRLKELAANTVGVNNSIFDVELNSLLSLYKSLVKEIDTIEKEINKLIEEVHPHYMSVPGIGPLSAAVIYSEYGDISNFTNPGQMLAFAGIEPGINESGTESHGGKMVKRGSSQLRYTLINCCLPLIRFDMTFATYYAKKRGEGKPHRVAITHVAKKLIRVIYTLESQDIDFNAQKLR

SEQ ID NO: 77696 - protein, 370 aa, unidentified
MAKRSMFVGMDVHKESIDISLAEEGRDGEVRHYGVIPGDLEALGQVVRALRAPTRRLRFVYEAGPCGFGIHRYLTAHGEDCVVVNPSSMPKRSGDRIKTDRRDGDALARLHRAGELTAIYIPTPDDEALRDLVRAREDAVGLSTQAKHRLKAFLLRQGRRYPGRAGWTTPYRRWLADLSFPLAPQHSALQEYRDTIDETDRRVERLTDQLRQLTPAWRWAPVVDALQALRGVSFVTAVGLVAEVGDIRRFTHPRQLMAYLGLVPSEYSSGPSVRRGGITKAGNPHARRLLAEAAWAYQGIPRIGRQMLYRQEALPTSVCAIAWKAQLRLTSRFRRLVARGKAKPKVATAIARELTGFIWAIAREVPAPPA

SEQ ID NO: 77697 - protein, 489 aa, unidentified
MNFTALTATVQPNLDVNYIGMDVHSDNVVVCVRRNTINSSGQLVGKTIKTKKVVIKSSQEPLVELLSKYADGQQHIMTAESTFNWYWLADIAEDRGWNFRLADPCTVSQANIKAANDETDAEYLADRLRTGSLKSTSVLPRKLRGVRDLMRHRLRVMQEVSDKKVRLSNLYHNHCAHPMHGKLLTALQDAYDEISVDAVLESGICNNGSELIIGDLLTGLREAEARLAKIEAAVYERIDEVDEYKAERLLLKTSMKGCGDVLSAIIVTEIGDISRFRTMGDFVSYCRLAPTSKLSNGKSKGQGNAKNGNAYLSWALTELATLMARFNEPIRRYLERKQDKTGLRVVAVRALAAKLARCVYQVLRKNESFDLALAFGGKPTRAPTALAEKPAAEVVQSPQEPEVPPITTAPEPHLQAPLSEAPIVVKEPSPVKAKRGARKKAVSPASSAPAVTAEGRQTARKADRVKARCALTATPPSCAGTSCVKSRRE

SEQ ID NO: 77698 - protein, 343 aa, unidentified
MDYFAGLDVSVKETSVCIVDDAGKIVREARVASEPEALLQVLTKTIYRFKRVGLEAGPLSQWLYSVLAEAGLPVICVETRHMRAALKSRINKTDRNDARGMAQMMRVGLYRPVHVKTLRSQKLRVLLTHRKLLQSKAIAIENDLRATLRNFGLKVGMIGTVKFEARIRELVANLPDLAVLVEPLLIVRRAIREQVSVLHRRLLALVRGDDVCRRLMTIPGVGPVVALTFRVTVDVPARFRNSKAVGAVFGLTPAKYQSGENDRTGAISRCGDEMMRMMLYEAAQSMLVRTVKWSWLKAWAMKIARHRGMKKAIVALARRLAVIMHRIWVDGTEFRWTREVVAA

SEQ ID NO: 77699 - protein, 409 aa, unidentified
MQQVIERVSGLDVHKKTIAACIRVPGPSGARVQQVQSFGTTAAEVLALSDWLAAHGVTDVALESTGTYWKAIYYVLEERFTCVVVNAAHVKQVPGRKTDVQDCAWLAQLLEHGLLRGSFVPPPPLRDLRDLTRYRKALIQERTRAANRLHGRLEDAGLKLATVATDILGVSGRAMLEALVQGTTDPAILAELARGKLRAKLPALRQALAGRFRSHHGFIVSQILAHLDYLDEAIASLSEQVEGYLAPFAEAVALLDTLPGVARRTAENLLAEIGVDMGQFPSDRHLASWAGLCPGNNESAGKHKSGKTRKGNRWLRATLNEAALAAIRTKNSALAARYRRLMPRRGHNRAVTAVAHALLRFAYQVLATRTPYHDPGPEYFDRRHTARLTRRAVQLLERQGYRVTLAPAA

SEQ ID NO: 77700 - protein, 359 aa, unidentified
MRTITIGVDLAKQVFSVCSVDAAGRVQDRRDLRREAFRQWLPNVPAGSIVAMEACSGAHHWARRCLQLGLQPRLIAAQFVTPFRKSRTAKNDRNDAEAIATAARQGNMRFVPVKTVDQQVRLSWHRVREGYKADALATSNRMRGLLAEFGVVVAQSDTALRRAVADLDALALPSGLVELLRDVDAHWRQLQARIADSDRRISEHAKSDEACTRLRAIIGVGPITADAVVATIGSAQDFKNGRQFAAWLGLVPMQHSSGGRSRLGRISCRGDGYLRTLLIQGARSSLQRAKAVPWEKASPEQRWIQDLGRRLPFGKVLVAIANKHARQLWAMLARGEHYDADAWLKHPMVQRPAKKRAAE

SEQ ID NO: 77701 - protein, 361 aa, unidentified
MKKVSRELPKMEAGIAKPEMTMGLDLGDRYSHYCLLNSDGEVVEEGRVQSTEAALRRHFEGEDCLRIALECGTHSPWVSRLLNALGHQVIVANARKIPAITSSESKNDRNDAEKLARFAAFDPKLLSPLEHRSEERQVDLNLIHARSTLVRARTMIVNALRGLVKSAGGRLPACSTEFLPARALAAIPPALSAVATPLVEQIGLLNAQVDGMDKQIEKLSAKYPEIVLLRTAPGVGPIVAAAYVLTLGQPDAASNRSAGAFLGLRPAQSQSGAADPQRRISKAGDSFLRSLLVQSAQYVLGRFGPDSELRRWGLKLAATGGKRGKKRAIVAVARKLAVVLHALWRSGQRFQPFPQQAAVAA

SEQ ID NO: 77702 - protein, 362 aa, unidentified
MESLLYAGMDVHKEWITIVVFRDEEAAPFIMIRKKNDRIVLQKYLRKLMEKGSLQCCYEAGFSGFHHYRILKEMGVPCLVAAPGLIPRKPGNHIKTDNRDAESLAMNLRAGMLTPVHIPTATDEAVRDYLRMRDDFKMDQKRKKQQVLSFLTRLGYKYDGNYWTGMHRKWIKDIKTLLPLQQETLTEYLIALGELEQKLLLLEDRIEKIAQTEEYTEQVGKLMCFKGIGTLTALSLVVEIGDFARFASAEKLMGYLGLVPSEHSSGDKRKQGGITKAGNIRLRRLLIESAWHYRYYQPSKRLTQRRLGFPPEIVAYADKAGRRLSKKFQHLLYEGKKSQKVVAAVARELSGFIWGMANEQIA

SEQ ID NO: 77703 - protein, 347 aa, unidentified
MEVTTVGIDLAKNVFRLHGCDARGRAVVRKQLGRRGLLAFVARLPRCVVAMEACATSHYWAREIEKLGHQVRLINPRFVRPYVKANKNDASDAEAICEAAGRPSMRFVGVKAAAQLDVQAVHRVRQQLVKSRTALMNQVRGLLAEQGIVIPQGSAHLRRALPRLLEDADNGLSGIMREILSEIGERFKFIEDRLRQYDLRIQRLFRQDERCRRLAEVEGVGPLIATALVAAVGNAAEFKSGRELAAYLGLVPRHRASGGRTTMLGISKRGDRYLRTLLIHGARAALRVNQCKRTRRSVWVGRLKLRRGSNVAAVALAHKNARVLWALLRKGECYRPAPFSARVPQAG

SEQ ID NO: 77704 - protein, 371 aa, unidentified
MEDKSKVVFVGLDASKDTLAVSVADEGRNGEVRDWGTVSTAPHAVDKLLKKLAAQYHRVEMCYEAGPTGYGLYRQITAFGFSCCVVAPSLIPMRSGERIKTDRRDAMRLARLLRAGELTPVWVPDETHEAMRDLVRARESAAEDQRHKRQLISAFLLRHGRIYHRPKTWTMRYRRWLQQQSFDHPAQQIALQEMIMAERHAVERVARLTDGIEQLIPNWQLGPVVDALQALRGVALISAVTFMAEIGDVRRFENPRKLMAYLGLVPSEYSTGQTTKRGGITKAGNSRVRRTLVEGAWTYRFPARVGERKLYVLQKLPPEIQDIAWKAQSRLTARYRRLSQRGKKKTVITTAIAREMSAFMWDIARRTMPVP

SEQ ID NO: 77705 - protein, 362 aa, unidentified
MNCVGIDVSKGKSMIAVMRPFGEVVVSPFEVRHTANELSELAGLLKSLDGETRVVMESTGNYHAPVAWLLHDAGLYVSVVNAMLVHDYGNNSLRRAKTDKKDAVKLANYGLDHWLTLPRYIPEEDTRLMLKTCYRQYQQYSKVQTMLKNNLISLLDTAFPDANRLFTSPPRADGSEKWVDFVATFWHCECVCGLSKKAFTAKYQKWCRKHGYNFSQDKALDIYASACGRFGVMPKTNTAKLLVEQAISQLQTTSAALAALKQEMQSLAASLPEYPVVMGMFGVGPTLGPQLIAEIGDVRRFHSKKALVAFAGIDAPPYQSGQIDVRSRSISKRGSASLRRTLFLVMGVLLQCAPMDEPVYQS

SEQ ID NO: 77706 - protein, 391 aa, unidentified
MIFVGIDVAKDKHDCFILNSEGTVLADVFTIANNRIGFETLLSRIQSCSQGESKIKVGLEATGHYSYNLLGFLLDSGLATYVINPLHTNLYRKSLSLRRTKTDRIDARTIAMMLMSDVDLKSYSNTAYHNEELKSLTRYRFDKVKERAKLKSSVARLVNILFPELEKLVSSLHIAVVYALLSNYPGASYIANANTEELAETLCTASKGRYTKSKTAEIQVAAGVSIGSKMPAKSMELKHTIALIRELDKEISEVESTIDKITSQMDSPIFTIPGIGRHMGAMILTEVGDFSNFASADKLLAYAGLSPSTYQSGQLQNCYAHMEKRGSRYLRYALFNAAKYVCLWCPTFSAYLEKKRSEGKHYNVAISHAAKKLVRLIFAMQRSGKAFLADY

SEQ ID NO: 77707 - protein, 352 aa, unidentified
MFLENHQEREPSMSEITTIGLDLAKHVFQVHGVDAQGTTVLRKRLRRGQVLAFFSRIPRCVVGLEACATGHYWARELGALGHEVRLMPAQYVKAYIKRNKHDAADAEAICEAVGRPTMRFVPVKTADQQATQLLHRGREQLVRQRTMLVNALRAHLAEFGVVAAQGLRKVGELIAIIRDDGDRRLPAVARQVLRVLANQIEQVEAAVAALERQLLAWHNSNPVSQRLASIPGIGPIIATAIATTVADPTVFRSGREFAAWLGLVPRQNSTGGRTRLGGITKRGNRYLRRLLINGASANLLRSKATKADPWVIGLRRRRPPLVVAVALANKTARIAWAVMLRQERYQPRAVAA

SEQ ID NO: 77708 - protein, 321 aa, unidentified
MSKLEVFVGIDVSMAKLDIAVRPTSEVWQVSNDKTGIELLVGKLKALNPSLIVVEATGGIEIPVVGELGKEGLPVVAVNPRQVRDFAKATGRLAKTDVIDAGIIAHFGEAVRPELRPLKDEQTLKLDGLISRRRQIVEMIVMEKNRFTSAPVHIRKGISEHIKWLEKRLSGIDKELGDLIKSSPMWLEKVELLQSVPGVGPVLCATLLAELPELGRLDHKRIAALVGVAPLNRDSGTMHGIRAIWGGRAGVRYVLYLSTISAIRYNPVIKGFYKRLRSAGKKPKVAIVACMRKLIIILNAMVKNGTAWDISFGKLENGVAQ

SEQ ID NO: 77709 - protein, 372 aa, unidentified
MTSIIYVGMDVHTTNYTLCCYSMEDDRFFAEVQVEPDAKNILKYLARIEKQQSRDCRIVCGYEAGCLGYSLYHQLHAHGIDCVILAPTTMMTKPGKRIKTDRRDARLISKCLAFHTYSPVYIPTEVDDAVKEYIRMRDDANSALARVKQQIIAFCIRHGKIHDGKSYWTNKHLEWLSSLDLGNKILSEVLQEYLIRYYQLREQVDMYDMRINELAQAEPYRQKVEKLGCFRGIAAHTALPFCVEVGGFRRFATAQQFASYLGLVPGECSSGDKQQYTGITKAGNSHLRKLLVETAQVFGRSATKSGKSVALKERQAKCDSLTVAYADKANARLKKKYFKIVMRSKVNIAKTAVAREMACFIWGMMTDNISCA

SEQ ID NO: 77710 - protein, 370 aa, unidentified
MLSAVWLVVPPRQPHDHGSDDMASMPHPQRLVTVGVDSHNDTHVAAAIDQLGRLLATTQAPTTQRGYGQLQQWAQRLGQVERLGIEGTGSYAAGLARWLVDHGHQVVEVNRPNRQTRRRRGKSDPADAEAAARTALAGDEVTTPKTAGGTVEMLRVLRVARRSAMKARTQAANQLDSLLVTAPDQLRAQLRGLAPGRLVEVAASLRPGELASPIAATKLALRELARRHQALTAELDRLDSHIAKLAPKASATLLARRGVGPQTAAGLLVAAGDNPDRLRSEAAFSMLCGSSPIEASSGKTIRHRLNRGGDRQANNALWVIALSRMASDQPTKDYVERRTKQGKSKKDIIRCLKRYIAREVYQDLKAAIAT

SEQ ID NO: 77711 - protein, 297 aa, unidentified
MDILHYLGVDFHPYQQTIAFVDKFGEIKTRCFYHTDKVSLRKFYQQFPTGSVVGVEASGSFQWFEKMLFELNFELKIGNPWLIRKMALSVHKSDQRDAEHILDLLITNRFPEVKQRSEKSQIILAWLNYRDSLVRQRTAIANQLQAMARSFGLARFQTKAKSAKARIVSSNTSDELLFLINSRFTMFENLTAEITSFEEKLHLEALLDERAKLLQTHSGIGDLTALCLIHTLGDVARFARKQQVTAFVGLAPVNHSSGEKIRIGHISKHGSRLLRFLLGQAAQSSNGRAIKNVLLSS

SEQ ID NO: 77712 - protein, 359 aa, unidentified
MRTKITENAFAGQRIFVGLDTHKKDFKVTIMAEDVFCKTFSAPPSAQKLVDHLHENFPGAEYFSAYEAGFSGFWLHRQLTALKVKNIVVNPADIPTTDKERKQKEDKRDSRKIAKELQLGRLKSIYIPTDKTLQDRILIRTRDAVVKETRRTKQRIKSFLYFFGIHFPEQFTDRNKHWSNNFIKWLESISFEQESAKHALQIHVNTLQNHRQTLLQTNRQIRALSRSGMYKENVELLVSIPGYGVLTGMRILTELETIERFKSQNKIDSFLGLVPSTRSSSDTERVSGVTPRANPFLRSAIIESAWVAIRNDPALMSKYLHYRKRMDENKAIIRIAKTLLHRTVHLLRKKEKYEKNVAK

SEQ ID NO: 77713 - protein, 378 aa, unidentified
MKNDNRYVGLDVHAETIAVAVVETDGEVGFLGTIPNRIETVRRLVKRLGPAQRLRVCYEAGPTGYVLYWQLAEMGVHCDVIAPTLVPQKPGDRVKTDRRDAEKLAVLYRGGHLTPVWVPDQAHEALRDLVRAREAAKSDQLRARHRLQKFLLRHGRRPPQGLKAWTQKHVEWVRREVHFEAPAQEAVLVDHLAEVEHARERIRRLEGSIDVAVEAAPACLRAVIEALQGLRGIAKVSAATIVSEVGSLSRFRKPRQLMGYSGGVPREDSSGERVRRGAITKTGNAHLRRIVGEAAWSYRHRPTVRGELLKRQVGLSEEVKAISWKAQHRLYSRYRRLIGKGKTKQQVVTAVARELLGFIWAIGVHVEQQHGAAARRAA

SEQ ID NO: 77714 - protein, 445 aa, unidentified
MGTQSAAALTETWGVPAPTGLLYLGIDVGRRQHLAAAIPEPRMWDGSWERAPARRIATTSLGFRELTGWLGELGFAFDQVRVGMEPTGGWYGRTVAAWLERHGYRVDWLQNFALHERRHLMIGKQAKTDALDARLIARLLFERERLGLKGGFLQRAPRNTDAIRMLVRNRARLVEQRTRCRNQLTAIEDVLFPELKDFFKTSVTIPSARLLLESFPTPDHVAAADPAELHRVVVSQGHARVLAARLMDLQMAAADSAGLVVDTDAIVHTQEWLLYQLRLLDGQIQQVEAAIDAVLAKWPAQDRAILASFPAMTIVRQAVLLAGIGDIACFRDDRQLRKLLGWYPEVRESGSSLSHHHLGRSGNRMARRELWLWAMELLAPTRATTPFRHHYRRLRERGMNGHVAIGHLAGKLISVLFHCLRSGTPYDPQRHARDLGIAEAEPPPS

SEQ ID NO: 77715 - protein, 322 aa, unidentified
MTEALAQPGPTTPCSVGIDVAKAWLDVAVRPSGAQWRAANGEAEVPTLVEQVRAVQPQLVVLEATGGYERAVVAALAAAGLPVVVVNPRQVRHFAKATGKLAKTDILDAHMLAHFAEAVHPVPRPLTDAATQRLAALLERRSQLVAMLTAEKNRRQQALDSVRPLSAAPIAWLEQDLDQLTQELDQTLHASPVWREREDLLRSVPGVGPILALTLLAELPELGTLAHKQLAALVGVAPLNRDSGSSRGTRVIWGGRARVRAALYMSTLSAVRYNPVLRAFWTRLREQGKPPKVALVACMHKLLTILNAMLKRQAPWQPALAA

SEQ ID NO: 77716 - protein, 422 aa, unidentified
MLGVGIDWAEAFHLVALGRPAEGVIELRRVEHTPAAVDQLIAQIATLEPDPAEVRVVIETRHGLLVERLVDAGYVVLPVNPDLVARRRGPARKKDDAEDARIACLLALDRHTSLRPLIPHGEQAAELRAIARDDERAARDQRRLLNRLRQDLISTFPTALAIAGDDLGAPTVLRLLERWPTRDQLASASHQELVAFARAGRHGWPERFADRIAQALAADHFTPRDYLVRAKADTIRLAATQLLAIGSQRRVWEQRMAELLVGAPRHGRTRQPREDNPGQALPGGKVYLSFPGLGDRLAARVAGEIGDHIDQYQSPNALACYAGKAPVTRRSGKSELVVATRLACNRYLAAAVQQWAFCSLRCSGWAREFYDAQRARGKTHHAALRALGNRWLEILWHCLIRSQLYDEATHLANRNRALGKAA

SEQ ID NO: 77717 - protein, 344 aa, unidentified
MQIKSIGIDLGKTTFHLVALGAHSQVVIRKKFSRQQLLTYAANLPSCLMGMEAGVGSHFLGRALREQGHEVRLIPAQFVRPFVKSNKNDYCDAEAIAEAVERENMRFVPIKTEDQLDLQALHRVRERLVSRRTSVINQIRAFLLERGISFRKGPASLRRQMPEILENADERLTARMRRLLDFLWQEWKHLQLQIESLSEDLEKIAKSDAACARLQQIPGVGPLVATAVVSAIGNGAAFHKGREFAAWLGLVPGQWSTGGKAKLLGISKRGNPYLRKMFIHGARAAVLRVKREGSYLGQWMGGLESRAARNVVIVATANKLARISWAVLSSGENYRPRPALAVAS

SEQ ID NO: 77718 - protein, 348 aa, unidentified
MTVYCGVDFHARKQTISYLTTEDGEVQQTELHHEQDNIRGFYAKLRSQSPVIVGFETSGYAAWFEEMLEELGCEIWIGMPAAIRRQARRRQKNDRRDADLILELMLRGDFPRLHRYTAASREVLQQLRYRHRLVKLRTIVVNSLQYLALSRGVSLRTKLLTTRGQERMKQLPLPPHLAKQRDEMCTLLQELTEKIETAESWLELKAKQDAQVERLRTHPGIGPLTGLCLVYTLEQVERFANPRKVTAYVGFDPVEDSSGERQRIGAISKQGSRLLRFLLVEAGQVAVRTDPDLKAAYWRVQLRRNHQKAKVAVARRLLVRAFIMLRDGIDYAEFQRRGVAARSTRRTA

SEQ ID NO: 77719 - protein, 341 aa, unidentified
MVEVSIIGLDLAKNVFQAHGMRSDGCVAFRTKLSRAKVAEFFASQPRCIVAMEACASSHYWGRVLGDLGHEVKLIPPIYVKPFVKRQKNDMADAEAIAEAASRPTMRFVAVKSEEKQAAGMAFRTRDLFVRQKTQTINSLRGHLAEYGVVAPKGPAHLGRLKGALEDVAIGLPEPVIALSQMLLDQIALLQAKIDELEKEIRHQVRRDDVTARLMTIPGIGPISAAAMMAFAPPPEIFAKGRDFAAWMGLVPRQHSSVGKERLGRTSKMGQRDLRRLLITGAMAVVRWAARRGAPEGSWLWRMLQRKPRMLVAVALANRMARIAWALMAKGGVYKDPSVAA

SEQ ID NO: 77720 - protein, 327 aa, unidentified
MEKKKRPVVGIDVSHLYFDAHWEGCDARYSNDTKGFRKLLKEAPEDAEFVMEATGNYHYRLSSYIASKGRFVKVVNPLRYTRWTQSEGRKAKTDPEDAIDLAGYAKEKGKKLREWKMLPPKLARAKVIVSQLKGFAKMAAQARCRIHAAKLVVSKTDYILNPMSGLLDYCGDMQADLEKELCKLAGEIYPEHYKLLQSITGIGAKTAAVMLVCAKDFASFETPGKLSAFFGYAVKVHESGKTVKGKTHMVKVGNSYLRGLLHMCANTAVQYDAACHNLYERLRAKGKLARVAQVAVAHRLVKIAWGVVNSGEMYRGTKIARDKKTAA

SEQ ID NO: 77721 - protein, 451 aa, unidentified
MKTKNANKSTDKMISMPVVNLHAAGIDLGSKSHFVCVSQDNVKEFGVFTIDLHAIARHLKEHEVQTVAIESTGFYWRPLYLLLLDYGFEVVLVNARHLKNVKGHKTDVVDCKWLQLLHSIGLLSNSFQPNVTTHELRVLTRHRKSLLEDASRFISKMNKVLVLMNIQLHVVLRDITGQSGLKVITAILNGERDAKKLTELVSFRVKAKREDIEKALTGDFRKEYLFELNHCYQLYSVYWQKIEETDKQIEDLLKLHIADTPANNDYKAPKNKQYQKNDPNFNVGYYANQMSGGVELLEINGVGAATILTLISETGFEMSKFKTAKHFASWLGFAPNRKISGGKVLSSHTRKKTNPLAKVIRDAANAAGNSQSRLGDCFRRLAYRKGRTVAIGAVSRKIAVIIHTMLTQGKAFCYEYAQNEALNLKNNKLKNIVKTLKKYSISMNELDLAMV

SEQ ID NO: 77722 - protein, 354 aa, unidentified
MENIKISFKNIPIYIGIDVHLKSWKVCILTEEFEHIVANFSPSAKVLSNYLRRKFPEGDYHSVYEAGYSGYWIHEELEKCGIKNLIVNPLDIPTSDKEKRIKTDKIDCRKLARCLRNGTLETIYIRDKEQQQDRALVRIRYKMIKKQTICKNQIKSLLAFYGIYIEEEKIQTYWSKKYIESVEYKTKQKGSATIAFDSLLRELKDLRSNILEITRQIRLLSRTERYQEKVRLLQSIPGISMLSAITILTEIGDIKNFNTLDKLNGYIGLIPGEHSSGEREYKGGMLHRGNKILKCIMVESSWVAVKKDPSLMLSYKNFIQKHKKTRAIIKIARKLVNRIRYVLVNQKEYQPSVA

SEQ ID NO: 77723 - protein, 344 aa, unidentified
MNNRNLIALDIAKNVFQVCRVSKSGKTQSNKPVSRNQLKELLVSSKPSVFAFEACGSSHYWGRFAKSHGHTIRMLPPKAVKAFRQGHKTDETDAQAIAIAAQHEAIKSCALMNIEQHTLQSFESSRRYIGKQCRGLANHIRALTYEYGLTIPKGNSALLKAIPEILEDAENGFPHRLRVILHSLYEQLKVQQRLLKEIEKEKAHQIKTIEPCQRLVALEGVGAVGSAMLYSCIGKGEMFKNGRQASTYLGVTPKQHSSGGKAIIVGIDKKGGNKELRAVLYQGALSVISRLPEEPTTAKQRWLIQLVQRVGVKRACIALANKNVRTAWAMLSSGEAYNTQPLTV

SEQ ID NO: 77724 - protein, 355 aa, unidentified
MDSVKYIGMDVHKDTISIAVLNSSGKLVIECVIETKASTILQFFQGLSGSLHVTFEEGTWAAWLYDLLKPHITELVVCNPRRNALLKEGSKSDRIDARKLAELLRSNLIRPVYHGEHGLRTLKELGRSYLTISKDLGRVMSRLKAIYRSWGIPCTGKQVYAPRYRSEWLSKIDEAGVRRRAEFYYQQLDALRPLRQQVRQELLAEAHRHEVWKLLRRIPFIGPIRAALIIAILQTPYRFRTKRHLWAYSGFGIETHSSANHSCAHGKLQRSKKKISVRGLNRNHHHDLKNLFKSAAAVAAAKPGPFQEFYDALVAKGIKPEMARLTLARKIAAITLTVWKKGVRFDAKYLNPQTA

SEQ ID NO: 77725 - protein, 381 aa, unidentified
MIKYSVGLDISSKSIYGCLSSIDSGQKVTVKSTQTFPNTTSGFKSMDGWIRKHRKVENIPVVICMEATGNYHESCALCLFEKGYSVSVILPTKAKNYLRSLGNKSKNDSIDAKGLARMGAEQCLRVWSPFGRFFYELRSLTRHHQSLQEQKTVVKNQLHALKSGMYSSKAVEKQLESMIKLIDKQLEQLEIAIKNLLQTEKEVWEKVCNICMIKGVGVLTTAILLAETNGFELFENSKQLVSYSGYDVIENQSGKHNGKTKISKKGNSRIRRAMFMPAFQAVTYQVKPFCNLFDRTFEKHGLKMKSYVAVQKKILTTIYALWKNNTPFEDDYKPQISKEQELELPSPVSFAKAEKSSADQVGTTQGKHPSERSLYASSPVS

SEQ ID NO: 77726 - protein, 377 aa, unidentified
MKRVKFVGLDVHAETIAVAIAEQNGEVRSLGVIPNREDSVRKLVRKLGPVEEPRFCYEAGPTGYVLYWQLTRMGAKCEVVAPTLVPVKSGDRVKTDRRDALKLARNYRAGELTPVWVPDAAHEALRDLVRAREAAKKDELRARHRLNKFLLRQGRRPPMGVKLWTIKYLEWVKREVHFEQMAQEATLLDYLHEVEHAAARIARLDGAIAEAVKLAPPKMRAVIEALQALRGIAHVAAVTVVAELGELSRFARAKQLMGYGGIVASEHSSGERTRRGGITKTGNAHLRRVVVEAAWNYRHRPAVGTSLRKRQEHVSEEVKEIAWKAQQRLHQRYKKLLANGKNKGVVVTAIGRELLGFIWAIGIKVEAAQKESLQRAA

SEQ ID NO: 77727 - protein, 418 aa, unidentified
MNDSQQWKQYPGFGAVDWASEKHSLIVVDQAGKVIEDFEIEHSALGWKKFREKLQAYGSIPFAIETSQGAAVEQLLEAGMIVYPLNPKSARAYRDRKAPSGVKDDRLDAWSFADALRVDGQGWKALRPEEPLIKELRLVCRDEVTLIEQRTALILQLRHALAEYYPAALEAFKDWTSVSAWMFVQRFPSPELLAKAGKRQWQKFLHARRLWGSDQGPRRMEIFAHATELSGSAPTAKAKSLLALSLVQMLFVLEKQLAVYRQRIEELFARHPDHDLFGSLPGAGSKIAPRLLAEIGDERDRFQGDAQNLQCLGGTAPVTMRSGKYRHCHRRWACDKHLRHAIHLFAQQSLTRCAWAQIYYEHHRKKDRSHSDALRRLGHRWLKIIHKMWIERTPYDPELHHRNQLQHGSWIFQLKACE

SEQ ID NO: 77728 - protein, 348 aa, unidentified
MLAEVVDAVVGGDTHRDTHALELTAPSGATIATLMIGNDERGFAEAIAWVAEHAPGPRVVVGLEGTRSYGIGLARVLQAAGLTVVEIERPRRGERRRGKSDPIDAHLAALHALRLDADRLPTPRADGDREALRILLGARRELTTAKTRTINRLRALLLTGSDADRALSRGALSSDRLAAITRRRGGQHETREYAVRRAEARRLALAISGIDRELADNKWHLADLVTHLAPQLLAKRGVGPVSAAQAIVSWSHPGRCRNDAAYAALAGASPIPASSGRIVRHRLNRGGDRHLNRTLHDILLTRWRTRPRTRAYIARRRAEGKTDPEIRRCLKRYIARELYRSLNTAMAA

SEQ ID NO: 77729 - protein, 423 aa, unidentified
MMKLKYSICCGLDVHKNVIVATIVTTNKDGISEYLQKSFSTINSDIQRFHNWLIENNCYHVCMESTGKYWIPIFNYLENDIDVCLTHPKYVKAIKGKKTDKKDSKWIADLYKFDLVRCSFIPPKDFRQLRELARYRFKLVCMKSSEKNRIQNCMTISNVGIASVLSDPFGKTATEIISYLLEHTADSMDEKAVRKLIKKGAKSKSDEIIEAIKGYNIETDQAKKLELAQGHLEYLDDMITQTEVELYVRIKPYYEFVEFVSTMPGMTELSSTIVLAETGVDMDIFDDAKHLCSWCGLSPANNESAGKKKSVRIAKAGDYLKPMMVQCALAAIKSKKQPYFAIKYGRIKKRRGHKKAIIAIARMMMVCIYHMVSEKKPFTPTDYEELMNPQNHVERVVLNENNVFAYLESLGYDSSKLVKRNDN

SEQ ID NO: 77730 - protein, 377 aa, unidentified
MSKVRFLGLDVHANTISAAIAEPGGEVRSLGTIRNTPGEIRKLIKRLQPVSTLRACYEAGPTGYVLYWQLTALKVSCQVIAPSLIPVRASDRVKTDRLDALKLARCYRAGDLTPVWVPDAAHEALRDLVRAREDARLDQTRARHRLGKFLLRHGCRPPEDIKRSWTAKHMGWIKSHAGFADPALQATFLDYVHEVEHAAERIARLEKALDEAIAAAPPAIREVVTALQALRGVGKLVAAGVVAEIGSFQRFTSPRQLMSYCGLVPSEHSSGSRTARGGITKTGNAHLRRLMVESAWAYQHKPWIGGWLEKRLQPLEPEIKDISWKAQWRLHTRYKKLSARGKNKPQIVTALGRELLGFLWAIAVRVESRHTALQPAA

SEQ ID NO: 77731 - protein, 461 aa, unidentified
MSKQAKTKEKAKRPRGIGLPVLHEHAAGIDVGSTEHWVCCPPKPDGSVNVRRFGTRSCDLDRLAEWLRSEGVESVAMESTSVYWIPLYELLEAKGFAVLLANARQLSNVPGRKTDMQDCQWIQLLHACGLLRGSFRPAQQICAMRSLMRECSNLIEERTRCVQRMQKALDQMNVQVHRAVSDITGVTGMGILRAILAGERDPLALAGLRDRRCQKSTLEFAEYLRGTWREEHLFNLKMAVELYDKLNEMIGTYQQKISGLMAQLQPEERRESVPPDHPCKTKAKNLRQRGQEDIRQALWRFSGVDLTRIDSVSTTAANIVLTEVGLDLGDFPTEKHFVSWLRLSPNRQISGGKVLKKKRNAVGATRVAGTLRMCASCLERSQTALGAQFRRLSRRKGRAVAIFCMARKLAVLIYRMLRYGQDYVDQGVDAYENQFKEKRMRSIISVAKQMGYAVTPIETTA

SEQ ID NO: 77732 - protein, 363 aa, unidentified
MSIVGGLDIHRKQLTFDYVEVETGRLERGRIAPADREHLAGWLTRFDGRTPVAFALEAGTGWRYVVEEMRGAGVAPHLAEPAETSTLRGPKRRAKTDKADAKLLRELLAAGRVPECYIPPSQVLEWRALLELCHDLRVEHTGWAKRVHATCFHQGTTALGEAGVVRGSRQRLESIVAEQLSPVGRLQVNTALSMMDTLAEYLDPLRRRLVATARHVRGARVLIEAIYGVGPQTALALCSWLGGADRFSSFRKAVRLVGLDITVHSSDTKPSPAGSRGRARRCCGGCCSRRPRPRPAAALPVTATTPTSGTATTPTGPRYPKPGVSSARPSTCSPTWARMPSPSSRSQIASPPGAPAPRTAQRD

SEQ ID NO: 77733 - protein, 348 aa, unidentified
MQISTIGIDLAKNVFQVHGVDVAGKPVLKKQLRRGQMLEFFGKLPPCLIGMEACATSHHWARELRKLGHDVRLMPPSYVKAYVKRGKNDAADAEAICEAVTRPSMRFVPIKSAEQQGALMLHRTRDLLIRQRTQLINAMRAHLAELGLVAQKGCEGLQQLMRTVADADDEQLPSDARVACQAIIAQLQAVQMQIAGLEKRIHQAHRANPASKRLDAIPGFGVIVSTAVVATMTDPKAFKTGREFAAWIGLVPQQNSTGGKERLGSISKQGDRYLRRLLVVGALAVIKSARTRPDKYPWVVALLGRRPTKVVAVALANKMARIAWAILAKGETYRAPVHKNSGVIAARA

SEQ ID NO: 77734 - protein, 357 aa, unidentified
MNNHSIPINFSNQHFYIGLDVHKKRWSVTIRNNNLSLKTFSMNPSPELLINHLHSHYPNGIYHIVYETGFSGFWIYRKFKELNTDCIVVNPADIPTAHKEKDRKSDPIDSNKLARELEKGELNPIYIPISQLQHLRSLTRFYHRIVQNMTRVKNRIKGHLYYNGIFLPSHTSQWSNNFISYLKTIVLDNGPADDYLSLLLEELQQHRSRLLITLKKLRQYISLYNFDTTIHNLLTIPGIGFKSAITLFSEIMDMNRFKNFDNLKSYIGLVPSTHSSGEHNIVKGITKRRNAYLRYVIIESAWVAIRKDPVLLQSYNTLISKMKKQQAIIRIARKLLNRIRYVWLNNHPYNYGLVEIR

SEQ ID NO: 77735 - protein, 404 aa, unidentified
MTSAVVDDMADQDVFGGVDSHADTVHVAVIGDNGGHLADAEFTTTAAGYAAALAFLNAHGHVIAIGVEGTASYGAGFTRAARSHGHQVVEVNRPDRAERRRVGKSDPIDAYAAARAALSGRACGAPKDDTVAGIRALHNAARSAVKARTAALNQIGHILISAPDSIRAKYGQLKGTDRTDTLARLRPAGDAVHAAVLTALKSLARRVKELTAEHDALTKALDGEVTTHNPGLRAAHGVGPDTAAQLLVTAGGNCERMRTEASFAALCGVAPVPASSGRTNRHRLSRGGDRAANAALYRVALVRMSSDSRTREYVARQTAAGRTKKEIIRLLKRAIAREMFRCLTTAVTVPGIADLRPLRQSKNITLTAAAQHFGVWPATISTLERGIRRDDDLAHAYRDWLQAA

SEQ ID NO: 77736 - protein, 342 aa, unidentified
MSEYVGFDVSEEETSFCVKDVSGKILARGKVATDPVALFEVLRAHCVCPERIVLETGTLSGWLSRELGKLGIAVEVIDARQAHAVMKLQHNKTDANDAALLAEIARTGFCRPVCVKSEAAQADRILLKARAHLVGQRRATQNTIRGLLGSLGIRFAKGSGKLAGLVREALEGRDELRATIDPLLRAAAALEREIARLDKAVSGRAKDDPAARLLMTVPGIGPVTALAFAATIGDAERFAKSRTVGAYIGLTSRRWQSGEMDYSGRISKYGDAMLRALLYEAANSLLTVVRKAHPLKDWARRIRKRTSHKKACVALARKLAVILHRMMITGEPFRWPQKEAAA

SEQ ID NO: 77737 - protein, 340 aa, unidentified
MEKRYVGVDLHRNQFTVCVRLENGRTYLRAWRLEALSQFVKKLRPTDEVAVEVTGNTRLFYEAVRSEVARVVVVDTNQFRVITQSVKKTDANDAQLLALYLAKGLLPEVRMKDKQHGQIASLTQTRDTLVKLRTTLKNKVNNILSARGINLAKEALSSEKKLDEVLGLPLEELVRIELRVIVAQIRSLNGSIRELEKTIAEEASKLEGHKNLTSIKGIGKITGAILLSVIGDVNDFPDEHRLASYFGIVPRVSNSNATQHSGHIHKRGSKLGRTALVQASLIAANYSPYLRNFYERVKARRGAGRAIIALARKFLGIIYRTLKNHWVFEDFPHFVLAEAA

SEQ ID NO: 77738 - protein, 344 aa, unidentified
MEHFAGLDVSVNETSVCIVDETGKIVREVKVASEPGALLTVLNSGAHHFKRIGLEAGPLSQWLYSALGEANLPVICVETRHMRAVLQAQINKTDRNDARGIAQMMRAGLYRPVHVKTLRSQKLRMLLTHRKLLQSKAIAVENDLRGTLRNFGLKVGIVGKLRFETRIRELVENLPDLAILVEPLLLVRRVLREQIAVLHRRLLVIVRDDDVCRRLMTVPGVGPVVALTFRATLDVPARFRNSRAVGAALGLTPCKYQSGESDRTSGISRCGDEMMRVMLYEAAQVMLVRSTRWSWLKAWAMQIARRRGMKKAIVALARRLAVVLHRIWVDGTEFRWSRQEAAAA

SEQ ID NO: 77739 - protein, 343 aa, unidentified
MQTVTTIGLDIGKSVFQVHGVDATGNVIVRRKLKRRYVLSFFQKLPPCLIGIEACASSHHWSRELRALGHTVRLMPAAYVKPYVKRQKNDAADAEAICEAVTRANMRFVATKTLGQQSCLMLHRTRHLFIRQQTAVINAIRAHLAEFGIVAPVGRNGVEHLLNIVADCSDKRLPDVARACVAALGAQLRMLKARILELDRLIMAWHRSNEASKRLDEIPGVGPALATALVASVADPRAFRSGRDFSSWIGLVPKQHSSGGKDKLSSISKQGDRYLRSLFTTGALAVIRYAKIHGTKHRPWLTALLARRPTKVAAIALANKLARMAWAMMARGDRYKEPVALAA

SEQ ID NO: 77740 - protein, 347 aa, unidentified
MDHVGMDLGKRESQMAILTEDGELIDMRIRTERDRLIEVFGRRPTAKILVEASTESEWVARCLEDLGHELIVADPNYAPMYAQRTRRVKTDRRDAHALAHACKLGAYRPAHRTSTERRHLRTLVAVREAVVRTRAAWIGRIQPVLRREGFRVRPGAPETFIRRVEELALPPALTTAIAPLLRLLRPVNEQIQALDAELERIVAADEVTRRLATTPGVGPVTAVAFVATVDDVTRFRDAHHLEAYLGLVPSEWSSSEIQRRGRITKAGNGRMRWLLVQAAWCILRRRKQSETAALREWADRIAGRRGRSIAVVALARRLAGILFAIWRDGTVYDASKVRRAVVATQVA

SEQ ID NO: 77741 - protein, 337 aa, unidentified
MMYSGIDLHSNNSVVAVIDDGDRVVAQKRLPNDIGKITGFLARWQDELAGVVVESTYNWYWLVDGLQDAGLHVHLANTAAVKQYEGLKHSGDETDAQHLAHLLRLGILPTGTILPREHRVVRDLARKRMQLVQSCTTHVLAVENIMARQLGGRMTSNQIKRLTDDTIDSLPMAADVGLAIKANVAVIATLQSQIEVLEKRLQERVRPRTQYALLTTVPGIGQTLATVIVLETGPIDRFAEVGNFASYARCVDSVHTSNRKKKGEGNVKNGNKYLAWAFVEAANFARRFCPEAKRFHERKKAKTNNIVATKALAHKLARACYHILKEGKPFDVTRCFA

SEQ ID NO: 77742 - protein, 409 aa, unidentified
MIVERPAALDVHKAQVTACVRVPGEDGERVEQVQQFKTTVRGLLVLRDWLKAHHVTQVTMEATGVYWKPVWHVLEDDFELLLVNARHVKQVPGRKTDVADAQWLCRLAEAGLLRSSFVPPKPIRELRQLTRYRKAQIAERQREANRLHKALEDTGIKLDCVATNILGVSGRAMLDALVAGTTDPVVLAELSKGRLRSKIPELTEALEGRFEELHTLLVGSILAHLDFLDTQILALGKAIEAKLAPFAQGAVKLLCTIPGIAERTAQNVIAEIGVDMTQFPTAGHLASWAGQCPGNDQSAGKRRSGKTRKGSKWLNLALKEAAMAATRTTGTYLQALYRRKKSQGGHNKAIGAVKHSMICAIWHMLKTGEIYTDLGPDHLARRNPERQTKRLLAQLQRLGHNVTIQEAAA

SEQ ID NO: 77743 - protein, 372 aa, unidentified
MIETCIIKGSVDEPGDEPVILRRQFSTMPAELKEFALWLEENECLHVAMESTGVYWLPVYEEIEARGNYERILVANATHMRNLPGRKTDVKDAEWIATLLRHGLLPSSFIPGREIRNLRKASRMYKKIIGEKSRYVNRVEKLLQAHGFKLSSVLSDIMCVSGRDILRLLAERGSLTVYDIQKCLKRRTKHTADEIHEAASGSLNEAERAMLKLLLREIEDCERNIETILSIMTEIADPYQSQISLIDSVYGIDKKAALLILAEIGPAPWKEFSSAEKLCSWAGLSPRNDESAGKIKSRKILPGNPYVKSILCQVAWVAVYNRKSNFGQWFWSHQARIGKKKAIIAVSRKILTTIYIMLRDGTPYDPEYSCAG

SEQ ID NO: 77744 - protein, 332 aa, unidentified
MNMHPQGGVANRDQRPNAGVDVCKQHLDVCLSTLELRVTNDATGWDVLIAKFKEADVDLVVLEATGGYERGLVCALQGAGTTVARVNPRQARDFAKSMGVLAKTDQVDARTLRDFGDVLARHKDRAKFITPMVDEQRQVLAELMARRRQLVDMRVAESNHLEHAGKHAVRSIKSVLKTLDRQLQAIEHEIDDHMDRHFKDQRTLLDSVKGVGPVTILTLTAALPELGNLGRRQIAKLVGVAPLADDSGPRKGKRRIWGGRADVRAVVYMAALVAIRHNPTIKDFHSRLIAAGKPKKVAIVACMRKLLTILNAMLRDHALWNAARHLQNAFPA

SEQ ID NO: 77745 - protein, 336 aa, unidentified
MKHTVIGMDIAKHVFQLHAVNAATGEIERIKLKRNQLLDFFAKREHSLAAMEACGGAHHWARQLQELGHDVKRICARSVRPFVLRNKTDAADARAIWTAAQQPDARFVAIKTEAQQAILALHRLRAQLMKFRIMQTNALRGLLHEFGQTLPEGYQALQDAIPGTLARAAERLPAMLVDSLREQWGRVQSTDADIATLERRLKAALRENQQYQRIAEIPGVGLLTATAAVAAIGNASTFRSGREFAAWLGLVPRQTGTGGKVRQLGLSRRGDTYLRTLLMHGARSVITRGTRSPWLDGLLQRRPFNVVVAAMANKLARTIWAVLYRGTGYHGAIKDA

SEQ ID NO: 77746 - protein, 351 aa, unidentified
MTKATIGVTGGSDTHSDTHYAAAIDDVGRLLGTREFPADLNGYQRLREWLECFGRLERIGVEGTGCYGAGVTRYLQHLGFEVIEVNRPNRRSRRARGKSDPLDAESAARRALAGEDHVVPKDSTTIVESIRVLRIARTGAVKARTAAYNQLKDLIITAPDSLRESLRGKTLQRVAQESARLRPDMNRLADPIQATKLAMRTIAGRVAALSSEIASLDAQLQNLVRSAAPRTLALQGVGPEHAAQLLITAGGNPARLRSEAAFAALCAACPIPASSGKTNRHRLNPAGDRDANRALYMIILSRLRYCPTTRAYVDRRQADGLSKRESIRCLKRYVAREIYHAVRADLAASAH

SEQ ID NO: 77747 - protein, 351 aa, unidentified
MSRQSTPSPIATIGIDIGKNTFHLVGLDHPGAIVLQLKTSREQLERRLANLPRCLIGMEACSGAHHIGRQLAALGHDVKLVPAQYVKPFLKGHKNDYRDAEAIAEAVQRPTMSFVTIKTPAQMDLLALHRVRSRLVSLRTGVINQIRGFLIERGIAVRQRPAPLRKALYDLLSSNPPSLSPRMVRLIADLFEDWRRLDDRIATVSAEVEALVEEDEPCQRLMTVPGIGPIISSAVVAAIGDGAGFKQGRDFGAWLGLVPRQESTGDRTILGKISKRGNKYLRTLFVQAAHVILARRPSAAMRGLWPWIAQASKRLHRNMLAIALANKLARIAWAVLARGREYQPSITPHAA

SEQ ID NO: 77748 - protein, 346 aa, unidentified
MIIVGCDFHPSWQQVAIFEAATGEIVERKLVNGNGEAEEFYRHLPAGSLVGMESCGNSQWFVELMEQLGHEVWIGDAAQIRASYVRRQKTDRRDAGHILKLLMEGRFPRLWRPDGEERDLRQLLIHRHRLVQIRTRVKNGLQHLAMNRGMQKKSKLWSAAGQRAFLQLPLPGWAGCRRQDLLALLGQLDERIKPLDAAVEKAALAHPQARLLMTQPGVGPVTALAFVVTIGDAHRFRRGKQVASYLGLIPREHSSGGKQRLGAISKQGNGFVRLLLVEAAQSVTRLDAGFRKQYQHRCHRKPKGVAKVAAARKLAVRLYWMLRSNIGYPEIVHNESSSRCPVAGAS

SEQ ID NO: 77749 - protein, 360 aa, unidentified
MFIERTSVGLDVHARSVAAAAIDGVTGEVFRARLVPAPREVIGWIEALPGPAAAVYESGPTGFGLARALNAAGIRCQIAAASKLQRPAGDRVKTDARDALHLARLLRLDEIVAVRVPTQVEESARDLVRCREAARADLMRARHRLSKLLLRHGIVYSGGKAWTQVHDYWLLEQSFPLAGTQAAFEDAYQSVVLATARRDRLDAAITAMATDSQFTPVVARLSCLRGISTLTGFSLAVEIGDWDRFTGASIGAYLGLVPSEHSSGARRSQGPITKTGNTHARRLLVEAAWHHRKPYRPTAILRRRWAVAPPAAVARAQLGNHRLHERWSAYAERSKRPVVANVAVARELAGWCWSLAMLPQ

SEQ ID NO: 77750 - protein, 349 aa, unidentified
MILVGCDLHTRKQQVAVLDTNTGEFFERELSHVGDAVEQFYAALAPPVTVGIESTGYALWFHAVLQRLGHTLIVGEAAKIRAMVVRKTKTDRRDARQLLDLLQHDRFPTVWIPDPHTRDLRALLKHRLRLVRIRTMIKNGLHAIALNQRLALGPSLWSRRGLARLHALVLLPHTARRRDDSLELLQWLDRRIDELDVHVAAVVSADPNARRLMTHPGVGPLTALATVLVLGPVTRFPNSKHVVSYVGLAPAINASADKYRLGHISKQGSALLRWVLGQAAPLATRADSELNRAYFAVFRRRGRPKAKVALARRLLVRLYVMLRDEIDYDEFCRRGRARRHDLVPAPSTG

SEQ ID NO: 77751 - protein, 361 aa, unidentified
MEKASSQVGKINMPVDEVTMTQILSFVGVDIASTSFMGCAGTAPWKVTVKPAKFENVEDGFISFLGWLKEHNLMPETTVVCMEATGVYSEGLAYFLYASGYTVAVEPPLNIQRKFPVNGSKTDELDCQYIAEYACRYVDKLSFWKPRAEILEQVKLLLTTRQHFSVQLTGHKNALHAVNRKKVSSALAKQVHQNMIEQITKHIKSIDQEIRRLIESDPTFKQTVLLLLSVPGIGLQLAAHLLIVMQETLDPKTLAAFIGICPIKHESGTSVYSAPTSRHYGPSVLRKLLYLAACSVRTHKKQFQQYFFRKVAEGKHKKLVLNNIQNKILKIACAVVRSQKPFVPNYVSVNPLVFQKTLTPS

SEQ ID NO: 77752 - protein, 433 aa, unidentified
MLKLNYMSTLFVGIDVSSKTNAVYAMDFEENKYISSSFGNNQPGADQLVNMIAECMQKHKNLDTVLIVLESTSVYSVHISNFLSTSEVLMPYKPYVFCVNPKATSNYRKSYIGMEKTDPTDAYLIADFGRVGRTKKLEPWRGGQFISLKRLTRHRMHLSECITREKTYMVSNLYLKFSELQLLEGDDKPFGSLYGATSSAVLTEFLSPQEIIDMPEEELLTFLAGKSRNRISDLSKTSELLRKAARDSYRLDKCMYEPLSISLASSFNCIHAYQKEIKLIEQAIEKCINGMNPNALLILQSIPGIGPIWASGILSEIGDITVFHSSDALAKYAGLYWPKGDSGDFTSEDNKMSKAGNPYLRCYLGEAANSVRKHIPEYADFYARKYAEVTKHQHKRALALTSRKLVRLVFGLLVKNQLYTGEKLDAEYNIKSN

SEQ ID NO: 77753 - protein, 428 aa, unidentified
MIATVPVTPRCTFVAIDVAKSVHEVLIESPSGRRHRWRVGNCQADFVVLRDRLRAFATPVCIGFEATGNYHRPLAYYLIQCGFELRLIASLAVARTRDALYNSWDKNDPKDTQVVLHLLKTGVSQRYHDPLIHRTNDLQELAQTHHQISLRKVQVQHSIMTHYLPLYFPEAERYYTNSRAQWFTQVLHRFPCPAAITRYSPATFEQEAWTLVGRKVNKRGFLADLYATASQSIGLAVTEDSQAIQMFRVMLAEHQHLCAIRAMIEHQADHVLQSHPDYQRLRTLPGVGPILALTILAEAGDLRRFPHYRQFLKFCGFDLSTQQSGQFRGMSRLSKHGNARLRYAFWMAANGAVRMRQNTFREKYARYIKADPQNPDRKRKALCAVAAKVARVAHGLIKTDTDYRPYFEALPPSGALRSHGPSRQVLTS

SEQ ID NO: 77754 - protein, 369 aa, unidentified
MTKIVYVGLDVHAETIAVATADDGRNGEIRFYGTIRNTADSILRLTKRLSSGNTTPAFCYEAGPCGYGIHRLLTKLGFECAVVAPTMIPRKTGDRIKTDRRDAEMLARLWRAGELTSIWTPDEEHEAMRDLIRARKQAMSALKVAKQQLLSFLLRHGLRFDRPTRWTKIHWRWINELRKFRYPHQQLAFEEMKRAVRQIDDRIATLDGAISDTVAVWRFGPVVDALRALRGVNTTIAATLVAEIGDINRFSNPRQLMAWLGLVPSEHSSGNSIRRGRITRTGNALARTMMVEASWSYRHPAKEGHPYLKRSEHLPQHIRDIGWKAQTRLCKRFRDLSKRGKPQPRVLTAVARELAGFIWDIARKTQIPA

SEQ ID NO: 77755 - protein, 400 aa, unidentified
MISVGIDVSKGKSTVCILKSYGEIVCSPFEVQHVEKELEGLDSLLKKLDGEIRVVMEATGIYHLPVLTFLEEKGYFVSVINPFAMKKYAKDNSIRGAKTDKLDSTMIANYGIEKWFKLQKHEGDEDTYAELKLLGRRYRYYMELHVKALLELTHILDYTMPGIKKLFNSWDEASGKDKLSDFVERFWHFDIITAQSLDEFVEEYLVWAGEKKYHRSRSKAEAVYELASGGISTLSSGTPSTKMLVQEAVSVLRAVDNSLSRILSRMQELAKSLPEYSTVRSMGGVGDVLAPMLIAEIGDVRRLHSAKALIAWAGIDPPPYESGQFVGSKRRITKRGSSTLRKVGYEVMRVLKSHKAPEDDAVYNYILKKEHEGKDKKHAKIAGLNKFLRIYYARVMAIYR

SEQ ID NO: 77756 - protein, 451 aa, unidentified
MKKKKMEMDIVNPNCAGIDVGSKSHFVAVGQALEDVKEFGVYAEDLTEICNWLKEFDVTSVAMESTGSYWQNLYVELIRHGFSVTLCNGKFTKNAKGKKTDVKDCRWIQKLHALGLLTSSFLPDETTERLRTYCRQRGSWIDLSSEASQKMQKYLRLLNFRLDVVVNDVCGLTGLSIIADICKGNLDAEKLSEHRNGNCRKSKEEIAKALKGNNREDFLFGLKQEYESYLFYQKQIGNCDKQINTFVKSQINANPEMKKLKTENKPHKRINKNTVKNLDLNQASYQYFGGIDLMRIEGLSHSTVLTIMSEIGPDGFTKFETAKQFASWLRLAPNNKISGGKILSNRIPKGSNRLKIALRQAANAIGNLKDTHLSDFFRRVAYRKGRQSAVSATARKLGVIIWTMITKKVQYQPSTDYLFLDQKRKLKLVARIRKNISKFELKPDELGFAIS

SEQ ID NO: 77757 - protein, 297 aa, unidentified
MGDITTIGLDLAKNVFQVHAVDVAGSVVLRKRLRRGQVLAFFAGLPPCLIGLEACATAHHWARELIALGHETRLMPPSYVKAYVKRNKHDVADAEAICEAVRRPSMRFVPLKTAEQQSALMMHRARDLLIRQRTMLVNALRGHLAEFGLVEAQGLHKVARLIAIVMDEMDGRVPDIARQVLKVIVSQIEDIQTRIAGLETQVLAWHKSNPVSQRLATIPGIGPIIATAIAATVVDPNIFRSGREFAAWLGLVPRQNSTGGKARLGGISKRGDSYLRRLLVNSAHTVLLCSKAAKADP

SEQ ID NO: 77758 - protein, 347 aa, unidentified
MHIAVLGIDLGKNSCSVAGLDTSGRVILRRRLHRDSVVKLASRLPACVIAMEACCGAHHLGRLLQACGHEIRLMSPEYVQPYVKAQKNDERDAEAIAEAATRPTMRFVELKTEQQLDMQSLHRARSRLVGERTALINQLRAVLLERGIAVAQGRYRLQRYLALALDGDGDPLPLNPRIRRLIDDMRAQWSELDRRIAAFDAEFVAAARSDADARRLSTIPGIGAINATALVAAVGNAQSFARARDLAAWLGLVPRQATTGGRPKLLGITKRGNKYMRTLLIHAARAALPSLITTEGSLGNWLRALSARAHRNTVIVALASKLARIAWAVLRSTATYSATIGGRPATV

SEQ ID NO: 77759 - protein, 415 aa, unidentified
MKKHSNSVKKSESRMKRRNPRAEQRRDSSEVMAELVSQLRQQLEEKSVPAAESAVEERDAVGPNLDRLTVGVDLGDQWSNYCILGLGGETLREGQFRTRRQEVEEFFQGLAVSRVVIEVGTHSAWVRELIAGLGHEVLVANAQRMEGRKRRRRKNDRIDAVKLARLGRVDPKALYPIQHRSTEVREDLLVIRVRDSLVESRTKLISTVRGMVKTMGARVQGCSSVSFSAKAAEQIPAEVRETLEPLLRLIQTLSEEIKSYEKRIEKLGSEKYMDTKLLRQVNGVGPVTSLAYVLTLETPQRFKRSRDVGPYLGLVPQQEDSGDSQPQLGISKAGDRMLRKLLVGSAHYILGPFGPDTDLRRFGMKLCERGGKNAKKRASVAVARKLAVLLHRLWSSGEVYEPLGYGKTITESAAA

SEQ ID NO: 77760 - protein, 346 aa, unidentified
MGKSITDLSPVTTVGLDLAKHVFQVHGIDASGRVVVAKAIRRNKLLEFFASLAPCLVGLEASGSAHHWARELITLGHEARMMPPAYVKPYIRRQKNDASDASAICEAVTRPSMRFVGVRSLMNQAALMRHKAREMLVTQRTQLLNGLRGHLTEVGVIAPQGLRCARELAELIEACDETIPFEVCEALAPLVVQLRNLDEAIAQLDRIIAKLAQQDETARRLMSVPGFGPITASAMAATIQDTSSFAGPREFAAYLGLTPKQNSSGGKPKLGRISKMGNRYLRKLLVVGAHAVLFHRKPHTDPLRMWAKKLIEKKPFKLVAVALANKMARIAFAILRGKTVYREIPT

SEQ ID NO: 77761 - protein, 324 aa, unidentified
MNKKQKVVGVDVSKDTFDVYDGKRSGVFANTAEGFSQFSGWLEGSVIYCVMEVTGTYHKLLAAYLYKQGVSISVVNPLIIKRYIQMKFHHNKTDKSDAKAIHSFGVDQPQAEWKPSSQYIEESKLIYAGINQYNKQSTALKNTLHALSSQGIKKGPLVRSVVRMLKQLSKEKQALEKELEKQVKANDAESLTNLTSIPGMGKKTALLLIVSLDGFRDFENAKQVSSYLGLSPIEHSSGSSVRGRSRISKRGNPLVRNYLFMCSFTASQNNEACRQLYERIVNKGKSKKLALIAVCNKLLKQAFAVTKSGLPYDPNYRSKLQVNY

SEQ ID NO: 77762 - protein, 363 aa, unidentified
MAIGLDVHARSVRAAALDTVTGELCEARLAFDVGQVVAWLVMMEHGHGTSAVAYEAGPTGFGLARAIQAAGLRCVVAAPSKILRPSGDRIKTDARDAVLLARLLRNDDLVAVRVPTEAEESARDLVRAFDDARIELMAARHRLSKLMLRHGHVYDPGKDAWTGAHDAWLRQVRRDQLPAAGAGTLAAFDAGYDAVVTIGARKKRLEIDIEAMAADSEFTPLARRLGCLRGISTVTGFALAVEIGDWERFTGGTIAAYLGLVPSEHSSGGSRSVGPITKTGNKHARRLLIEAAWHHKATYRPGKTMRDRWALAPAVVAARGDAGNRRLHHRWQVLMAHKKRHTVANTAIARELAGWCWSLATLN

SEQ ID NO: 77763 - protein, 368 aa, unidentified
MVSSVGVSRRGAVRVLEHSGFPNNTRSERKETPMEQRPYVGIDLHRRRSVIVRLDEHGDRVVTHIENDAAALAAAVAAAGEHPEVVLEATYGWYWAVDVLQELGATVHLAHPLGLQWGNRRRKDDVIDATDLVDMLRLGRLPEAWIAPPATRQLRELVRHRAKLVCLRSNLKSQVHAVLAKEGVHVAMSDLFGVGGTRFLDELSLGDAYAFRVRSLRSLIGGFDAEVNAADRQVRSALGEHPGWEAIQAIPGVGPVLGAVFVAEIDDITRFPSARHLCSWAGLTPKHRESDTTVIRGHITKQGSRLVRWAAVEAAQKTGDFLKSDFRRIAERRNNRKIARVAIARKILTLVYYGLRDGYIRCLAQDTA

SEQ ID NO: 77764 - protein, 468 aa, unidentified
MSKGSGTTRGDRRRNARRERLRGLLPRDGAVIGIDLAEDKQALVLIDHDVRVLARKTVKVKVFRLGEALDWAVTAAKVKGFRQVTVACEPTGPRWMQVQRLCAERGLPLVCIQPLMSHIAREQQDYTPHKTDESDCVLIGRLAVELHCYIPEELDETWAHLRHLGRRRAQLITAATASVQRVRDFLSVAWPVVTEACAGPFGSVTWLAALRVVTARCGGDPGKRAGMGQEAFTAAVRGAVAGWGGKKAWGTISARVFAALTDTEGVVTWSRRGLLRRVADELGDLARTRAQLRAVEADMVMILGELGLSRLGDIPGLTAVGAAAILAETGDPRRYDGSSSLVKHAGMSPAGNASGAFEGQAHISRRGRPGLRLAVWRAVWPMLRYNPVMAAKYTALTRAADAAAAGAGPQHGTAAQAAARARRAKARVACAASLLRWIYCMVIHGTSWDPAVAAGRCHDTPRSQAEAA

SEQ ID NO: 77765 - protein, 464 aa, unidentified
MFAFLYTKSLSTFSVERLFGLSRWLQLNEASCTGPRPPISGEVANSEGSDRLSSNVLDVLLQSPEFCPYGGWCGERFTMSEAKPLRNAKQERTPINLKVRKPSNGASPMSLSTPKPSYAGKDIYVGIDVHKRSYSVYVSVERTKIKQWRMPASARKLTEQLQRHYGEGHIHTVYEAGFSGFDLHRELTTGGIDSLVVHAAAVETAAHNRIKTDKRDAQKLAIQLESGRLSSIRIPTREEERKRLLSRTRAQLVKARTRLKIQMRMKAHQFGLIGAEDRREMSHRFVQDLLDCAVGEEFTLSISALLEVWKSLDIQIKRLEQQLKEQAAADPNEATYRSAPAVGPISARVLSNELGDMKQFQNERQLFSYTGLTPSEHSSGQRIHKGRITKQGNAHLRGILIELAWRALRKDPGLAQHYQHLSARMESKQAIVAVARKLIGRIRAAFRKGELYQIPNLEDLATAP

SEQ ID NO: 77766 - protein, 556 aa, unidentified
MGRSSGAGRVATSQAPAEGTARKGALTCFPRIWKRQGGAAGSACGTWCGGRRSLGSYRAVESKLVWVPPRELEHLGVEVDLFPKLLEAIVEISEVGRVLFHRPLPRFAFARRKFGDPRSRVLENLGSLRDSDQPAVQSRASGLAPLDMAKHSPCTLIRLRLTQNGVLYQGVALRGDRTHRRKPSSLGIRGIPRTAAHAVDHLRQDGACVTRGAGLLREVRGTPESILTEGGCMSCVFVGIDVSSGSLSVTIRKGEEVWRGAFENNTGGQTLLCTKLARTRSLVRVCLEATAFYHLDVALRLHAQARVEVMVVNPRAAKDFARARLQRSKTDRVDADVLVEFAWRMPFVPWQPPSAQVLELRAISRYMASLAQARGRERARLSHVRSKVVCAAIEQHIVRLDAQIQELLIAALAEVQSDPQLSRCFHHLVSIRGIGRASAVGILAELASLPSDMSARQWVAHSGLDPKHFESGTSVKRRTRISKVGNSHLRSVLYMPAVVAARFEPRVRAYYEHLLAKGKKPMQANIAIMRKLLHAIHGMLAHDTDFDGERFFASTA

SEQ ID NO: 77767 - protein, 487 aa, unidentified
MELKYRRCCGIDVHKKSVTVCVLPPVGKPEMEVRKRNFRTFTRDLKQLRTWLKNCKVTEIAMESTGQYWRSIWNLFEGHFDKLILVNPQHIKGLNGHKTDPKDAQWIAELLETGKLKGSWVPAREIREVRDLTRQRVHVLEDMNRVKNRIEQLCQTGNIKVSSVATDLFGVSGRRMLKAVVEGKHDAGWMADYAKGSLRGKRRELELALEGRFTGNQRWLLDKELRQLEWLESQIPVLEQEIERQLAPFQEPMRRLMTIPGIDRKTAWTIVAELGVDMGVFTDSKHLASWAGLCPGNRESGGKRMSGRTRKANRYVKRGMCQAAWAASHTKNTYLQAFYRRIQMRKGAPKAVMALAHHMIAIVYNTLARGEEYVELGGDYYDQRNKPRVVSRLVARLTRLGYYVSLKPVGPESSYEPSSVMELSLPQPQPAIPASHNPLSMPGSVAPARPKRGRPCKCLERGIICKHTTSPGINSLKQHDLSPSRFS

SEQ ID NO: 77768 - protein, 402 aa, unidentified
MKKFNAEAIRLETASALGTVRQDQAMSRYAAYIGLDVHNESIVVAVARAGRQAPESRREIANKPKSVAKLVERLNQEFGGEVVLFCYEAGPCGYGLYRHLLGLGHDCQVVAPSLIPKKPGDRIKTDRRDACKLAQALRSGDLTAVWVPDEEQEAMRDLTRARADMKAQERKARQQLNAYVLRHGHAWASNKTRWTKTHYNWLEGLRFAHDWQQVVLQEYIDAVKAASQRVADITAQMERVLPQWSLAPVVGSLVALRGIDKLAAMVLLAELGDISRFDSPKQLMAFLGLVPSEHTTGGRRRQGAITKTGNRHARRMLVESAWSYRFPARQTAHLKRKATNASDEARDIAWKAQKRLCGRYRTLTRAGKETKRVCVAIARELVGFVWDIVCREMPEVQLQAAG

SEQ ID NO: 77769 - protein, 381 aa, unidentified
MKQDNKTKQNRGNEVSVEAPQDRCDLGRRRWKVQRVGLTVGLDVGDKISHYCVLNEEAEVVERGKLKTTPAALQPWVEALPAGTRVVLETGTHSSWISRLIEQAGQEVLVAQPRKMPQIYASKRKNDRRDAEKLARTGRLDPNSMGPIRHRSAEQQADLAVIQARDALVQVRTQLINTVRGLVKGTGERLRGCSAPSFARQAEAQIPQRLRGALLPLVSQIRSLSEQIERYDAEVEKLAQKKYPETELLRQVSGVGPVTWLAFVLTVGDRWRFRHSRDVGPFLGLVPAQDESGESSPQLGISKAGNSYLRRLLVGSANYILGPFGPDCELRRWGMKRSERGDKNARKRAKVGVARRLAVLLHKLWVSGEVYEPLREKRAAA

SEQ ID NO: 77770 - protein, 343 aa, unidentified
MTDVVIIGVDLAKNVFQLHGAAADGTVVFRKKFTRPMFQRFMADHPRCLVAMEACGGAHHCARELVRLGHEVKLIAPRYVKPFVKRQKNDAADAEAIVEAAMRPTMRFVEPKTMEQQARAIVFRTREKFVNQRTEAINALRAHLYEFGYIAPQGIGYLSRLEAVVDDPNTDLPELARDLCRALLNHIAQLTISINDLKKRIGTISKEQETSRRLQTMPGVGPVGALAIETFAPPMDQFKRGRDFAAWLGLVPRQNSSGGKQRLGKTSKMGQRDIRRLLVTGAMAVVNWASRKGAAEGTWLARMLSRKPRMLVAMALAGKMARGIWAMLTRQEDYRNPVLVGVA

SEQ ID NO: 77771 - protein, 421 aa, unidentified
MDSQASEADGYAALIGIDWADKKHDMVILDTKTGEKEHVVVEHTPEALDEWVTGLATRIEEGPVAVCVEQARGALVHNLMMYGFITIYPINPQAFSEYRKAMCVSGAKDDPTDAALLLDYLEKHRDRLRAWQPDDETTRLLGILVKDRRKAVDQRTELTNRLRAALKGYFSQALDWVGQELHTPMACDFLLRWPTLKAVKGARAKTLRKFYYGHKSRQGHLIEERIQQIRKAKPLTTDMAVIDASAMVVKMVAGQLRLLDGAIREYDKKIKEIFSKHKDRDIFESFPGAGASLAPRLLSGMGTDRERYDNSDEVQCTTGIAPVTERSGNMEFIHWRWACDKFTRQSFHEFANCSRQYCDWAAAFYEQQRQRGKKHHAAVRSLAFKWIRIIYRCWKDRVPYDDETYVNSLKERGSPLYQLIG

SEQ ID NO: 77772 - protein, 333 aa, unidentified
MNEQAVGVDVSKKKLDICVATGNKFKSKVFANSPGGHEALNTWLQQRDIPVDTPVVLEATGPYSEAVAIFLADLGWSISVVNPSRISGYAQSELSRNKTDKADARLIACFAQRARLESWSPPSLAVRELRALVDRLQALIDMRQQELNRLEDLSQTSTSSVEKMVKEHVDWLNDQIKKIQSDIDDHIDGSPELKNDADLMQSIPGIGRRASSQMLAYIGDVRRFKNAKALAAFIGVTPRQRQSGSSINKRSAMSRTGHVAARKSLYMPGLVAKHHNPVVVAMAVRLQTRGLSPKAIVGASMRKLVHLIYGVIKSGIPFNAEISMNRLDLQEGI

SEQ ID NO: 77773 - protein, 345 aa, unidentified
MDVLIGVDPHKATNAVATIDERGRLLEYAVFSTSRAGLRSLARWAKRFPSRRWAVEGAGGLGRSVALRLVAAGEKVVDVPAKLSSRARLLATGNARKNDRVDAIHVALAALGSERLAEVGEEEHSEVLRMLSERREDLVKERTRTLNRLHVLLRDLLAGGAPKNLSAEGATLALRGVRPRSAPARTRRRLAADLLRDVRRLDRQLLDLEARIRDAVREASTGLTALFGVGPILAAKIIGRVGNIARFPTRARFASYTGTAPIEASSGEVVRHRLSRAGNRKLNHALHMIAICQARHDTEGRTYYRRKLAEGKSGKEALRCLKRRLSDAVYKQLQTDLVAVTAAAA

SEQ ID NO: 77774 - protein, 345 aa, unidentified
MQHVAIDLGGRESQICVRNAKGKVIEEKRCSTVKLGKFLEGRRKSRVVMETCAESFAVASQAQKAGHEVRVVPGTLVRSLGVGARRLKNDQRDARALSEVSCRIDLPTVHIKSESARELKTLCGMRNGLVRCRTKLINTVRGWLRMVLVTTASGSADNFTQRIRDTLQKRAIPIPSYVNRQLVAIEALTEQILAADQDIGQRSKADPQSERLMTVPGVGPITAAYFVATVDQPTRFPDAHQLESYLGLTPSENSSSERVRRGSITKASNGEMRWLLIQACWSLWRTRPNHPMVKWAQQVAERRGRSKAIVALARKLSGIMYAMWRDGTDYDSHKTREPLRENHRR

SEQ ID NO: 77775 - protein, 378 aa, unidentified
MNRIIKIGMDVHTTNYTLCIFEPSFEHDGTVHCITQVKPEIKNIIHVIQTFKKKYENEELNIVCGYEAGCLGYSLYHELKEKGIECVILAPTTMKTEKGGRKLKNDYRDAKMIAECLAYGGYSAVHVPTELDNSVKEFIRMRDDIKESLKSIKQQIIAFLTRNGKQFKGKSYWTRKHIDWINTVSFSEPLLQDTLKEYMIEYNHLCDRVETLDKQIEEISVKEEYVEKVQQLQCLIGIKTHTALSLIVETSDFNRFKKGNMYSAYLGLIPGDDSSGGQENKLGITKAGNSHLRKLLVEAAQGYTRGKVGFKSKVLKSRQEKCSSEVVAYADRANERLRRKYYRMILRGKRYNVAKTAIARELACFVWGIMTDHIDLCS

SEQ ID NO: 77776 - protein, 436 aa, unidentified
MDEVEDEPLFRERVAGIDIGKTTIMVTIRVPSGTRRGRRQQETREFRAVRKDLLALADWLRCWGVTRIGMEATGDYWKPVYFLLEREGFDCVLYHASQVKALPGRPKTDKLDSVWLAKITERGNLPGSFVPPEDIRRLRTHTRYRRHLVQTRTAEKNRCEKLLEDAHLKLSSVISDIHGVSGREMLTAIIAGQRDPKVLAQMARTRMRGKIAQLEEALDCSFFTGQHAFILQMMLANIDHLTAQITELNARIDELCQPYERQIAQLDAVPGFGIITAQDIIGEIGVDMTVFPTAGHLCSWARQAPQVSESAGKRKGKNATGRGNPYLGGALGEAAANAGRTSTFLGTKYRRLVKHMPKKKAQGAISRSQLVIAYELLSDPDAEYQDLGTDYYEQRANIRREVRSHARAIERRGYRVILEPIDPGLDADVLPITKAS

SEQ ID NO: 77777 - protein, 325 aa, unidentified
MNAAEKVVLRKKLRRKEMVAFFKALAPTVIGIEACGASHHWARILRSFGHEVKLIAPQLVKPYVKRGKNDTADAEALCEAMSRPTMRFVPVKTAEQQAALMMVALRDRLIRNRTQLSNAIRGYAAEFGFTAARGIAHIDPLLDRIQADENVPVLARELFAAQAEEYAQLQAQIAEVDAKLMAWHKADECSRRLAKIPGVGPIGAALLMMKTPAPEMFRSGRQFAAWIGLTPKDHSTAGKVRLGVITRAGDEALRSVLVVGATAVVQQVRRGGRGSPWIVDLLKRKPPKLAAVALANKMARIAWKLMVTGNSYAAKSAPAALMGAA

SEQ ID NO: 77778 - protein, 343 aa, unidentified
MEHYAGLDVSVKETSVCVVDGAGQVVREVKVASEPGAILGVLADEAFTLKRIGLEAGPLSQWLYGALAEADLPVICVETRHMKAALSAQINKSDRNDARGITQMMRVGLYRPVHVKTLASQKRRMLLTSRQLLQAKAHDIESDLRGTLRNFGLKVDPVSRGKFEARIRELVVDCPGLAAITGPLLIAWRALREQFAVLHRQLLAVVRDDAICHRLMTVPGVGPVVALTFRATVDVPSRFANSKAVGAVFGLTPRQHQSGEVNRMGYISKCGDAMMRAMLFEAAQVMLTRTTKWSWLKAWGMKVARHRGMKRAIVALARRMAVVMHRMWVDGTEFRWTNLAEAA

SEQ ID NO: 77779 - protein, 371 aa, unidentified
MDYNTKYVGFDVSMKKIAVAVADEGRSKARYYGMIDYSIEAIRKVLKKIGESDQLQVCYEAGPTGYGLYRILKGMGISCEVIAPSLIPQKPGVRVKTDKRDALQLATLYRAGELTPIYVPTEDDEALRDLVRAREDVKEDELRMKHRLTKFLLRNEIRQPNGIRKWTVRYWEWLDQLTFKRSTSRVVYQEYLQQLKECQHRLKVLEQEIKEQSKEGVHASMIQSLMTLKGVAVITATSLVAEIGSFDRFKTAKQFMAYTGLVPSESSSGEARKLGAITKTGNRHVRRLLIEASWSYRHRPAVQRILRRRQVGQPTSVLDISWKAQQRLHKRYFRLLGRGKESGKVITAVARELAGFIWAVARESNKVADAH

SEQ ID NO: 77780 - protein, 346 aa, unidentified
MSQIIRIGMDTSKHIFQLHGVDAAERPVLRRRLRRHEMLAFFVKLPPTIIGMEACAASHYWARQLGELGHEVKLIAPQHVKAYVKRNKNDGRDAEALCEAMSRPTMQFVPVKTEEQQAALMLMGVREQLIKRNTQLGNAIRGYAAEFGLITAKGTDKIEPLLARIAQDGSLPELAREMFAIQGRDYARLQVELKAIEARLRVWHRANADSRRLAKIPGVGPICAVTLVLKAPDPHAFSSGRHFAAWMGLTPKDHSTAGKTRIGKITRAGDERLRSVLVSGATSVIQQAKKGRGRQPPWLVALLARKPPKLAAVALANKTARIAWKLLTTGESYDGGRMSGASAIAA

SEQ ID NO: 77781 - protein, 322 aa, unidentified
MFILGIDIAKRKYDVALLRPDGKIRAKAFANTAAGHAELLAWLHRQEAGLVHACLEATGTYGVSVSEALADAGHTVSVVNAAAIEAYGRSRLSRTKTDRTDARLIAQFCAAHQPPAWVPTPREVRELQALVRRLDALEGMRQQERNRLAADAGSAAVSTSIQHVIDTIEDEMVSLKARIHDHFNQHPRLRQQRDLLTSIPRIADTTAAILLAEFGPMARFSQASACAAFAGLVPREKRSGTSVHRKPVLSKLGNAALRKALYYPALTALRHNPIIKAMRERMLTRGKHRMVIVGAAMRKLVHLSYGVLTTETPFDANFAKNR

SEQ ID NO: 77782 - protein, 356 aa, unidentified
MSGLKHQKEKRSMDHFAGLDVSVKDTSVCIVDDTGKIVREVKVASEPAALLAVLKNPAYHFKRIGLEAGPLSQWLFSALAEADLPAICVETRHMRAALKAQINKTDRNDARGIAQMMRVGLYRPVHVKTLRSQKLRMLLTHRKLLQSKAIAIDNDLRGTLRNFGLKVGMVGTVRFETRIKELVENLPDLAALVEPLLIVRRTLREQFCILHRRLLAIVRDDEVCRRLMTTPGVGPVVSLTYRATVDVPARFRKSKSVGAVFGLTCAKYQSGEVDWDGRISRCGDEMMRAMLYEAAQSMMRSKKWSWLKAWAMQIARRRGMKKAIVALARRLAVIMHRMWVDGTEFCWTREPAAAAA

SEQ ID NO: 77783 - protein, 356 aa, unidentified
MRVYTNQHRFYCGGDLHARTIHLCILDQAGNVVFDKNIAARPETFLKAIAPFRADIVIGVECMFAWYWLADLCAVEKLPFALGHALYMKLIYGAKAKNDKIDAGKIARLLRGGNFPLAYVYPKGMRETRDLLRRRTYLVRQRAALVTHLQILNGQYNLPPFPKRLAYAGNRQELDIAHRFADPSVQQSATVDLAVIDVLEEHIDALELYLARTAKVDDLQTFYRLRSIPGVGKIIALILLYEIHDIRRFPTEGQFLSYCRLVRCRHESAGKVLGSGGKKIGNAHLRWAFAEAACLFLRESERSKKWQAKQLKKRSEGQVLGILAARLARAVYQMWRKGEAFDEDRFWSSQGKCVEV

SEQ ID NO: 77784 - protein, 366 aa, unidentified
MHNTTPDVRVTVGVDTHKDLHVAVAIDALGRRLAELVVPATAAGYQQLHRWAHDQGQVDAFGVEGTGSYGAGLARHLRRAGSRVIEVNRPDRATRHRKGKSDPLDAEAAARAVLAGTATATPKDDDDQVEAIRLLKLTRDSAVKAQTQAVNQLKAMLVTAPAQLRESLAGLGLITLLERCAAARPGNPTTPQSAAKHALRLLARRALALRAEAKHLRELLDGLTAAAAPTLVELTGVGPDTAAALLIAAGDNPHRLHSEAAFAALCGTNPIPASSGKITRFRLNRGGNRQANAALHRAIITRMHWHEPTKAYVARRTAEGKTKPEIMHCLKRYLPRQVYHCLVPRTPLDPVVQQPRDPRDDLANAA

SEQ ID NO: 77785 - protein, 323 aa, unidentified
MTRIICGIDVASRSLEARVGQQGAAGSFANSPEGVAALDAFCRAHQVELVAMEATGGYEQQAFAQLWGQGLPVAILNPRAVRQFAQSMGRLEKTDGIDAGMIAWYAEVNKSEPICVAPENQQHLRALVTRLRQLTEMRAVQLNQQRLVTDRAVEAGFRKMLAFLAKQIGKLEQAIAALIDQDPLWRELNQAFRTIKGVADRTVARLMAEMPEIGTLSNKTVSKLAGVAPLARDSGQYQGKRAVRGGRPAVREILFIVASVVGRYEPDFIAFQQRLRAAGKPPKVVRIALAHKLLVRLNAKAREVRQQMTALEPDPAVLLAESR

SEQ ID NO: 77786 - protein, 366 aa, unidentified
MTEITRALIARVGVDLSKRVYQVHAVDRAGRRVLAKSFAVDRFYAWCAELPAGCLVAMETCGGAHHVARRLRLLGLDARLVAAHFVTPYRMAGRSGKNDANDAAAICEAAGRPQMRFVPVKTAQQQGLLALHRLREGYKEERTALISRIRGLLLEFGLSYAKGPEALRPLLAGVLEDASNELPGIARLALQRAHEQWIALDEQLRWCDQRVAEHVRTDAQASAAAKLLGIGPLTASALVASVGDFKQFDSAAQFGAWLGLVPSQNSTGGKARLGRITKRGDDYLRTLLIQGAKSALMTAGKRSDRISQWLVQLRLRAGWQKAVVALANKNARILWAVLSRGANYDPDHLPVPPAARCCLPRVTAAT

SEQ ID NO: 77787 - protein, 345 aa, unidentified
MNKISVIGLDLAKNVFQVHGIDTDDEVVVRKQLRRSEIRKYFARLEPCLIGMEACGGAHFWSRELTRLGHTVRMMAPAFVKPYLKSNKNDRNDAEAICEAVQRPSMRFVQPKLPEQQAVLHLHHGRQLLVRQRVALSNHMRGVLSEYGIVVPQGVKVLSRHLPEILEDAENALPMLTRHLLAELKAEHDQLIERTDRIEKQLKAWHANNAVSQRLASIPGIGVLTATALAATVGEGQDFKNGRQLAAYLGLVPRQSSSGGKDRLLGISKRGDSYLRSLLIHGARAVIHHIRRRLKAGKPGGNPWVEQLLQRCHVNEAAVALANKMARTSWVLLARKETYCPAYPV

SEQ ID NO: 77788 - protein, 381 aa, unidentified
MPSASTHRKRQLDELACVHPNAAGLDIGSEEIVVAVPPDRDPQPVRVFQTFTADLHALVAWLVACCIDTVALESTGVFWIPIYELLEAAGIVPYLVNARHVKTVPGRKTDWNDAQWLQKLHARGLLHASFRPDAEIRTLRTLARYRSELVERRAPHINHMIQALKHMNIQLNLVLSDITGVSGLAMLRAIIAGERDAERLAEFRQPGCKHSFAEIVKALTGTWDDAQIFILTQSAELFDYYSTKIAVCDGQLEQQYQAMESRWEKDAPLPDLPPAKGESKSKNAMNFNARAQIARVIGVDLVAVMGLSAITVQTIISEIGTDMERFPTVKHFRSWLGLAPHNDISGGKVLRSRTMNVHSRANQAFRQAAHSVTRAHSSIGA

SEQ ID NO: 77789 - protein, 364 aa, unidentified
MQESTHIGLDVHKETIAVAVLRPGTGECDERVIANTPAALRKLFARYPDRAALRTCYEAGPTGYDTWRLLADLGVPCEVIAPSLIPRRSGAHVKTDRTDARNLARLHRAGELTAVRVPTPAEEALRDLVRAREDLKDDRRVARQRVKSFLLRYGKRQPTGSGRWGVGYELWLQALSFEEPAAQAAFDHLMGAASVRAAQLAAIEREIEAAALSGPLAEPVARLRAFRGIDTLTALTVVTETCDFARFPSAASYMAFTGLVPREHSSGAVRRQGSITKAGNAHVRRVLIEAAWAYRHRPAVRGKLAVRQEGLPPELLAYSWKAQQRLHATYRKLAARRGANKAAVAVARELSGFVWGAMTERTGA

SEQ ID NO: 77790 - protein, 388 aa, unidentified
MIQVDDLSRSLIAFEQISTLVIVVELSQSSWLAAGVVPGIERRPLKKLDPDPTALLHLVEGWRDRATKAGRAITRTVLAFESGRDGFWLARWLRVRGVESFVMHSTSVAVSREPRRAKTDRLDTEMLIRVFLGWLRGEPRHCKMVAIPTLEEEDARRPSREREILVGERTRIINRMKAALVRLGIRGFKPGLLTAPQKLDALRTPEETPIPPNTLDEMRRDMARLAWVREQINAIEQARLERLERAPATGRHAMVRMLARVIGVGVETADMLVQEVLSRNLRDRRAVARYAGLTGSPDESGSKRREQGLSKAGNARVRRGLIQLAWRFLRFQKDSALAQWYRGRTEDGAGKRKRTMIVALARKLLIALWRLVTIGEIPVGVALRTAVA

SEQ ID NO: 77791 - protein, 451 aa, unidentified
MTLHLGIDVASRESHRASLTDSTGRFVWRNWKFTTRSSDLEELWQMVLEAGDDEPVIVVLEPTRNAWVPLAAWLRAAGARVELVPAEQSADLRRYYNKHVKNDRLDSELLARLPLLHPEGLTTTQTLGPADSLRRAARRRVSLITRRTACLQRLDALLELLGPGWFDALGSAAGKTALVVLQRYSDPNALIRFGRTRLTKLLIANSRGMWREDKADELLAAARESLALWSGGGLDFAELAEDIATEAMLVVTLSEQIDVIDERLARLYELADPDGTVASAPGLGPVLAPMILGRLGDANRFHDLAAVRRYSGLIPAVEQSGVSDKRQRITKAGDQVLRYALFLAADQARRVDPTLAARYNRLRSAGKHHNSALCTLGAVIITRIAACWRTGQHHQLRDLDGRPITAEEGRKICASLNPIPIGTGRDKKESQGAPVTGPSTTQPTTRRRRTA

SEQ ID NO: 77792 - protein, 458 aa, unidentified
MYRELQPFREALSRELKASLFPAVAGVDPTKLLETYLDRLTMFTGVDVADHTFTALALDAGREILGSLDGCPNEPAGFERFVTWARDLRDQHGLRIIAVAGETTGIYYWALWDFLGEQPDVVRVLYNPRTTENMGEVLSKKVRNELVDALLLAEQLRLGSTPEVLLQDNADLLTARYYSRSARDLAQQINRKKNQLRALLRAYCAPVCQVFPGEKLHHPAVYALLQEHVFPADFVQAGAEALTTILTSHCRGVFGSAQVEQLLAASRQAISRPIGQDAIRSLVRAHIHDVTAFQERKALYLKAGYALIKDRKETELLRTVKGAGVSNTLALVSEIGDVARFSSGEHLASFLGLTTSKHISGATLFQSKRITKQGSPNGRYAAVNVAHHLTRWVPRYEEMYKRIKARKPPRKGHFIALVAVGRDFVSNVLYDMWHNQRPFFVEVSDYRAYRQKHSLAND

SEQ ID NO: 77793 - protein, 395 aa, unidentified
MFIVGIDIAKRSHEAIIIAEDGQVVRKAFSFRNNCTGYNLLLEQVRRLTLVKSQIVFAMESTAHYWLALYARLLKDGYAVMVLNPIQSHSLRELYIRKAKTDARDSLIIADLVRFGRCKASNVPQDKILALRELCRSRAYLVDMAADLKRKLIALLDRIFPEYEFLFDSVFSKASIAVLSKYSTPQKVKNANLRKLTDILMESSNGHFGEWKAHQLKEAACSSFGIDDSDGVYSTLLGMFLEQILPLTAQADSLEKQISVFFQEFNNPLTSIPGVGTVLAATILSEIGDITRFSSADKLLAYAGLDPSVKQSGEFKSNQNRMSKRGSPYLRRAIWLASTVAVHRDPMFQTYYEKKISEGLHYMNVIGHVSRKMTAVIFAVLRDGQPYQPILQSAG

SEQ ID NO: 77794 - protein, 352 aa, unidentified
MTETSPDVSLTIFAGIDTHKDTHHAAIIDYLGREIADRQFPATATGYQALLAWLNGTGITARVGVEGTGSYGSALAMVLQAAGIDVVDVDRTDRRSRRFHGKSDTLDAYSAARLAASGGARTIPKAHNGDVEAIRFLHNTRRSAVKSRAEAITGLKSAVVNAPETIREQLRPLTSTTLVKACALLRPGTVAPGEINAAVKTALRSTARRIQFLDQQIKALEAHLKVLIDATATGLVTTFGVGYETAAQLLITVGDNPHRIADEAAFASLCGVAPIPASSGKTNRHRLNRGGNRQANRALHIIVMARLKHDQRTRDYRDRRLAEGKTKRDIIRCLKRAVAREMFQLLTHKTTA

SEQ ID NO: 77795 - protein, 401 aa, unidentified
MIDIRDVAVFLGLDVGKGEHHATGLMPDGRSVVDKPLPNSEPRIRALLDKLTAKYGRVLVVVDQPASIGALPLAIARDAGCEVAYLPGLTMRRIADLYPGEGKTDARDAAIIADAARTMPHTLRSIELTDETTAELHMIVGFDDDLAGEVTRVANRLRGLLTQIHPHLERVLGPRIQHPAVLTLLEQFGSPKAIRKAGRRRLITLLRPKAPRMAERLAEDIFTALDEQTVVVTGTDAAAVIVPKLAKNLAGLLDQRKELASDIEELLKSHPLSELLTSMPGIGVRTGARILIDVGDGTAFPTAGHLAAYAGLAPVTRRSGSSIRGGSPSRRGNKHLKRAFFLAAFASLSDPASRAYYERKKAEGKRHKQALMCLARRRVDVLFAMLRDGTFFEPQAVPQAA

SEQ ID NO: 77796 - protein, 345 aa, unidentified
MQVTTIGLDLAKQVFQVHGIDAEGAAVIRKTLRRANVLPFFAELPPCLIGIEACSSAHHWAREFMKLGHTVKLMPPSYVKPYVKRGKTDAADAEAICEAVRRPTMRFVPVKSPDQQAVLMLHRARALLMRQRTMTVNALRGHLAEFGIVAGQGAKNLRELIERVFAEHQDQPELPRLARIALGTLVMQLNDLQAQVREIEVELLAWHRTSEASKRLETIPGVGFITATAIAATVTDPTHFKSSRQFAAWLGLTPKQNSSGGKERLGGISKMGDRYLRTLLVVGATSVMRYARGKGAVSAVWINKLLAKKPARLVSVALANKTARIAWALLVRQENYRAPTMPADA

SEQ ID NO: 77797 - protein, 346 aa, unidentified
MSGQYVGRQIVGMDLHRRRSVLVRMSETGEHLETVRISNDPEYLRQVMARAGEHPEVVLEATYGWYWAADCLAELGARVHLAHPLGVKMFSLRRVKNDERDSADLADLLRMGRLPEAWIAPPATRELRGWVRHRAKLVGLRSNLKCQIHAILAAAGVQVPMSDLFGAAGQQLLATVGLAAESRARIDSLLRLITALDFEVELFAKLVAGRLRTHPGYQAIQAIPGVGPVLAAVFVAEIGDITRFHRPAQLASWAGLTPKHHESDTTVHRGRITKQGSRLVRWAAVEAVQRVGAHTGLGQVREQVGARRGRNIGVVAAARELTELVFYGLRDGHIRRLPAPPHTPAA

SEQ ID NO: 77798 - protein, 343 aa, unidentified
MQIHSVGIDLGKTTFHLVALGVAGKVIVRQKFNRKQLLVYTANVPASLIGLEACSGAHFLGRALRKQGHDVRLIPAQFVKPFVKSNKNDFIDAEAIAEAVERKNMRFVPIKTDDQLDLQGIHRVRDRLICRRTAVINQLRAFLLERGMVFAHRPANLKAAMADILENAEADLTPQMRSLINMLWDEWKLVEEQIKKLDLELERISAADAGCTRIRQIPGIGPVVATAIVAAIGNGAAFHKGRDFAAWLGIVPRQYSTGGKAKLLGISKRGNIYLRKILIHGAPAAVLRIKRDRAPIGPWLDALDARAPKNVVVVAMANKLARIAWAVLSSGEDYRPMGNTVAA

SEQ ID NO: 77799 - protein, 353 aa, unidentified
MGIVVALDVHRKQITYKTLDRGSGELRRGRIAPASRADVRAWLAQFAGCQAEFALEGTTGWRFVVEEIERAGHTAHLADPAETSARRGRKRRAKTDNTDCDLQLRLLLAGELPESWIPPAHICELRTRVRMRKTLIDQRTAWQQRIQAQLFQQGVPAGQRLRSQAGREALAAVELSPAGRELVVLGLRMIDALDRELAPLDRQLHAFARRQRGCRALIAGLYGVGPVSATAILAELGDARRFSSSDDAVRHSGLDVTVYQSDSKRAAGRLSHEGPELLRWALFEAAVSATRVSSPDHAYYLQVAERLDHTRACLSVARKLCRRAYHILRELGDEALAPVDCDPQAEEGIAAAA

SEQ ID NO: 77800 - protein, 374 aa, unidentified
MDDHSVAYVALDTSKLRNAVAIAEAGRDGEIRYLGEIDNAPAATAKLARRLAKKHAVLTFAYEAGPTGYGLYRQIKSLGHDCIVVAPSLIPQKPGDRVKTNRRDALSLARQLRAGDLTAVWVPDPHHEAVRDLTRARGAAVRDQRAKRQQVSALLLRLGLHYPGKTTWGKAHMAWLAGQKLAHLEQRIALEEMLHAVRQAGDRIARLEHAIHTAVPDWSLAASATALMALRGIEFIAATTLLAEIGDLTRFRTPRELMAWLGMVPSEHSTGERIRRGAITKTGNRRARSVLVECAWSYRHPPRVSRDKLARLEAAPPAVRDIAWKAQSRLTARYRALRRAGKLDVVAITAVARELAAFIWAVGLAVGSGRTPEV

SEQ ID NO: 77801 - protein, 342 aa, unidentified
MTAVGVDTHKATLAACAIDDLGREIVEETFSNDPAGHAAFIAWASSIEPEATIGIGGSFSFGAPLARAVQSVGLCVREVPPHLSRFERRRTRRPGKSDPGDALAIARVTARETNLPPIRLPDRTNEIRLLLEAREDLIGETTRARNRLHAHLRVLLPGYGGRVANLVAARHQTMVTRLLRANATVQGELARSLLDRLPRLERECDVLTRRIEALVDSHPLLALPGAGPITVARLIAEAGDMRRFRTPDAFAALAGVAPIPAGSGQVQRMRLNRGGNRQLNRALHVIAVTQSRFYPPAKAYIARRIEADGKSRREAIRALKRQLFRPVFRLLVEGSEVRLDAA

SEQ ID NO: 77802 - protein, 364 aa, unidentified
MFYLGIDQHSKQLTVNLRNEQGETAVKRQVSTKWNRVRAFFDDLRREVEPDGGFMAIVEVCGFNDWLLKMLDEYGCQQIVLIQPEKPTKRKTDRRDASQLAELLWVNRDRLAAGRKVNGLRRVQPPNEQDAADRQLTTFRKRVVTSRTRTINKVKQILLKHNLLQECPTKGIQTKKARAWLAELPFEKIDRLELDMLLEQWDLWNTQLEELDKQIASRQAEHPTATILATVPGAGTFSSLALASRIGPIERFAGPDSLANYWGLTPGCRNSGKVTDRLGSITKQGSAMARFVLGQMVLHVLRKDPHMRNWYRRIKKRRGTKIARVAVMRRLATIIWRMVKYEQPYVPGGPEHVKRTQVTMAALN

SEQ ID NO: 77803 - protein, 352 aa, unidentified
MLIIGCDYHPSMQQIAFVDTETGERGERRLMHRDGEAERFYRELKQRRVEVRVGMEATGYARWFERLLAELSFELWIGDPARIRARRVRKQKTDRQDAQLLLRLLLEEDGFPRIWVPSPENRDLRQLLWHRHRLVQMRTRIMNQLQAVAMNEGLRRKRALWSEAGRKQLESFLLAPWATRRRKDLLELMDRLNPTIRELTGAVEKEAENKPEVQWLMSHPGVGPLTALAFVLIIGTPQRFHCGKQMGSYLGLIPCEDSSADRQRLGHISKQGSSLLRFLLVEAAQVAARVDAEWRRRFLHLAMRRGRKIAKVAMARRVAVGLYWMWRKEWDYQQVVKFGSHVGQLELRHGVQ

SEQ ID NO: 77804 - protein, 391 aa, unidentified
MINIGIDVGKFKHCAAVLDDKTGEILIQPFFFRNDQDGFELFYSKTKRYVHRKHAVGMEDTGHYMINLTNYLLDKKLTVKYINPRSTSLRRKELGISAKNDKKDTLLITEMLSEKQFWRSVSRKTVELDKLREITRLYHQLQEQQNQDMNRLQRALDIVFPEVNKLYWTRYSKIYMQFLATYSSASSIASEDIRNLRKALKTEGRGRQCKVTAEDIKDLAKRSVGDDNFAVELEVKSVIAIINARAEQIHTLEKKIEEFSHQLNSPIVSIPGISHITGMTILAEIGDIKDFPEAAKLISYAGMEPLVYQSGKYAAAHMPISKHGSRYLRKALYQAVFTVCTYDPTFQAYYTKKRNQGKSHRCAQGHCVRKLLRVIYKLLITDSSFDSALIH

SEQ ID NO: 77805 - protein, 430 aa, unidentified
MKSNTQNAKIEAITEKTLVLGIDVGSEMHYARAFDYRGIEYSKKPFKFSNTEAGFVTFKEWILDLKERHEKDKVVPGMEPTGHYWFNLGKFLQDNEMKPVLVNPHHVKKSKELDDNNPTKNDRKDPKVIAGLVREGRYMIPYLPDGVYADLRTVSNIRFQLQAELTRIQNRISRWFNIYFPEYKTVYGKPDAKSGILILKAAPLPEDILTLGIDGVNQIWRDAKLRAVGKARAKTLIEAAEHSVGSKEGAVSARMEIRMLLEDYESRNIRLREVMTLIEGLIKQIPMAEKLLEIKGVGIRTVSGFLAEVGDISRFNTPKELQKLAGLALVESSSGKHKGETTISRRGRKRLRYLLFEVAMSLVAKNPEFRELHNYYTTRRLNPLKKMQSLMAIAAKLIRVFYAMLTKGVDYDPKKMVSDIKRPAVYLQAA

SEQ ID NO: 77806 - protein, 360 aa, unidentified
MNNVAGIDVSKGKSMVSVLRPFGEVVAKPFSIGHTGSELKELADYLKSLDGETRVVMEHTGRYYEPVARFLHDEGVFVSAVNPKLIKDYGNNTLRKVKTDKADSRKIARYGIDNWAELRQHTPMDTIRMQLKTLNRQQSLYTKTKTMMKNNLIALLDQTYPGVNALFDSPVREDGSQKWVDFATAFWHVDCVRNMSLTAFAERYRKWCKRHGYNFSQSKAVEVHAGAQDLIAMLPRDALTKTMVRQAIDALNAISASMERLKAEMQALAAQLPEYPVVMAMHGVGDSLGPQLMAELGDVTRFTHRNAITAFAGVDPGADQSGTHEAKSTRVSKSGPPELRRALFLVMDCLLKSIWKRTAV

SEQ ID NO: 77807 - protein, 370 aa, unidentified
MGPAVEPQLREAPVMSEGSWVGLDVHARSVVAGVIDMGSGEVRSLRVPPGSEATVAWLKTLPAPVRVVYEAGPTGYGLARLCAEAGISCVVAAPSKIRPAADRVKTDRRDAERLARLLRLGEITPVRVPGPVEEAARDLVRAREDARGDLMRARHRLSKLLLRHGAVYDATAWTRAHDAWLRKQRFQDGPLAIVFDECYSRMIDAKTRRDTLDKAIAELAASEPYVDVVERLVCLRGVSTLTAFALTVELGDWNRFRPESLAPFLGLTPSESSSGERRRQGGITKTGNTHARRLLIEAAWHQRSAPRLSVTLERRRTGKSLAVRAQADSSARRLHGRWNALEARGKPRLIVVVAVARELAGHCWALATME

SEQ ID NO: 77808 - protein, 409 aa, unidentified
MQAFCGIDWAEDHHDIAIIDDAGTLLARARIGNDPAGLRRLLQLLANAGDNPEQPIPVAIETARGLLVACLRATGRPVYAINPVAVARYRERHTVARSKSDQRDALVLAHILRTDAAAHRPLPADSERAQAITVLARGQQDAVWACQQLANQLRTVLLAFFPAAVAVFCVKHVGLTSREARTVLAAAPTPTRAATLTRAQLRALLRRTGRQRNLDQWVQRLQAAFRAEQLHQPPLVEQAMGQHTAALVAQLSAACRAAEQLAEATTTTFRRHPDAWIITSLPGLGELTGARMLAETGDDCARFADARALKAYAGAAPVTRASGKRRFVMARKVKNQRLASVGYVWAFAALTASPGARAHYDRRRAAGDWHPAAQRHLFNRLLGVLHHCRTTRQVYAEDKAFPTAQPATA

SEQ ID NO: 77809 - protein, 388 aa, unidentified
MDVLYQSCAGIDVHQATVVVCILHGPLTSTRPKREMAQFDTTTKGLKACHDFLTQFHVEAVGMESTGVYWRPVWHELCDDFELILAQPAHMKAIPGQKTDKKDAHWIAQLTRIGLLPRSFVPDETIQELRELTRQRKHYVESRNRETNRIHKILQSGGIKLTTYIEDIMGASGRNLLQLLIDETPLTPRMIHQSVYTSLKRKVPQLLEALDGYFSAHHRFMLGQSLEIYDFYQKQIDCLEERINGYLNLYERPVEILDSIPGIDLITASVIIAEIGVDMSQFPTAGHLASWAGLCPGNNESAGKKRSTKIRHGNSYLKRCLCQAVFAAKRQKGSPLAERYYQIQSRRGPQKATIALAHQLLKIAYILLKENLTYQEFVLQKRLLETSQ

SEQ ID NO: 77810 - protein, 429 aa, unidentified
MRTESTPGARGPVFCGVDTHADSHWLCVLDWRGRKVLSRQFPADAAGYEALAGAIAAAGEPACVAMEGTSSYGAGLTRHLASLGMPVREALSPARMQRRRPGQGKCDEADAERAARAAMSGSKLGTPKSQDGWVDGVRCMLAARSGAVKARTSAINTARSLLTTAPEGLRSRFRGMGGPRLMEELPSVRAEGALGAALGALADLWEAARDAALDMERAIEASLEENCPALLAMYGCGPVSAAKLAVAAGDNPGRLRSEASFAAICGACPIPASSGKTVRHRLNRGGDRQANSALHEIARQRVMRDPETAEYAERARGRGKSDREVMRCLKRYVAREAYRALMHPHEIRRPEDASELVAARRAARVSQVRAASILGTSEKYISMLERGQRELKPIRRAYEAWVEAGLPLDWDRRAFEAERKMDSKKHLAK

SEQ ID NO: 77811 - protein, 304 aa, unidentified
MSHNLNDAVAVVGIDIGKNSFHVVGLDSRGAIVLRQKWSRGQVEARFANMPPCLIGMEACVGAHHLSRKLRTLGHDARLMPAKYVRPYSKGQKNDFRDAEAIAEAVQRPTMKFVATKTSEQLDLQALHRVRERLVSQRTGIINQIRAFLLERGIAVRQGLRFLRAELPRLLATPPDVLSPRMVGVIEGLAEDWRRLDERVEHLSGEITALARQDAGCERLVSVPGIGPIISSAMVAAIGTGEAFSKGRDFAAWLGLVPKQMSTGDRTILGKISKRGNRYLRVLFVQAAWVVLIKPQSWERHGLR

SEQ ID NO: 77812 - protein, 365 aa, unidentified
MKWLVTVSSVLRVVGLTVAATPKGVMEVTMAGREGSATSAEVVLGVDTHLDLHVAVALDQLGRRLGALTVPTTAMGYKSLVSWAEGFGPVRCAGVEGTGSYGAGLARHFKIAGIPVMEVERPKRRHLRRNGKSDPLDAEAAAKAVLAGETAGEPKSADGRVEMIRALRTARHSAVKARSQAANQLQALVVTAPETLRKRLRGLSTRELVAVAARFRLGSDPAEVQTATKFALRSVARRHRQLSEEIAELDEQLDQLVADAAPGLVSLTAIGASHAATLLIVAGDNPERLSSEASFASLCGASPIEASSGKVVRHRLNRGGDREANRALHLICVARMARDQRTREYVSRRTAEGKSKREIMRCLKL

SEQ ID NO: 77813 - protein, 374 aa, unidentified
MDKSSTLFVGLDVHKDSIDVATAEAARDGEIRHVGAIGGDLGALDKALRRLTSRGQPLHVVYEAGPCGYVIWRHLHAQGMRCDVVAPSSIARPSGDRVKTDRRDAMLLARLARSGDLAAVRVPNDGDEAVRDLVRAREDAVREQRNARHRLKALLLRNGIAYAGRSAWIAAHLRWLSTLALGHAAQRIAFQEYLHSITECTARIARLEQAMRDALPTWHLRAVVQALQAMRGVQLVAAMTLVAELQDFLRFDSPRQLMAYVGLVPSEHSSGPKRRQGSITKAGNSAARRMLVEIAWHYQHSPRVSPVIAARHEGLASSVTDIAWKAQLRLHSKFKRLLARRVLKNKAVVAVARELAGFVWAIGQDVQRCSVTQH

SEQ ID NO: 77814 - protein, 384 aa, unidentified
MPQFDDLSRSLVALDQNATVISVVELSRDKWLVGAIVPGITRDPLKALVPDPQALIKLLYRWRDEAVKAGCKIKRIVVGFEAGRDGFWLARWLRARGIEAYVIHPTSIPVSREQRRAKTDRLDIALLKRALLGWLRGEKKHCTMAAIPTLAEEDAKRPHREREQLVGKRTGIVNRMKAALVRLGIRGFNPKLRKAAEQLATLQTPEGTAIPPNTLAELKREMEHLCFINQQIKQIEDERLRDLHDAPKDAHHVAIQTMLQVKSLGIETADMLASEAFARQYRDQRAIARYAGLTGSPDESGRRRREKGLAKAGNARIRRGMIQLAWRFLKQQPDSALVQWYRARVAAGKKSKIAIVALARKLLVALWRLVTIGEIPQGLVVDAA

SEQ ID NO: 77815 - protein, 394 aa, unidentified
MTLYIGIDVAKTFHIACIINSQGQMVAQLRFDNDAAGFHELQQTIQRLALPEMGPVFCGMESTGHYGIALRDFLTRLGYPVQVFNPLKVNRFRDFYIQPHKDDYRDAFVIAQMLRYGERAPYTPLQPTLRALKQLTRYRTSLVRARAKVKTQIRAILDEVFPEYQQTPLFVDAFGASSLALLKRFPTPQELVTISQEALARLLSRNSRGRLSSQRAALILEKARGSVGSPASARAFATILPDLIDELEILETRVAHFTAKIEAQLAETGQTLTSIPGIGPVFAATILGEIGDITHFPSADALVAYCGFAPRRYQSGQFTAKNMHLAKRGVPQLRYVFYRAALVSIQYNPDLAAYYQAKVRQGKPKKKAVIAVARKLIRIVYALLKSQAAYVSPG

SEQ ID NO: 77816 - protein, 336 aa, unidentified
MDSPRVFQVHGVDERGRMQVSKKLSRAEVLKFFAQLPACQIGIEACGGAHYWGRELGRLGHTVKLMAAQFISPYRKSGKKDANDAEAICEAVGRPNMRFVGIKSEEQQAVLMMHRVRTLVVANRTALVNQVRGLLGEFGVVIPIGIRRVRALLPQILEDAENGLPILARQILAELLEQLHHLDGQIEHYEHEFEALAAQSEPAQRLMQINGIGPITATALVASVGDARVFSNGRQFAAWLGLTPRQYSSGGVTRLGRITKRGDRYLRMLLVHGARALLRFVNRKTDAKSAWARALKERRHVNVAAVALAAKHARIIWALLAKGTAYRQPQEVTAGA

SEQ ID NO: 77817 - protein, 420 aa, unidentified
METPQVSFKQVVSRGCGLDVHKKVVVATIDGEGLKKQTREFGTVTSSLKELRDWLLENGITHVAMESTGVFWKPVYNILEPAGITVWVVNAAHVKYVPGHKTDKKDSAWLCKLLLAGLLKPSYIPAKEQRELRDLTRYRTKLVQSNASNKNRIIRILEDANIKLSSVLSSTSGAVGTKLIDKICDGEEITMQDVDEVYHKKLAATKEEIFEACQGFITEHHVYMLQIIRQEIAGTQQTIESLTQRIKEVLSPYENALELLKKVPGISSKSVEDLVAEIGLDMGVFPTEKHLASWAGMSPGNNESAGKKKSGRTTRGNKQVKAVLTEIAWAATRTKNTFYHARYHKLAARRGKKRALIAVGHSILKSVYHILSDMSEYKELGAEYLISRTEAKRKAYLKGELGKLGYVVELKEQPPAQKAG

SEQ ID NO: 77818 - protein, 402 aa, unidentified
MNCVGIDVSKGKSTIAVMRPFGEVVVSPFEVCHTVNELSELARQLKSLDGETRVVMESTGNYHAPVAWLLHDAGFYVSVVNAMLVHDYGNNSLRRAKTDKKDAVKLANYGLDHWLTLPRYVPEEDTRLMLKTCYRQYQQYSKVQTMLKNNLISLLDTAFPNANRLFTSPPRADGSEKWVDFVATFWHCECVCGLSEKAFTAKYQKWCKKHGYNFSEDKALDIYASAFAHFGVMPKTDTAKLLVEQAISQLRATSTALAALKQKMQSLAASLPEYPVVMEMFGVGPTLGPQLMAEIGDVRRFHSKKALVAFAGIDAPPYQSGQIDVRSRSISKRGSASLRRTLFLVMGVLLQCAPMDEPVYQFMDKKRSEGKPYRVYMMASANKFLRIYYASVKAYLDSLEHD

SEQ ID NO: 77819 - protein, 430 aa, unidentified
MKSNTQNKKIEAITEKTLVIGIDVGSETHYARAFDYRGIEYSKKPFSFSNSEAGFEMFKAWISDIKEKHEKDKVVPGMEPTGHYWFNLGKFLQDNEMKPVLVNPHHVKKSKELDDNNPTKNDRKDPKVIAGLVKEGRYMIPYLPEGVYADLRIASNMRFQIQSELTRIQNRISRWFNIYFPEYKTVYGKPDAVSGMMILKQAPLPEDILTLGVEGVNQVWRDAKMRAVGKKRAQILIEAARHSVGAKEGSMAARMEIRMLLEDYESRNNRLQEVMTMIEELVKQIPMAEKLLEIKGVGIKTVSGFLAEVGDISRFNSPKELQKLAGLALVENSSGKHKGETTISRRGRKRLRYLLFEAAMSLVAKNPEFRELHNYYTTRRLNPLKKMQSLMAIAAKLIRVFYAMLTKGVDYDPKKMISDIKRPEVYLQAA

SEQ ID NO: 77820 - protein, 323 aa, unidentified
MNRQYAAVDLHLARSLIVREDQAGTELAVERIDNSPMNLAAALADAGPNPEVAIEATYGWYWAVDVLQELGATVHLVNPSGLGQSWEGRRVKNDYKDCRELIDRMRLHKLPEAWIAPPELRELRELVRYRAKLVNIRTGLKAQVKAVLAKHCLRPPVKDLWVGHRGASFLDELALPDAYITRIESLRDLVGVVNREVAMLERTIHGRLRDDRGYRAIQHLEGVGPVLAAVFCAEIGDVCRFSGPQALCSWSGLTPKHRESDGKAHRGRSTKQGSRLVRWAAIEAISRRGINVARVAVARKLLTLVYYGLRDGEIRCLAGAEAA

SEQ ID NO: 77821 - protein, 369 aa, unidentified
MTTMTYVGLDVHARTLVAAVARPGREPARVVGRIATTLKAVDGLLERLRREYGEELRFAQEAGPTGYWLHRHLETRGVESVVVAPSRTARAPGDRVKTDDRDACRLAEQDRAGGLTEVWVGDAAHEAMRDLVRQRSVAVRALRRERQQVMSFLLRQGRHWPGKQWTKKYRAWVAAQKFTAAEQAWLWEEMLAQVALGEARLARVASAIEQHVANWAQAPVVGALQSLRGIALINAVVLAAELGDLRRFASARALMAYLGLVPSEHSSGEQIRRGPLTKTGNRRARTALIEAAWQYRWRAAGVGAALRRRRASQPPSVIAIAVKADQRLCQRFARLARRKLVVVAVTAVARELAGFVWAIGQVVAPMPPR

SEQ ID NO: 77822 - protein, 391 aa, unidentified
MTILVGIDVAKDKHDCFFMNSEGEVLAKPFTIFNNKEGFDFLYEKIQSVSSSDNIKVGLEATGHYSYNIIGFLLNKGLATFILNPLHTNLYRKSLSLRKTKTDKIDSKTIAMMLLSDVSLKSYSDISYHNEDLKSLTRYRFSKVEERAKLKTSLSRLAQILFPELEKLVPTLHMTSIYQLLEEFPSASAIASVHLTRLTNLLSKASKGHYDRETAIKIRDAAKNSIGSNMPAKSLELKHTIKLIRALTIDIGEIEAEISKMMDKIASPITTIPGIGRNIGAMIISEIGDFSRFSSPDKILAYAGFSPSIYQSGKLDNCYAHMEKRGSRYLRYALFHAAKLVCHWDKTFADYLAKKRAEGKHYYVAISHAVKKLVRVIFHIEKTKQAFLKAS

SEQ ID NO: 77823 - protein, 350 aa, unidentified
MLIIGCDLHTRYQQIAMLDKETGEVVEHRLEHESGETRAFYASLPCGAVVGIEATTPAHWFERMLTEFHHELWVGDAAQIRAMSVRRQKHDPRDAWHLMDLMASGRFPRIWTPSPRERDLRQLLAHRDKLVRIRTAVKNQLHALALSQGLCRGHRLWSARGQAELQSLTLLPWAGRRRQDLRELLTPLDTTIAELDKVVAREAEAREEVKLLMTHPGVGPVVGLAFVLTLGAIERFPRSKQVVSYLGLNPREHSSGGRQRLGRISKQGNVMMRWLLVEAAQTAARFDPELHRRYHRLKFRRGSSLAKVAIARQLAVRLYWMLRNQKGYAQLVRMQGSPGSGVVDPGPSTN

SEQ ID NO: 77824 - protein, 334 aa, unidentified
MKEITTLAIDLAKRVFQLHGTDAQGHARLCRQVRRAQLPQLLATLPRCTVVMEACASAHYWGRVASSLGHTVRLIAAQHVKAFARGQKNDRNDAEAIACAARQPGLPSVALKSQEQQAVLAVHAIRERLIRERVALVNQLHGLLGEFGVVLPRALQALKRTVLQRLDEGGVPPLLQGVLREQLEHLRALEAHLSATTKKLEQLARHSEPCQRLMRHRGVGPIIASAFVAEIADAKAFHNGRQVAAWLGLVPRQHSSGSRIQLLGITKRGNSYLRKQLIHGARAALRWAGRSEDPVSRWALNVQQRRGFNRACVALANKTARHLWASLRYEPALA

SEQ ID NO: 77825 - protein, 343 aa, unidentified
MKQVAAIDVDQKLLVTTLGRMYDDWSPELYAQKTFANTQKGFEAFLVWVKNNTVNEVSVRFVMEATGVYHEGLAYYLDDQGEEVTIVLPNKISNYMRTLETKTITDKTASEAIARFGLERKLELWKRPKDIFKKLRQLSRERDQLITERTMVKNQLHAEQAEAEPNKSSITRIKARIKMLVKQEQEIKAELSALVSSNDEIKKIVVLLCSLTGVGILTATSVLGETNGFELIRNRRQLASYAGFDVKEKQSGTSVKGKPKISKKGNKYLRKAMHLPALSAIRHDERFKAVFRRIVSRHGIKMKAAVAVQRKLLEMMFTLYKTNTPYNKEYLINKEMPTEALSA

SEQ ID NO: 77826 - protein, 381 aa, unidentified
MQRATSTATVSANTLNCALELSKKTWLLAIQFPAREQPSVYTIKGGDGAALVAQLIAARDRWAEVSGSPPSILICYEVGYDAFWLARFLMAHGIECLVIDPGSLEVKRRSRRVKTDRVDLKKLLRTLSAWCRGERHVWSVVRIPTVEEEDLRRSHRERSRLISERTAHSNRIKGLLFAQGIGVDNIKTLALEKLVTGDGRRLLPRLADEIARQMKRLAVVQEQIDEIERERDTAPTPCKETEKKRHLLLQLKSIGPTNAAVLSREVYYRHFDNQRQLGSFLGLTPSPFKSGEEERCQGISRAGSGRVRAAMIEAAWLWVQHQPKSALTIWFLKRTAGQSKRVRKIMIVALARKLAIALWRFVELGLVPDGAIFHPRVTAQA

SEQ ID NO: 77827 - protein, 410 aa, unidentified
MRRIRDRVGGLDVHRDSVVACVELFDGHSVEVDKHTFSTTAAGVRELGEWLAEREVELVVMEATGVYWRPVYYGLEDRFDELWLVNAHHVKNVPGRKTDMSDAQWLADVAAHGMVRASFVAPPEIRGLRELTRYRKTQITARSQEIQRLERLFQDAGIKLTSVASKVWSQSSRAMTEMLIAGDADPAVLAELAKGRMRPKIPALIEALENRWLSYHSVVARQILAHIDFLDATIDTLNTEIVESVAPFRAAVELLTTIPGVSTLTAQTIIAETGADMTRFPTAAHLAAWAGVAPASRESAGKRRPAGTRHGSRHLRHSLIEAARAAARTKDTFLSARYQRITRRRGPNKAAVAIAHSILVSAHHMLLTGEIYHDPGANYYDKRDNDPDRKLHRHIAELQAAGYTITRTAA

SEQ ID NO: 77828 - protein, 410 aa, unidentified
MDRQLERCCGLDVHKETIAACVRLGGRSGHATQQVQTFRTTAADLVVLHDWLAVQGVTHVAMESTGVYWKPVYNVLEDRFNTMVVNARHIKNVPGRKTDCKDCQWIAQLLQYGLLTASFVPRRGQRELRDLTRQRAQLIQERSRVANRVQKTLEDANIKLASVASDALGASGRAMIRALIDGDKTPEQMAELARRRLREKIPQLKEALTGTVTDHHRFMLRQLMDQIDRLERQVEDFDRRIEQVMSPLEQKATENLDQIPGIDVRAAQTIVAEIGADMSRFKSSGHLCSWAGMCPGNHRSAGKRKKGTMNQGNRWLKRTLMQCAWAASRTKNSYFQGQYRRLSARRGKKRAAAAVGHSQLVVAYHLLRDGTEYQDLGTNHFDTLAESQRTAPLVKRLEKLGYRVTLDKAA

SEQ ID NO: 77829 - protein, 309 aa, unidentified
MDTIVVGIDVSKDRLDVAVRPAGTTLSCSRDAAGIEGLIGELGRLGAQLIAVEATGGFETVVAASLAAASLPVVVVNPAQVRAFARAIGQRAKTDPIDARVIAHFAEATKPQVRPLPDAATQALADLVARRRQIIQMIVAEGQRAKRAAPRAKRSIGRLLEALRRELSEIDADIDETVRGSPAWWEKENLLTSVPGVGSGTARTMLADLPELGSLDRRQIAALAGLAPFTRQSGKWCGKSFIGGGRASVRTALFMAAMTAVRWNPALRAFHHRLRAAGKPKMVALIAVARKLLTILNAILRDKIKWQTA

SEQ ID NO: 77830 - protein, 375 aa, unidentified
MKKVRFLGLDVHAETIAVSVAEIDGEVRSLGIIANRQESIRKLIKKLGPAEQLQACYEAGPTGYVLYWQLTALGVKCDVVAPSLVQVKAGDRVKTDRRDASKLARSYRAGDLTPVWVPDEEHEALRDLVRAREAAKQDQLRARHRLSKFLLRHGRRAPSGVKVWTQKHLDWIKEQVHFKQPAQEYTLLDYWHEVEHVTARIRRLEQAIEEAVKLAPARMQEVIQALQALRGIAQISAVTIVAELGEISRFERPRQLMGYSGAVSSEHSSGKRIIRGQITKTGNAHLRRIVIEAAWSYRHRPSHGWALRKRQKDLSEEVKEIAWKAQHRLHQRYRKLLAAGKDKQKVVTAIGRELLGFIWAIGIQVERNNQQSRVA

SEQ ID NO: 77831 - protein, 312 aa, unidentified
MTNKICGVDVGSETLDARVGQDGPWRQFARSLEGSLALAEFCKEHDVDLVVMEATGGYERLPFAQLWGAGQPVAIVNPRSVRKFAEAMGRLEKTDRIDCGMIAWYAQTKRIRPMQPASATQTRLTALVVRLRQLTEAKVVQTNQRRLVTEPDALATFEPILAAIVSQIRSLEHQIAETIDDDPLWAELDREFRTIKGVANRSVATLMAELPEIGTLSNKAVAKLAGLAPLARDSGKKTGQRPVRAGRAGVRSILFVVAEIVRRFDPDFKAFHQRLCAAGKPKKVVRVALAHKLLVRLNAKARDTRRKLAAAT

SEQ ID NO: 77832 - protein, 354 aa, unidentified
MTVQMKRTVGDIIVGVDTDKKHYVFTVREQGVNIMHKTLVAVPAALHNYIKKQFPGKNPIYVYEAGPTGFGLYDYLTALKVPCHVISTLSMPVAKCETVKNNGIDSRKLAEYMEAGKLRSIRVPMNEYRELRHLTKVRELCVSYRTKAKQRIKGLLLYSSISDSKLDASKHWSTGYIGTLRDLKITPAERYRLDCLLEDLDYARRNLIKTHKELKTFCKTYPNVRKNVKYLESIPGIGFITAVTILGKIGEPSLLRYSKEIASFLGLTQWEYSTGDVQSRGSITHFGNKVLRKLLVECAWAAIRKDVRLNQFYHRIKNRNNPKYASQIAIVAVARKMTQIIYRVLKEQRCYAQY

SEQ ID NO: 77833 - protein, 469 aa, unidentified
MPVCFIYELMLEAGMKNNKRSKRISKHLEHVNLFAAGIDIGSQSHYVSVPDDLSRAPVREFSCFTADLNRMADWLVEIGIQTVAMESTGVYWIPIYEILEERGLIVLLVNSRHIKNVPGRKTDVLDCQWIQQLHTYGLLEGAFRPDDEIVTLRSYMRQRETLGQQVSDQIRRMQKALRQMNLLLDNVVSDIDGLTGMKIIRAILEGERDPIVLAKYRHGRCQKDEKTIAASLQGHYREEHLFALRQSVELYDIFQSKIVDCDKAIQAQLDKMDTKGNKKDLPPSKKTNNKNTPKFDVRGELYRITGVDLTRINGLNENSILKILSETGIDISSWPTEKHFCSWLTLCPGNKVTGGKILSGKTTPSANRAAAAFRLAAFGLLNSKSALGAYCRRQRTRLGAPKAITATAHKLARTFYSMLKNGTEYVDQGQDYYEKQYQQRVLHNLKRRASEMGFELIVKDPLVLEKSIT

SEQ ID NO: 77834 - protein, 345 aa, unidentified
MKNTTIAIDLAKSVFEVGVSDRPGHVVANHRLSRDEIVRFMANQQTTTVVMEACSSAHYWGRTFQSLGHDVKLLPPLYVRPYVQRSKTDRADVKGMLEAWRNTDIRTVPVKTESQQQLTTLHRVRAGWMATRTMRINSARGLLREFGIVFPLGAAALAGRVQELIEDADSALSMPLRQLLHELVLEIGELENRVKLIHKQLEAIAVETPVVERLLTIPGIGVLTATAFVGFIGDVSRFPSGRHFAAYLGLTPSEHSSGLRRRLGRISKHGDVYLRTLLIHGARAVLVAAQRQPHPKGLHLWGLQLQRRIGNNKTAVAIANKMARIVWAVWKSGKPFQPHLRDDVS

SEQ ID NO: 77835 - protein, 359 aa, unidentified
MSTCVRSQALFVGIDVHKETHTAVGISPFGEKLFEITVGNYPKDFKALSEKVESLKGSLSPYFGLEDCHGYGERLAEYLVAKYPVMNVPPVMVDRSRRNATHPEKSDSLDAYGVAKVMMQSIDALPPYTVTEETKRAKQIKEISTDREYLVKERTRLKNQLHILFYRIWNTGYQTKFTNPFALKALRYWIKTKPSCDGFLLRAMKRKARRLIELHREITELEKDMKTLLEQGKYTIQTASGCGVVLSSQIIGEIGDINRFHSPSALAKYAGCAPRECSSGKTKRYRKNRGGNRRLNSAFHGMALTQISMTGNDSAKKYFAKKISEGKSKPQALVCLRRHMVNIVWMMLKHKTVYRCPQE

SEQ ID NO: 77836 - protein, 345 aa, unidentified
MNLHSIGIDLGKTVFHLIGLSHSGEVVVRKKFSRIQLLRFTANVQVQLIGMEACGGSHFLGRALREQGHEVRLIPAQYVKPFVKTNKSDYIDAEAIAEAVCRPTMRFVPIKTDEQLDMQSLHRVRERWIMRRTAVVNQIRGLLLERGITLRKGRCHLDAALPGILEDAATTLSGAVRLLLTELKRELEHLAVHLEDADALIQRAAQESEACQRLDAIPGIGPLTATALIAAVGNGAAFRKGREFAAWVGLVPREHSTGGKQKLLGISKRGNPYLRRLFIQGARAVLQFREKQSSGLRNWLARLTSRTHYNVVGVALANKLARMAWAVLANGEVYRPPVLAGEAAA

SEQ ID NO: 77837 - protein, 378 aa, unidentified
MSLVPAASIIYLGLDVHKDSVTIAVLPEGAAAPTRIDKYPNDLARLRRVCERLAKDGELRACYEASGAGYVLQRAMRAWGYHCDVIAPSLIPTKPGVQRKHDKYDAGQLGRLYRAGELTVVRIPSEAEERVRDLVRCRETMQREILKSRHYILKFLARRGFVYRAGTHWKQGHYEWLRQLAAATSPLESIDREVFGEYLGLLEYKVSRREALDRRIEDLALTPAYAAAVAALQCFRGLNVHGAMVLATELVDWRRFDSPRQLMSYLGLVPREDSSGPRERRGSITKAGNAHCRHVLVQAAWAYRFQPKVGVALKARQRGQAAPVIAHTWKAQHRLHTLYRRISLRRGPQIAVVAIARELVGFLWAVMRQIEPATPIAA

SEQ ID NO: 77838 - protein, 337 aa, unidentified
METYVGLDVSQKSTAVCVIDGDGNPVWRGTVASDPQAIDSIIRQQAPEVRRVGMETGPLAVWFYHALRNRGVPVDCIHARHVHAALATQLNKTDSNDARGIAQLTRSGWYRAVEVKSIASHEVRLLLGARSQLVSMRTGLYNQIRGVLKTFGVVLPPGTRSAFEKLVEQHTPSTSLIRGVVDILLDSWRHIDRQVRETDKALERIARASDVCRRLMTVPGVGVKTAVAFAAAVDNPDRFRRVGDIGPYLGLTPRKYQSGDVDHNGGISKTGCRLTRHMLFEAASALLLRHKRDCALRRWAQALIPRIGLRKALVATARKLSTLLLSMWRSGKEFIPG

SEQ ID NO: 77839 - protein, 402 aa, unidentified
MNCVGIDVSKGKSMIAVMRPFGEVVVSPFEVRHTASELSELARLLKNLDGETRVVMESTGNYHAPVAWLLHGAGFYVSVVNAMLVHDYGNNSLRRGKTDKKDAVKLANYGLDHWLTLPRYVPEEDTRLMLKTCYRQYQQYSKVQTMLKNNLISLLDTAFPDANRLFTSPPRADGSEKWVDFVATFWHCECVCGLSKKAFTAKYQRWCRKHGYNFSQDKALDIYASACGRFGVMPKTNTAKLLVEQAISQLQTTSAALAALKQEMQSLAASLPEYPVVMEMFGVGPTLGPQLIAEIGDVRRFHSKKALVAFAGIDAPPYQSGQIDVRSRSISKRGSASLRRTLFLVMGVLLQCAPMDEPVYQFMNKKRSEGKPYRVYMMASANKFLRIYYASVKAYLDSLEHD

SEQ ID NO: 77840 - protein, 341 aa, unidentified
MNYMGIDHHRQYSHVTLLDEEGRVVKSGRVVNLRRELENFLCGVNGVKAVVEAGRSSYTMVDILDEMGIETTIAHPKEVKAIAKAKVKTDQRDSYKLAHLLRTSYIPEVFKRSRENRSSQRVLRQRAFYVAKQTAVKNRLRALLAQQGEEIRQEASRVENLFTAKGIRVVEKLALPEREAKMMGALLKTYHHLQDRIDETNALVHELYETTPSAQLIQTVPGFGKFFSVLVAVEIEDLGRFEDVRKFHAYAGVIPSTHSSGETTYHGKIIKAGNRWLRWATVEAVWPGLRADFDLRCYYDRMKRRKGANSAKVATARRLLTIIYRMLKENRPYIPYKRSWK

SEQ ID NO: 77841 - protein, 402 aa, unidentified
MNAVGIDVSKGKSMVAIMRPFGEIVSAPFEIKHTASDINSLVELINSVEGESRIVMEHTGRYYEVLAHQLSEANLFVSAINPKLIKDFDNDSLRKVKSDKADAVKIARYALDKWQNLKQYSVMDELRNQLKTMNRQFSFYMKHKTAMKNNLIGILDQTYPGVNTYFDSPARSDGSQKWVDFASTYWHVDCVRKMSLNAFIDHYQNWCKRKKYNFSQSKAEEIYGKAKELVPVLPKDAITKLIIKQAVDQLNSASTTVESLRTLMNETASKLPEYPVVMAMKGVGTSLGPQLMAEIGDVSRFTHKSAITAFAGVDPGVNESGTYEQKSVPTSKRGSADLRKTLFQVMDVLIKTHPQDDPVYQFLDKKRAQGKPYYVYMTAGANKFLRIYYGRVKEYLSSLPES

SEQ ID NO: 77842 - protein, 423 aa, unidentified
MKYALVRVLPEVPPGGVCAGIDWASADHAVCVVDLAGRVRDRFTAVHDRAGIAGLIARLRENQAGEVAIERGDGVLVDALLAAGLTVVVIGSRQVKNLRSRYGSSGAKDDRFDAFVLADTLRTDRARLRPLVPDSPATLALRAAVRARRDLVAHRVSACNQLRAHLAVAFPGAIGLFSELDSPVSLAFLAAFPGQQAAARLDEQALAAWLATIPRRGNTAPAGVLAARLAAAPRGAAGADAAQAAVTTQLAAATAGLAGRVRALEAEIAAQLAAHPDQHIFTSLPRAGTLRAARLLAETGDCRARYPDPWSLAGLAGVAPVTRRSGTYISHEFRWNLNRQLRDAICDFADGSRHASPRAATVYAAARDRGKDHPHAVRITARAWVLIIWRCWQDGTSYDPAKHRALQDILTRQAAAGTPQPHR

SEQ ID NO: 77843 - protein, 328 aa, unidentified
MCTLGIDVSKNKIDLCLLTAGPGGKKKHKVLTNEPAVARKVVDWLNAQKCVPESVTVVLEATGIYHENLAYGLHEAGVSVCMANPCRVREFAHGMDILNKNDAVDAFVLACYGELKSPAVWVPPSPEVRKLRALLRQRDALREDVQRTVNRLEKANSTSTPQEVIRSLERTKSWLNEELARIEKLITDHTDNDPGLKADLDLLKSIKGVKDQVGREMLALLKDGMFKSASQVAAYLGLTPVVKTSGSSVRGRPHMSKTGPSGVRAKLYVAALTASRWNKQAKAIYERLVAKGKAKKAALGAVMRKLVHLCFGVLKTRLPWDENYVATA

SEQ ID NO: 77844 - protein, 308 aa, unidentified
MTTIYAGLDIAKLNLQLHLTGRVYDLPNSAAGHRRLRKLLAAQPGSHVVCEATGGYERDVVAALHEAQVPISVLNPARVRHFAHATGQRAKTDHIDAAVLSAYGQALQPKPTAPRTEQEQQLAELVRRRVQVLEILVAQRQQAQRLTLPALRRQAQSLVRRLERDLTQIEAQLKALRRQTATLDERVQKLEAITGVGAITALSVLAELPELGTLSRRQAAALAGLAPHPRESGQWHGRRSIGGGRVPVRRALYMAALVAARANRQLKVFYQRLRSAGKPAKVALTAVMRKLIVLMNHILKNPDFLLSN

SEQ ID NO: 77845 - protein, 342 aa, unidentified
MEITTLGIDLSKTTFHVIGLNARGEIVLRKKFSRKQLLVFTANRQQMLIGTEACGGAHYLARALREQGHDVRLMPAQYVKPYVKTNKNDYLDAEAIAEAVQRPTMRFVPIKTDEQLDLQALHRVRDRWVARRTAVMNQMRGFLLERGITMRKGPSHLAARLQIIFGEGNCSFSGRTQGLLLELKHEWDELERRIEEASAELQRIAKQDDACSRLMEIPGIGPLVSTALVASVGNAITFRKGRDLAAWLGLVPRQHSTGGRAKLLGISKRGNEYLRRMLLHGARSVMMQVERNPSALGVWITDLSKRKHHNVTAVALANKMARIAWAMLTRGSHYSASQLAVA

SEQ ID NO: 77846 - protein, 350 aa, unidentified
MIIIGCDYHPGFQQIAFVDTETGDYGEPRLEHSEGAEKFYRDLAAQGKKVRVGMEASGHARWFERLLGELNMELWIGDASEIARKRERKQKTDLEDARHILQLLMENRFPKIWVPSGENRDLRQLLWHRHRMVQARTRIMNQLQAVALNEGLRCKKKLWRQHGREQLESFRLAPWASRRREDLLQLLDRLNPTIAELTQAIEQEVEKCPEAGRLRTHPGVGALTALAFVLIIGRPERFQCGKQIAAYLGLVPLEDSSGSRRRLGHITKQGNSMLRFLLVEAAQVTARSIPEWRNKYFHLAMRRGRKIAKVAMARRLAIALYWMWRKGWDYEQLRKFGSHAGKLGTGDGVQ

SEQ ID NO: 77847 - protein, 339 aa, unidentified
MSAAYDGRQFVGIDLHRRRSVVSRTDQHGNVLEAVRISNDPHLLAEVMGRAGEQPEVVLEATYGWYWAADLLATIGANVHLAHPLGVKGFAYRRVKNDFRDAADLADLLRMGRLPEAWIAPPQVRDLRQLVRHRAKLVAVRTGWKCQVHAVLAACGIPVRMSDLFGQAGTELLDHLQLPSAFAARINSLRRLLEPLDAEIALFSGMVAARLARHRGYRAIQAIDGLGPVLAAVLVAEIGDVGRFPGPAQLASWVGLTPRHRESDTHVHRGRITKQGSRLARWAAIEAVQRLGPQTRLGQVRERVAERRGRNIGVVAAARELVCLVYYGLRDGYIRRLAA

SEQ ID NO: 77848 - protein, 460 aa, unidentified
MKLLYRCCAGLDIHRDTVSVCVRKRVRGQAEAATEEEVFGTFTQELERLRSWLKKHKVRQVAMESTGVYWIPIWNVLERGFALTLVNPATVRALQGQKTDRIDARRIAEYLQYGLLRGSFIPPKPIRELRELTRMRVHIQQDRNRVINRIARLLETVNLKLASIASNIVGTSGMAMLRLLASGVCAAEKLADCAQASMRMKIPALILALDGRPDEHFRWMLQQLLDKLDRLDEERARVDARLDSLAVPYGDLLQRLGTIPGVDRTTALVLLAEFGEDMSQFPTGAHLASWAGLCPGNAESAGKRFSGRTRKGDRYVRRILVQSAWAASRTHDCFLAALFFRTSQRRGLKKAAVAVAHRIAIIAWHILAEQGVEYQERGGDYFDRRNPERTARKLSRRLEAIGYKVTLVAPPKSARQPKPPVAKAPRATVDPALCAKCARWGMPRCICLLKRKPKSMPAPQ

SEQ ID NO: 77849 - protein, 354 aa, unidentified
MTRTTKYVAFDVHQATTVTSVREESGRVLARSILETHGPSIVEFLRGLRGAIHVAFEEGTQAQWLHDLIAPLVHRVVVCDRRGQARHGNKGDQVDADQLSELLRRGGLRSVYHGSAHHADLKELTHAYRSLVEDGTRVMLRLKALFRARAIRTPGTAVYQPRHRPQWLAQLADHGARCRAEVLYAELDVLRALRPKAKAAMIAEARRDPAWPVLRTIPFLGPVRVALLLATMQTPWRFRSKRHLWAYAGLAVVTRSSADYTLVAGQPGRRRRAPLTRGLNRNHNRVLKDVFKGAATAATARPGPLQDFYHAVIARGVREELARVTLTRKLAALTLRLWKKGAPYDPTQLTQQAG

SEQ ID NO: 77850 - protein, 409 aa, unidentified
MRYYLGVDWADQTHAVWVVDERGTKVAMRTVPHTAEGLSEWGRELDEWRAQGTELWAAIERPEGRVVDFLLDHGVVVYPVNPKALDRARDRFRQSAAKSDPFDARVLADFLRTDHARLRALRPSSEAAQELKLLTDDYQQQIRQQTRLVNQLTMTLKAYYPRALEVAELPTALARDFLQAYPTPAALTALTERQWQRWARAHRMHEARTQELWAVLQRPQLPVPAHVVRAKARLMQSLVAQLTLVVEVVGTYREAIEDFFAQIPAAQWIRTLPIGDHGITAPTLWARLGDAPGRWESFRHLQAQAGTVPVTIRSGKQQVVRFRFACDKSLRYVIDHVAFLSLRWSEWARAYYAGQRARGHSYHQALRALSAKWLKIIFVMWERQVPYDEQYHLATMTRQQLRLRQKQIA

SEQ ID NO: 77851 - protein, 386 aa, unidentified
MTQHSHIAASHQLDYERTLILAVEVSGRSWVVAAQVPGLRQKGVKQQLAPRADALMAAVEGYKRRAAAAGLAVDRVIVAYESGGSGFWLARWLQQRGVEVYVMQPSSVPVDRRMRRAKSDRIDADMLLRTLLAWLRGEPRVCSMVPVPDEATEDARRPIREREELIRARVALVNRIEAVLTVLGAGEYNPLRRDCRERLGQLRTALDQPLPPHARAQIERLLDRLDLIRQQVADLEAQRDRAVEGETVGQAERMIQHLARVRGIGVQTATVLVHEAFVRRFRNARALGSYAGLTGTPYSSGGTHREQGISKDGNRRLRATLVELAWMWLRYQPGCALSRWFHDRLGGSRGRLRKVMIVALARKLLIALWRYLQDGAVPQGMELKPA

SEQ ID NO: 77852 - protein, 343 aa, unidentified
MDYFAGLDVSVKDTSVCIVDETGKIVREVKVSSEPDALLTVLRNPAYHFKRIGLEAGPLSQWLFSALAEADLPVICVEARHMRAVLKAQINKTDRNDARGIAQMIRVGLYRPVHVKTLRSQKLRMLLTHRKLLQSKAIAVDNDLRGTLRNFGLKVGVVGAARFEARIRELVEGFPDLAVLIEPLLVVRRVLREQLDILHRRLLAIVRDDEVCRRLMTVPGVGPVVALTYRATVDVPARFRKSKSVGAVFGLTCSRHQSGERDRPGAISRCGDEMMRTALYEAAQVMLMHSVKWSWLKAWAMKIARHRGRKKAIVALARRLAVIMHRIWVDGTEFCWTREAAAT

SEQ ID NO: 77853 - protein, 370 aa, unidentified
MGKSVLYVGLDVHKMSVDVAVAEPGPGAEVRFYGRIGGDLEALDKVTRKLQAKGAELRFAYEAGPCGYQVYRHLTAQGHSCLVAAPALIPRRPGDRLKNDRRDALALARLLRAGELTPVKVPDADDEAMRDLTRAREDAVSVERRAKQRTGALLLRHGRRYPGKTTWGRGHWRWLLQQVMDHPAQQIVLQEYLDAVREASARVQRLTGQIQELLPQWRRAPYVAAYQALRGVSLIVAATMVAELGDLSRFNNPKELMAYLGLVPSEHSSGASVRRGRITKTGNGHARRVLVEAAWAYRLRARVTRPVLQRQEGLSTGVKEIAWKAQLRLCARYRRLLARGKAKNTVATAIARELAAYIWAIGQAVEPLTA

SEQ ID NO: 77854 - protein, 347 aa, unidentified
MSYYAGIDVSLEQSCVCVVDLGGKIVREARIASEPAVLIAWFAALGHELERIGLEAGPLSQWLYAAMREAGLAVELIETRHVRVALKAMPVKTDRTDAQGIAQLMRLGWFRPVHCKSRAAQEVRAVLTARRLVQSKLHDVEMSLRGVLRGFGLKVGPTTPRRFAGRIRELVAGQATLTAIAEALLTVHEVLRGELAGLWKRVLRMAREDAQVRRLMTVPGVGATVALTYVAAVDDPTRFKSSKELGAYFGLIPRKYQSGEKDITGGISKIGDATVRAMLYEAAHIVLTRPVKGGWLKSWAARLAQRAGVRKAAVALARKLAVILHRMWVDGTEFAMTLPTKGAAMAG

SEQ ID NO: 77855 - protein, 431 aa, unidentified
MSERDYSKQVARRQRIGSTTLVVGVDIGCASNAVGFMNKEGKVLGSDPNMPNSREGFEQFVKVTEGLKAKHGLNDVLIGMEPTGHYWRKLAYFAREHGYEVRFVRTTALKHHRELDESSSAKSDQRDALTITNITREGKYIDTVIEDGSRRQLRTLVKVREKIQKRNVSAKNSLHAALDDYFPELKEIFWSMHSRGLWALLQRCPFPVDVVTLKVSVLKELIGRASRRRLEASRKATAVYQAAKESIGLRQIGSADRYRLRMCLEEVKRTELMIKDIEREIKRMLKEIPDAQYLLSIPGIGPISAAVFLGELGNPSYFQRARQVVKYAGYDPQESDSGYRVSRKFISKKGRWLLRKHLFFMSMRVVVLTNYFKTYYERKLETKNRVGQLPRRKEILCAVAIKLIKVIFALLRDKRRFEDTHGPVTALSQGA

SEQ ID NO: 77856 - protein, 443 aa, unidentified
MKELPVLDSRAAFCDVGSEHMHVSIAGGLPKVFGTFTSQLHELRDWLLGEGVRSMAMEATGVYWLSLYGVLEAAGLEVLMVNGRQTRNLPGRKTDMKDCQWGATLHAHGLLKAGFVPPAHIRKLQDYQRLRTDHIASAASHVQHMQKALERMNIKLHNVISSLMGTSGLAIVHAILDGERDPAKLLELCYSTIRHKKAKEVIEALRGTWEPEHLFALRQALQSWEHYHRQIAECDQQIQLLLQEITFNDMQGGGIGEKPKATAGNRPSANAPQISGLHSMLIDLCQGKDLSILPAHTDYSVLQIISEVGTDLSKWPTEKQFTAWLGLAPGTSQSGKRKSNVKHSRSRVGRYFCIMARSLARSKDMALGGFYRRLAARRGGLIANIALARKLAALFWRVMVKGTEFVEEGLAAYEAKFLEGKKRSLRRLARELGQTVSPIPITV

SEQ ID NO: 77857 - protein, 386 aa, unidentified
MKQAAEVEGYEVGKPLYMAMELSSRTWKLGFSTGAGKIRIRDVGAGQIGEVLKEISVSKAKLRVDPGAQVVACFEAGRDGHWLYRWLISEGVKALEIDSSSIEKARHGRGVKTDRVDVEKLLDLLMRYHTGYRQAFRVVHVPSEEAEDVRRLHRERDRLVKERTRLKNQMRSHLVTVGQPELTLSRRNFEVWLEAVNDGVGKPLPPLLKAELKRTWRRYCLTEDLLKEVEAGIAAELEGDTRLGVQRRSLEGLKGIGPVGSRMLSGEMFSWRTFTNGKQVGSAAGLTPTALQSGRLSREQGIGKQGNWRVRWVMIELSWQWLKHQPESALSTWYRARFGHGGKRMGRVGIVALARKLLVALWRYVEQGVVPTGAQFKPGFTIEAAK

SEQ ID NO: 77858 - protein, 339 aa, unidentified
MDTIRFLAIDLAKNVFQVHGVDAAGKLVLRRRVGRAQLTELVLRLAPCTIGIEACSSAHHWARQFLQQGHTVKLISPQFVKPFVKGNKTDGNDAEAICEALQRPSMRFVPIKSVEQQDVQSLHRARSRLVSNRTGLVSQMRGILAERGIVFAQSITRARREIPVIVADTSNALTPLAREMLADLMDQLHELDRRIAGFDRRIDLVFKASETCQRIAQIEGVGPKTATAIVAAVSDPKDFRNGRHFAAWLGLVPRQSSSGDRTHLLGISKRGDRHLRTLLIHGARAVLRTAPTKHDKKHAWALALKARRGANRAIVAIANKMARVIWSMLATGQSYQKAG

SEQ ID NO: 77859 - protein, 364 aa, unidentified
MKIVGCDLHARQQSIAMVDTETGELTEKRLMHEGNAVRDFYTSLEGPVVVGIEATGAMQWFLELLEEFGIECRVGHPAKIRAAETGKQKHDRRDAEVILDLLVMKDRFPDLWMPSTEQRDLRTLLRDRHQWVKMRARLQPTLQAIALNHALREGRALWSAAGRRALQDLALPPYTDQRRDELLALYTQLEKRIQQLDKQVEGEAQQRPGARRLLTHPGVGPVTALATEVFLGDPTRLATANQVASYIGMIPCEHSRGKKQRLGKLTKEGNALLRYLWIEATLHAVIKDAELKRFYRRKLIQKGMGKARVAAARKLGIRLWIMLRDEIDYEEFCLRGKLRQKGEAHAGMPDYDSGPARAVTGSTE

SEQ ID NO: 77860 - protein, 385 aa, unidentified
MSSKAFVPRDYDVFAGLDVDKKSISVTFANHQGFIRSLRVPYSAEHLVNHVRKHFPDQKVAFAYEAGPTGYGLYDEIVAQDYPCLIASPSMIPKAPGQRVKTNRLDSRGISENLRGGQLKSIHVPSVLYRELRHLTQLRDTFVSELVAMKQRIKSLLLMEGLEFPPAPAGSQWSFMVKDKLRKLACSSTVRFKLDQLLDSLEFNEKQIVKTSQQIRRFCRNDPELSQCIEYVVSVSGIGQIVASQLLARIGDWRELRNVRQLGAFLGLVPTEHSTGDRTDRGSITHSGDPRLRSKLIQAAWSAIRKDGELREFFRSVCQTHARPVASRVAIVAVARKLTVMVSVVLMEQRPYVVRKKVHSAPLTQEETVPQGTPRRQAEPGAKNS

SEQ ID NO: 77861 - protein, 420 aa, unidentified
MSDPEQWWQQHRVFGAVGWASEKHSVIVLDQAGKVIEGFEIEHSALGWKKFREKLQAYGSIPFAIETSRGAAVEQLLEAGMIVYPLNPKSAQAYRERKAPRGAKDDWLDAWSFADALRVDGHGWKALRPEQALIKELRLLCRDEVNLIQQRTAFIEQLRRALAEYYPAALEAFEDWTSVSAWMFLERFPTPDELARAGKRKWQNFLHSRRLWGSEQAVGRMEIFTRASQFAGSPPTVNAKSLLALSLVRMLFAIEKQLGLYRQRIEELFARHPDHELFGSLPGAGPKIAPRLLSEIGDDRQRFDEVQALQCLAGTAPVTKRSGKKRRYWHVHERSACNKYLRHALHLLADKSLSRCVWAETYYQLHRQKNQSHASALRRLANRWLKIIYKMWLDRSPYDAELRHRNQLKHGSWILQLKQP

SEQ ID NO: 77862 - protein, 405 aa, unidentified
MKQPAMLHYAGVDWATRTHAVCVVDPNGAIRARFEVPNTGKSYARLCKRLIKLGVAGVAIERPDGPLVEAMLEAGLRVVVVTPRQVKALRSRYGASGAKSDPADAEVLADVLRTDGHRLAPLTQDSDPTKVLRALTRTRKDLQEARVALVNQLTSQLERCFPGAIGLFAELRTPVAVAFLRRYPTSHAAAGLTQAKLAAFLRRLHYPGRTPVHVLFSRIQTAPVAGISPVEAAGRAVCVLALLEAIQACARQERELEAEIIERLELHADQHIFTSLPRAGHGVRAAALLAELGDVRARFPDNDCLAALGGAAPVTITSGKRRVVKFRWACDKKLRNALIDFADDSRHASPWAAHVYAQALARTGRHPHAVRILARAWIRVIWRIWQDGVAYDPTKHRGAVMLQAA

SEQ ID NO: 77863 - protein, 322 aa, unidentified
MAKEDLIIEQVVDKGFGIGVHKEMMMVTIMGKGIKKQTREFKTFTEDLESCRRWLEEQGITQGAIESTGVYWKPVFNILTESLELKLVNARHIKNVPGRKTDVKDSEWICKLLLSGLLNGSFVPPELTRETRDLYRYKVKMTQAGASEKNRIQRILEDANIKLSSVVSDMSGATAIKLIDGIIAGRTDINKLVEENYHGKLSASKSDLKKAMTGRLTEHHKYMLLEIKDHIKYLEEKIKKLEDKLEAKLSAYQTEINLLDTIPGVDIEAAIGIISEIGTDMSVFADEQKFASWAGMCPGNNESAGKKKVHGLLTAIRHSKHC

SEQ ID NO: 77864 - protein, 374 aa, unidentified
MDHHSGAFVGIDTSKLRNAVAVAEEGRNGDVRYFGEIDTTEATTRKLVTKLAAKYRQLTFCYEAGPTGYGLYRLIKKLGHDCIVAAPSLIPKKPGDRVKTNRRDAVGLVKLLRAGELTAVWVPDERHEAMRDLSRACEAARKDLKGKRQQISSFMLRLGRHYPGKKTWGPAHMNWLMLQKLEHREQRIALEELLGAVRQESERIERLEQAIRDAVPEWSLAEVVTALQAMRGIDLVAAVTVLAEIGDLSRFQTPRELMGYLGLVPSERSTGDTVNRGGITKAGNGRARRILVEAAWSYRHPPRVSREKQMKVAAAPRAVREIARKAQMRLCGRFRSLTRRGKRPNVVATAIARELSAFIWAINREVVGSHATAS

SEQ ID NO: 77865 - protein, 303 aa, unidentified
MTQVALFVGIDVAKDKLDWCIRAVARATASNSPDGCAKLAAELKARGVTLAVMEASGGYERTMAAALRKQRVPVRIVDPKRIKDFARAAGRRAKNDPIDANTIAWFAHTFTLAAEDKPDKEREHLAALVAERQDLVEIRTQCLNRNQHKAPVLCQHVRKNVLNEVKQGIAKLDAAIAAWIAKCPRLAARARLLASVPGLGRKTRQQIAALLGVAPFDNDSGEHAGIRHIAGGRRQLRNSLYMPLVGAATQHNPILKKYFKRLLASGKLKKVAILACMRKLIVILNVMLAREQSWNPQPTSAQP

SEQ ID NO: 77866 - protein, 463 aa, unidentified
MEKEKRSRKTKVVPALQAIRPEVAGIDVGSREHWVCGPALESGQPNVRVFGTTTTQLEELVAWLCAQGVKSVAMESTGVYWIPLYELLESHGIEAVLANARQLHNVPGRKTDFADCQWIQLLHSCGLLRGSFRPGPAITAMRAIHRHLANLVEQRAHYVQWMQKALDQMNVQVHRAVTDLTGTTGMAIVRAIVAGQRDPASLSALRDPRCGKSAEEIARYLTGTWRDEHLFSLASTLELYDAIDKLIGTCESRLLDSIKALQPDERKDLALPTHPKPSKERFLRSHGAQLVRTALWRFAGADLTRIDGISIGSAKIILTEVGPDLSAFPSEHHFVSWLRLCPRTPISGGKPLKKGRNGMGANRVANTLRMAASSLQRGKSALGAAYRRIARKKGALVAVFATARKLAQLVYRMLRYGQDYTDIGESNYESLFEARRLAGLTEAARSLGYSLTKNPPPSLQTLT

SEQ ID NO: 77867 - protein, 343 aa, unidentified
MKLSRIGIDLAKNVFQLHGVDHSGKTVWKRRLKRNQWLKAVLDQGEPGCEIGMEACAGAHDWARELESRGYLVKLMAPQFVKPYVKSNKNDANDAEAICEAMSRPHMRFVTVKSIEQQDIQATHRIRSELMTQQTAKSNQIRGLVTEYGLVAPLTLRALRAAIPCWLEDAENGLTDHFRTLLHGVWTDLVTLDDRVLELDQMILKLANSNEVTRRLQQLRGVGPMVATALVATVGDAQQYHKGRQMAAAIGLTPRQHSSGGKDRLLGISKRGDVYLRSLLVHGARAVVSQAKHRDDRLSRWVIGIAQRRHPNVAAVALANKTARMAWAMLRNETDFDPDFATS

SEQ ID NO: 77868 - protein, 352 aa, unidentified
MRWVGLDLHKRYITACALDDAGQIVAEHRRLPPEVEALTAWFAGLGDAVTVAMEATLYWAWLHDQLSAVGIAAVAAHPYQVKLIWQARCKTDPIDARKLAELLRANLLPVIWVPDTAVRAHRKLLRGRAYLVRVRTQLKNRIHGHLTAENRRTTVTDLYGRAGRAWLATVSLSPAARVQVDLLLEVVDALDVRIHGLDDRVKRLVQGDPVAQRLQTWPGIGTFGAALLLAEIGTIHRFRSAHELAAYAGLTPSTQSSGDKTRHGGVGRAGSPWLKWLLIEIVQSLKLAPGPVGQQYQKLVRSKGKAKAAVAAARKLCCYLYWCLKEEWSYDEWLRQHERLEVRPVQPLGSAA

SEQ ID NO: 77869 - protein, 351 aa, unidentified
MTQQSATEAIATIGIDLGKTTFHLIGMNARGRIVLRRKVSRGQLQSCLANLPACVIGLEACAGAHHVGRQLAALGHDVRLLPAQYVKPFLKGHKNDYRDAEAIAEAAQRPTMRPVPLKSAEQLDLQALHRVRSRRIGQRTAIINQIRGFLLECGIAVRQSPAGLREALPTLLARRTDVLSPRMIHLIEDLAEDWRQLDGRIAAISRDIAALAGQEAGCRRLMTIPGVGVITASAMVAAVGTGAAFARGRDFAAWLGLVPKQISTGDRTILGGLSKRGNRYLRTLFVSGAQALLRYQGRWQSHGFGRWLQAAEVRLHRNVLAAALANKLARIAWSVLFHGCGYEMEFATHRA

SEQ ID NO: 77870 - protein, 403 aa, unidentified
MEGPLISLDVSKGKSNYRFFENGTDRKGKKGVIRHDIQGFDSIRDEAEKMEERLRIKPSVIFESTGVYSDVVEKYFTDKGFDVYVISPLLSASMRKEGVRPAKNDSLDTLSIAKVFYSKDDLRKCSENDKKAERLREMSYELDMMNRRIRPMKCQFLRLLDKVWPCLDEVSDYSSRFMLDFIIAFGHPENIKTVKGVLSVIRKSEMGTAGRKDKIAQDLFDYCHTHLSAVSKDSSYVELLKRMAIELKAMAKKKSELIDRMAEEARSKDEFVRLLTIPAVAKTTALKIMARVGDISRFRNAEALVAYCGLDPRVYQSGKMTGEHRTITKKGDCILRSTLFLAVKLMVMLYPDTKVARFVAAKAKNGLSYKQAVVAGSAKLARIIYSMLTHHENYVEFNADIVA

SEQ ID NO: 77871 - protein, 342 aa, unidentified
MPIVGGLDIHRKQITFDYLDTVTGEVRRGQIVPADRAHLRAWLARFAGRDEVAFAVEGCTGWRYVAEELAAAGVAAHVADTAAARGRKRHAKTDKTDSRHLRTLLAEGRLPECWVPPAQILEYRALLETYHDLRREHTAWVQRIHAVLFHQGAPRLGEEALRTEQGLAGLRSVAAAQLSAAGQLQVATALDMLAALEARMEVLRTQLRRAAQHLVGAKVLAARLYGVGPVTALALTCWLGGAGRFSSSRKAVRFTGLDITVWSSDRKGPPGRLSRQGPPVLRWAVYEAGKTHARSSAPDHGYYAQVKDRKNSKRAALSEARKIVRQACHILTELGDDALTAA

SEQ ID NO: 77872 - protein, 327 aa, unidentified
MEYIAFDCHKRYTFAVVEDERGMVKLEGKIPHERGALKKFLSRCEPDSPVAVETVGNWYWIVDEIERAGFKPRLVHAGKAKLMLGMVNKTDKLDARGLNRLQRAGTLPEVWIPPGELRDKRELPRARMVLVRERTRLKQRVHATLAKYGLTVVGISDLFGVKGRAVLAKLLAQLPPQARYVTEGLCSQIDALEEEIGAIEGRMREVLSPTREVELLQTLPGVGFILATVIALEVGDVGRFPGPGHLASYAGMTPRVHSSGGKVRYGRTRQDVNRYLKWAYSEAGNVVARFHKVHPYWHVSQLYRRVRGKKGHQVAVGAVGRHLAEAT

SEQ ID NO: 77873 - protein, 401 aa, unidentified
MESMIERCAGIDVHQGTMVVTVRRPGPSGGREVGTHTFATMTSDLLAIRDWLQASGVTHVAMESTGVYWRPLYYLLEDQFTVLLVNMQHLKQVPGRKSDVRDSEWLAQLLECGLLRGSLIPPAPIRDLRDLTRYRKRQIEDRAQEVNRLYRLLEDAGIKLASVLTDVMGVSGRAMVEALLQGQSDPGTLADLARGRLRRKLPALREALQGRFRAHHAFLATQILAKVDFLEDTIERLSAEIDEHLRPFEAEIARLMTIPGLARRNATTLFVETGGDMRHFPTAAHLCSWAAICPGQNESAGKRRTGKLRDALIEAGLAATRARETALQARYYRVKRHRGHKKAVVAVGHQILEIAYYVLRDQVTYHELGADYFDRRDRDRTMRRNVKQLEALGFKVTLEAA

SEQ ID NO: 77874 - protein, 347 aa, unidentified
MKDIIGCDLHTRYQIVAWVEEETGEIRSRRLEHESGEVRAFYAPRPAGAGVGVEATFPALWFERLLAESGHELWVGDAARIRASEVRQQKTDTRDAVHLLELLLTNRFPRIWVPSLAERDLRQLLVHRSKLVRTRTAVKNQLQALAMSQGVCRKHKLWSARGRAELESLALLPWASRRRQELLALLDQLEGPIAELDRAVEAEAQQREATVRLMTHPGVGPVVGLAYVLTLGPVERFPNRRQLVSYLGLNPREHSSGGRQRLGAISKQGNTMLRWLLVEAAQTAARYDPDLRRTYQRLKFRRVSGVAKVAIARRLAVRLYWMLRARLDYAQLVRMSGSPSSAVVPSR

SEQ ID NO: 77875 - protein, 440 aa, unidentified
MNRVIPTSAAATKRKESEKMKTWNEVTHFAGFDWAKDHHDVLVLDGTGKITSEFRFDHTATGWTLCQEKLKQFPELAIAVEAGHSAAIERLVVLGYRVYPVHPRSSKSYRTRKLPSGTKTDRRDCWALADALRLEGESWRVLTAPEPLVQQLRLLCRDEVTLIEQRTALINQLQQALYEYYPAALEAFPDWTHVSAWAFVERFPTPQALVQAGKRKWENFLHAQKLFHPEWNKKRLEIFTRANQFCGTEAVIAAKSALAVAVAKMLQTLEAQLARYRSLITECFKQHPDHALFTSLPGAGPKLAPRLLGELVALKPLADTPQALQCLAGMAPVSYQSGKVSVVYLRHQCNRFLRATIHLWVDLSRHYCDWARIYYEAHRKKGQSHACALRCLGMRWLKIIAAMIRNQTPYDAAVHTRNQLQHGSWVMQLQPVQIIKKDAS

SEQ ID NO: 77876 - protein, 326 aa, unidentified
MKAVTWIGVDIAKDSCVVAQRCPEGFQTEEFPITPQGLKALGNWLPQQPRLQIVLEATGPYWRAFTSGFNSVAPEIPIAVVNPRRVRDFAKASPHASKTDLLDAQVLVHFAETFQPGLMEASANRADRQLRALTRHALQLTQQRDQVRDQMEKAQADPDTPKFVLRSLKRHLQHLQKALKLCWSQARVNLDQDPQLTQCSRLLLSIPGIGEKTALTLISEYGAGLRHVGPKQLTRYAGLDVVFFQSGSSVYRLPRISKQGNWRIRRALYMAALSAIRHNPVVRSYYLKLVANGRPKKSALVAAMRKLLHQCYGVLKNQSPFDPAYA

SEQ ID NO: 77877 - protein, 349 aa, unidentified
MKYIGCDFHPSFQQIAMLDKETGELVERRLLHTEEARVFYEGLKEPVVVGIEASGNTHWFESLLARCQHQLWIGDAAAISRQEGRKQKHDRRAAELILKLMLENRFPKIWVPTVAERDLRQLLIHRQHLVRMRTRVKNQLQHMALNQGWQKKRKLWSEAGLELLRQLKLEPWAGQRRDTLLEMLEELEEKIQPLDQAVAKQAQACEAARRLATHPGVGPVISLATVLTLGDVARFADSRSWVSYLGLNPSEHSSGQRRRLGGISKQGNPFLRYLLVEGAASAARGDEDLGRMYARLKARRHHGVAKVAVARKLAVRLYWMARTEKSYPEVRSHAGEPESSRGRKSRPTG

SEQ ID NO: 77878 - protein, 317 aa, unidentified
MTDTGTGAFIGIDVGKMYLDIAVWDSEIYWRVSNDGAGIEKLINRLQKLSPVLIVVEATGGLELPVVTALALAALPVAVVNPTRVRNFARSTGQLAKTDKLDARVLAHFAQAVRPQVRPLRSEEQEYLAALVTRRRQVVQMLTAEKNRKSSARPQIRKRVQKHIDWLTEELRALDEDIAKFIHSHPLWREKEALLRSVPGVGPVTACTILAELPELGTLNRQKIAALVGVAPLNKDSGRKRGKRRVFGGRASVRRTLYMATLTATKFNPVIKSFYENLLRRGKEKKVALTACMRKLLIILNSILRHQRPWQVRPARP

SEQ ID NO: 77879 - protein, 344 aa, unidentified
MGQYVGLDVSLETTKVHVLDDQGKRVWRGTCVTHPTAIEATIRKHAPEVVRIGLETGPLTTWLWQALTDAGLPMVCLDARQARAALNMKINKTDDNDAEGLAHLVRSGWYREVRVKSREAMLTRSLLGARTQLLGIVTELSNQIRGLLKTFGLVVPKGAGKIFEANVRRLLEGEPAVAAIILPLLESWRAVRVRAAELDRQLLAAAREDRACRRLMTAPGVGAVVAASFVAAIETPEAFRRSRDVGAWIGLTPRRYQSGEVDYDGHISRRGDARLRSLLYEAATSILTHVHADSTLRSWGLALKKRLGFKRAAVALARKLAVILHAMWKTATNFDARASASAAP

SEQ ID NO: 77880 - protein, 368 aa, unidentified
MSMQEKRLFVSMELSNKNWKLTFGDGSRDRERTIPARREDLLLREVPVAKAKLGLHEDCEVVFCYEAGRDGFWIDRMLKKNGFKNYVMDPASIEVPRRSRTRKTDRLDGKKLLKLLLRRELWGELDAFSVVRIPSEDQESAMRMYRERERLVVERTGHRCRMKSLSVLHGIEIGNPATVKIEELRDWDGKSLPGLLVEELKREQKRLCMLVEQIKGIEKQQEEALAKAQTPAEQKACKLFTLKAVGKQSSWVLGHECFGWRVFPNRKHLGSFVGLTGTPFDSGETLREQGISKAGSRRVRGTMIELAWSWVRWQPNSALTHWFVDRYVRGGTSRSKRKGIVALARKLLIALWKYVEQGIVPEGAVLRA

SEQ ID NO: 77881 - protein, 353 aa, unidentified
MSSLTDLREVVDVVIGVDTHVHTHSAAAIDARTGGVVDEITVEATADGYAQLVEFADEHAALRAWAIEGTGGHGAGLTRHLERGEEVVIELDRPERAQRRHGAKSDPLDAIRAAREALARPRLGGPRSGGDRQALSVLLAARRSAVKAATDAQRQVFSLVIAAPEPIRERFRGQKLPAMIQTAAGLRGHASWDVETTTTVTVLRTLARRARALAEEAAEHEKAIRAIVRSWRPDLLGQLGIGPIVAATVLCAWSHPGRIHSEAAFAMLAGVAPIPANSGQVTTRHRLNRYGDRQLNRALHTIVLTRIRYDQATRDYVTRRTTEGKTTREIKRCLKRYIARDLYRLLEHQPIAA

SEQ ID NO: 77882 - protein, 338 aa, unidentified
MTLYGGIDLHSNNVMISIIDAQDHLVFERRLANNLSSIQSHLDPYRSRLDGLVVESTYNWYWLVDGLAEQGYDVHLANTTAIQQYSGIKYTDDASDARYLAQLLRLGILPEGYIYPPEQRSIRDLFRRRLLLVRQRTMQHHSLQSLIARHSGIRLSAQQVKQLKSGDLKAYFRYPASLETARLLHRQMAQLSQAIDQIEKGVGAQCQESADYDLITSIPGVGAILGKSILLETGPIERFPAVGNYVSYARCTPTARISNGKQKGQGNRKNGNRYLAMAFVEAAHYAAIWDPTIKRFYQRRQRRVHTMVAKKTVANKLARACYHMLKRQERFDVKRAFS

SEQ ID NO: 77883 - protein, 323 aa, unidentified
MVVQRTNVGLDVHARSVVACGLDRQTGEVFEQRLTPSHEEIAAWIRSLPGPAAAVYEAGPTGFGLARSLRAVGIDCEVAAPSKLMRPSGDRVKTDTRDARHLARLLMLGDVTAVAIPSREQEAARDLVRAREDCRGDLMSTRHRLSKLLLRQGIVYRGGKAWTGKHELWLRCQRFDDPALQLAYDTSFEAMLATIARRDRLDRAIEQMAADSEFTPVVSRLCCVRGVATLTAFGLAVEIGHWHRLTGRSIGAYLGLVPTEYSSGASRVQGGVTRTGNGHARRLLIEAAWHHRARYRPGATLRRRWDRSRRAVAFTPGWQGRWA

SEQ ID NO: 77884 - protein, 340 aa, unidentified
MEITTIGIDLAKDVFELHGVDGKGRIVLQRRLTRKRLLECLAKLPACLVGMEACGSAHYWAREISQLGHEVRLMSPQFTRAYVKGNKNDVNDAAAICEAVSRPSMRFVPVKNQPQQDIAALHRVRAQLIKNRTALTNQIRGLLGEYGITVVQGIDRLRRALPVILEDEANGLSGMFRETLAEMAERLQWLDERCQRYERRIELVFRQDERAKRLGQIEGVGPLIATALVAAVGNAREFKSGRELAAWLGLVPRQHSSGGRSVLLGISKRGDRYLRALIIHGARAALRVAERKRDPRSIWISRIKLRRGPNVAAVALANKNVRVMWALLVRGDNYRTLAAA

SEQ ID NO: 77885 - protein, 346 aa, unidentified
MHYIGMDSHISTLDFAVVNESGRLVKASRVATSVNGFIEFVKTVPPPRTIYMEEGTLAAWALETCVHFREKLVITDAKENHWIGSSGQKNDSIDALKLAQLARGGYIKEIHHPVGQRRRFRELMIAYHDAVRSTTRIKNKIKARFRQNGIQCTGTTVYLETHREEWKGKLPQEATLLLILEGLWRQLEQSEQTEKELLAAARVQAKHYPEIKHFEAIPGIGFISAATISAILETPYRFADKRKVWMYAGLGLMKRSSGGKTYSEKLSKDYNRLLKYSIKQAAEAAIQAKDNPFRRKYLDMTLLHGIAPHRAKLTIARDMLATMWAMWRKGEKYSLEIREKAACKQG

SEQ ID NO: 77886 - protein, 412 aa, unidentified
MKDLLEISCGLDVHKEKIVACILTGPLGKPTRSEIREFSTLIPDMIALRNWIVSKNCHHVAMESTGIYWMPIYEILEDAFSGDITLLVVNARHMKNVPGKKTDMRDSEWISTLLRAGLLNGSFIPEKRIREFRDLNRYRKSVIRDITSQKNRIEKFLQSSGFRLSSFISDIFGASGRNIILHLIEHGQIDKTALDSCLKTKTRNRIDEILMSVNGTLSEHQKAFLRILMTHYDSLKKHLAEIETSLEEDMAPFALQVEQLNSIYGISTTASCAIIAEIGIDMEPFKTAEHICSWAGLCPGNNESAGKRKSASVTKGNPYIKSMLCEIAWVIAGKRNTYLSAWYWRIKQKKGAKKAIVALARKLLVIIYTMLKQGTLFDESCFETRRKHCEQKQLSRYIRELEKHGYHVEAQS

SEQ ID NO: 77887 - protein, 334 aa, unidentified
MKSDMVHMGVDVSKEKLDVFVPAQKEGMRPTAKELDNSVAGFRELRDLARKAGATVCVEPTGGYELELIAFMHKFSVPVAYADALRVRQFARAEGCLSKNDSIDAALISRFADKIGVRLLEEKDVEAVELKRRAKFRQTMSDSRTAMVNRLETEVDPDMKALLKEQIKRINRLIAKAERLCLETVRKNDSTNKLCERFTQVGGVGAITAISILAGLPEIGTLSDEKLNRLVGISPEEDQSGSRDRLRRIWGGRQDVRNALYMAATASLMWNSILGAYYRKKRAEGHPHKWAMVPTMRKLLSLLNRIARDPDFTPRPEPESTKRNAIATRKRKAA

SEQ ID NO: 77888 - protein, 344 aa, unidentified
MSNLDSCGIEVSAKQLVIRLRRQGDWEPLRNFTNTPQGHEMVVRYLRQAGRVVRVCLESSGLYGLDLALALSAATGIEVMVANPRAVRHFAHALMKRSKSDPIDAAVLEEFAARMPFQAWNPPSAGALALHALARRLHELVQIQTAEKNRQHAAGLSRTIPTVVRRDLARSLRAQQRAIERLTAQARKLIAQDPQRRERFELLDSVPGIGECSAVQLLGELAVLAPDLDARQWVAYGGMDPREYSSGSSVHKKIRISKAGNKHLRHSLFMPALVAVKHDPYLAAFYQHLLAQGKFKMQALVAVMRKLLHALHAMFKNHQPYDGSKLFRLPAVTNQEVPHAPLAG

SEQ ID NO: 77889 - protein, 340 aa, unidentified
MKEVITVGLDIAKHVFQVYGVDQKGDTVLRRKLRRSEIISFFDHLPPCLIGVEACATAHHWARVLINLGHEVRLMPASYVKPYVKRQKNDASDAEAICEAVTRPTMRFVPVKSEEQQSVLMLHRARELLVRQRTMLINALRAHLAELGIVMRQGPTGVSTLIGLIEDDEHDLIPAFTRRALTPLVEQLRDLYRRIAELDHEIIQWHRTSELSRRLETIPGVGPVTASALSATIADASLFKSGRQMAAWLGLVPRQNSSGGKERLGRISKQGDPYVRKLLVIGAHAVLRFSRKEGTGPKKWAADLLVRKPYNVVAVALANKMARIAWAIMVSGERFRSIPA

SEQ ID NO: 77890 - protein, 338 aa, unidentified
MNIVFLGIDLAKNVFQLCGLNQAGKPVYTKRTGRKELLQTLANIPACLIGIEASTGAFYWQREFEKLGHKVKVISLQYVKPFVRGQKNDGNDAQAIAVALMQPTMQFVPPKSPEQQDIQALHRARQRIVNHRTATVCQIRGLLLDRGIPIGSAVSRARRAIPLILEDAENGLSSRMRRTIAELYDLFNDLGRRIHFFDKEIETVFRQSEACQRIAKVKGIGPETATAVVAAIGKGTEFKNGRHFAAWLGLVPRQHSSGDRQVLMNMTKKGDKHLRTLFIHGARAVVRVATNNNDGHMNQWVNQLKERRGFNKTTVAVANKNARIIWSMLRNDTGYQVV

SEQ ID NO: 77891 - protein, 355 aa, unidentified
MEGTKYIGMDVHKDSISIAVLNSSGKLVMESIIETKAITILEFVHGLRGSLHLTFEEGTWAAWLYDLLKPHVTKLVVCDPRRNGYLKQGSKSDRIDARKLAELLYSNMLRPVYHGEHGVRSLKELARSYLTITKDQARVMTRVKAVYRSWAIPCAGKQVYGQRHRLEWLGRIQEPGVRRRAEFYYAELDALRSLRLVVRSELLLESKKHNVSTLLSQIPSIGPIRAALLIALLQTPDRFRTKRQLWAYSGLAIETHDSAENQYVNGQLQRSKKQSSIRGLNPNHNPDLKNLFKSASAVAAVKAGPFQKFYAALIRKGIKPEMARLTLARKIAAITLIVWKRGVSFDARYLNPQTA

SEQ ID NO: 77892 - protein, 330 aa, unidentified
MNVAGIDVAHKTLGVVLSAEEKAGKAQEFANTASGHQALVKALKAARVERVCLEATGSYHLDLALALEASGLALMVANPKAAKRFAEALLTRTKTDAVDAAVLAQFAQRMPFEPWQRPDNQALALRACARRLEALNRAKTEAKNQLHAFTQTQTTPAVVLADVRLTITQCEAQIKDLRTWAEGQIQADTHLKEVFDLLTTVKGIATASAIQLMGEILVLPADMRAKQWVALAGLDPRQSISGTSVHKKPRLSKAGNRYLRLALFMPALSAARHDRHVNGYYRHLIEDRGLKKIQAVCAVMRKLLHAIHGMLKSRQPFDGSRFYTLAETPT

SEQ ID NO: 77893 - protein, 412 aa, unidentified
MDVYCGIDWAEDHHDIAVVDRDGRLLARRRISDDAAGLAQLLGLLAEHGDTPEDPIPVAIETPRGLLVACLRATGRPVYPINPMSVARYRDRHSVAGRKSDHGDSFVLASVLRTDMHAHRPLPADTELAQAIAVLARAQQDAVWDRTTAHNRLRSHLREYFPAFLAAFADARGGITRPEARAVLAAAPTPADAAKLTVTQLRGILKKAGRSRGLDTEAARLHEAFRAGQMRQLPLVEQAMGRQALALPGQLDAACAAAGDLEHAVTQSFNLHPDAGIITSFPGLGALTGARVLAEIGDDRSRFQDAKGLKAYAGAAPITRASGKTRSVTRRKVKNNRLNAAGYNWAFSALTASPGARAHYDRRKDTGDRHAAAQRNLFGRLLGCLHHCLTTGQHYDEATAFPAATKKISQAA

SEQ ID NO: 77894 - protein, 406 aa, unidentified
MEVLHERCCGLDVHKKSITACIITPKGKEIHTFSTMTRNLIELVDWVKDNRCSHVAMESTGDYWKPIYNLLETEDLQPMVVNAQHIKTVPGRKTDVKDAEWIARLLRHGLVQGSFIPNRDQRELKEVVRYRRSIVEERTREVNRLQKVLEGGNIKLSSVASNVLGVSGRNMLEAMIKGEEDTSVLADFALKKLKDKKEDLKLALEGLLGAHQLFMLEKQLAHIDYLNELISKLDEEIEKRMTPFAEELKLLDSIPGVGKRTAEQIIAEVGTDMSRFPTPGHLCSWAGMTPGHDESAGKKKSTKTRKGNKKLRSALTEAAKAAARKKNNYLSAQYHRIAARRGKNKASIAVGHTILSLVHILLTRKQEYVDLGYNYFDERKKDSLIKNSIKKLESLGLVVSVQEQIA

SEQ ID NO: 77895 - protein, 502 aa, unidentified
MALRTWRPFHWKLYVAAAGHENETGPHAVGWDSGRGSRVYLFGARSPYWKLPGSVSRGYECDHLFRDEYVGENCVLFALRRGHSHSREEAAVEIVHARCCGLDVHKKNVVACVLISQPDGLIERQVRTFKTMTEDLLALADWLSSLGVTHVALESTGVYWRPIFNILEDDSRTLLLVNPQHMRAVPGKKTDVRDSEWLADLLRHGLLRGSFIPPAPIRAVRELTRYRKTLVQARTDEINRLQKTLEGANIKLASVASDVLGMSSRAMLTALLDGERDPDVMADLAQGRLRNKLPELRQALAGRIQPHHTILVGQILAHIDFLEQAIGQMQTEIERCLPPFEEALELLQSIPAIKAVAGAAILAEIGTDMSRFPSAGHLASWAGLCPSNKQSAGKRMKAPVNRGNVWLRAIMGEVAWNAVKMRDTYFHAQFQRVARRRGRQKAVIAVAHSLLIVIFHVLRTGRPYSELGGNYFDQLDATRVERHHIHRLEQLGYTVTLTPVAA

SEQ ID NO: 77896 - protein, 429 aa, unidentified
MEEVDELELLVERVAGLDVGKAELVACVRVPHPSKPGRRMQEVRAYATTTAELVVMAVWLRQHRVQRVVMESTGTYWKGIYYLLEAEGLDCWLVNARDVKNLPGRAKTDTLDSIWLAKVAERGMCSPSLVHPEPIRRLRNLTRYRRALVADRGREMQRAEKLLEDAQIKISSVLTEVHGVSGRAMMEALIAGKRDPHTLARLARGRAKVKTAQLEEALRGFFTDHHAVMLRMMLDNIDRMSAQISALDGRIEEAVARFSDRVDRLVDLPGVDRVAAAELIGEIGVDTSRFPTAAHLVSWAKFCPQTHQSAGKTKRKGRGKGNPWLGGTLGRIVFGLSRTDTFLGTRYRRLAKRRGKQKAIVALGNSVLTVVYHLLADPEARFDDLGPGFYESRINTNRRARNLATQLQAITGQKIVIRDGKAVIAESAA

SEQ ID NO: 77897 - protein, 336 aa, unidentified
MPHYVGLDVSQKTTAICVVDEQGRRLWRGACVTDPGAISARVLRHAGVVDVKVGVETGSMTPWLVHGLRSAGLDVECLDARRVKAALQMRLNKTDENDAEGLAQVLRTGWYRPVHVKSFDAHRARALLGARAQLVGMTTRLSNMIRGVLKTFGLLPGAGRGLRFDRSVETLLEGAPEIGLIVRPLLATWRQLREQIAVFDKAVQQRVRADPICRLLMTVPGIGALSSLVYVSTVEDPGRFSRSRAVGAHLGLTPRRYQSGETDRSGHISRCGDGLARTLMYEAAVVILHRIKRSLHLKDWAAAIEQRSGPGKARVALARKLSVILYSVWRSGEPFR

SEQ ID NO: 77898 - protein, 317 aa, unidentified
MSDHSTLSAGIDVAKNKLDVAIHGRDARLSATNDADGWRRITHMLREAQVQRVGMEATGGYERDLAQHLRHDGFEVRLLQPMQTKAFARLHLRRAKNDAIDAALIAACTAMLDTPQDAHDPRLDGCADLLTFVEQIEEDIARCKTRLEHIRHPRLRRLVTADIARLRARAAAELKRIAAGLRQFDDLAIRLDLVLSIPGIGERTAIAVIVRMPELGRVSREEAAALAGLAPFDDDSGSQRGQRHIAGGRSRLRRSLYAAALPAAFRWNPALKSLYARLTARGKTHRAALVACARKLIVYANTVVQRGSPWQTQPERT

SEQ ID NO: 77899 - protein, 392 aa, unidentified
MTYFIGIDLAKYKHDCFIMDENGEVIRDSFSFNNDKEGFNTLLNVLNSLDLNQEKRIGFESTGHYGSNLKIFLERNGYSFMEFNPLLVHRHFKSETLRRTKNDKVDARKISSYLYTREYKPNPNSSYHLNCLKSLTRTREALIKERTRHIIHITNVLDKMFPEFKPQFNNQGLNASSAMYLLENYGSPSKMANMTRASYDKMKSELRHAISYAKFLKIKELAKNTIGNEDEILVFELNTYLELFKELDKKILEVEDKITKEFSIMKCHMTSIKGIGIITAAGILAEIESIDRFDNPGQLCAFAGIEPSENQSGTHDGGGKMVKHGSPHLRNYLMQSAGYMLIHNPVLYEYYLKKRNEGKCHTVALSHVAKRLTRIIFYLEKNDTDFNIDKMR

SEQ ID NO: 77900 - protein, 424 aa, unidentified
MKKEHPSKIDQEASIYERCAGIDVHKKVITVCLRIGRKTQVREFGTLTCELREMAAWLKENDVQMAAMESTGSYWKPLYNVFEQEGIPAMVVNAGHMKAVPGRKTDVKDAEWIAKLLSQGLLKASFIPDREQRELRELTRFRKSQIEERARTLNRLQKMLEGANIKLSSWVSDIDGKSATQLLELIIGKEEFTAQEVEKLRHFNMKASSEELFKSLEGIVTPIQRELFTHIMNVIKEQTAQIEKTEELILGYMTKAYQEAADAIDAIPGIGRISAQQILAEIGIDMSRFPSAAHLSNWAGICPGNNESAGVRKSGKTNYANKTLKSTLTQCAQAVKKNKNSFFYAQYQRLVVRRGKNRATMAVAHSLLIAIYHVLSGKSFCDLGADHYNRFNKEKKINSYVKQLSKLGVSVPDDAVRVALVKTA

SEQ ID NO: 77901 - protein, 400 aa, unidentified
MFIGLDVGKAEHHAVALTAAGKKVYDKALPNDETRLRGILDELARAHGPALLVVDQPATIGALPVAVAQACDGVEVAYLPGLAMRRIADLHPGSAKTDAKDAAIIAEAARTMPHTLRSIRVDEEQIAELAMLAGFDDDLAAQITATSNRLRGLLTQIHPALERVLGPRITHPAVADLLGRYPTPAQLRTAGPGHVRARLRKHAPRLAASLTEQIFQALDEQSVVVAGTQAAATVVPILAEQLAGLTRQRAGLASQVEAAVEAHPLHPVLISMPGVGIRTAARILTEVVGKDFVDAGHLASYAGIAPVTRRSGTSIRGEHVARGGNKRLKRALFLSAFASLSHPPSRAYYDRKRAQGKRHNQALIALARRRTDVLYAMLRDGTLYQDPTAPPAPSSVALAA

SEQ ID NO: 77902 - protein, 338 aa, unidentified
MSESLFSVFVGIDVSCEKLDIAWRNGQDWVMRKVANTWPEVQGFAAELAVKLPNCCCIAEYTGTYSSKIALALCQAGLQVSLITPAQSKAFAAMKHRTTKNDRSDARLLAEYGVFNAGELRFYAPPSEEQLHFRQLLDTIEQLEKMRQQTRNQRHAYEQLPPQHQQKVILDTYQNTENQLDKQIDELNETLKSLDNHDEDLDKTRQLMTTVKGIGGKTANVILAKTNGIKKFQTAKQLAKFAGIAPTEKSSGTSVRGRRGINRSGNASLRKALYCATWSSLRGNAACKTLYDRLRSKGKPAKVALIAVANLLIRQIFAVVTSQKPFDNELYLKNCTPT

SEQ ID NO: 77903 - protein, 433 aa, unidentified
MRFYTTQHRFYCGIDLHARTMHLCILAQDGNVVLDRNLPCDFPSLLQAIAPFRDGIVIGVECMFGWYWLADRCADHDIPFVVGHALYMKLIHGAKAKNDRIDANKIARLLKGGNFPLSYTYPRGMRETRDLLRRRMYLVHKRAELITHLEILNAQNNLPPFGKKLAYAANRAELDIPQRFADPSVQLSVTVDLDLIDKLDELIAKVELHLTRTAKVDDVQTFHRLRTIPGVGPILALVLLYEMHQVERFDNVGQFLSYARLAPCDHESAGKKLGSGGKKIGNAHLRWAFGEIACLFLRGSERAKQWKQKQEKKHGTAKALAILAARLARAVYFMLRKEEAFDEERFFTGQAKPVLAPTSPTKPAAAAGQAKPAPTKSTKQDAADRQAKSPAAPTRSVRPAAAKEQAKSSPAPTSPSKPAACRGGRRRVATTSP

SEQ ID NO: 77904 - protein, 393 aa, unidentified
MRFVGIDIAAEKHFVAIVDAGGAVRRKPTAFAEDADGYAKLFDLLGDPGDLLVAMEATGHYWKNLFAALVTRGIAVALLNPLRTHRFAGEDLQRAHTDRIDALGIARFAAQKRPPATPVTASTTEELRELVRFRDRVVQDHCDRLRQLHRLVDLGFPEFTRHVDLDSAMALAILRDYPTAAAFHGLSAHALAAVRYDGRHTIGVHLAQALIDAAARSVGQHHGEVYRLQIRYACEDLELLGRRRRALERDIERRLDNHDLGPLLTSIDGIGAQTAARLIAELGDPAQFRSAGALAAHVGVVPATRHSGKSAPVHASLSPIGHRRVRAKLWMPALSAIQHNPWIRAYYTGLVARGKLKKVAIVAAMRKLLIAVYAVAKTRRPFEPRVAAVETQA

SEQ ID NO: 77905 - protein, 389 aa, unidentified
MLLDHPSDGLTAIRTHIGAIFVSLELSRSNWLVTSLSPGKGEKMSKHSIAAGNVAELLTLFAEFKRKAEVRTGQSYPIITIQEAGLDGFWLHRVLQQEGIESHVVDPASIATPRRRRRAKTDRLDGEALLRALLAYKRGEPRVCAMVVAPSPEEEDRRRLCRERRTLIEERIAHVNRIKGLLFAQGICDYAPMRRDRRARLEALRTGDGRELPAHLKAQIGRELDRTELLLEQIEAVETERDGLLAAARKPASEGAAPDVVTMLLALKGMGANFAAALWSEAFYRQFANRRQVAAYAGLAATPWQSGGIRHEQGVSKAGNPRLRTTMIQLAWLWIRHQPQSALTRWFKERSPQGRKRAIVALARKLLVALWKYVTQGVVIEGAVMKPAA

SEQ ID NO: 77906 - protein, 403 aa, unidentified
MEVYVGVDWGGLSHAVCVVDAKGRVLDRFQASHDREGLQALALRLMKHGEPGDIPIAIERPSGLLVDALVEAGFVLMPIHPNAVKACRPRYRAVSAKSDPGDAYILADILRTDGHRLTQLRPQSDAIKALRGLVRGRDDLVSSRVALANQLTALLDDFWPGAALIFADVATPIALAFIERYPTPESAARLGPKPLAGFLAQHSYCGRRSAEALLERLHAAPAGRAGETESDAKGELARTLQSLVGEIARITHRIEHMIAELPDGRIVMSFPRTGRVCAAQILAELGDVRERFQTPDQLFAEAGVAPVTYASGKSRGVGWRWACNKRLRAAITCFADNSRHQSPWAADIYKRARARGCDHPHAIRILGRAWARVLWRAWTDRLHYDPTRHAGAQPFQAPVGASG

SEQ ID NO: 77907 - protein, 338 aa, unidentified
MEHIAIDLGGRESQICVRAADGEVMFERRCATKTLGKYLSSRPKSRVIVETCSEAFGIAELAMGSGHEVRVVPATLVRSLGVGARGTKTDRRDARILSEVSCRIDLPSVHVPGQESRRRKSMCGVRDSLVRARTQLSNCIRGWLRGQGHRLVSGSIETFSFRVHQEVRDVPAFVERQLQVIDNLTVQISAAEKELADEARADSTCRRLMTVPGVGPNTALRFVAALDEISRFDGAHKVEAYLGLVPGENSSSERKRRTGITKAGSPALRHTLVQAAWAARRCRRRDPLQAWSHEVEKRRGRRVAMLALARKLAGILYAIWRDGSQYEPRKGAKTQPES

SEQ ID NO: 77908 - protein, 306 aa, unidentified
MSALPTLGVDVAKHSLHTDDGRRQHVVPNQPAALRRWLRRLPPGTRIICEPSGGYERPLLACAHQAGLSACLVNARQARAFARSVGRLEKTDRLDAAVLRHYGVCVQPRPLPPPDPARLRLQQMVRTRAHYAGTLQSERNRLELLDDAALCRLTRQQCGHWERVLAKLDAQILEHIEAHPRLRDRMQTLCLVCGVGEQTALTLVAELPELGRLSARAAAKLAGLAPLSQESGQWQGRRHIAHGRANVRRALFQAALVAARHNEHLRPFYQRLRANGKPPKLALIAVARKLLIFLNRLLKDEPQAQP

SEQ ID NO: 77909 - protein, 372 aa, unidentified
MTSIIYVGMDVHTTNYTLCCYSMEDDRFFAEVQVEPDAKNILKYLARIEKQQSRDCRMVCGYEAGCLGYSLYHQLYAHGIDCVILAPTTMMTKPGKRIKTDRRDARLISKCLAFHTYSPVYIPTEVDDAVKEYIRMRDDANSALARVKQQIIAFCIRHGKIHDGKSYWTNKHLEWLSSLDLGNKILSEVLQEYLIRYYQLREQVDMYDMRINELAQAEPYRQKVEKLGCFRGIAAHTALSFCVEVGDFRRFATAQQFASYLGLVPGECSSGDKQQYTGITKAGNSHLRKLLVETAQVFGRSATKSGKSVALKERQAKCDSLTVAYADKANARLKKKYFKIAMRSKVNIAKTAVAREMACFIWGMMTDNISCA

SEQ ID NO: 77910 - protein, 367 aa, unidentified
MKKGSTVAAKQGRNFTQQKLTIGLDLGDRASWYCVLEQTGAVLWEQRVSTTPKAMREAFSTVTRSRIALETGTHSPWVSRLLAEFGHEVIVAHARNVRLIGESRKKDDRWDAQTLARLARIDPQLLCPVKHRSAKAQADLTVIRARAGLVRARTALVNTARGLAKSYGERLRSCNVRNMNPEKAEGLSPELQTALEPLLLAMESLSEQIREYNERIENMAQHSYPQVALLKQVKGVGTLIALTFLLTLEDPLRFRKSRDVGCYLGLQPGRRNSGQSEPQMHISKEGDPYLRTLLVQGAQHILGPFGVDCDLRRWGLKLAERGGKSGKKRAIIATARKLAVLLHHLWASGEVYEPLHNSKQNAMATAA

SEQ ID NO: 77911 - protein, 429 aa, unidentified
MKIIYPRVCGIDVHKKFIVAVICISESVEPVYLKKRFSTFHNDLIRFREWLIQNDCQNVCMESTGKYYIPVYNVLESHISNIVVANPKWVCAVKGEKDDDKDAKWIADLFKFGIVRSSFIPQKDFRILRELTRYKYKLVNMRSSEKNRYQNALTSGNCKLDMVFTDVFGKSASNIIDLILSDNPYTDEDILSKVHKNCKASPDMILNSINGTDLTPVQKSRIELVNDHIKQLSSNIQRLDKLIDLMIEPYEDYISFLCQIPGVSRNSAIIILSEIGVDMNQFTSSRRITSWAGLTPSSNQSAGKKKSVRISRAGVYLKPCLVEVAHAAVKDKNHSYYANKFNKISKRRGKKRAYIAIARKILVAAYHMLLTGEIWNPADLAEVETPVEQRIKYVKNNLKSDIKQLLDIGLTVEELTLMIQQNANNIATQ

SEQ ID NO: 77912 - protein, 394 aa, unidentified
MILVGIDIGKNQHTFSIIDKGTGEILSNPSVFNNNQEGFLSLIKKLSDYAKSELLIGMEDTGHYHFALLKYLLDSHYTVALINPATTDLTRKLQGGITKNDSLDSLTICDVISSNHRKKPYRITKVNRFDLYEQKQLTRHHHNLKEELNIYKNRLQKCIDIVFPEFNSLFRSKYGIVYMNVLKTFASAKKIADSDIQTIRECFEYNRRGKRISLSAEQLKAAAKTSVGIHSVAEEIQIRHLVRQIEMIEKQLSETDKKIEEFSLQNDSPILSIPGISHFSGTSILAELGDICNYTKASQIIKFAGVAPYHHESSQFTAQHTAITKKGSRYLRKTLYQIILTVINNNKVFTAYYNKKLAEGKGHRCAQGHCIRKLLRIIYHLLSTGQTFDPDLLR

SEQ ID NO: 77913 - protein, 322 aa, unidentified
MSSFVLGIDVSKDKLDCALQLPDGKLRHKVVSNAPEGFKRLDEWLAQRGVGQVHVCMEATGIYWEASAEYLSGREHTTVSVINPAQIKAFGASRLVRTKTDKVDASLIAQFCAERCPPPWQAPSAQEQALRAMVLRLEALQNMHRQESNRLLVARDAVREGIEAHLAWLDEQITQLVRQINDHIDNDPDMHDKRQLLESIPGVGERTVAVLLAFYADPARFGNARQAVAFAGLNPRQHESGSSVRGRSHLSKVGHAFIRKALYMPAVVAAYKTTWGGRFRQRLVRRGKHPKLIIGAMMRKLLQVAYGVLKSGKPFDPTLHET

SEQ ID NO: 77914 - protein, 343 aa, unidentified
MQIRSVGIDLGKTTFHLVALDDNGKVLLKRKFTQKQLITFTANMQTSLIGMEACGGAHFLGRALRAQGHDVKLIPAQFVKPFVKSNKNDFLDAEAIAEAVDRQNMRFVPIKTDDQLDLQALHRVRDRLIARRTSVINQLRAFLLERGLVFAKSPAKLRERMPEILENAEEDLTPRMRNLLAMLWNEWKDLELQIEEMNDEVERIASSDAGCMRLRQIPGIGPLVATAIVAAIGNGAAFHKGREFAAWLGIVPRQYSTGGKARLYGISKRGNNYLRKILIHGARAVVLRSKRDRIAMGAWMTALEARAPRNVLIVATANKLARIAWAVLSSGKDYRAVQDPVPA

SEQ ID NO: 77915 - protein, 410 aa, unidentified
MEVLYRRCCGLDVHKETVVACLRLVSDGKVDIEVRTFETTTASLIALSEWLAQNGCTHIAMEATGIYWKPVWHILADGEFQLVLANSAHVKNVPGRKTDVNDATWLAELLAHGLIRPSFVPDTQTQELRTLMRTRKQLVREKASHILRVQKTLEDANIKLDSVITDVMGMSGRAMIEALIAGESDPTKLASLANYRLKASQQNLREALRGRVTKHHRFLLRLHLNQIDALDAAIAMIDRQVEAGIAPFRAAVEQVSAVPGIRDVGAQVIVSEIGTDMSRFPSDGHLISWAGLCPRSDESAGKRRSNRLRKGAPWLKTTLVQCAWAAVRKKDSYLQAQFLRLKARRGPKKAIIAVAASILTAIYHMLKDGTTYQDLGSNHFQKRSKNQQTLRLVKRLTDLGYDVALKPLAS

SEQ ID NO: 77916 - protein, 317 aa, unidentified
MTDHAPQFVGIDVSKDRLDIAVRPMGNYWQCPNAAKQFPDLMARLRTLAPKLIVLEASGGLHVPVSAALAEAGLPLAVVNPRQVRDFAKATGTLAKTDALDARVLAHFAEAVRPEARPLPSAQTLQLDALMTRRRQLVAMQSAEQNRLASAPACVHPDIEAHLRWLAQRIDDTDKALRTLIENSPAWRAKDELLQSMCGIGPVSAGTLLAALPELGTLSNRKIAKLVGLAPLNRDSGRMRGKRTIGGGRADVRTALYMPTRSAVRFNPALRVFYQRLKHAGKPEKVAMTACMRKLLTILNTMLKTNTHWRKTLATQP

SEQ ID NO: 77917 - protein, 304 aa, unidentified
MNGIGIDVSKRQLDIGTTDGETLQVGNNRSGFSELDVWLKKRPTRQIVLEATGGYEQPVLDFLHKAGHPVVRANALRARKLAQGLGQIAKTDRLDAYALAQMAALVKLPPYQPLQSWQQKMREFVRARRQAMDALTIARQQQEMVLDHELRRLLQGNITRLQTLVEHLGKQIVEQVGQQPQLKMLKSMKGVGPVLQAVLASYLPELGRITGKRIASLVGVAPMSHDSGTMRGKRSIHGGRAEIRQVLYMAAMSAMRHEPRLRDFYQSLRARGKEGKVAIVAVMRKMLVILNARVRDAESGLVPA

SEQ ID NO: 77918 - protein, 370 aa, unidentified
MKQRLLYVGLDVHKNTTDVAIANGRSNGKVRSYGKIDSTLDALNKLIKKLQDGDKELRFVYEAGPCGYPIYRYLDAKGIHCSVVAPSMIPRRSGDRIKTDRRDAINLARLFRAGELTSIYVPTPEDEAIRDLVRCRDDMKRFERKARQRLLSFLLRHGYQYSGKKNWTKGFYTWLATVRFSHSAQQVTLQEYIDVTNECSERIQRITQQIQVHVEEWNRAPFVKAYQALRGVSIIVATTVVAEIGDMNRFQSPKQLMAYLGLIPSEHSSGKTVRRGPITKTGNSHVRRVLIEAAWTYKMQARVSNILLKRQKGLPKSVCDISWKAQTRLCARYRRLYARGKSRQTVVTAIARELSAFIWAIDKEIQLAVL

SEQ ID NO: 77919 - protein, 361 aa, unidentified
MRRPKDKLIAGMDLHGNNVVIGVINQDGKRVAHRKVDCDLKQVIEFLRPLKAQLQSAAVESTFNWYWLVDGLRDAGYGIDLANPAKIEQYSGMKHADDQHDAFFLAELQRLNILPKAHVYDPQLRPVRDLLRRRTNLVRQRTALLLSFKSLYARTHGESLDLNEVKKMEPAEAAKLYEHPANQLIAEVQAEHMQALEKSIRRIENGVLASAREIPLYEKLLTIPGIGRILGMTITMEVGEVKRFKTDGDFASYCRMVDAKRLSNGKCKADNNQKCGNEYLAWAFVEAANYARRYDEHCRRWYDRKAAKTSNVIATKALGCKLAKAAWHVMARKCDYDPTRMFPELATKATPKTITKTMKRN

SEQ ID NO: 77920 - protein, 414 aa, unidentified
MKLFVGIDVSSQELQACLMNPDGEKLDALKVKNDLQGASHLRDRIVATADKLSASEIHIGLESTSVYSWHPAMYLHQDPALKALGAKVFTINPKLISKFKEAYPDLDKTDRLDAWIIADRLRFGRLTTTIVMQEQYIALQRLTRMRYHLIHSLTREKQYFLQNLFYKCNAFTSEVESSVFGHAILEMLSEKYSLDDIATMDVADLADYLKEKGKNRFPDPERVARCIQKAARDSYRLSKVVEDSIDLVLGVSIQTIRSIQAQLKELDKAIERILDGMNGARCLRSIPGIDKVYAAGILAEIGDIERFNDQAALAKYAGLTWRRHQSGSFEAEDTKRIRSGNRFLRYYLVEAANSVKNREPEFGEYYRKKYQEVPRHQHKRALVLTARKLVRLVDALLRNDQLYTPRRKVNHAKG

SEQ ID NO: 77921 - protein, 409 aa, unidentified
MEVLCSRCCGIDVHKVCLVACLRIQDGRRVTPTIREFGTTTAELLRLQAWLSEAACTHVAMESTGIYWRPVFNVLEGTFQVVLANAYHIHAVPGRKTDVRDCEWIANLLAHGLIRASFIPPAEIRDLRDVTRHRKSVIRDRVKTANRIHKLLESANIKIGNVMSDVLGVSGRAMLDALLAGDTDPAHLSTLAKGSLRTKVAQLSDALRGSFTAHQACLLGLLLTQLDQASALIAACDARVLELAKPFEPIITRLQTIVGVGRRSAEVIVSEVGIDMTRFADAGHLASWARMCPGSHESAGKRRPAGTGKGNNWLRTTLLESAWAASHVRRSYLGAQYRRISRRRGPKRAAIAVAHSILVIAYHLLRDGVDFKDLGGDYFDRTDTAKLTRYHLRRLADLGCDVSMIARPA

SEQ ID NO: 77922 - protein, 371 aa, unidentified
MTSILYVGMDVHKENYTLCCYSYEKDALEYKQTLPPDYKMVLKYLERIREQRGGDIEFVCGYEAGSLGYSLYQQLTSRGVNCVILAPTTMGITNTCNIKTDKRDAGNIARCLAFNTYSAVYVPTAEDEAVKEYIRMRDSQKSALKSVKQQILALVLRQGRHYDLGKSYWTSRHVAWLRSLDLGGVLQESLEEYLITYDYLTSKIERLDMRIEEFAGSEHYQEKVKKLCCLIGVKTHTALSVVVEIGDFARFAKADKFAGYLGLVPGEDSSGSKQKRTGITKAGNSHVRRMLVESAQSYTRGAIGYKSQALKKRQAGNTPEVIAYADKANERLRRKFYRMVLKNKSQRNVAATAIARELACFMWGMMTDNAA

SEQ ID NO: 77923 - protein, 396 aa, unidentified
MATIWAGIDAGKSHHHCVAIDESGCRLLSRRVANDEPELLELLTDIRALGDEVTWGIDLADGGAALVIALLVGHDQPVHYISGRAIHRASESYRGEGKTDAKDAAVIADQIRIRRDLQPLRTGDETVTDLKILTGRRMDLVADRTRTVNRLRAQLAGIFPGLERVLDLTNTGPLVLLTGYQTPAALRRTGRKRLETWLRNRRVLRADRLAETACEAADRQHTSLPGEKLTAQMVHTLAAEVITLNRQVGEIDKAIEARFREHRDFEVITSMPGLGVILGAEFLAATGGDMTAFGTADRLAGFGGVAPVPRDSGKISGNLRRPRRYNRRLQRVFYISALFSIRHCDESRRFYERKRGEGKRHIQAVLALARRRVNVLWALLRDGRRYELTPPTARAA

SEQ ID NO: 77924 - protein, 338 aa, unidentified
MIVIGLDVHKHALTAVAVDELGRTLAERTSTVAAEPLLAWARSLDPERLWALEDCRHVTRALEQALVAAGEPLVRVPPRLTAPQRRRGRSRGKSDALDALAIARAALQEPRLDHPRAGEERLRELKLLVDHRDDLVAERRRCQQRLRWHLHELDPSLAVPLGALDRSLWLDRLGRRLARFEQTTQVRIARELVARCRSLTRSVLELEHELTERTQVLAPALLRLPGCGPLGAAKLLCEIGPVERFASDAQLARHAGVAPLEASSGKHQRHRLDRDGNRQLNCALHRIAITQGRVHPPARAYLERKQSEGKSRREAIRCLKRQLARTVYTTLRSEPSLT

SEQ ID NO: 77925 - protein, 322 aa, unidentified
MNKYKETFGVDISKDVFDVHGSKAGHHQYKNDEPGFKKFLKRLPDDCLVAMEATGYYHYRLAQFLYKNAIVVSVINPLSIKRFIQMKLAKVKTDKSDSKAICEYALINEVPIYSALTDLQSECLQLFRLLDVYIKQRTAIKNKMHGEETLGIPSNFVYRSLKRHRKWLDKEIKSIEEKLLSLVKEDQQQQLSLLKSVPGIGPKTALFLIVITDGFSKFETASQLCSYAGITPTTRESGSSVRVSPRISKVGNKKLRNLLFLCSFNACKHNKACRELYERIVNKGKSKKLALIAVANKLLKQCFAIAKSGRPYDESYVSVLPK

SEQ ID NO: 77926 - protein, 338 aa, unidentified
MNIVFLGIDLAKNVFQLCGLNQAGKPVYTKRTGRKELLQTLANIPACLIGIEASTGAFYWQREFEKLGHKVKVISPQYVKPFVRGQKNDGNDAQAIAVALMQPTMQFVPPKSPEQQDIQALHRARQRIVNHRTATVCQIRGLLLDRGIPIGSAVSRARRAIPLILEDAENGLSSRIRRTIAELYHLFNDLERRIHFFDKEIETVFRQSEACQRIAKVKGIGPKTATAVVAAIGKGTEFKNGRHFAAWLGLVPRQHSSGDRQVLMNMTKKGDKHLRTLFIHGARAVVRVATNNNDGHMNQWVNQLKERRGFNKTTVAVANKNARIIWSMLRNDTEYQVV

SEQ ID NO: 77927 - protein, 387 aa, unidentified
MQKPHDNSKASPAAFMQDNTLIAVIELSLSNWLVAGLIPGVSREPLKKLEPKPEDLLKLLHGWRDEAIKAGRLITRIAVAYETGRDSFWLARWLRERGIDAHVIHATSVTVSREHRRAKTDRLDTAMLKRGFLGWLRGERGHCTVAIVPTMEEEDAKRPHREREGLVHEQTRVVNRMKSALIQFGVRNFNPKLRKASVKLETVRTPEGKSLPPNTIAALRRDMERLKIIKEQIRAIEKARLQQFEQKPEALANRMIYLLVRIYGLGLETADLLVHELLSRTLRDRKAVARYAGLTGSPDESGSKRREKGLSRSGNARVRKIMIQLAWRMVKFQPDSALVQWFKQRTENAKGSRKPMIVALARKLIIALWRYANDGVIPEGFRLHSAA

SEQ ID NO: 77928 - protein, 365 aa, unidentified
MKKIAYVGIDYHLNSLSLAVVVKGKNEPVDMVRLKNDDKLIRKYMSKLSERFEIKTCYEASSNGYSFQRKMAAWGYPCEVIAPSLIPRKPGDHRKNDFRDARDLAQNYAHGTLSIVHPPSEEEEAVRSLVRCRFAFKEAAKRVKQQINSFLLAQDQHWNRSKWTSQHRKWLWEMRMPNACLQQVLDEHLAHLDYLETRLAHLDGQIEQVATSPVYAPSVKKLAAMKGIKTLTAMLLIAEITDFRRFPNPRALMAFLGLIPSEDSSGDKRKDGAITRAGNKRCRSALIESVQHYARSPHMSAQMKSDLSQLDAHSAGVAVKCLKRLHKRFWSLTLKGKLRPVAITAIARELVGFIWAMMQPQPAIA

SEQ ID NO: 77929 - protein, 313 aa, unidentified
MGKHQLHLALLRPGRKPKLKVVANNAQGHQALLVWLNQQGCSSVHACLESTSTYGEAVAEVLHQAGHLVSIVNPARIKGFAQSELSRTKTDKADAALIARFCAAMQPGLWQPLPDEVKQLQALVRRLEVLKEIYQQESNRQETATAQVALLVEEHLDYLRADIKRTEELIKEHIERHPKLKEQSDLLKSIPGIGQTTAALIVGELGSVNRFDSAKQLAAYLGLSPQERSSGSSVRGRTQLSRTGSGRLRKAFYMPAVVAKRCNPLVSALCQRLAERGKQPMQIIGAAMRKLVHLVYGVLKHNCPFDPNFLSTP

SEQ ID NO: 77930 - protein, 365 aa, unidentified
MELRNIFVGIDLGDKNSVARIAVDRGKAERYGFVNNAEGRARLFEEVKRRAAAVNGKVWMAYEASACGFVLADEAQNRQMWCAVLAPTKMEKSVEQRKHKNDDRDADGVVETLRGHVLAGNRLPGVWIPDRQVRDDRELIRTRLELAEKQTKLKSQVQMLLKRYGLEKPSGLGAGWTVGYRQWLQALAETSSPQLGMGGRQALGSLLRQLQLIEEEIQRMDQYVKQLANEARHKPFMDELMKEPGVGRLTALVYRTEIGYAGRFRRGRQVGKFVGLTPSSYESGQQNDRKGHISHQGPPRIRKMLCQSSWVGIGSGEGGDRRLYDRIVSRNPKRKKIAIVAVMRRLAVRLWHRMRQVEMKLAATA

SEQ ID NO: 77931 - protein, 457 aa, unidentified
MKWYLGIDVSKGYADFALVSELLIQVEETFQLDDTRSGHEQLKIWLDALFRRHPHLEIDCGLESTGGFENNWYALLIKLSSSLPIRAARLNPSVVKNASKALLNANKTDAESAKEIAGYLKRYEDQIDFAVRDNQYASFRSLQNHLELVTKQKTQLINELKQILYSSFPELQRFCKQGIPGWVLELLMQYPSPEKLVRQKPMKLARIKGITEEKAKSLIEKAQATIASRSNSTYEFLIVQMATEVKHKQEKIKQLKQDLEDHCKGKEKEWLESIKGIGSYSAAAIMIQIEDIRRFASPKELASYFGLHPLIKMSGDKRMVSRMSKQGRPAMRALLFMCANSAVRCDEHMRTIYARHRAKGKNHKQALGAIMHKMTRVIWGVLIHEKPYDSRIDLANQSKNIQNPVQDELKETENKRRMQQFDSDAPISRIASKKRKVHAASQVGEAELVRDLEHEPG

SEQ ID NO: 77932 - protein, 382 aa, unidentified
MQPIDTVNPTILLAIELSASTWLVAARVPRLEKPLLHRIDGGDTAALLALISSLQARAARGLDATIGVVCCFEAGRDGFWLHRLLTAHGVACHVLEPTSILVNRRARRAKTDRLDAEGMLRVLAAYLRGDHQACSMVRVPTPEEEDAKRTHREREKLVQERLRIENRIEALLFTQGIRKRPSLRSWERDLAVLRTGDGREIPRHLRAELDRLRRRLVMTLELIREVEAERDQAAKTKPQDQACRKIAALSRIRGIGENFAAVLTREVFYRSFDNRRQIASYVGITPMPYQSGGMDRDRRISRAGNPRARTTMIQLAWLWLRYQPGSELAEWFRERVGTLAGRTRRIAIVAMARKLLIALWRYAETGVIPAGAEIRAETTVAA

SEQ ID NO: 77933 - protein, 341 aa, unidentified
MKKFIRIGVDLAKNYFQVHALVSDVGPAVTRKLRRSKMHEFFSQIEPSLIGMEACGSAHYWARELKAMGHEVLLMPPAYTKPYVKRGKNDAVDADACCEAMSRPGMRFVPVKSAEQQATLMLHKTRELLVKQRTMSVNALRGHLSEFGIIAAKGIGRVDELLDLVESDTTLPNAARASAKVLAQALEGLDKAIDDLEDEITNAQAQNEMTRLLYKVPGIGKIIASVIAASVPDPSVFKSGRDFTAWLGLTPRQNSSGGKQALGAITKQGNRYIRKLLVLGATSLLNVVGKRKGALRDWIVGLLAKKPARLVTVALANKLARILWAMMKTGESFRTEIFAKA

SEQ ID NO: 77934 - protein, 354 aa, unidentified
MTKAIQYVGIDVHQATLVIAVLLANGQLVFESTVATKREAIEQVLRGLSGRVWVAFEEGTQAQWLYDVIAPLVERVVVCNPRETRQGENKSDRIDARKLADKLRLNALKPVFHNSANVRTLKELVRIYESLVSDGTRSKLRLKAIFRGRAIPTPGESIYDAKKAAGQLAGITNSGAAFRARKLLEQIAKINELREESLIEMTREAKRHCAYKVLDALPFIGPVRTAQLIAVMVTPFRFRTKRQLWTMAGLSVVTHSSDDRRIVGGKLVRRKRPPMTRGLNHNHNRTLKNVFLSAASDASVRSGPLKDFFEAMVKRGIAADMARLTLARKIAAYTLRLWKKGGSFDPKKLTMSTT

SEQ ID NO: 77935 - protein, 316 aa, unidentified
MSKFYFVGIDVSKDKLDICFLGEKSDSKPKFETLPNKENIIKAYFESFKSDKLVVCFEYTNNYHILLQKALTSLKIKYNVLNPAKTSFYLRHLSHIKNDIKDALGLAIYAKNFSIDLFPDKFSKEYNLLKSYSSTLLLLTKISTQIKNFKASQKFVCDEAINLNISILQKTIENIKKKLRDINYRILKSLVPNSDEILAESKGIGIDLALVLFPILHFNRDKTSKQLISFLGLSPRVYESGSSVRKSHKINKIGSSNIRRVLFLNALSCSRFNPILKTKYENLINNGKCKKVALVAVMCAIIRYLKIYFKNEKSIN

SEQ ID NO: 77936 - protein, 353 aa, unidentified
MERYIGMDVHAASCTLAVISEKGRKLKDFPVETNGQALVEAVRMIPGHKHLVFEEGLQSAWLYETLSSHVDEIVVTGVTESRGQKSDKRDAYGLAEKLRVGSLDKPIFKSPRQFSLLRELSRIHMTLVGDVVRGQSRIKSLYRSRGILVTGVNVYGVRHREEWQAHLSSGSLARAIRLYAHLDFLLEQKKQAEADLLREAKKHRIVRILETAPGFGPIRAARLVPIVVTPHRFRTKRQFWSYCGLGIVTRSSSDWVQTNDGDWIRARVPQTRGLSRQHNHFLKSIFKGAATTVITQLRQDPIHARYERLLEGGTKPTLAKLSLARMIAATVLRMWKDEEKYDPGRGSPSTRDG

SEQ ID NO: 77937 - protein, 343 aa, unidentified
MQITTIGLDLAKHWFQIHGVDAKGDVIVRRRLWRSGVIAYFRSLEPCLVGMEACATAHYWARELTALGHTVKLMPPAYVKAYVKRNKNDAADAAAICEAVTRPSMRFVPVKNAEQQSVLMLHRARSLLVRQRTMLVNALRAHMAEFGIVAPQGFRHVGILTKTIARQQEGLPELARSILQTIIDQLNGTMARIREIEGRLAIWHRQSRVSRLLATVPGIGIMGASAIAATVADPSLFRSGREFAAWLGMTPRQNSSGGKERLGRTSKRGDKYIRSLLTAGAVAVLRHARNRPTRDGEWVRALLARKPTKLAAVALANKTARIVWAVMMRGDGYRVKEVFEQPA

SEQ ID NO: 77938 - protein, 338 aa, unidentified
MGKITTIGLDLAKNVFHAIGCDEHGKVIKKKMLRRSGLLAWFATLPPSLVGMEACASAHYWARELKALGHQVKLIPPQYVKPFVRGNKNDYNDALAIAEAVTRPEMRFVSIKTPEQQDIQALHRLRERRLRDRTALCNQLRGLLGEYGLVFSRGVNTLRQRIPEILEDSENGLSNFFRGLLSQGYQQLTELDAHIDAYTQTLEAHSKRNDACQRLRTIPGYGPIVSSAFYSVVGNGEAYRRGRDVSASLGIVPKQHSSGGKEVLLGISKRGDRYLRSLLIHGARAVVIQAINKEDALSRWINKTRAARGFNKAVVALANKLARIGWAILANNTVYQAR

SEQ ID NO: 77939 - protein, 339 aa, unidentified
MVMSGVRCQDSTNVEVVLGVDTHLDFHVAVALDELGRYLGELRVPTTTKGYTRLVCWAEEFGVIRCAGVEGTSSYGAGLVRYLTSAGIAVAEVERPKRRHLRRNGKSDPLDAEAAARAVLAGETAGTPKSADGHVEMIRALRTARRSAVKARSQAANQLQALVVTAPDALRDRLRWLSTRRLVAVACRLRPGTQPETPQAATKLALRSVARRYEALSEEIAELDVQLDRLVAQAAPELLALPAVGTDHAATLLIVAGDNPQRLRSEASFASLCGVSPVEASSGKVLRHRLNRGGNRDANRALHMICMVRMGMDRRIREYVARRTAKGKSKREILRCLKR

SEQ ID NO: 77940 - protein, 377 aa, unidentified
MSNVRFIGLDVHAETIAVAAAEPAGDVRALGVIPNRIESIRKLVKKLGPVDQLRVCYEAGPTGYVVYWQLTALGVKCEVVAPTLVPVKAGDRVKTDRRDALKLARSYRAGDLTPVWVPDAAHEALRDLVRAREAAKKDQLRARHRLGKFLLRHGRRPATAIKAWTQAHLAWVKRAVHFDQAAQEATLLDYIQEVDHVAARIVRLEAAIDAAVTTAPARMRAVIEALQALRGIALVTAVTIVAEVGTLSRFATPRQLMGYSGAVPSEDSSGERTRRGGITKTGNAHLRRVIVEAAWAYRHRPAVGPALRKRQATISAEVIEIAWKAQHRLNARYRALSGRGKCPPQVITAIGRELLGFIWAIGVHAESHTANGQSVAA

SEQ ID NO: 77941 - protein, 407 aa, unidentified
MLNAVGIDVSKGRSTVAVLQPGGVVIRKPFDVYHNQSDLNNLVAYIKSLDGDTKAVLECTGRYHWPIVEALHRAEIFVSAVNPHLIKNFGNNTVRKVKTDPADAKKIARYALDNWHELREYSDMDSKREQLKTMNTQFDFFMKQKTAAKSNLIALLDQTYPGVNNLFDSPVRADGSEKWVDFAYSFWHVDCVRKLSLSAFKERYKAFCKKHGYIFNELKAEEIYSASKNLVATLPKENGYRDLIRFSINQLNLESEHVEKLRVDMNSLAAQLPEYPVVMGMYGVGTTFGPQLMAEIGDVMRFTHREALTAFAGVDPGRDDSGQRVAKSVKASKCGSARLRKTLFQIMNCLLQNMPEDDPVYQFLDKKRSEGKEYYVYMTAGANKFLRIYYGKVKEYMRNLQAEQSQN

SEQ ID NO: 77942 - protein, 403 aa, unidentified
MADQDRGVTGGVDTHKEFHVAAVVDEAGRIEGTSSFPATPAGYAQLVAWMSSFGPLERVGIEGTGSYGAGLARHLRDEGVDVVEVNRPNRQMRRQHGKNDTVDAEAAARAALNGSARSVPKTQDGIVESIRVLRIAFCSARETRTRVANQLRDLVLTAPDKLRTSLEPLQTAARVERAARFRPGPISDPLEATRMALRSLARRYQALTEDLDELRDQLDELTVLANPALRAAKGVGVDVASILLIAAGDNAERLHSEAAFAAVCGVSPIEASSGQIVRHRLNRGGNRQANHALWRIALVRLSNDPDTKAYAARRRAQGKTTRDILRCLKRYIAREVYGLLTHEHSVPDISDLRPTRIAAGISLATAAERLDTWPARISELERGCLRNNELERQYRTWLITRVA

SEQ ID NO: 77943 - protein, 341 aa, unidentified
MNITTIGIDLAKSVFQVHGTNERGKAVLSKALRRPQVIQFFTQLPPCLIGMEACGSAHYWARRLSALGHTVKLMAPQFVKPYVKSNKNDARDAEAICEAVSRPNMRFVAIKTPEQQALLALHRARQGLVRARTAQGNQIRGLLAEFGFVIPKGRRHLESQIPGILEDAENGLAGMSRELFTLLLEHLRHLDEQVLALEAQIKAWHREDAASQRLEQVPGIGPLTASALVASIGDARNFKNGRQLSAWLGLVPRQHSTGGKQVLLGISKRGDVYLRTLLIHGARANLRVAKPGQWGSALAERSHKNLAAVALANKNARIAWALLAHGRSFQADYRSVRSQAA

SEQ ID NO: 77944 - protein, 437 aa, unidentified
MRKFLECCAGIDIGKREITVTILTGSVEVEPVQQTQTFGTTVQELNRGLEWLLAHACSTVVMESTGTYWVPVWNVLHERVAVIVANPEHVKARRGEKTDPEDSRRLAERLRVGDVRGSFVPSEQIVELRDLTRRRKRLLSAANSERNRIQKLLEQANVKIGNVVSDVFGVSGQRILQALLQHPQLPPADLAELAKGRLRHKRQALIETLQGHRLNDHLCWMIQHSLDHLVFLEKQLTELSQRTLQKLQPFEREYELLQTIPGIAAETAAVILAETGGNMAQFPSPRHLTSWAGICPGNNRSAGKQNSASIKRANKWLLAALVQSAWATVRQRGSIFKKRFYRQMQHRGRKRALIAAARSLLAVVWQVLQRMTPYNEPANEVFQERERGKKIRHHLHRLRQLGVDISALELPPPTPSDGTRFRTDNPHPLGALGIHAR

SEQ ID NO: 77945 - protein, 416 aa, unidentified
MQKKDCIEFEQVVERGCGMDVHKETVVVTIQGKGIKTVTKSYSTFTSSLIKLREWLKKHGITHIAMESTGVYWKPIFNVLGDDFVILLVNARHVKNVPGHKTDKKDSRWLVKLLLSGLLKGSFIPERPFRELRDLTRYRKKLVQQVTAEKNRFLKILEDANIKLSSVLSQVFGASGTKMINHILSCDDYRPEELMQYVHGKIKASREEIKEALTGYITDHHKFMMRTILGNIVKIESTISEIDEQLDIVLEPYKLEKQLLETIPGVGPDVAIGIIAEISTDMDNFPDQKHLASWAGMSPGSNESAGKNKSGRTTHGNKHLRGLLTEGGWAAARTKNTYFSSKYKSLVGRRGKKKAIIALGHKILIAAYFIIKDKVEYKELGEDYLNNFRKDKLIAYYKKQIERLDPNLEFDKVEAA

SEQ ID NO: 77946 - protein, 427 aa, unidentified
MNKKEANTEEYAALIGLDWAAEKHDVCLWDAATGKSRHRVIEHTPEALADWLAELQACYPGQRLAVCLEQSRGALMYALMGHAFLDLYPINPVTLARYREAFAPSRAKDDPGDARLLSEILRLHREKLAVWKPDDEQTRTLGFLNEERRKAVNLRTKLVLRMQAALKLYFPQALAWLGTDLGTPMACGWLLKWPTLDAVQRARPQTVRAFYYAHNCRSAGHIESVLAALPAAKPLTQDAAVLAVQPLTVQMLAKQLRLLHGSIAEYNRQIAALFKPHPDAFLFECLPGAGPTLAPRLLSAFGTDRARHPTAQDMQTYAGVAPVIERSGKSCWTHWRWNCPKFLRQTFHEFAKNSIPYSAWARAYYEQQKQRGKGHNAAIRSLAFKWIRIIHRCWQTRTPYDEGLYLQALARRGSPLCALIAAPTREA

SEQ ID NO: 77947 - protein, 482 aa, unidentified
MKKIKNIFRDGNQRFKVITDKHSLNEVLVVAIEIGKFNSKGIIADMYGDLIMDNFQFPNNQRGYRFLTEKIKIASQIADSKLVFIGMEGTGHYHENIALQLKSDGFSVEIIHPYDSKHERENKNAKTDGIDLLSIARMLITNKGRRSVLADGIYSKLKVVARSRRKLVFMRTSLKNRITALVDSIFPGYWPKEVDEEIFSDNWGKASLLVLEHYPHPEKITMMGIKRLANFLKKHNTKLGEETARKLLEAAKNSLSRPFKDMDSHCLTLKCLISIYRTIYENIEKLEREMAVLLIQTPGAYLLSISGISVIYAAEFMAEMGDIIRFSYPKQIMIFAGNVPYVSQSAEYEAKGLPLTKKGASGLRPLLNQISLSLNSYCPQFGRYYQKKHFEKCDRPGIAKIATGNKFIRLAFCLIKHQKLFVPEGFDPSLMSYKDYYREVFSQIIAKLCNYRIAPSDLSGCEENYFAKIRSHLEDAYGLNFG

SEQ ID NO: 77948 - protein, 337 aa, unidentified
MKRYLGVDLHRTQFTVCTREENGGKTLRQWRSEQLPEFVEQLRSEDEIAVEATSTTARFHEAVVDHVARVVVVNPHQFKVISESVKKTDDRDAETLALFLSKDMLPEVRMKNPQQRELQHLAETRDLLVKQRSALKNKINNLLAAQGINLQREALSSQKALDRVLATQVSALVKIELRVLVDQIRSLTSSIAEVDELLEEEGRRLPGHANLTSIKGIGHLSATILLTSIGDVRDFANENKLAAYFGLVPRVQNSNESEHSGRITKRGNKLARTALVQCGLIAQRYSPYLKRFYERIKSRRGGGKAKIALARKLVKIVYDTLKNNWVFDDFPSFTLAA

SEQ ID NO: 77949 - protein, 413 aa, unidentified
MFMPKIVYPICCGIDIHKSFVMACIAATDEKGVTTYSKPKRFSTFTNELRRLSAWLAANDCRDVCMESTGKYWIPVYNILEPTCNLVLAHPKYLKAIKGKKTDKRDAKWIADIFKHDLLNGSFIPPADIRQLRDLVRYHTKLTSYMTGEKNRAQNCLTVSNIKLDDVFSDVFGKAASAITERLLESNEPFDVRPYITKGIKALPEDIQAAVDGVMCAEQAEKLRIIRSHMTSLELCKANLESAILNIAEKFLPQVKLLMSVPGVSTFSAIAIIGEIGVDMSVFQTSRHLCSWAGLTPQNDSSAGKKKTTRISRAGVYIKPLLVQCANAAIKSNKHPEIRSRYNSIKKRRGHKKAIIAIARMLLTAIYNILKKNEPYNAELYNKSNLPPKNREVTLEQAIYIIQRQGYIVAASP

SEQ ID NO: 77950 - protein, 490 aa, unidentified
MVPELVIAKLVTLARVRVAIPLGRLPFAQSGPIRSPRGDVMATVPGKGRSLSVRCIELNAAGIDVGATEIYVAVPPDRDPRPVRSFQTFTGDLRAMAAWLVQCRITTVAMESTGVYWIPPYEILEEAGIRVCLVNSRHVKHVPGRKSDVQDCQWLQYLHSVGLLDPSFRPHGEICAIRSLSRHRASLVETASMHVQHMHKALTQMNLQIHHVLSDITGQSGMAIVDAILAGQRDPAQLASLCHSRVHANPQTVIRSLVGNYRPEHLFTLKQSLASYRHYQQLMAECDREIERLMRQIDGKIDPQQKPPASGPGVQKRSKNQFSFRMEPELERIFGVDLTKIPGISTLTAHTLLAEIGPDLSRFHNVGAFASWLGLCPNNKKSGGKVLSSRTRRTTSRASHALCVAAQTLARSRCHLGNFYRQLRARLGAPQAITATAHKLARIVYHLLTTGQAYNETIFQKEEHKQAQRYENRIRKQAKTLGFKLIPIAA

SEQ ID NO: 77951 - protein, 385 aa, unidentified
MEDVLRSCCAGLDIHQKVIVACIIRSTEGKKRPEKFFGSFDTTTRGLFDLSDWLTSYEVTHISMESTGVYWKCVWRILQNHFELQLANPRHIKNIPGKKTDMKDAEWIARLTRLGVVPTSFVPPEPIQELRDLTRYRKHLVEDLNREKNRGHMVLQNAGIKLASVIKDIYGKSGRGLLYALIKNEQITETLILKCVYTTLRRKVPQLLESLEGFMTPHYRKMLSLHLTQIECLEKQLVEVEETINDSLVPYEEYVERLEEIPGINRRTAAVVLAEVGIDMSVFPSAGHLASWAGVSPGNNQSAGKTRSKRVGKGNSYLKKVLAQGALAVSQGKPNRIQAFFFRVRRNAGHKKSVVATVHLFLRIIYRMFSDQSRYNELGESYLQK

SEQ ID NO: 77952 - protein, 439 aa, unidentified
MAKETIFETVHENVAGIDIGVEQIFVSPDGKEVVNFETFTSGYHTCALYLKEKGIKKVAMEATGVYWIALYFLLEESGMFVCLVNPKETKQVKGRKTDVKDCQWIQKLFSAGILRHSFIPEGKYMELRQLVRERLDIIDMGSTYVNKMQKCLELMNIKLKEVISQIHGASGIRMIKAILAGNRDGEFLLSLCDERIKKYKGDQILKALEGNYNPTYLFMLQQNMELWEIHQCQIEKIDAEIAKLLDELSMGKEEVATGKVKRVRHHAPKIDGLHSTMARLYGVDLNCISGMNEYTALRLIGETGTDMSRFPTAKSFVNWGGLSPKSHRSGKVKKNVRGAACNPAGQIFKECAQGLMNSKHIAIGSFMRKLRGRKDSGIAIKAGARKLALAYYNALTKGTAYVEQGTKLYEQQIKKRELGALKKLAKKYNMQIIENQIAA

SEQ ID NO: 77953 - protein, 370 aa, unidentified
MIVIGVDTHKGSHALAAVDEGTGRVRGRREIGADEPGHLAAVRWARGLDEERVWAIEDCRHVSRRLEQALLAAGERVVRVAPHRMGASRRGEREPGKSDEIDALAIARAVVKDGVERFPAAFLDERAMEIRLLLDHRGDLVAERTRTVNRLRWHLLQLCPELERSLKPGAFNQARVLDRVDRRLQRLPADARVRVAREQVAHLRRLNRRIERLKRELLELVRAHRPQLLAETGCGSLVAAILIGRTAGAERFQTDAGFALQSGTAPIPCSSGQRTQHRLNRGGDRQLNHALHIIAITRARHDPATRAYLARKRAEGKTKKGALRCLKRHLARRFHRLLSPSAQARPMPHDAARADTTTVGAAPMPMVCLT

SEQ ID NO: 77954 - protein, 448 aa, unidentified
MRFIGLDVHRDFCEVAICLPGERARSAGRVPTEPKKLKLFAESLDRGDRVVMESTSNALAIARVLEGHVAEVALANPMQVRAISHAKVKSDRFDARTLAELFQAGVLPTVWVGDERTRALRRLTSRRSQLVRQRTRVKNEITAVLVRNLAGRPPASDLFGKSGRAWLETLQLPGDERQTVDACLRQIDFLTEEIGTVDQSIATAALDSPEIKRLMTIPGVDITTAATLMAAIGDIARFPSDRKLVGYLGLDARVRQSGIAPARHGRISKQGSSAARHVLVEAAWAAIKTPGPLRAFYQRIRARRGSQIAIVAVARKLAALSWQLLTKQEDYAFKRQSLVDQKLRKIELRAGAPRRQTTRRDGITSRDRTQQERQLTQQAEQAYLRLVTDWTASRPAKNGAGAAPGRASQRPSKGKAARQAPAPTPALSLAVTRTAKSIPPTPDHSRAK

SEQ ID NO: 77955 - protein, 343 aa, unidentified
MYYIGLDVHKKTISFCVKDTAGCVHQEGKIGSTRRELDAWIKTLPQPRVIAMEATIFTGWIYDHLLPHAEKVKVAHPLMLRAIAASKKKNDRIDARKIADLLRCDLLPECHMASTEIRQRRRTLRYRGLLVRQMVQMKNRISGLLMETGVSYNKRRLHKVGYFAELLSTNEEVNQSIRPLLKLSRETIVRCQKTDYALVSSLERDPLLAERLKRLRTVPGVGPITALTWALEIGDVTRFESIKQAISYGGLCSAEKSSADKVMRTPISKQRNKHIQRALVEAAKLAPRQCHELAVIYQKEKQRGNSNRATLAVARKMVAYLLAVERRKQDFVPAEDFASRAAA

SEQ ID NO: 77956 - protein, 370 aa, unidentified
MSEPTTLFVGLDVHKNSIAVAHAQALQTDPPHYVGSIGTSQSEIDKLVRRLHSKASNLVFAYEAGPCGYVLHRYLTRQGLECQVVAPSLIPKRPGDKVKTDRRDAVELARLLRSGDLTKVYVPCVEDEAIRDLCRARDACLVMLKEAKLRLKSFLLRLGLHYSGRADWTEAHRRYLAKVVCPTATQQIVFQESVHAVDEQVERLRRVEKELLDVIPTWRLYPLVEAFQALRGVQWIVATIIVTELGDITRFDNPRQLAAFVGLIPSEHSSGDKRRQGGITKAGNGRARRALIEGGWAYRHVAKVSPAIQKRLESLPKPIRDIGWKAQVRLCKRFRRLSSRGKNSNVVVTAIARELIAYMWAIAKEVPINV

SEQ ID NO: 77957 - protein, 366 aa, unidentified
MGKKVAYVGVDYHLNFLSIAVMVEGDRDIRESIRLKNSDKMIKKYFKRLYEKFDLKVCYEASNNGYSFQRRVRSWGYHCDVIAPSLIPKRQGDRRKNDFRDARNLARLYANGMLTVVHPPNEEEESIRTLVRCRTAFKENEKRVKQQINSLLLAQGLHWPNSKWTKRHRDWLHELKMPDHYSQLVLEEYLGHLDYLETRLHAIDEQIEEIARSETYAPSVKKLRAFKGIGTLTAMLLIAEITDFRRFPSPRALMGFLGLIPSENSSGDRQKGGSIIKTGNWRCRKYLIEAVQHYTRKPRISLQMKENLLQVDAHSANIAIKCLKRLHKRYWALVTRGKIRPIAITAIARELVGFIWAMMQPHPATT

SEQ ID NO: 77958 - protein, 479 aa, unidentified
MLLDVRSMEDERLKDNHRSPRASKRKRRRQQSLKRIHPNAAGIDCGSEWHHVAVPADRDPEPVRKFKTFTTDLHRLADWLTESGIETVAMEATGVYWIPIYEILEERGFEVMLVNARHVKNVPGRKTDVVDCQWIQELQSFGLLRGGFRPSAEIARLRAYLRHREKLIQDAGDHVRRMQKALIQMNVQLHNVISDITGVTGMLILRDIVAGVTDPKVLALHRHSRCKAPEAEIEASLTGNYRPEHVFVLRQNLDLYDAYQRQIDGCDAEIESLLHGMAALRSQPNAPLPAARSRFRTNDNQPQFKIREVLYRLIGADLTQIDSIGPYTALRLVSEIGTDMSRWPTEKNFTSWMTLAPRNKITGGRIISSKTQPSANRVAAMLRMCAMSVGRTSTALGAYYRRLAYRVGKAKAITATARKIALLVYHVLRGDIDYRDPGAQAYEAQHRTRTIRNLRKRAQRLGLGLIDLETGEVLQAVVS

SEQ ID NO: 77959 - protein, 347 aa, unidentified
MKRYVGIDVSQEQSAVCIVDDTGTIIFEGSCPTDPDEIVRTITTEVGDVEKIVHESGPLSIWLTRELIKRGAPVVCIDARAAHKVLSARMNKSDKSDAVGLAQLARTGWYGEVRVKSEASDQLRLVLSTRDRLIRIRMDIEGQVRGLLKAYGIRLGPVNAGYSRQSFRDQLGVAIKGEPSLEMIFASLIAVHETVCLEATAIDAKVQQLAKDAPLARRLTSIPGVGPIVSLSFIATIDDVARFRKATDVGAYLGLTPRRYQSGETDWSGRISKRGDGTMRKLLYEAANILIQRVSRFSPLKAWAMRLVARKGMKKAIVATARKLAVIMTRIWRDGTTFAWTKEELPA

SEQ ID NO: 77960 - protein, 462 aa, unidentified
MTVPTTKGRRKRATPVPTSLPAIRSLVAGLDVGSSEHWVCGPARADGQPNVRCFGTTTDQLQELADWLADHRVESVAMESTSVYWIPIWELLEARGIEALLVNARQLHNVPGRKTDVSDCQWLQLLHSCGLLRGSFRPGEAITRLRALQRQLANLVAERTRCVQWMQKALDQMNVQVHRAVTDLTGTTGLAIVRAIVGGERDPARLAQHRDPRGRKSAAEVARYLTGTWRAEHLFNLASALRLFDALEAEIAAYDAQLLTAIESLQPPDRQAAPVPPHPNLAKEKAIRTHGEQPARTTLWRFAGVDLTRIDGIGAGAAQVVLTEVGPDLAAFPSEDQFVSWLRLCPRTPISGGKPLKKPRNGLGANRIAGVLRLAATSLQRSKTALGAAFRRIARHKGSAVAVFATARQLAKLIYRMLRYGHDYVDIGEQAYDRQFQTRRLAALTETARSLGYTLLPNAAAK

SEQ ID NO: 77961 - protein, 392 aa, unidentified
MVYVGIDVAKDFHECAILSQDKEVLLAPFSFSNTKEGFVYLKEMINLAGNADPLNVKIGLEATGHYSVALLSFLEHNGWRIIYLNPLSVAKAKKARSLRRTKTDKSDALYIAELIIDERLRAYTASSPDILALKSLTRARYRLSKELQIIKGRIKRSIHLLFPELPDLFVNLYRKAVLNVLKKYPSAEDVSKANLTVLTNLLKSNSHGVFGKTKAKQLKERAKNSIATYSPGDALELKLLAERILFMHEQRATIDEEVERIMREINSPITTIPGIGNITGAAILSEIGDISRFDTSSKLQAFTGTDPCVYQSGKFNANNTPMVKRGSSYLRHSLYLATCMASMTSPTFSSYVAKKKEQGKHYYVAIGHAMKKMIRIIFHVLKTGKSFVELSA

SEQ ID NO: 77962 - protein, 355 aa, unidentified
MNDEKYIGLDVHQATIVVAVIDSAGKLVMESILETEAATILQFFAGLRGTLSVTFEEGTWSVWLYDLLNPHVDKLVVCNPRKNALLKDGNKSDRIDARKLAELLRGNQLKPVYHGETGVRMLRELSRSYLTIVKDLSRVMNRLKAVYRSWAIPCAGRDVYYRRHRAQWLAKIREAGVRRRAERLYEQLDMLQHLRQQARRELLAESRKHAITAKLRQIPYLGPIRSALAVALIQTPHRFRSKRQLWAYSGLALETRISAEYRLVEGQVRRSKKLLSIRGLNKDHNHDLKGLFKAAATMASVRPGPFQDFYQAALAKGIKPTLARLTLARKMAAITLTLWKKGEDFDAKKLKSQAA

SEQ ID NO: 77963 - protein, 405 aa, unidentified
MQVYIGIDWSKNKHDVCFLNQQGAILTSFTIPDTPIGFAAFAEHRAKLGVAPEDCLLGIETHRLLFMDYLLSHHYSSVYVIPPSISSDSRGRFGPSRANTDQSDAHLLADMVRTDRARLHPWQPDSPLTQEIAARVSLERCLTRSIIQFTNRLRQTLWRYYPNASEVFSSLDTLIALDFICAYPTPSAAAHLSFEEFQHFAKAHRYPNPKKLPACFSRLQDLQPEPSQAVLQAYAGEAIRLAELLKHMIQAHTETQKEIQALFRQHPDAPIFDSLPGAGEKLAPALLSSFGDNRQRYPTPEALQAVAGTCPVTRQSGKKKNVHFRRACDHEFRTIVQQWARCSLDYSVWANTYFHQVWPHCRSTSHAYRCLGNRWLAIAWKLWQDRVPYDEAYHLRQHALRVKPK

SEQ ID NO: 77964 - protein, 346 aa, unidentified
MMLIGCDYHPSWQQICWLDTATGETGEKKLEHASGEAERFYRQLPAPALIGMESTGNCQWFVELAATLGHDLWIGDAAKIRASDVRAQKHDRRDAELILKLLREGRFPRIWTPSGEEKDLRQLLIHRYKLVRIRAQVKTELQHLAMNQGITKKRRLWSKAGEKVLRELPLAPWASQRRKDLFRVREMLDGQIDLLDQAVVEIAEKNEKARLLMTQPGVGPITSLAFVLTMGDVSRFQRGKQVASYLGLIPREYSSGGHQRFGSISKQGNRFMRMLLVEAAQGAVRCDPGFRNEYVHRCHRKPKGVAKVAAARKLAIRLYWMLRTNTGYPEVVRVESSSRVPLVSAS

SEQ ID NO: 77965 - protein, 351 aa, unidentified
MNFTRCGLDIAKQVFQVHGVNEHGVVKGRKTLARAKVLEYFAQLPPCLIGMEACGGAHHWARKLTKLGHTVRLMAAQFVTPYRKRGKNDANDAEAICEAVGRPNMHFVAVKTEEQQAVLLMVHRARSLVMANRTALVNQIRGLLGEFGLVVAQGVARLRGQLPQILEHAENGLPALPREVLSGLLEQLRELDQRIQQYDTKIRHLAQHSEPARRLMQVEAIGPQTATALVASMGDPHMFKSARNYAASLGLIPRQDSSGGKIRLGPITKRGDRYVRTLLVHGARAYLRVVDKKTDGKSAWARRVRERRHVNIAAVALAAKHARIAWAMLAKGTEYRPAQPEEVLPTRIARA

SEQ ID NO: 77966 - protein, 364 aa, unidentified
MYDSTTTVAVGLDVHARSIRLAAVRADELLEERTLPYDEEAVERAVRRWPGVRCCYEAGPTGFGLQRFLVERGIDCQVVAPGLVPQRPGDRVKTDSRDARKLARLLAGGLLEPIHVPTPELEAARDLVRAREDARLDRMRDRHRLSKFCLRHGRRLPTSSWTVARRKWLAEQRFEFVARQQTFDTYVHAVDLVDARIQQLERAIRETAEQEPWRALVARLRCLRGIDTLTALAIVTEIGDFARFKTAEELMAFVGLVPSERSSGEQRRQGSITKVGNAHVRRLLVESAWHARRRPTVGYELARRQRGQDAVVIERAWRCQQRLHSRWQRMAGRGKPQQKIVVACARELAGFVWAIATEQPLRTS

SEQ ID NO: 77967 - protein, 319 aa, unidentified
MKPYIGIDVSKDRLDVAVGDSAQCFSVENTENGIEGLVKQMKALEPELIVMEATGGYERLCAAMLAAAGLALSVVNPRQVRDFAKSKGILAKTDRLDARVLAHFGAAIKPEPRALPDVQQQLLDELMLRRRQIVAGLVAEKNRLGMAHTDAVKKSLRKAIAFYERLLADVDRQIGEHIERSPLWRARALWRAREDLLRSFKGVGPVSSRTLIGDLPELGSLDRKRIAALVGVAPVARDSGKRKGTRAIFGGRAQVRAALYMVAITAIRTNAPIRQFYQRLRAAGKPAKVAIVACMRKILITLNAMVKTHTRWNEHLTVS

SEQ ID NO: 77968 - protein, 348 aa, unidentified
MQYDAGIDVSLEQSSVCVVDAAGKIVKEAKVASDPCVLVTFFKGLGFPVTRIGLEAGPLSQWLYAGLTQAGFDVVLLETRHVKAALSAMVVKTDRKDARGIAQLIRMGWFRAVHAKSASSQEIRALLTARRLLLDKLRDVELSLRGVLRGFGLKLGKVTQRGFETRVRELVANHSMLQQITGSMLQARATLQREHNMLHKALLKIVRRDKVCRQFMTAPGVGPIVAITYKTALDDPQRIKKSKGAGPLFGLTPKRYQSGETDVIGGISRIGDAMVRAMLYEAANSLLSRTMRFSALKRWGLAVAKRRGMKRAKVAVARKIAVILHRMWIDGTSFRWSNKEKVKAAAHA

SEQ ID NO: 77969 - protein, 463 aa, unidentified
MLDNLEQINLHAAGIDVGSAENFVCVPARSVKQGQSAVRSFGVFSTQQDELVEWLKECGVTSVAMEATGIYWMSLYDKLEAAGLEVLLVDPHSVRHVPGRKSDVLDCQWLQQLHTYGLLRGAFRPEATVRRLRVLSRHRADLVAEGSSHLQQAQKALVQMNVQLPLVVSDINGETGLRIIDAILAGERNAQALVKLRDPRIKKSTVAEMEAALSGHYSEELLFVLRQNIETWRFYQKQMEGCDQQIEATLKAMASISKAGVPAAPPKPVPAAAPGSPGAKPKRQRPLHGNNAPKVDFSEQIRRICGVDLMKVCGLNLLSVLMLIAEIGVDMRQWRSAKAFSSWLGLCPGTKISGGKNLSRRSRHVVNRASVLLRLAALAAGQTDTWIGRFYRRKRAHLGAPKALTATAHKLACVIYHMLKYQEEFVPLDVAVYELKAQERRMRHLRKQAEELGYQLVEKQEAA

SEQ ID NO: 77970 - protein, 358 aa, unidentified
MRYVGVDLHKNKFTAYFADTGRYRDYGTNSVGIMSFIHDCKKSDDCNGIIVGVESTGNTRYFKRMLEAEGIQVKVINTMKFKVIAESVTKTDKHDAATIAEFLEKDMIPEARLCSDYSEQLRRLLKVRKTLVRTIVTIKNQIHGILTAYGYEDTRASLQSKRGRQHILNTLASTENGLVVQPLIQIIDELDEKVKHIENIIEELTKQDDQKRLLQTMPGCGDIIASTILAYTDDIRRFKSPKQYAAYAGLVPYVHNSNTMLRHGTITKHGPEPLRTAFVQLVLGTHRLPATRDYRIMKQYRALKQYKGSGKAIIATARKYAEIVWHMLTYNEPFCPDKQLQVMCERNRSIQVYEQQPA

SEQ ID NO: 77971 - protein, 370 aa, unidentified
MHSISYVGLDVHKTTITVAVADGGRSGEVRQLGAFANRADVLRKMVERLERRGERLRFCYEAGPCGYGLHRFLTGLGHACAVVAPSLIPIKAGDRIKTDRRDAVMLARLHRAGELTEVWVPDAGHEAMRDLVRARATAARVLTKARQHLGGFLLRHGKIYSGVRTWTQAYRRWLTTVRFEHPAQQIVLQDYIDAVTDAERRVDRLTRQIIEHLPEWSMAPIAAAIQAMRGVALINAVTIVVEVGDFSRFGTARQLMAYLGLVPSEQSSGGAVRRGGITKAGNVQARRALIEGAWTYRMQARVSRKLYDRLEALPQNIRDIAWKAQVRLCSRWRRLAASGKPKVVVTTAIAREMAGFIWAIARQVQAQTAG

SEQ ID NO: 77972 - protein, 561 aa, unidentified
MNSMRCDIPAFECAMPKAAEDSRTPRRCRAIGSVSYFRKVLECGCPDTVSKVIHRRGNGSSKNPPPELVNNFAATHIRDGEQLAAPKTRPDCPHAASVRQRSPTSVAAPGPSAERTSSQEGSCIRLRPSRVPVRGRTLRTVNTNWNERNYFGALDWAQDHHDIIVVDRLGNIVADFEFAHSAQGWSEFEQKMQPFGKCPMCIETSSGPAVDQLLQRDYQVYPVNPKAAQRYRERKSPAGSKTDRLDAWSMADALRTDGHGWVQLVAQDEATSTLRLLCRDENVLIEQRTALVNQLQAALREYFPLALESFDDWTKPFTWAFIRAFPTPESLNKAGKRQWQKFLHNHKLWRPETAETRLQGWERGQQLNSSAAITKAKSLLALSLANVLQSLQKQIDQYREQIRLAFKNHPDHDIFGSLPGAKDKLAPRLLAELGSRRDVFPDAHSLSCRAGTSPVSFQSGQIRKARIRWACDKFLRHTAHLWADQSRRTCLWAQTYYATKRASGHSHASALRCLAKRWLKILWRMWQDRVPYDESIHLESLKAHGSFVAKLLTTQPAAVCE

SEQ ID NO: 77973 - protein, 330 aa, unidentified
MYFVGIDVSKYKHDCFIVTEAGEVIKDTFTFDNTRTGFDQFFSILDGLGPKNEIKIGLEATGHYMNNLMKHLSVKGYSFILLNPIIVSRFRHSETLRRTKTDKVDAKLIAQVIASKDFSSYPLQAYHFPDLKTLTRLRDRLIKQRSLYLVMLTNQLDLSFPEFKEFFDGNLKSKTAQFILTKYGISSRIANMNSQSFELLRKVSHGKFSYAKFAKLKELAKNTIGCSSEIDETLFALTINLYQSIDEAITEVESKIAEIMEKLDSPTASIPGIGIMSAATIIAEYGDVSRFANDGQMFAYAGLDCGRYQSGTPIFLEEWSSTDLVTLDKL

SEQ ID NO: 77974 - protein, 347 aa, unidentified
MSISMIGLDTSKSVFQIHGINESGKAELKRKLRRSDLIAFFEKQERCTVVMEACGAAHHWARILSGLGHTVKLLAPEAVKPFVKRGKKNDAADAAAICEAASRPDVKFVPVKTVAQQGILALHTARSLLVKQQTMLANAIRGLATEFGHVVPKGLHNLEPLVALVDADEDMPTQARQAIAELHKRFGELAKGIQACEAEIVKHARTDPTARRLATIPGIGPITASLIAATVVDISRFKTARQFAAWLGLVPRQHSTAGKTRLGRITKAGNREIRKLLVLGATSMLGRAEGWHSAVGSWLRDILQRRPARLVTVALANKMARIAWAVMTRKEVYRPKGGVAVAAQATA

SEQ ID NO: 77975 - protein, 360 aa, unidentified
MRIIGCDLHARQQTLAMLDTETGEVVNRTLMHEGDEVREFYSQLPRPALVGIEAIGPMQWFLDLLGQLGIECRVGDAAKIRAAEPRKQKHDRRDAELILKLLVEKRFPAIWMPSKELLDLRALLLHRHQWVRLRTQVQNALQAIALANGLRRGPSLWSYDGLAKIAFLPLPPHASYRRSALQAEYRDMEEEIEKLTVQVAEQVEHRSGAQLLMTHPGVGPVTALATDVFLGDAQRFDDGKSLASYVGLIPEERSSGRRRRLGRISKQGNPLLRFLWNEAGAHAARRDPELRRFYRRKLVQKGLGKARVAVARKLGIRLWIMLRDQIDYQEFCRRGQKQSGATCAGMPEVGNGANRHRPVE

SEQ ID NO: 77976 - protein, 412 aa, unidentified
MKDLLEISCGLDVHKEKIVACILTGPLGKPTRSEIREFSTLIPDMIALRNWIVSKNCHHVAMESTGIYWMPIYEILEDAFSGDITLLVVNARHMKNVPGKKTDMRDSEWISTLLRAGLLNGSFIPEKRIREFRDLNRYRKSVIRDITSQKNRIEKFLQSSGFRLSSFISDIFGASGRNIILHLIEHGQIDKTALDSCLKTKTRNRIDEILMSVNGTLSEHQKAFLRILMTHYNSLKKHLTEIETSLEEDMPPFALQVEQLNSIYGISTTASCAIIAEIGIDMKPFKTAEHICSWAGLCPGNNESAGKRKSTSVTKGNPYIKSMLCEIAWVIAGKRNTYLSAWYWRIKQKKGAKKAIVALARKLLVIIYTMLKQGTLFDESCFETRRKHCEQKQLSRYIRELEKHGYHVEAQS

SEQ ID NO: 77977 - protein, 351 aa, unidentified
MKYYQTTTEFNCGIDLHTRQMYICVMNRAGDVLVHRNIRDNDFAFFLKLVEPYRHDLTVTCESCFVCFWLADACEDAGIEFVLAHAYYVKSIAANKHKNDKEDARELAECLRTNRIPPAYVCPRDLRPIRKLIRRRNKYVKNRAVLTGHSTCEVMAAGNQPLKISSNSKERWREGIRDSFDDPLDSFTVDAELYMIESYDRVIMQMEQRIEKYAKNYQLQDYRLLRTVPGIGKILALTILYETIDIKRFPSEKDFVSYCRLVAGTNESGGKDFGGKGRKMGNPYLKWAFMQAAILCKRADKNLNAYYEKLARQKGKHVANAIVAAKFARAVYFMLDRKTGFSPEMLMKGKR

SEQ ID NO: 77978 - protein, 353 aa, unidentified
MDRITRVGVDLAKSVMQVHAVDSAERVVVRKAISRERFVSWFANLEPCLIAMEACSAAHYWARKLHALGHEVRLIPPQFVAPYRKGGARVKNDALDAEAICEAASRPHMRFVPVKSPAQQSVLVLHRMRTGFVEERTALVNRLRGLLAEFGVFLPQGTRQLHQHFIDRVEDGGNELTGPARQALMRGWAQWQALDEEIAWFDRQIAEHANRDPQAQRCMDVCGVGRLTASAAVATVVDARQFKNGRQMAAWLGIVPKQKSSGGRQRLGSITRQGNDYLRTLLFLGARSAMRTAHRRDDRLSRWIVQLQARVGYSKTLVAVANKHARILWAVLAKGERFDRSHAPARTGGAAGA

SEQ ID NO: 77979 - protein, 361 aa, unidentified
MAQVRSWAGLDVHARSVLAVTMDAATGELRSQRLPGDTARVVEFCSSLPGPTRAGYEAGPTGYGLARALHAAGIGCIVAAPGKIERPSGDRVKTDERDAGRLLRLLMIDGLHPVRVPSVQEEALRDLVRAREDVRGDLMRARQRLSKLLLRHDVLYQDTGSAWTQRHRAWLRAQEIGGGAQITLLDHLGAIDVLESRREQLERAISELIPASPYAPAVARLRCLRGIDTLSAIGLAVEIGDFARFQRPAQLMSYVGLVPSENSTGASRRLGAITKTGSRHARRLLVEAAWHYRKTPNRGMVLQRRQDGQPAPVIALSWKAQRRLYQVWQRLDTQRQKRRTIVAVAVARELAGFCWAITNTD

SEQ ID NO: 77980 - protein, 327 aa, unidentified
MHAFIGIDVSKEKLDLGWLRDPVTNKKKSKVFRNRREELQKVCDWILTNTKAQPQDVLVTVEPTGVYHEALLYFLYERGFNIYLPNPSQVKAFMKALGTVHKTDKSDALMLARYGAQSHDRRLWEPEAPEIRELKAMMRRLEALEKDRQRELNRLEASEITGASERVLRSLKDMIEVLEAEIRDLQHDIDEHIDRHPPLKKNRQLLESIKGIGPVMSREMTYLFAAKSFRSAKQAANYTGVIPKIQESGKWVGRSTLSKEGPARVRAKLYMAAIVAKQHNPVIRLQYQRLLAAGKNKMQALGAAMRKLVHICFGVVKNQQEFQPQPL

SEQ ID NO: 77981 - protein, 317 aa, unidentified
MNHYSAVCAGIDTGKHKLDVAIDGSDERLQVDNSPEGGRLLLAWLHKLGVERVGIEASGGYEQAAVSTLRADGFVVVVFQPAQVRSYAGFVLQHAKNDKIDAALIARCTAAATDIREPPDARLAPLAQHLTMIEQLTEDVAQIKTRREASRDQRIHDFWTDEISRLKRLIKQELQLLVAAIRTHRDLSDRLDLIASVDGVGLRTAVAILVRMPEIGRVSREKAAAIAGLAPYDDDSGLRRGERHIKGGRQRLRKSLYAAALPAVFYWNPRLKAFYRRLIEGRKPHKLALVACARKLLIFVNTVVARGAPWASVKATN

SEQ ID NO: 77982 - protein, 381 aa, unidentified
MNQTTRQRKFKGVPEVLYLSFELGSTEWKLAFTVERGEKPRLRTLAAGDLRGLEQEIERARQRWGVPEGARVVSCYEAGRDGFWLHRFLLSRGVENLVVDSSSIEVNRRSRRAKTDRLDALKLLTMLIRHDLGEARRVFSVVRVPSVEQEADRQLHRDWDVLKKERTLHRNRIQSLLACQGIRVKLGADFGDRLESLVLWDRSALPSEVRERLKREWKRLELVESQIAELTQQKKEAVAAASSPSLQKIQELAKLKGIGLTSAWVFVCEFFGWRQFRNRREVGALAGLAPMPYQSGSSDHEQGISKAGNARLRTMAIEIAWSWLRWQPESQLSLWFRERYGPGSRRSRRVGIVALARKLLVALWRFLEFGVVPEGAILKTT

SEQ ID NO: 77983 - protein, 424 aa, unidentified
MNDTQNKKIAQVTDKTLIVGVDVGSDTHYARAILARGYEVSKKPFDFGNTREGFEKFVNWAYNLAASNQLTKIFVAVEPTGHYWFNLADYLKVYDVKFVMVAPQHVKHSKEMDDNTQRKDDRKDPLVIAKLVPEGRYMEPYIPEDVYAELRAAFNRRCDLVEALNRNINRMIRWFDMHFPEYRTVYGKANAISGLLVLMRAPLPSDILDLGVDGICRIWREAKIRAAGINRAKKLVEAAQKSIGLKGGEAVRQELWQLMEEHELLKKQLSGIMQIIEELLARIPGADRLLKVPGAGVVTVAGFLSEVGDISRFTDPKQIQKLAGLAIVENSSGKRKGLPGISRRGRSRLRWVLFQLARTMVKSNEEMKTYHQYYTTRKENPLKKMQSLMAIAGKMTRIFYGMLKNGTEYDPAIVMKNLNKEAAA

SEQ ID NO: 77984 - protein, 370 aa, unidentified
MENRSMFVGLDVHKETIDVSIAEGHRNGDVRHYGVIASDLEPLDKVVRALRAPNRRLHFVYEAGPCGFGIYRHLTKRGEACVVVSPSMVPKRSGDRVKTDRRDSVTLARLHRAGELRAIYVPDDADEAMRDLVRAREDAVVGGTQAKYRLKAFLLRQGRRYPGREGWTLPYRRWLTDLSFPAAPQHITLQEYRDTIDETERRIARLTEQLRQLAPTWRWAPLVAALQALRGVSFITAVALVAELGDLRRFGHPRELMAYLGLVPSEYSSGPSVRRGAITKAGNPHVRRLLAEAAWAYQGIARIGRQHAYRQEALPKVVCDIAWKAQLRLTTRFRRLVARGKAKPKVATAIARELTGFIWAIAQEVSPASQ

SEQ ID NO: 77985 - protein, 347 aa, unidentified
MKKIIVGIDISKEKLNVCLLEGMNIVHEDEIENTVASLHKWFGRMRKSLKCCMDEVLLCAEFTGRYIYPLAVACQEEEAFLWMEDPSRIKNSFGLVRGKSDSVDARRIAEYAFRHHDKAVAYRLPSKELASIKILMADRELVLSDRKKYEAQLSDQKRFMSKEDYALQSKMWKSIVKELQKQLDFIDEKIDKLVSDSETLSRQVELLKSVDGIGQRIAVAMVVFTDAFSRFDNARQFNCYAGLAPFTYTSGKSIYSKAKVSQRANKQIKALLHLAAVCAATHMKSGDYKEYYDRRIAEGKHPLCVLNVIRSKLVSRMFAVIKRNEHYIKNYDRPSSEKKLSTPLQIS

SEQ ID NO: 77986 - protein, 322 aa, unidentified
MNYKKWMGIDVSKEKIDLSIFDGKNYEHVVLKNERKVLKKFFSRLKNKEQFHVIMEATGIYHLVLFKTLVALKIDVSVVNPLIIKRYSEMKMMRAKTDMVDAKLIALFGYEQKPKLSKLPNKVQSEIFALFKAVRIFQKYLISLRNQLLALESCESENKIIIKELKKNMRSNTKSIEKLEQKIDDLIKENFDDLSKRLQEIKGVGPKTSSMVIGYFGKFENFETAKQVVSFVGLNPNPRLSGKSVNRGSNISKKGNSMMRKILYLAALSAKNYNPDCHDLYQRLLKKGKPKVKALVAVANKLLRQIFAIAKYDRKWKSDYVK

SEQ ID NO: 77987 - protein, 387 aa, unidentified
MAQVNDLSRSLTAFDPISTLVVVVEMSKASWLVNGVVPGVERQPLKKLEPDATALLRLIERWRNEAVRAGRPISRIALAYEAGRDGFWLARWLIARGIEAHVIHSASVAVSRERKRAKTDRLDAAMLMRVFLGWLRGERGHCGMVAIPTMEEEDARRPSRERESLVDERSRITNRMKSALARLGIRGFKPHLRKAPERLAGLQTAEGTGLPANIIEEFRRDMARLALVREQISSIEKTRAERLERAPDTGPHAMVRLLARVIGIGIETADMLVREILSRKLRDRQAVARYAGLTGSPDESGLKRREKGLAKAGNARVRRGLIQLAWRFLMFQKDSALAQWYRTRTEGPSGARKTTMIVALARKLLIALWRLVTTGEVPDGVELRPAA

SEQ ID NO: 77988 - protein, 391 aa, unidentified
MPMYFVGIDISKYKHDCCIISAADQQIISKFTITNDKDGFEQLLTALNSLSNPEDIKIGFESTAHYALNLELFLENAHHSFMEVNPVLIKEYKKSTTLRRTKTDSVDCESIARWLMTVEYKPHSKGFYHAYSLKSLTRLRDRLIRQRSFYLVKITNVLDHTFPEFKPFFNERLSKTAIYLLENYGSAEKMAHMNSVSYDKLRCISRGKFSIQQFLRLKELAANTVGVNNSIFDIELNSLLTLYNSLCKEIKNLEAEITRLIEEVHPHYMSIPGIGPISAAVIYAEYGDISNFSNPGQMLAFAGIEPGINDSGTESHGGRMVKHGSSQLRYVLLNACLPLIRFDITFATYYAKKRAEGKKHRVAITHVAKKLIRVIYALERQDVDFNAQKLR

SEQ ID NO: 77989 - protein, 372 aa, unidentified
MKKITRWVGLDVHAETIAVAVADKDGTVQSVGTIPNRPEAVRRAMKKLESGGRLYACYEAGPCGYGLYWQLAQMGIECDVVAPTLIPVKTGDRVKTDRRDAEKLARLLRSGDLTAVWVPDAEQQALRDLVRARHAAKRDQLRHRNRLGKFLLQLDVRRPEKMVAWGTKHMTWLDGQTMVHASHQEVFVDYLNEVKRAKERIDRLEKSIDEGIARAPKHLQELIAALQALRGVAKIGAATLVTEVGRFTRFESARQLMAYVGVVPSEHSSGGSTHRGSISKTGNARMRHVVGEAAWSYRHRPSNGPALKKRQEGQHEDVKAIAWKAQHRLHKRFQKLSTQGKHHGRVVTAIGRELLGFVWAIGCKIEATLDAA

SEQ ID NO: 77990 - protein, 426 aa, unidentified
MSNKLVAGIDISKAFSDICILSPRNEIIVHTKINNDYEGMKSIDLTFKKLETDYNTQLVVIMEATAHYHQLLANFFRKLDYEIIVINPIQSNAIKNINIRKVKSDKTDAYNIALLYRLKNYSETETHADIIISIKKLCRQHKELTDEIVEHINRLTGFLDTSFPDFRKVFTDLQGKTALTILAEYPTVTAILDPELDKAKIINQIKTISHKSESYAIKKYDKLYQAARNSSEICISNLSTSILIQTTIAVIFSLQEALRAIDDEISRLSIVDEQFQINVKLLQTIPGIGEYTACVLLSEIGSIDKFSKPKQLVAFFGLDPGVSQSGSYNRKNNKISKRGSPYVRTILHMLAKANVYSNRNREYPNPVMRDYFEKKIVDKPYKVVMCAVMRKMVQIIFAVLRDQKPFELRTPDDHQKMIRLNNKQAA

SEQ ID NO: 77991 - protein, 339 aa, unidentified
MELNVIAIDIAKKVFQLHWVEPDSGSIERLKLKRAQVLPWFANRAPALVVMEACGGAHEWGRELLKLGHEVRLLPPKMVRPFVHRNKTDAADAQAIWTASRQPGVRFVPVKNEAQQVVLALHRLRAQLMKMRIMQTNELRGLLYEFGIVLPEGHRALLKELPAALRDVQARLPAMLIDSLDEQVRRINQLEVDIGAVERRLSQQLRDTPACKAVAEIPGVGLMTATAIVASMGSLTAFKDAREFAAWIGLVPRQTGTGGRVRQLGISKRGDAYLRTLLMHGARAIVRSDKAVSWPWLAALLKRRPYSVTVAAVANKLARTIWAVLANGQAWRAQAWHAV

SEQ ID NO: 77992 - protein, 402 aa, unidentified
MNSVGIDISKGRSTVAVMRPFGEVVISPFEVRHTDSELSELARQLKSLDGETRVVMEATGNYHAPVAKLLHDAGLYVSVVNAKLVHGYGNNELRRVKTDRKDAVKLANYGLDRWLTLPRYVPEENTRLLLKNCYRQYRQYSKVQTVLKNNLISLLDTVFPNVNRLFSSPVRGDGSEKWVDFVAEFWHCRCVTEKSEKAFTNKYQRWCKTHGYNFSEAKAHTIHAEASGHIGIMPKSETTKLLVEQAVVQLRATSTTLTALKREMLTLAVQLPEYPAVMGMFGVGPTLGPQLIAEIGDVRRFYSKKALVAYAGLDAPPNDSGDVTGKHKSMSKIGASSLRRTLFLVMSVYLQNAPLDEPIYQFMDRKRAEGKPYRVYMMASANKFLRIYYATVKAYLESLEQV

SEQ ID NO: 77993 - protein, 348 aa, unidentified
MDHIAIDLGSKESQVCVRTSDGQIVEERRVGTRSLGKYLATRPRSRVVLETCAEAFTVADAAKEAGHETVVVPASLAPSLGVGDRGIKTDTRDARNLSEASCRMSRLPAVHVPSDVSRERKTLCGMREALIQARTKLINTVRGWTRSRGLGVVRSGSAGTFPLRVKDQASSRGAMIPPYVERVLTGIAELSVRVNEMDRELEACAAADPTCQLLMTGPGVGPTTAIRFVAAVDDVTRFPSAHRVEAYLGLTPGERSSSERKRRTGITKAGPSKLRWILVQAAWSARRYYKDHPLVLWALEVEKRRGKNVAVMALARRLAGILYAMWRDGRPYDKDHRHLVTHRTSAAA

SEQ ID NO: 77994 - protein, 348 aa, unidentified
MSKSNQYVGLDVSLKETSICVIDDADKIVWRGQVDSTPEAIASAVKQHAPHAVRIGLESGQLSSWLFRELKEAGLPVICVDARHAKAALSLKVNKTDANDAFGLAQIMRVGWYREVTVKGLDCQAVRALLVARAQIVSQITMLKNCVRGILKTFGRVLPKGLRSQFPARVRAAIEGHPVLGAIIEPTLQVLEATRAQLLVYDKAIIQRARSDDTARQLMSAPGVGTVVALAYMTGVEDPARFKRSSSVAAYFGMTPRRYQSGEVDHAGRISKCGDGMVRGLLFEAAKVLLSRSARPSALKTWGEALSKRIGAKKATMAVARKLAVILHRMWTTGTTFQWNAEAASPAV

SEQ ID NO: 77995 - protein, 260 aa, unidentified
MDTETGECGERRLRHRAEAEEFYRQLKGKQVRVGIEATGHSRWFERLWAELNFEKWIGDPAQIRAKQVRKQKTDRRDAEHILKLMLKDDFPGIWAPSPENRDLRQLVWHRHRLVGMRTRAMNQLQAIAMNEGIRRKKGLWTEKGRQPLESLSLMPWTTRRRQELLQLLDQFDPNIDELSQAMQQEAERMPEVKLLMSHPGVGPITALAFVLVIGTPERFGCGKQVASYLGLIPCEDSSSDHWRLGHITKQGNKLLRFLLG

SEQ ID NO: 77996 - protein, 315 aa, unidentified
MGEPAEVVVGIDVAKAQLDVAVRPGGEQRRYTNDAEGIAELVTRLRVLGPWLIVVEATGGYEAPFVAEVGLAGLPIAVVNPRQVREFARASGQLAKTDRLDAQVLAHFAEALRPVPRPLPDAQTQELAALVERRRQVVAMRTAEQHRLGAARVPRVHAHIQAHLAWLETELAEGDKELHRLLRASPLWRERDNLLRGVPGIGPVLSLTLVADLPELGRLSHGQIAALVGGAPRNRDSGTQRGRRTVWGGRAALRTVLYMGTLRATRCNPVIRSFYDRLLAAGKAKKVALVACRHKLLTILNAMLKHQTPWQAQAT

SEQ ID NO: 77997 - protein, 328 aa, unidentified
MTPTTWIGVDIAKADFVAAQRTPKGFDTQSFPMTEQGFEAFYGWLPKAPALAVVFEATGPYWLRLASWLEELEVRLPYACINPRKLRDFAKASPERSKTDPIDAALLVHFAETFPPSLERKKSLSSQRLRALWRHHLELQTLFDRARDRQEKAAADPRLPTELAQGLETLLACLKSELENVERQARELVKADSKLHQAQGLLLSIPGIGPKTALTLLAEYGPQLYQATPRQLTCYAGLDPILFESGTSVRKRPHISKQGNWRLRRALYMAALVGVRFNPVLKAFYERKVQQGLAKKSALVAAMRKLLHLVYGVLKHQQPFNPDYESLS

SEQ ID NO: 77998 - protein, 346 aa, unidentified
MNKIAYLGMDLHANNCTLGHMNEHGKFIGDIEFPTSEKNIIHALKSIKAKEKYLTIEEGNLTYWAAQVANPFVTQVIVCDPRENALIYKSPYKKDKVDTKKLCRLLRLGELNRVYQPESDARAIFKAAARHYLDLRDQLKRIKQKIKAMYRHWGIINVFTDSVYSKLRRENYLEKVKHLPIRNQLLRLYYLMDQTDEMRKSALKSMKQLGRKYTEIHEFKKIPGVADIIAHVFDAIIQTPHRFTKRSRLWKYCRLSIIDRTSDGKPLGYQRIDPSGIGELKALSYMAFMAAMKSDNEVKRFYLDSLQRTHSQKHARLNTQRKIIVAMYTIWKKGVAYRPELFTGSA

SEQ ID NO: 77999 - protein, 372 aa, unidentified
MGKPTRFVGLDVHADTIAVAVAEGREEVRSVGTVPNEPECVARLIRKLGGPEGLRVCYEAGPCGYSLYWRLVGLGVACEVVAPSLVPVRPGDRVKTDRRDAIKLARSYRAGELTPVWVPDAEHEALRDLVRAREVAKADQLRARHRVSKLLLRQGRRWHGKKAWTQAHAVWLSAQRFDQPARQAAYLDYLHEVRHAAERITALERAIDEAIAHVPPAMRALIDGLQALRGIGRLSATTIVAEVGPLTRFGHPRQLMSYSGAVSSECSSGGRTIRGAITKAGNAHLRRILVEAAWAYQHPPAVWGALKLRQKGLSGEVKSIGWKAQNRLHTRYRRLQARGKPRQQVMTAVARELAGFVWSIGQQVQREREHGA

SEQ ID NO: 78000 - protein, 416 aa, unidentified
MKKHNNSGKKSEPTSKGAKSRRPVPQDTKEVLAELVGKLKEKLNPKKAAAESAGDEHPRGGLRPNLDRLTVGVDLGDQGSHYCILGLEGETLAEGQLRTTQEDLATFFQGLNAARVVVEVGTHSAWVQEVISGCGHEVLVANPRLMDGSKRRKRKNDRIDANKLARLGRVDPESLYPIQHRSREVRQDLVMLRARDALVAARTEIINTTRGLVKSMGTRLPKCSSRSFAQKGEEAVAVEMREALLPLVRLAATLSADIKEYDKKIEELGREKYGHTALLRQVKGVGPITALAYVLTLENPKRFAKSRDVGPYLGLVPKQEDSGESQPQLGISKAGDTMVRKLLVGSAQYILGPFGPDTDLRRYGLRLCERGGKNAKKRAAVAVARKLAVLLHRLWVSGEVYEPLHYAMSAPIAAAA

SEQ ID NO: 78001 - protein, 442 aa, unidentified
MSNELPVPTAPEPEWAAFVAIDWADRKHYWKLVAAGSQKPEQGELDNTPEAVAMWAAGLNVRFGSRPIAVCLEQSRGSLVYMLLKFPQLVLFPVHPRMAASMREAFHPSGAKGDPSDTAVLLTILLCHRDQLRRLKPDTAETRLLQRLAEQRRLMVNEKTRHSNRLTACLKLYFPQILKWFDDPTSPLVGALLERWPSLEPLQRTHDGTLRKFFHQHNCRSEERIQERIDAIRQAVPATTDTAVLGAEAMAARGFLAVIAALRAHIAELDEQIAKAFAAHPEIALWDCLPGAGAALGPRLLVALGTDRQRYAKAHELECYSGIAPVRSASGQSEWIHFRWACPKFLRQTFHEFAGHSIAKSDWARAYYDLQIGRGKSHHAAVRSLAFKWIRILFRCWKNRTPYDEQVYLQSLQKRNSPLKALLPGTGWKDVAGFQKLSENPS

SEQ ID NO: 78002 - protein, 368 aa, unidentified
MSEIITYVGIDAHKKDLFIAMLIGRERTPVTWQVANEPQAIRRLVRKLEREAPGPVRCCYEAGPCGYALQRQVTSARVSCEVIAPALIPRKPGERIKTDRRDARKLAELWRAGLLTVVQPPTPADEAVRDLARARDDAREDLQRCRHRLGKLLLRRGLHYSGRNWTQAHRRWIDALEWAEPAEHAVVDDYRLAIDHLEARLIELDARLAEVAETEPYRERVGWLRCFRGIDTLTAMLILAELHDFRRFPSPRALMAYLGLVPSEASSGEAHRRGRITRAGNSVVRRVLVETAWHYQHRPGVGVALARRRTGQPARIIAIADKAQQRLCRRFRRLAEQHKPPAKVVVAVARELAGFLWAALQPTASVAH

SEQ ID NO: 78003 - protein, 586 aa, unidentified
MSTTTGLDRIGVGIDTARYGHRVSFLRPDRQPAAKPLTVLENCAGYQALKERLVQLHENYPHAHFHVRIDAAGQYAVNLEQFLRGLDLPMTLSIGEPKRNKDYQKAHFPKRTTDDTESQAMARFAVVEQPDATPAPSAAMILLREVAGRLEAQVKQTTQATNRLHNLLARTFPELATLTDDIASGWVLHLLDKYPTADRIAQAHLASLEKIPHLSGDQARALHQAAGQSVASLRDSVAESLVSALVAQVRHCQNAEKAMRKLLTKAFADLPASPHVQVLTIPGIGEATAAALVAKIVDIKRFATPDQLVGYFGVFPEENTSGVDRHGNPLPPGTLSMSRKGNDLVRGYLWNAARAAIRHNPAVRVLYRRLRAKGTRGDVAMGHCMGKLLHLVFAVWKTNRPFDAKHFAWEEPGANPLPTTTAGDRDARATPAAHKDAVGHKRDVPAEKVVTTAGSHGEPAPAPVKLATPPNSVARPRVDFAFLRQQVTMKQVLEHLGLLGQLRGPGDQRRGPCPVHSHPADRDRTFSVHLGKNAFQCFQADCGVKGNVLDLWAAIHRLPLYDAALHLAETFQVPRNREEEPGKGTR

SEQ ID NO: 78004 - protein, 404 aa, unidentified
MEQHDVIGIDVSMGKSSCAIYHQDHCLYDFTFTHTITGFKTLFSRISLTTNPIVYFESTGVYSRPVRTFCENNRLAYVEVNPLALHFQMSTLRRLKTDRNDAHKIAQYGIQYPQALSQPFTPAYGKIRELTRFHAQIEMDIKDKRMRLHNALQQTFPELEHLFASRVSKLALNVIELMPHPDFVRSLSQTKLKNILSKNTDKKLSKAKTLRRAQELVHFASISYPAANRNSIQVDEVRYYARRLINLIQEKEKLVKQLKNLAQTLPEFEIMTSFPGIGDQTAAELIGELGNIRRFTNNRKLNAYIGIDLNRYQSGTYTRPDHINKRGNAHARSILFFTIGNMIRQQAAAPNHIVDYYYRLKKGPHPKRDKVAKVACMNKTIKCLLVMIKANQRYDYSYHGLKVQ

SEQ ID NO: 78005 - protein, 351 aa, unidentified
MAMTTMADPRAAVFGGVDTHLDVHVAAALDGVGAELGVKSFPTTAAGYAQLLGWLTGFGAVTKVGVEGTGSYGAGLTRHLLDAGIAVVEVDRPNRQNRRRRGKSDPVDAMSAARAALSGDARGAAKTRNGSVEAIRVLRVTRSSARHDRTEALNQLRSLVSTAPDELRQPLRDLTGLQLIATTAALRPGSQLDVLSATKTALRELGRRAQYLADQIARLDALLGPLVATTAPKMMTRHGVGTDTAGALLVAAGDNPERLHHEAAYAHLCGSSPIEASSGKVTRHRLNRGGDRQANHALWRIVMVRMISDPDTRAYVERRTKEGKSKREIIRCLKRYVARELFPLLPRETSS

SEQ ID NO: 78006 - protein, 347 aa, unidentified
MTIVETTRPVTGGVDTHLDVHVAAAVDANGGVLGVESFATTPAGFGELHRWLAGFGTIDRVGVEGTGAYGAGLARHLRGQGLVVIEVDRPNRQERRRNGKSDELDAIEAARAALSGRASGIAKSADGDVEAIRALLVVRRSGRNVRIKYLNQIRHLGFTAPDELRERLRGVHRDRLARTAAALRPTAGSDTIVYATKLAIATLGRRVLALEADAKRLDRELETLVRRAAPSLLDVYGVGINTAAILLVAAGDNPHRLKSEAAFAHLCGVAPLPASSGKTQKRFRLNPGGNRQANHALWRIVFTRMSGDERTRKYVARRTAEGRSTREVMRVLKRYVARELYPHIVRA

SEQ ID NO: 78007 - protein, 346 aa, unidentified
MEHYVGLDVSLKLTAICIVDRTGKIEREGVVPSDPEAIAVFVKSHAPHVVRIGLETGATSTWLWTELRELGLPVICIDARHAKAALKMQINKSDRNDAVGIARIMQCGWYKEVRVKDLDSHAVKALLVSRALLVKIKRDLENQIRGLLKNLGLVIGRAKMNVFAVRTAELIDNRPALAAAVVPLVKAREAIERQIADLDRKVLWLARKNAQVRQFMTAPGIGPVTALCFLATIDDPTRFKRSRSVGAYLGLTTRRFASGEIDWTGRISKCGDKMLRSYLYEAANVLITRVAKWSALKAWGVRVAKRCGLRKAKVAVARKLAVILHRMWIDGTEFKWSSKEASNQPA

SEQ ID NO: 78008 - protein, 357 aa, unidentified
MRTILKQCLGLDVSKHTLSPSFGVLTEDLTKRFTPHADVTNDQEGFKEIERWLRGQVDEKADLIIVMEATGVYHQGIAHYLYDLGYKVSIMQSGRVKRYAQSLDQRSKTDALDSRMLSMLGLERNLRAWQPPSAELQQLKALSRERSNLLKSRTVETNRQEAISSSSYPSSTFTKRHQQRMELINEQIQAIEEEMRELVARSEPLQTGINYLESIPGVSFISAATVVGETLGFSSINNAKQLNSYAGYDVVQRESGSFRGRTRISKRGNAHIRAVLHMPSMTCVRCNPTLKQFYQRLKPTKAKPIVALVAVQRKLLILMYTLWKNEQEYDPEYEIKKQQKPKAFAAQDNNTVAYAIS

SEQ ID NO: 78009 - protein, 358 aa, unidentified
MADNVTEATVVDGVDTHKDLHVAAVVDQNNKVLGTQYFSATRQGYRQMLVWMTSFGALKRIGVECTGTYGSGLLRYFQNAGLEVLEVTAPDRMERRKRGKSDTIDAECAAHAAFSGIRTVTPKTRDGMIESLRVLKTCRKTAISARRVALQIIHSNIISAPDELREQLRNMTRMQLIRTLGSCRPDASEYHNVTNVYRIALKSLARRYLELHDEIADLDVMIAAIVDELAPELIKRNAIGYESASQLLITAGDNPQRLRSESGFAALCGVSPVPVSSGKTNRYRLNRGGDRAANSALHIIAIGRLRTDAKTKEYIARRVAEGHTKMEAIRCLKRYISREVYTLLRNQNRQVNSIQIMT

SEQ ID NO: 78010 - protein, 428 aa, unidentified
MKNPNVQKLEAITPGTLVVGVDIAKETQWARFVDYRGLELRKVLKFKNHKNGFDSILAGIEAICKNRRLDNIIVGMEPTGHYWKPLANYLLKNKVNVVMVNPYHTKRAKELDDNSQTKSDKKDALTIARLVRDGRYYEVYMPQDIFAELRVLSNSRISLMKRSNALKNTITAVLDEYFPEIVTVFKKPLKGKAAMQILKSCPFPSLILELGIDGVLFEIKKAVKKTVGRKKAQQLVETAKSSIGVNYGLVSAKLKLGLMIEELELLIKQLEQLETAMKKALADTGYGEIILGIPGIGVVTAASFLGEIGDPMRFDHPRQICKMAGYNLIEDSSGKNKSGTVISKRGRKNLRSVLYQMAMTMVAVNDEMKKLYKYLKTRPNNSLKKKQALVVISKKIVTVIYNLIKKQTGYQAELALGEFRKNQIKQAA

SEQ ID NO: 78011 - protein, 348 aa, unidentified
MEIHTIGIDLGKTLFHLVGVDSSGTVVVRKRCSRAQLLVYTADIRVHRIGMEACSGAHFLGRALREQGHDVRLLPAQYVKPYVKTNKSDYIDAEAIAEAVERPNMRFVPIKTEEQLDLQTVHRVRERWVMRRTAVVNQMRGLLLERGLTLAKGRRHLEEAIPGILANADSKLSESFQVLLRQLNQELEQLSARIAEMDKVIERTAADHEGCQRLTTIPGIGPVTATALVAAIGNGAAFRRGRDLAAWVGMVPREYSTGGRQKLLGISKRGNSYLRRLFVQGARAVMQRRNRQSNSLGRWLTQLLARVHQNVAIVALANKLLRAAWAVLHKNEPYRCPELVTTSSDPGA

SEQ ID NO: 78012 - protein, 457 aa, unidentified
MAHRKKKIGAQLVEDEDYQLRHERVAGIDIGKAKGDVCTRLPPARDGGRRRSRVEEAVPARARDILELGARLLADGVELVVMESTSDYWRIWYYLLESLGLAVALVNSSHARQLAGRPKTDRLDAQWLARLAEMGLLRPSFVPPPEIRALRDLARTRLQLVRDRTAGWQRLEKLLEGALVKLSAELSSLAKVKSARIILEAIAGGERDPKALAALALGPLQARRAGLEAALDGMMPGAHHARLIRIHLDHITFLDRSVAAVEDDITAALEAIPAACGVTADGARAADPGPGAAVLPAARRLAEIPGVSPELARAIIAETGLDMSVFPTPAHLVSWAGLAPAARQSGARARKPKKGQGDGYLRRYCTQAANGAGQTDTFLGERLRRLSKRLGGTRARCAVGRSILIIVWHLLNDPAARYTDLGADWHARKTDRGKQIRSHLRQLQALGLNVTVTETAA

SEQ ID NO: 78013 - protein, 367 aa, unidentified
MKKVSTAAAKATKNFSQPKLTIGLDLGDRSSWYCLLDEVGEVLLEQKLSTTPKAMREVFGSLPRCRIALETGMHSPWVSRLLSELGHEVIVAHARAVRLIGESRQKDDRLDARTLARLARIDPQLLCPVKHRSAKAQADLTLIRGRAGLVRARTALVNTARGLAKSYGERLRGCNVRNMNPEKAEGLSPELQRALEPLLAGIESLSERIGEYNERIETLAQKSYPQVALLKQIKGVGTLIALTFLLTLEDAHRFRKSRDVGCYLGLQPGRRNSGQSEAQMHISKEGDPYLRTLLVQGAQHILGPFGADSDLRRWGLKLAERGGKNGKKRAIIATARKLAVLLHHLWVSGEVYEPLHNSQQSPLAIAA

SEQ ID NO: 78014 - protein, 430 aa, unidentified
MNYTQNQKIEQVTESTLVLGVDIGSSEHYVRAFDYRGRELTRKVFRFSTDINGFNSFYDWVTQICIKHGKNEAMIGCEPTGHYWYTFYQFVKDHGMKLAFVNPASVKKAKELDDNSPKKTDLKDPKTIAKLVIDGRYSFPYVPEGIYAEIREVTSSRDRIMKELNAASNRIQRWLKIYFPEYLTVYKKFDTTTGMMILEEVPLPTMVTALGVDNIIKIWREHKVRGKGASFNRAKTLVDAAHDSVGKSGGQGAVMEIQMLLEDYKVKKQQLEMVTSVMEELIMQIPNAEKMLSVDGVGLVTVAGFISEVGDISRFKNPKQIQKYAGFELVENRSGKHKGRTTISKRGRKKLRKIIYQVVLPLIQSNKEFRSIYDYYRKRIKNPLKGRQAMIAVGCKLIRVFFAIMTKGVVYNGSKMIEDIHRPTQLPQAA

SEQ ID NO: 78015 - protein, 394 aa, unidentified
MYKLFVGIDVSKDSSSARGLGQEGQSCFSLSFPMNATGFSEVWRLIRSHCEDLSEVMVAMESTGCYHLNLYSFLISQGMKTVVINPLLIANFAKLSLRKTKTDKKDALTIAQFLLIHKDAISQISLSQDVQDLRDLSRERESLTVLIASMKNDIKRILQSTFPELESICDVFSETMLQFLKEFPSARLIKGANPRRIAKALMHSDKRKRVSVSAGEIIKAATESVASLSAAKEFILLGKISILFHLIEKQENITKALVKLCKSTMIEDLEIITSIKGISDKTGATFLAEIGKFNDFDSPKKIIAFAGIDPTIHQSGKFEGISKISKRGNRHLRRVIFLMAKHVSREDTLFKRYYLRRRMEGLSFKEAVLATAHKLIRVIFAMLTNRTYFCTKEN

SEQ ID NO: 78016 - protein, 337 aa, unidentified
MIVIGVDVHKQSLTAVAVDEAGRALAEVTVAAAPELLGWSASLAPERLWALEDCRQLTRALERALTAAGEGLVRVPPKLMAPQRRAGRMRGKSDPIDALAVARAALREPRLDHPRPGEQRLRELKLLVDHRDDLIDERRRAQQRLRWHLHDLDPELAVPLGALDRGVWLDRLGRRLTRLEQMAQVRIARELVGRCRSLTRTILELDRELHAAAMQTAPGLMALPGCGGISASKLLGEIGPIERFDSDAQLARHAGVAPLEASSGKHRRHRLDRGGNRQLNCALHRIAITQARVHPPARAYLERKQAEGKSRREAIRCLKRQLARTVYTTLKNESLLT

SEQ ID NO: 78017 - protein, 425 aa, unidentified
MKHAPDNSNRTTLPPNPARGLTAGLDWVKDDHVVCVVDGAGRAVDRFTVTHTGSGLAELLQRLRKTGCQEIAIERPDGPVVAALLEADLTVVVISPNQLKNLRSRYGSAGNKDDRFDAYVLADTLRTDRARLRPLLPDSPATLTLRATCRARKDLIGHRVALANQLRAHLHTALPGAVGLFAELDSAISLKFVGRFDTQDKLDWLSAKRLAGWLRNAGYSGRVDPAVLHARLTAAPRGLTGPPGAAHAHTTRALLTVLASLVEQIRAQSEQIGEQLDLHTDQHIFTSLPRSGTVRAARLLAEIGDCRARFPTPEALACLAGVAPSTRQSGKHRGVSFRWSADKQLRDAVCDFAGDSRRANPWADKLYRDAIARGHDHPHAVRILARAWLYIIWHCWQDRVAYQPARHGALQRHLATQNKITNQAA

SEQ ID NO: 78018 - protein, 342 aa, unidentified
MKRKIYIGVDVSKNWLDLAYYDGVEIDWKSGHIRVDNNKSGYRRISLWMKKLQIAKESALFCMEYTGLYCYNFRVWLESEGIIYGMINPRKMHRFEPDLGEGEPALDRIKTDEMDSFRIAMYCEKHSRKIKSSPSRLPGSAFFNLKRLLAERRQYVKHSVLYKQQLHDISAYDTEESCKRKQAGLKSLSVLRRQTDIEMRKIIKSDEAIYKNYKLLCSVIGVGLVIAVETIVLTENFTAITNPRKYACYVGIAPGRKESGISIRGGDHVSKKGFKQAKANLSLVALQAIRHDSNIRSYWLRRKADGKHTGVVLNAIKFKMILRMFAVIKRQKPYVEMDTYMK

SEQ ID NO: 78019 - protein, 349 aa, unidentified
MRSFIPAANVRFYAGVDLHARALFLVVLDRDGNVVFARNLPANPDAFLGAVAPFRDGLLVACECMHCWYWLADCCRDENIAFVLGHAWAMKAVHGCKTKCDRKDAEAIARLLRGGNFPPAYAYPKERRGLRDLLRSRLRLVRQRAELYGHVHTARRQANLPPVSNDVKYKCKRAACTADIADPFVRRRVETHLALLEPLDTAIRRLEAEIEDAARGLFPVELAVLQSTPGVGPVLSLTILLEIDTVERFDTRQQFCSYARLCGAVQTSANQRCGGGNAKAGNAWLKWAFSEAAVLSAQKDQRLGAYLNRLASRLGKAKAYSALAHKLGRAFYHMLHTKEVFHVNRFVRH

SEQ ID NO: 78020 - protein, 478 aa, unidentified
MVYSVGIDLHKGQHRVHCLDEKAQPCDAFGFQTTPEGLATLEQRIFRDGSNPIVVFEPAGLTWLMVAAYLRSCHPECRVVRAKGQKVAALRRYLRGPVKSDRIDAFTLAKMPFIDPERLDEVYLAPAQIHALQRLTRQRKRLEDQITTHKKRIGSIVDGYLPGVRQAFSHPWSARVRAFLHSQINPFAVIRAGEEALHRFLTQAKHGNRGGRTESHLVYRACQNVLALQKLCAAVGMLNEDFFVDLQDEIDRELRLMEAEEAESKALDRRIEELYRELHPSDNLRTIPGVGEHTAPVFVANIGDPRRFPGQSEFANWTGVVPAAKQSAETESKGLRMTKAGPATVKWALYQAGQIGRRWDPQLASVYYQQMVYHGKNHKQAMGAVMSHIGARIFTVLREDRPYELKDTDGKSVSALAARELIMTKYQVPEDIRQARRKSKGRKASTSGLRERRGTAADREHEAAIAPQPVTSSPSPIT

SEQ ID NO: 78021 - protein, 331 aa, unidentified
MSNCIGLDISKKLIAVHIPINKLDIEIENNIKGIKKLYSKLKKLYKKEYENLVFIYEPTGSYSSTLTKFCNAQNIKCFVINPKQFSNHSKALGQRVKSDKIDAQVLSKAIHLARDGEVRVPQYDKVVEEIKELMGYYKFTTKLKTKASNHLESLKAKDGSSYAIGDLQQTIKDYNDKQTDIISKVNEIIEADDKLKQGYENITSIKGIGKIGGIVLLHLFIKYPKANQRQITSLAGLDPIDKSSGTSVQTRSRISKAGSKLYRGSLFMGVMTAIKYDDNFKAFFARLKGNGKHTTLAQLAVMRKMIVIAHSLYKNNKKYDEELYKKATGIN

SEQ ID NO: 78022 - protein, 378 aa, unidentified
MKTVLQSKDNANDRVLYMAMELSAKKWKLGFSNSARIRVKTIAAGDWPALRAEIELTKTKLNCAADAHVVSCYEAGRDGFWIHRALQADGIESQVVDSASIEVSRRKKQVKTDRIDVAALLRLLMRYINGEKAALHPIRIPTMSEEDDRRLTRERDQLLKERGSHSARIKSLLIAHGIRLAKMTDLPRLLPTAKAAVTGYELPADLKAELEREYERYALVNKQVKHLEQLQLERAESEDIPAMQNIQQLRSLRGVGWQSSWGLSMEFFNWRQFKNGKQVGACAGLTPTPYDSGDSTREQGISKAGNKRIRKLMVELAWLWLRYQPHSALSQWFEQRFGSGGKRMRRIGIVALARKLLIALWRYLEHGVLPEGSVLKAV

SEQ ID NO: 78023 - protein, 335 aa, unidentified
MQIYGIDLAKEKFDVSFFDLTSKKVSNHPSHKVVKNNFKSIGRFLETLPSDAVLVAEHTGVYGDTLLKCCMDSNVKIAFVGGYVIHRYRATPDRAKTDVLDCALLRDFGERYPDKLKYKTFPEEALYELRQLARHREMLVEQRKQLITAGNSEYCRPIRSLAVKRSMDRIKEMLDTEIAETEKEMLKVINGHESIRHNYELVKSVDGVGLITAVELLVKTENFTKITTARQYAAYAGTAPYEKSSGKMDKGAHISKIGNRRSKTLLYICAESARLHNKEIKLYYERRTLIDKKPRHYVLNAIANKLLRIIFTLVEKGEYYDANFIRQDPRVVKYN

SEQ ID NO: 78024 - protein, 344 aa, unidentified
MEITTVGLDLAKNVFQVHAIGSTGGVVVRRSLRRAQVIPFFSKLPPCLIGMEACGTSHHWARELVGLGHEVRLMPPAYVKPYVKRGKTDAGDAEAICEAVTRPTMRFVQVKSVEQQAALALHRTRDLLVRQRTQLVNMIRGLLAEFGIAIPKGITNALAFVRRAVAGEANEVPDLATKVIAALAEQAIEVQCRIRQLERDLLASFRSNDLARRIATVPGVGLLGATAIAATVTDPTQFRSGRQFAAWLGLTPLNNSSGGKERLGRISKMGDQYLRRLLVTGMTSLVRRNKHHPGSADPRINALLARKPPRLVTVAMANRAARAIWAIMVRGEIYRMPALGSAVA

SEQ ID NO: 78025 - protein, 343 aa, unidentified
MQIHSVGIDLGKTTFHLVALGAAGKVIVRKKFNRKQLLVYTANVPASLIGLEACSGAHFLGRALRKQGHDVRLIPAQFVKPFVKSNKNNFIDAEAIAEAVERKNMRFVPIKTDDQLDLQGIHRVRDRLICRRTAVINQLRAFLLERGMVFAHRPANLKAAMADILENAEADLTPQMRSLINMLWDEWKLVEEQIKKLDLELERISAADAGCTRIRQIPGIGPVVATAIVAAIGNGAAFHKGRDFAAWLGIVPRQYSTGGKAKLLGISKRGNVYLRKILIHGARAAVLRIKRDRAPIGPWLDALDARAPKNVVVVAMANKLARIAWAVLSSGEDYRPMGNTVAA

SEQ ID NO: 78026 - protein, 516 aa, unidentified
MAPVLAIASLVANAVDTTRLFDPVGEIFKPFVTGPNWIVVCPARRTAMAAEKKLWNRKERKELARQLQSANPGLEIVHPNAAGIDVGNQAHYVAVRPDRDPEPVRRFECFTADLYRLANWLKNCGVKTVAMQSTGVYWIPLYDILEERGFEVYLVNARHTKNLPGRKSDVQESQWLLKLHTYGLLNNSFQPSCEIRTLRTYWRQRAEHVAGAATCIQRMQKALTQMNLQLANVISDLSGLTGQRIVRAIIAGERDAQRLAGFRDPRVKASQEEIAKSLEGNWRPELIFLLQQEMAMYDTYQQRIAECDQQLHKHLTSFADHAHQVRSQSAQGKAEGKKAKKPAAKNAPRFDLSSELERITGVDLTRIDGIDVMGSQTILSEIGLDMGRWKTEAHFASWLGLCPDNRTSGDKVLRRGTRHVVNRAALALRMAANSLLRSQSYLGAQYRRLRTKLGAPKAITAMAHRLARLVYRMLKYGQQFVDKGMEYYEQRYRNQQIQLLQKKAAKLGLQLVQAQT

SEQ ID NO: 78027 - protein, 402 aa, unidentified
MNSVGIDISKGRSTVAVMRPFGEVVISPFEVRHTDSELSELAKQLKSLNGETRVVMEATGNYHAPVAKLLHDAGLYVSVVNAKLVHGYGNNDLRRVKTDKKDSVKLANYGLDRWLTLPRYVPEEDTRLLLKNCYRQYRQYSKVQTVLKNNLISLLDTVFPNVNRLFSSPVRGDGSEKWVDFVAEFWHCRCVTEKSEKAFTNKYQRWCKTHGYNFSEAKAHTIHAKASGHIGIMPKSETTKLLVEQAVVQLRTTSTTLTALKREMLTLAAQLPEYPAVMGMFGVGPTLGPQLIAEIGDVRRFYSKKALVAYAGLDAPPNDSGDVTGKHKSMSKIGASSLRRTLFLVMSVYLQNAPLDEPIYQFMDRKRAEGKPYRVYMMASANKFLRIYYATVKAYLESLEQV

SEQ ID NO: 78028 - protein, 414 aa, unidentified
MDDILACCCGLDIHKESIVACLLQGSVEEGLKPSAEIREFGTQLADLIELRAWIEQHGCYYVAMESTGIYWQPVYAVLEEALTDDMHLLVVNARHMKNVPGKKTDIRDAEWIATLLRAGLLKGSYVPERDIRDLRQFTRYRKALVRDITSQKNRVEKLLQASGFRLSSFLSDIFGVSGLAIMEQLVQVGFITSQSLEFCLRGRAREKTAAILTNLNGTLSEPQRHLLRRQLAHLRDLQDNLQEVEEDIRTGFAQFEGPLDLLDSIPGIDQTAAYAILAEIGADLTAFPTAQHLCAWAGLAPGNHESAGKKRRQRTLPGNPYLKAMLCEVAWVIARQKKLYLSQWYWRLKQRTDAKRAIVALARKLLVIIYTMLKTQQPYDENRFLERKAAVEQKRVSRMVRELTKFGYTVALSA

SEQ ID NO: 78029 - protein, 341 aa, unidentified
MEYFAAIDVSLELSSVCVVDGTGKIVREGKVASEPEALAEWFTGSGLEFTRIGLEAGPLSQWLHAGLTAAGLPAILIETRHVKAALKAMTVKTDRNDARGMAQLMRMGWFRPVHVKTLPAQEVRALLTARKLLQGKLHDIELGIRGLLRGFGLKVGQVSKGRYEARIRELATGHSVLEPVTAAMLQARASLRAEYGKLHRLLLRIVREDTVCRRFMTVPGVGAIVAVTYKTAIDDPARFRKSKDLGPYFGLTPSKYQSGEVDWTGRISKVGDVMVRTALFEAANAMLSRVTRFSALKAWALRIVKLRGVKRAKVALARKLAVVLHRMWVDAADFRWRKAAA

SEQ ID NO: 78030 - protein, 412 aa, unidentified
MKHRKEQFIYVGVDLHKRTHTAVVINCWNEKLEVIEFENKPSAFSAVVNKVKKHVQDGMTIVFGLEDVGGYGRSLAVYLVENHFLVKEVNAALSNWKRRSYAMTEKHDSWDAENIAKLLLDELDRLPTAQPHDDYWILKQLVMRRYSLRDTLVMLKNQLHTQLSYNYPSYSKFFSEVDGRTALAVWHEYPSPYLLEGVTLEDLAEFLRENSNNVCSTKKAALILESVQADGNTKRNGQEYRDFLVRSHVNQIRDVHREMNDVEDNIRAIMQKLDFKLNTFTGIDNVTASAIVAEIGDISRFASADKLAKYAGLTPSQMSSGGRGKDRNQRQGNRALNKILWGLAVRQVQTARTSKKPLNPLFHAYYEKRLSEGKKKKQAIICIMRRLVNILYSMMKNKTEYRRTSLPESLAS

SEQ ID NO: 78031 - protein, 461 aa, unidentified
MRKTRKVAGQRGKKRVDVTANLEILHPNAAGIDVGNAQHYAAVPVGRDPQPVQTFGSFTADLHRLGQWLRACKIETVVMQATGVYWIALYEVLEGYGFNVYVVNAKHTKTLPGRKTDVCECQWLQKLHTFGLLNNSFLPPEEIRVLRTYLRQRENLVAGAGTCIQQMQKVLTQMNVQLANVLSDLSGRSGLEILKAILSGERDPYRLAALADPRVQASRKEIAQSLEGHWREDLLFVLRQVHDLYFFHLDNIAECDRRIEAHLQTLGSKVDLATQPLPQPTPLPRRKHIPQTNLREELYRITGVDLTRIDGIQVQTAQVVLSETGVDMTPWEDEHHFASWLGLCPNHQITGGKIIRRGTKKVLNRATTALRLAAQTLHHSQSYLGAKYRRLRAKLGAPKAITAMAHQLARLIYRLLRFGTEYHDKGMQHYERQYRKNQIEWLKRQAAQLNMQLITNTGVAR

SEQ ID NO: 78032 - protein, 408 aa, unidentified
MKDSGKRYIGLDVHKHYLIAIGVDEELNVVLPVRRVEFSYLEAWMKKTLTKQDEVVLEMTTNTWQLYDELCQHAGSVLVVHPPHVALITRSQVMNDKIAASILARLLAKGLLVGVWVPPQEIRELRGLVAQRKKMTGLVTQAKNRLHAVLQRHHLAPPEGNPFQEAQSAWWLALPLGKFEKVNVQSDLETLRFAENQREQLTLMMEEIASQEEQVTRLLQLPGFGVVTAVTVWAAIGNIQRFADAQHLVGYAGLGTKVHDSGMTTHTGRITKAGRRDLRMALIEAAQVAANSHPHWKAELARLQPRLGRNKAIVAIARKLLVTAWYVLAQHKTDRFAQPEAIAQKLLKFAYQLGKENRPKGQSAAQFVRQRLDTLHLGNELTSIAWGSKKPIPLPPSTNKVSDVPNTK

SEQ ID NO: 78033 - protein, 372 aa, unidentified
MTSIIYVGMDVHTTNYTLCCYSMEDDRFFAEVQVEPDAKNILKYLARIEKQQSRDCRIVCGYEAGCLGYSLYHQLHAHGIDCVILAPTTMMTKPGKRIKTDRRDARLISKCLAFHTYSPVYIPTEVDDAVKEYIRMRDDANSALTRVKQQIIAFCIRHGKIHDGKSYWTNKHLEWLSSLDLGNKILSEVLQEYLIRYYHLQEQVDMYDMRINELAQAEPYRQKVEKLGCFRGIAAHTALSFCVEVGDFRRFATAQQFASYLGLVPGECSSGDKQQYTGITKAGNSHLRKLLVETAQVFGRSATKSGKSVALKERQAKCDSLTVAYADKANARLKKKYFKIAMRSKVNIAKTAVAREMACFIWGMMTDNISCA

SEQ ID NO: 78034 - protein, 352 aa, unidentified
MRTSRKAAGIIATIGIDIGKNTFHLVGLDKRGAIVLQQKVSRGQLERRLANIPRCLIGMEACSGAHHIGRQLAAVGHDVRLIPAQYVKPFLKGHKNDYRDAEAIAEAVQRPTMHFVAIKTPEQLDLLALHRVRSRLVGRRTGVINQIRGFLIERGITVRQGPMPLRKALVEILSSDTGVLSPRMVGLVTDLVQDWRRLDERIAAVSAEIEALAEQDDGCQRLMTVPGVGPIISSAVVAAIGNGAGFKQGRDFGAWLGLVPKQESTGDRTILGKISKRGNKYLRTLFVQAAHVVLVRRPSAAMRSLWPWIEQASKRLHRNMLAIALANKLARIAWAVLARGRAYQPRNTVDAA

SEQ ID NO: 78035 - protein, 355 aa, unidentified
MTANRPCVTGGVDTHGRSHHAAVINSAGRVLGSAEFEANTAGYRRLLAWMRRHGELAQVGVEGTGTYGAGLTRYLLAAGVPVAEVDRPNRRMRRQRGKSDPIDAEAAARAVLAGTATVPPKDRGGIVESIRALRAARSGAVKARGAALNGLKAMIVSAPAELRAVLDDLHTVPLIKMCACLRPDRQRLDDPLQGTKAALRSLARRIVALEDEINELDAALAGLVRRAAPHTISLLAIGVEHAGQLLVTAGERPERLRSEAAFAHLCGVAPIPASSGRTQRHRLHRGGDRAANRALHLAVVVRLRCCPRTRAYVERRTQEGLSKPEIMRCLKRYLAREVFHTLSADLQDLQGLDGI

SEQ ID NO: 78036 - protein, 319 aa, unidentified
MFVGIDVAKAELVVAVHPSHERWTVANDERGVRTLVERLRAAVPTLIVCEATGGYELLGVAALAAAALPVVVVNPRQVRNFARATGQLAKTDRLDADILARFAEQVRPELRAIPGAEAQELEALLTRRRQLLEMLGAERNRLGQIFGKHQRLVTKSLKTHIAFLERELRMADHDLDEAVRHAPLWREQDDLLQSVPGVGPVLSRTMLASLPELGRLSRREIAKLVGIAPLSRDSGTMRGRRFVQGGRAAVRAVLYMGALAATRRNPVIRAFYLRLVAAGKPKKLALVACMRKLLTILNIMVRTKTRWRVDSPTTASQPA

SEQ ID NO: 78037 - protein, 418 aa, unidentified
MTKKLDTTFIQIVHPVCCGLDVHKKKISACLITLDNNGKEQYEIKEFGTFTDDLVEMKNWLLKNECPVLAMESTGVYWRPVHNVLEGFMEVILVNARHIKNVPGRKTDISDSKWLAGLLRHGLLKGSFIPAKEIRQWRELTRIRRTYTESLADFKRRVHKLFETANIKIDSVVSDLFGVTGLNLISLLCDGSELNLATIEQNTKPGLKKKIVELHRSIQGFFEDHHRFQLIGLMEVMRTLEKQIDEITRRLEDLTSGHQDLLDRLDEIPGIDKKSAQSIVSEIGVTLDEFICTAALASWAGLCPGNNESAGKRKSGRASVRSHPFKTILIEVAWAAVRKKGSYYRAKYFKLKARRGAKKAIVAIAHRISKAIFHIIKNEDHFMDLGENYLTAQTRQKAINSIKKRANQLGYELVPCAN

SEQ ID NO: 78038 - protein, 391 aa, unidentified
MQVLYPRCCGLDIHQKTVVACVLLTDPDGTDQRLVRTVGTMTADLLALGDWLDVHAVTHVAMERTGVLWRPVFNVLAEGRTLILVNAQHLTAVPGRKTDVKESEWLADPLRQGLLKASCVPPPPIRVLRDLTRSRKTLVELRTQESTRIHKVLDTANRTLGVVASNVVGVSGRRMLRAIEQGESDPAVLAELAKGQLREKLPALRLALAGRVQPHQRQLLGELLDHSASREQAAQRVEVSSADLLTEQERAVQLLLTVPATGPVTAAAILAEIGTDMARFPSAQHLASWAGVCPGNKRSAGRQLSGATTKGTIQLQTILCEIAATIARSPGTYLQAFSHRLARRRGKPRAMLAVAHSLLVSIYHMLRDQVPYQDLGPDFFDHLHAQRLEHH

SEQ ID NO: 78039 - protein, 390 aa, unidentified
MVVVMIGVDPHKASHTAVVVGADEQPLGQVRVRASAVQARRLLEWAAAWPERSWAVEGAGGLGHLLAQQLVSAGERVVDVQPKLAARVRLLAAEAAGKNDPNDARSVAVTALRSRAVREVVPDDHCTVLRMWSRRHHDLGRNRTRIACRLHAALCELVPGGIGKEITTAAAAALLEQVAPADAVQQARHELAADLLGDLRRADEQLRETRQKLAAAVQATGTTLTGIFGVGPFIAATVIGEAGDVSRFASRDAFASYNGTAPMEVSSGKRKVYRLSLRGNRRINHAVHMTAVTQVRYPRTQGRAYYDKKIAEGKTPKEALRALKRQVSDAFYKHLKADAARPTAGGKSPGGQTGNDSAASAAGSHPGCQLFGQATPGPAAHPTPEAIATE

SEQ ID NO: 78040 - protein, 427 aa, unidentified
MSEVESIQSEPEFAAFIGIDWADQKHIWCLQTAGSKQRESGELEHTPEAVECWVANLYQRFAPRPIAVAVEQSRGALVFMLSKYELFHLFPVPAQMAASMRQALYPSGAKDDPRDADLLLDLLLQHRNKLRRLSPDSEATRRVQNLVEERRKLVDEKTAQINRLTDHLKVYFPQMLEWFGRLDSELVCALLERWPALEELQKASPASLRTFFRKHRCRDRERIECRIEAIRRALPAIQDRAVIDAKSAVVKVIVQLIRILIGGIEDLDGQIEEAAAAHPDFFIFNSLPGAGPVMAPRLLAAFGSQRDRYRSAHEIQSFSGIAPVTESSGKRKWVHFRWACPKFLRQSFHEWAGHSIVQSEWARVYYQQQRSKGNTHHAAVRALAFKWIRIVFRCWQDGVAYDENTYLAALAKHGSPLSGLVAIGKTL

SEQ ID NO: 78041 - protein, 430 aa, unidentified
MEYVDGIRRREFQQVKNEIRGSDKYLIVGIDVAKERHNAFFGTANGKTLHKGVIFDNTIEGFEKLLTLTEALKVQHDLTKAVFGLEPTANYHKPLGEYLIKGGHLVVLVSAAATVKNRELLDGRWDKHDTKDSANVADLVSQAKCLYYDCPGEDLRSLRGLLSLKKRLKKEEHGLRVRIRNQLLAQYFPEMDQHFGSKASLSVVQRCLDPSLISIMEYDEFCRTVAPGKTNMAQQRRLTQIWRAAKQSIGCIVGEAVSVEAQIMVEALHRVREAIKTLDDRIEDICLKFPEYSFLLTIPGFGPDVSSKVLAAIGDPERFTSGKQVLKMAGFDLCADRSGKRSNSAIPVISKHGKADLRYALYQAAIISSLNYKEFIVYHTNKIKGREREKGIGTKMRVKLAAKLLIIAWTLMRKKVPFDPGHLNRPAKAA

SEQ ID NO: 78042 - protein, 387 aa, unidentified
MSQTVAALMPAAVDYEKTLVLAIEVSNKSWVLAAQVPGLPHAKAKRTIDPEAEALLTAIAGYRARAAAMGRSIERVIAVYEAGWSGFWLARWLMRHGVEVHVVQPSSVPVDRRVRRAKSDGIDSELLLRTLLAWLRGEPRVCSMVPIPDEADEDARRCVRERTELISERVGLTNRIGAVLATLGVSDYNPLLGNRSRRLAELRTALGEPLPANAHAKIKRLLVRLELVLTQIAELERERDAVMETEASDRASRMIQQLTALRGIGVQSATVLVRDAFVRCFANGKALGSYAGLASSPYSSGGIDREQGIGKAGNRRVRTVMVELAWLWTRYQPGAAQICWFRERVGTTGRRVRKIMVVALARKLLIALWRFVIDGVLPEGAVFKPAA

SEQ ID NO: 78043 - protein, 325 aa, unidentified
MLEETQDTEELIERVAALDIGKAELVCCVRVPGQGKRGRRLQEVRTYTTMTRSLLVLADRLGELGVTRVVMEATSDYWKAPFYLLEAQGFEVWLVNVGDVKHLPGRPKTDRLDAVWLCKVAERQMLRPSLVPPPAIRRLRDVARYRADLVGCAPPRSSGWSRLLEDAHIKLSVVAADSFGVAGRAMLAALIAGERDPKVLAELARGRMRAKRSVLEEAFTGHFTDHHGFLLARMLARVDGLDADIAELDHKLEELIVSFTAAVDRLDESTGVGRTAACAIIAEVGVDMGRFPTPGHLASWARFAPGVKQSAAKTKGKNATGHGNP

SEQ ID NO: 78044 - protein, 310 aa, unidentified
MDATYVGIDVSKEKLDVHLRPSAEAFAVARDGKGLHELVERLRGVEPELIVVEATGGFETIVTAALAAAALPVVVVNPAQVRHFAKALGQRAKSDPIDAAVIADFAAAVKPQLRPLPDAAARLLAELVGRRAQLVEMLAAERQREERVANARVRKSLKRHIAALAKELKTIEDDIDGLIRSSPLWREKEDLLKTFPGVGETLARVFLADLPELGQLNRRKIASLVGVAPFTQQSGQWKGKSMIAGGRAAVRSAVFMAAMSAIRCNDMLRAFYQHLLALGKPKMVALIAVARKLLTILNAMLRDQKPWQHA

SEQ ID NO: 78045 - protein, 412 aa, unidentified
MSKEQAKELRVSVDVGYRRHSVAMGLSSGEVLEEFEIEHRLEGFQEFFSRIEKHNLQQGYSVAVAMEGYNGYARPLDSMVRQRGYRLYNINNLKLARFKEIFPGSAKSDRIDARKGLELFQLSDHLPLAKEVLQEVSGTPHENEVLKRLTRRRRRLVNERVRVVNNLQADLQAVCPGLLEITSEASNQWFLNFLLSADTLPQLARLRKATLLKIPAVGRKYASLIEGWQKRAHFGAEVEWVSEMIQEDAQRCLDLGDKIKALETKIKQVAKDSKIAKILLSIPGFGAVCTSELAGEIGTIERFSKEGSLALYLGMSTLDNSSGKYQGSKAPKHVNTRAKAAMMIALDRHRKHVPESQRYYEKKRSEGKKHNQTIRALGRHLCRIIYKLLKAEREYQIRPEKRNTKTKVRSRS

SEQ ID NO: 78046 - protein, 464 aa, unidentified
MSTDRKTRNKKSLASRSLPVIRPNVAGIDIGSAEHWVCGPVESDGQRNVRTFGTTTPELHKLVDWLVEQGVESVAMESTSVYWIPVYELLESRGIEAVLVNARQLHNVPGRKTDFSDCQWIQLLHSCGLLRGSFRPGDAIVRLRALQRQRGNLVHERTRCVQWMQKALDQMNVQVHRAVSDITGQTGMAIVRAIVAGERDPAGLAKYRDRRCQKSEEQIARHLTGNWREEHLFNLASSLALYDALGNLIASYDARVLKEMEALEPPERRKQPVAPHPNPAKEKALRHRGEQQRRTQLWRYSGVDLTRIDGIAAGGAEIVLTEVGPNLSSFPSEHDFVSWLRLCPRTPISGGKPLKKRRNGLGASRVAEVLRMAASSLERSKTALGAAFRRIARRKDRSVAVFAIARKLAQLIYRMLRYGQDYIDIGEQKYEQQFETRRLQGIKDAARSLGYELVSKAQQLTSPA

SEQ ID NO: 78047 - protein, 446 aa, unidentified
MKKNTQKPKTLNYINENVAGIDIGHGSIFVSINPRGKESETRRFGTFTSDLKDMVEWLKENNIESAAMESTGVYWIPTYDLLDQAGIVPVLVNAYFFKSLPGKKTDVKDSEWIQQLHSFGLLRGSFRPNGNEVTLRTYVRQRSNQVRQASRQINLIHKVLAQMNIKLNLVISDVTGETGINIIKAIIAGETDPKKLAQFRNYRCRSTEAEIAKSLEGNFKPELVFSLKQSFEAYNFFMSQATACEENIQEVLDLWQVKNSDNSVTNNSPKKKKGKNSYSFDATSNLEKILSINITEIPGLGENLAIKIISEIGTDISKWPTVKHFSSWLGLCPNNKISGERVLSSRTAPSSNKAAEALRFAAQSLQFSQTALGAFFRRIMIRTGTAKAITATAHKLAVILYHMMKEKVAFIEVGQAVYEENYKRRKMANLQRQAKSLGYELVAREA

SEQ ID NO: 78048 - protein, 358 aa, unidentified
MEKVIRQCVGIDVSKDTLDAALGYLHEDFKVEVYATSQFENNVKGFKQLMGWMKKLKHRDFPCQVVVEATGVYHESLVYTLAKGCFEIAVVLPNKIRNYCRSTNIRTVTDKISARQIAEFGLVKRLENWVPPDNEILYLKGLCRERIQLLQEKTIATNRKHSHDYSILATKGTTQRSKKRISFIEKQISEIEQEVKETINNNPWLKKKIENICTLKGVGMITAVTIIAETNGFNLIRNARQLVCYAGYDVVVKESGTSVRSKSKISHKGNKYIRRALHFPAISAVGCDHSFSAFYTRLFERQKIKMKTYVAVQRKLLILIYTLWKTDQAYDPLYQHNSQIFLEQPNEAALTELVLDRS

SEQ ID NO: 78049 - protein, 387 aa, unidentified
MIYVGIDIAKLNHFASVLSSDGEVLIEPFKFTNDSDGFFMLLSKLSVFDKDSIVIGLESTAHYGNNLLMFLVPKGYKVCLINPIQTAVLRKNNIRKTKTDKVDTCIIAKTLMMNDLRYVTLQDIGLIQLKNLGRFRLKMVKQRTRLKIQLTSYVDQVFPELQYFFKSGIHHKGCYALLKEAPSPEAIASMHLTHLTHLLKTNSHGHFKKETALELRVLAQKSVGNGDKSLSIQITQSIEQIELLDSQLKRTEQEISDIITSLDSVIMTIPGIGAVNGGMILGEIGDIKRFSSPSKLLAFAGLDPSVYQSGNFQAKRTRMSKRGSRAFRYALMNAAHNVVKNNSTFKTYYDKKRDEGRSHYNALGHCAGKLVRIIHKMLTDDVTFNLD

SEQ ID NO: 78050 - protein, 415 aa, unidentified
MSNERSEIFVGFDWATQVHHAWVDDASGNALGDKAVPHRAEDLASFCDWLSSLCAGLPSAVRIAIEVPHGSVVETLMDRGFTVYAINPKQLDRFRDRLTVCGVKDDRQDARVLASSLRTDRRAFRELEREDPIVIRLREWSRMREDLQRERVLLVNRFREQLRRYYPQFIDLAEPLGANWTLALWEKVPSASIARKVRGSSIQKILKAHRIRKIDASTVLEALRVPGPKVAPGAEDASRAHIEMLKERIQIVNKQIKIASKHIEKHLEELSGKGEDSPGEKGGQRDVEIISTMPGIGPIILATLLVEAWRPLRDREYQALRALSEIAPVTRRSGKKILVMMRKACNGRLRNALYHWGRVAIQKDPYTRAKYTKLRARGKTHGQALRSVVDRLLGVLCRMLRDQTDFDPERRQVAA

SEQ ID NO: 78051 - protein, 425 aa, unidentified
MKQNQKIERITAKTLIVGIDIAKNKHVARFQNYRGIELGKYHTFNNTKEGFRSLLLKIQTEMAEHGLDDIIVGMEPTGHYWFNLGDYLLSNDIEIALVNPHHVKNSKELDDNSPTKTDIKDAKVIAQLIKDGRYSVPNIPEGVYAEIRTGMNQRERLMGDLNRVKGRIDNWLDRYFPEFCEVFSDWSGKAALGTLQEFPLPSEILDLDELEIAARWKKYVKRAVGIKRAKSLIESAKNSVGIQRGLVLAKTELKLLIEQYKLLNKQLEELMKIIAEWIQKIPEAAYMITVPGVAITTAAGFIAEVGDLSQYKHWRQVQKLAGLNLKEHSSGKHKGQTKITKRGRPRLRSLLYKCAMVLVAKNPEFKALHQYLKTRAKNPLKGKQSLVVICCKLIRVLFTLGKKKLEYDPDKVLGAYRENQINQAA

SEQ ID NO: 78052 - protein, 366 aa, unidentified
MLQKAELSGTLIQRTTTEAPRDHMYYIGLDVHKKTISYCVKDAAGQVHREGKIGATRLDLDNWIKTLPQPRMMAMEATIFTGWIYDHLLPHAEKVKVAHPLMLRAIAAAKKKNDRIDARKIADLLRCDLLPECHMASTDIRDRRRTLRYRGLVLRQTVQMKNRVSGLLMESGVTYDKQRLHKMGYFSELFSTNDEISDSIRPLLLLGREHIQRGQRLDRALISSLERDPLLSERLRRLRTIPGVGPITALTWALEIGDYTRFQSVKEAISYCGLCSAEKSSADKVMRMPISKQRNKHIQHVLVEAAKLAPRYSHELALVRDKEMQRGNKNRATLAVARKLVAYMLAVDRRKQDFVPAEALADKAVA

SEQ ID NO: 78053 - protein, 317 aa, unidentified
MEVTPIFVGIDVSKARLDVAIRPTGERESVANDKAGIKDLVKRLAKIQPALIVLEATGGLERPVTHALAGAELPVVVVNPRQVRDFAKATGQLAKTDSIDADVLARFAEAVRPALRPLPDAVTLELRALTARRRQIIEMIGAERNRLATASKAVRKRIDAHIGWLEQELERADKDLDRSIQHSPIWKENEDLLLSVPGIGPVTSHTLLAELPELGELDRKQISALAGLAPFNRDSGSLKGRRSIWGGRAPVRSALYMATLVATRRNSVIRDFYKRLRAKGKVFKVALVACMRKLLTILNSMIKHKTRWSETFSFHTT

SEQ ID NO: 78054 - protein, 429 aa, unidentified
MHNKNYISVGIDVGSAFSFMTILAPDETVILKPFKITHNNKDSLERAVSEIKKAEELSLESRTFLESTGIYHFPLFCYLVDCGFNASIINPIITHSTKNGNIRKVKNDKIDSKGIAKLGLSKDIPVSQFPAKLVLELRSLTRKYYDLTDERSAHINKLKGDLHTVFPQYLDVFCDVTGKTSTMILRQYGTPDKILRGHKKTMIEKISKASRKGLAKASERYEKLCAAANAAKTFGCQIDSIYFNIFLTLDLVEKLDSALDSILNRIRQLITFNKNEKFIQQIKLLNTIPGVGFLTAVTIMCEIGDFSAFRNPKQLFAYFGLDPEVNESGKFVGTQLHMSKRGSRIARRAIFAVALASIRTKRNGEGINPYLRKYYELKSGQKPKMVAIGAVMHKVCNIVFAVLRDEKAFELRSPEEHCKQYQRPALAAA

SEQ ID NO: 78055 - protein, 425 aa, unidentified
MIDHLDCTAVANLVAIDVAKDWNVVLVREGSGNRRNFKFANRKPDHDRLVAFLKSLPGGVIAGLEPTGDYHRPLAYRLLSEGIPVVSISSLALARVREARFGTWDKNDPKDAQVILSMLTQNMVQTYYDPLLAGTHDLQELSNTYFQITLARMRLQHSLMLHHLPLYFPEFARYWNSTRSQWFIRFLLRFPTAQSIRMLDFESFSREAWDLIDRKVEKRRWLAETYAMAAESIGLPVSLESMAIRMFRLQLARQLELNTQREELDRTAQELLAGNDDFQRLQTLPGIGAIMALTILAEAGDLRLFHHHRQFLSYCGLDLCKAQSGQSRGRETLSKRGNKRLRMVFWMAGLRALRMRENAFRDKYERYLAENPFDLDRRRKAVTAVAAKMARVAYAVIKTGTDYERFFEQRLPSGSIPLARAVEAT

SEQ ID NO: 78056 - protein, 310 aa, unidentified
MDAIVVGIDVSKDRLDVHVYPAGESFAVARNAEGLDALIARIASLQAAAVAVEATGGFETVVAAALGGAGLPVIVVNPAQVRAFAQALGKRAKTDPIDAAVIARFVAATKPEIRALPDADTRLLADLVTRRRQIIQMMVAERQRERHLPSRHLKKSVARLLKALEKELNALDQDIGDTVRGSPAWREKEDLLKTVPGVGNIVARTLLAELPELGRLDRREIASLAGLAPWTRQSGKWRGKSFTGGGRSSVRAALFLSAMVAAKHNPLLKAFHQRLIAAGKPKMVALIAVARKLLTILNAILRDNRPWQTA

SEQ ID NO: 78057 - protein, 337 aa, unidentified
MRIIRIGLDTAKHVSQVHGVDDNERAVLRRQVRRGEMEKFFAKLPATRIGLEACGAAHHWARMLRGLGHAVVLMPAQYIKPYVKRGKNDALDAAAICEAMSRPGMRFVPVKSAENQAALMLLRVRDLLIKQRTMLVNAMRGHAAEFGVIAAKGRVNVAELLQRAHAAAAGVPPPALALLRVLSEQIDGLAAKLTALEAELMVLHKADPVSQCLATQPGIGPIGAVSFSLTVSDPKAFRSGRHFAAWLGVTPKENSSGGRQRPGRISRQGDEGLRKLLVLGATAVIRFAKPGSASPWLLNLLARKPKKLAAIALANKMARTLWAMMVSGEVYRRPQPA

SEQ ID NO: 78058 - protein, 364 aa, unidentified
MSIVAETLDGNEQQRPALLDAAVGGDTHRDTHSLEMVSGIGAVLSTITIDNDADGYAAVIEWMLEHAPGPRVVIGLEGTRSYGVGLSRALQAAGFEVVEVPQPRRADRRAGKSDPLDAHLAALAVLQMPVDRKVLPRSDGDREAMRILLGARKDLSTGRTAQINRLRAMLLTGEDTDRALGKGPMSKAQLDLIARRRGLRGETTEQAVRRAEARRLALAIRAADVALVATDKQLRDLVNATAPTLLDGLGIGPVSGAQAIVSFSHPGRCRNEAAFAALAGASPIPASSGRTHRHRLNRGGDRQLNRALHTIMLTRWRSCDRTAAYITRRQQQGLTDREIRRCLKRYIARELFRALNHEPPKTQG

SEQ ID NO: 78059 - protein, 414 aa, unidentified
MDVVVERCAGLDVHRDSVVATVRLPGTGKSRRRREQQTRSFGTTIGQLETLADWLRSCAVTLVGMEATGVYWKPVFYVLERRFECWLLNAQHLHNVPGRKSDVIDSVWCCQLVEHGLVHPSFVPPPEIRRLRDLTRLRSTQVEERTRVIQRLEKVLQDAGIKLTSVASKAYSASARAMLEALLGGVSDPAALAELAKGRLRAKIPQLREALANRFEITHHGVLVASLLAHIDALDQSLATLDARLEADTEPYGELIQLLCTIPGVGIQTARVLIAECGIEMSVFASAEHLVSWAGICPGNNKSAGKRRSGKTRHGDRWLRKALTEAAHAAARTKDTYLASHYWQIRGRRGEAKAIGATRHDILIAYYHITRDRVPFRELGADWLARRHSPEHRTRRLVRQLEALGHTVTLETAA

SEQ ID NO: 78060 - protein, 371 aa, unidentified
MKGFCISLDVSKGSSFYQGFKGFDEPITKPKKIEHNLEGFKELLKLKETIRKEYNEDCIVVFESTGVYHRSLQTYPDEHNFKYTIISPLLSAKVRKSDIRGTKTDAKDCASIAKVFYLKELRIYSKIDEIYDDLKEKSRYYDFLMDEMKRWKIEFRRLLDIIYPGFDGVYDDLYGDFIQTFLLEYSHPEIIRKRRLDTIAKFLEKHTCHKETYCIRQAQTLKEYVENCASGCSSKSYLVRQFDTVIHNLNAQIKHLEIVLEEIVELAKTLPNYDSIRSIPGIGNNLAGRILAEIGEVNRFNNASQLVAYAGIDPQIYQSGQISGLHLKISKKGNKKLRWLLYLAVTCMIKTSRNTVIVDFYKKEKGRWISV

SEQ ID NO: 78061 - protein, 409 aa, unidentified
MHEKQKHIYVGVDLHKQHHVAVIINCWQEKLDEIKVENKPSAFSTFLLDIDKLTEEGLTPVFGLEDVGGYGRALAQYLTDHGQVVKEVNPALSYAERKSHVTVQKSDSWDAECVARILVRQLSQLPDAKPHDLFWSIQQLVTRRNALVKAQGALKNQLHIQLSHHYPSYKKFFSEVDGKTALAFWERYPSPSCLEGVSIKQLTTFLLEVSHNTCSVKKANEILKLVIEDGNTTKEHQETRDFLVRSIVRDITFKKKEMNYVEGELKELMSLLDFQLDSMPGIDLVTASALIAEIGDVRRFPNANKLARFAGIAPVYFGSGGKGKEQKSKQGNRALHALFYNLAVQQVQVAKGGKLPRNPVFHAYYQRKLKEGKTKGQALVCIMRRLVNIVYGMMKHKTAYELPIEQEKK

SEQ ID NO: 78062 - protein, 356 aa, unidentified
MSAQTAVGWDIHRKFSQLSVVQRSEHGEIRVVKRIRLEHADRPGMRAALATLPPGTPVAMEGAFGWPWIADLLDELGLDPHLGHPPAIKVLAKNEAKADRVDADRLGRFWLRGIFPQSYLSTPEVRNLRERLRYRMALVCLRSGMKNRVQAILHRQGILHDFSDLFGKGGRAFLKTLALPAAGRAVLDGWLAQIDLVGEHLAGVEAWMEEHLEADEIVRLLKTIPGIGLILAHVIRAEIGQLVERFPSRKNLTSYAGLAPVADDSADRHGRRHIASACNHTLRWALIEAAGCILRSKSCPTNLRQLHNRLTHGGRVHKSQAKVAVARELCELVYVIWKKGEPYREPTAVRPPRAKR

SEQ ID NO: 78063 - protein, 373 aa, unidentified
MKKVRFLGLDVHAETIAVAMAEPDGEVRSLGIIPNREESIGKLVKKLGPAEQLQACYEAGPTGYVLYWQLTALGVKCEVVAPTLVPVKAGDRVKTDRRDAMKLARSYRAGDLTAVWVPNEEHEALRDLVRAREAAKQDQLRARHRLSKFLLRHGRRAPAGIKVWTQKHEEWIKKQVHFEQPAQEYTLLDYLHEVEHMGDRIQRLEQAIAEAVKLAPRRMQEVIQSLQALRGIAQISAVTVVAEVGEISRFEGARQLMGYSGAVPSEHTSGKRMQRGPITKTGNAHLRRIAIEAAWAYRHRPAIGPRLRKGQEGLSEEVKEIAWKAQHRLHKRYRTLSAAGKEKQKVITAVGRELLGFIWAIGVQAERNSKRVA

SEQ ID NO: 78064 - protein, 462 aa, unidentified
MANVTIFETKLEHAAAIDIGSSRIYVTADGIEVKVFDTFTSGYYECAEYLQEKGTLEVGMEATGIYWMALCAVLVSCGMKVCLVHPQETRQVKGRKTDVKDCRWIWKLFSAGILRSSFIPEGRYMELRHLVRERLDIIEMGSIYVNKMQKHLELMNIKLTEVISQVQGASGIKMIKAILEGNRDKEYLLSLCDARIRKNKGDLVLKALEANYTDTYLFMLKMNMESWEYHQKKLQEIDERIETLLTEICQQKEDVKITSTPKAIRHHAPKIADLHSMMVKIHGANISSVSGLNDYTLLRLMGETGVDISRFPNVKYFTSWCGLSPKNNQTGKTNKKVKGMRCNRAGQIFKECAMGLLNSKHVAIGSFMRRLKAKKDAAIAIKAGARKLAEAYYNAITKGMEYVEQGIKNYAEQQKLRELSLMNKLAKKHNMEVIEKLSMAAPPKGPKPMQSAQSKNCINLSS

SEQ ID NO: 78065 - protein, 411 aa, unidentified
MRLFVGDDWAEDHHDVEVMDGAGKVLARKRLPEGVAGMAQLHALVGAHLGEGEEGAEVIVGIETDRGPWVQALIAAGYRVFPVNPLQASRYRQRHGVSGAKSDAGDAHMLADMVRTDSHQLRLAAGDSPEAEGIKVLARTHKTLIWERTRAVQRLRHQLREYFPAALEAFEDLDAPDALELMAKAPDPARAARLTRAQVSAALKRARRRDIPGKATAILAALRAGHLGQPEALTAAYAATVRSLIAVITVLDEQVKVLQGQVEAHFGQHPDAEIYLSQPGLGAILGARVLAEFGDGPRRYADGKARRNYAATSPITRASGKKKIVAARFIHNDRLIDALMAQAFASLNASPGARAFYDSLRARGIEHNDALRRLANRLVGILHGCLKARTRYNETTAWGHRENRPQSSAAA

SEQ ID NO: 78066 - protein, 351 aa, unidentified
MERGVDTHKRSHVLVALDDEGRQLGTRTIANTPEGWAEALVWARGKQQHHRRWGIENGGSLGKGFAQFLLSQGEAVVREVRPQRTAQYRRRGRTQDKTDQADALAIARLLLAEGEHLPTIPRDDVSTELRLRSDHRANLLADRIRLINQLHAPMLQIDPDYPARSGALTARRGLLYCRDLLLLEADGVTLTRQLIVRQLVGQILGLDEEIGTITAALGERVRASRTPILALCGVGEVIAARLIGELGIVPRVHAAAALAALAGVAPVAVSSGGRGGFRLNRGGNRQRNRVIHLMALSQRRCDPRAQAYYAKKRAEGKTRRAAMRCLKRRLVDVLYRCFTRGTVEQPVAVAA

SEQ ID NO: 78067 - protein, 401 aa, unidentified
MTAVGSKAWIGVDIGKTHHWVCAVDESGHKLLSVKVLNDEAQIIEVIAAVKAVAPDRVWAIDILGTPSALLVALLAKADEQVRYASGRVVAAMSAAYSGEGKTDAKDAYIIAETVRIRSDLSVIDADADLVRTLGVLTGYRADLVADRVRMINRMRDLLTSVFPALEREFDFASCKGALVLLSGYATPEAIRRMGEARLSRWLRQRRVRGYADVAARAVAAAQTQQTVLPGQDVAASIVAELANSVLVQHERLKVLEQQIQDAFAQHPQADVIESIPGFGPVLGASLLVAAGDLAAYPTAGHLAAAAGLVPVPNDSGRRAGNLHKPRRYSRPLRHALYLSAQTSMMRAGPNRDYYLKKRDQGRTHSQAVIALARRRIDVLWALLRDNRTWTPAPPARAQAA

SEQ ID NO: 78068 - protein, 411 aa, unidentified
MSVDRRLAGIDVHKKMLAVVVRSETAGKPLYQEQKFGTTRAEIEHLAAWLQQEQVSEVVMESTAQYWRPVWWGLESHFALHLTHPLKTRAPHGRKRDFRDARRLTDRWASGDLEESFIPNQEQRQWRALTRARVHLGRLIVIVRNRVEGLLELGGLKLTSVVTDTFGVSGWLILQQLAKGENDAEKLVQLARGSLRKKEAQLREALAGKLDAVSRLLLKQSLEEVELLRKQIQQLDEALAVAMRDHLPTLVRLMKIPGVDRVAAEQLLAEIGPTAATFPSPQQFASWVGVCPGSRESAGVSYSSRSAKGNGYLRRVLCQIAWGAVHTRNTFFQGLFTRLKPKIEPKGAAWAIAHRIAKVVWLVLHEGAEYQERGPAKPNPETLKRKLRNLVRQFTGLGVDPREAFNAALPS

SEQ ID NO: 78069 - protein, 403 aa, unidentified
MRSVLSIDVANGKSEVLLITEYGEVLIEPYEVKHCLSEFNLLKEKIDNFNLNDLTIFMESTSTYHLPIQRFFTKNNYNVQVINPILGKNNTRNLRKTKTDIEDCYNLADLFFKNTVKIHTKTMNDIYSSMIELSRQEKHLTESLVRSKNRFKQIIANAFPEYLKCFTASDIYGETSLNFIKEFPHADIIKSKRIDALANNIYKSTKGYLPYSRCLNKAKKIKELANNSYPGIDVNSCEVKNLINIIEIISYSDTKLSEVKQDIIKLAKQTPYFNIINSIYGVGETSTAQIIAELGDINRFENIKQLNAFCGLDPTIIQSGKSINYNGPISKRGNRNARKILFITCCSIIRSSVLHNVDNDLLLYYRKKQAENKHFKECIIACSSKLLRTIFAMCKNNSLYMQN

SEQ ID NO: 78070 - protein, 371 aa, unidentified
MDKSSKVLFVGLDVHKDTIAVAYAPEDRGAEVVSWGMIGTRQCDIDKLIRKLESKGATLVVAYEAGPCGYWLYRYLTRRGVSCSVVAPSLIPRKAGDRVKTDRRDAVTLARLLRSGDLSAIYVPTVDDEAIRDLSRAREDAVHDLKRSKVRLKAFLLRQDLRYEGRANWNAAHLRWLARVVCPTPAQQIVFQEYVHTVSEQTARLQRLEVELHTAVKTWRQSPVVEAVQALRGVNLTGAVTLIAEVGDRTRFDTPRKLMSDLGLTPSEYSSGPHRHQGGITKAGNGHARRALVEGAWAYRYPAKVSRHLQLRLEHVPAEVRAIAWKAQLRLCKRYRLLSARGKHVNQVVVAIAREMAAFAWAIARIVPIAA

SEQ ID NO: 78071 - protein, 338 aa, unidentified
MIHVGVDLHQRFCYMTALDARGKKLQAGAVSNERAALRRYFRQFAGQGVQVAVEACGFWPAFREVVEPAVERLVLVHPQRVKAIAWAKLKNDRVDAETLAHLLRCDLLPESWKADRATQARRQQVRLRATLVRQRTRLKNQVHAVLHQQGLRSPVSDLFGRGGRQWLAQAKLPPRARETITVCLRLIDGYSQEIEEQNRQLSVEARGDARVRWLTTIPGIGMYSAMLLLAEIGDIRRFRDQQALCSYAGLVPRVRESAGKAARGGITRQGSPWLRWIMVEAAQAATRSSPAARRYYDRLLRKKHKHVARVALARNLLIAVYALLHEGEVFDEAKFAAR

SEQ ID NO: 78072 - protein, 357 aa, unidentified
MIIIGVDFHPEFQQIASLDTDTGVFEEKRLLHPEEAEKFYRALATASQKVRVGMEASGHARWFERLLAELNFELWIGDAAEIETKRVRKPKTDREDARLLLRLLMEDRFPRIWVPSWENRDLRQLLWHRHRMVQARTRIMNQLQAVALNEGLVCKKRLWRERGRQQLESFPLARWASRRRHDLLELLDRLNPTIAELSQAIEQEVEKGPEAQRLMTHPGVGPLTALAFVLIIGRAERFQCGKQIASYLGLVPLEKSSGNRRRLGHITKQGNSILRFLLVEAAQVTVRSVPEWRSKYFHLLMRRGKKIAKVAMARRLAVRLYWMWRKQWDYEQLKKFGSNAGQLGNRHGVQLEHRVID

SEQ ID NO: 78073 - protein, 321 aa, unidentified
MQGKVHADAMPAVYAGIDVCKERLDIYLHPAGERFSVANDAGGWRCLRRRLTLLPVAMVALEATSKYHRAVHRRLHGAGIPVALVNPLRARLFAEACGMLAKTDAIDARMLAWMSVRLELAESPPAAEQVEALQELVRARAAAVEERTALANRLESCAHAVLRRELQGRLRGLDRHLGRLERLISTHVAAHPDLAGHYAIVRSIPGIGPVTATELLANLDVVGRVGGKQVAALAGLAPFARDSGDARGLRHIGRGRPHLRKALYMAALAAARCNPDLKRFHQRLRQNGKPPKVAITAVMRKLLILANTLIAQNRHWSPDPA

SEQ ID NO: 78074 - protein, 366 aa, unidentified
MKDQLYCGLDLHKRFSYIVVKNSAGFQLAKGRVENDEIEISNFFAPFGGHHIKVALEATSNYYWMFETLDKMNMDVNLSHPLKTKMIADAKIKSDKIDANVLADLLRSNFLPTSYIPGKETRELREILRHRIRLVTMRSGLKNRLRDILTKNNITDPYTDITGVKARQFIKELHLSPVFTIQRDDLLDQIDFINKKVENINRILKTYAEDYPEISRLTEIPGIGIFSALIVLAEIGDINRFPSPKKLVNYAGLCPGLHQSGNTCYNRPITNQGDKYLRWILTEAAFHAIRHPGPLKDFYTSLFKTKGCQRAIIAVSRKMLVGIYFVLKNNKPFNPVRRKKLSKYNANLDKPGLGTWSTKETVETIG

SEQ ID NO: 78075 - protein, 344 aa, unidentified
MNHYAGIDVSLKSSAVCIVDGAGKIIREAAVESEPAALIGWFKRLGVELERIGLEAEPLSQWLYAAMQEAGLRVELLETRHVRDAFRAMSVKSDRNDARGIAQLMRLGWFRPVHCKSIEAQEMRAVLTARKLLQSKLHDIENCLRGVLRGFGLKARKTTERTFATRIEALAAGHSGLTLVVQALLEAHTVLLREFKKLDKQVQQLAKAHPQAKLLMTTPAVGPIVALTYVFAIDDPKRFRSSKATGAHFGLTPRRYQSGETDHSGRITKIGDASVREALYQAAHIMLTKPVKNCSQLKSWAMRIARRAGPRKAKVALARKLAVILHRMLADNMPFNPAAKAAAT

SEQ ID NO: 78076 - protein, 345 aa, unidentified
MDEAYDGRQVVGMDLHRRRSVLVRMSMDGRKLETVRITNSPGALRAVLARCGERPLVVLEATYGWYWAADVLAGAGAEVRLAHPLGVRAFSYRRVKNDERDAADLADLLRAGLLPQAWIAPPEVRALREVVRYRHKLVGQRTSCKDQVHAVLAKLGVPVTHSDVFGTGGGLWLDQLVLPEPYAAKVASLRALIGVLDGEIARLGQRAAGVLGADPGYAALRELPGIGPVLAAVIIAEIGDVTRFRRAGQLCSWAGLTPRHYESDTKVIRGHVSKQGSKMLRWALVEAIQHQPAGTRPRQARDAIIARRGKEARNIAKTAAARVLLTQVFYALRDGHVRSAGRPAA

SEQ ID NO: 78077 - protein, 412 aa, unidentified
MTAIDQFAAHVGLDWADKKHDVCVQFKNGERTFHVINHTPEALDTWLNDLHQKVKGRIAIALELKKGPVVYALQKYPFITVFPVHALSLARYRQTFWPSGAKDDPQDAELALDLMLRYPQKIKPIEPDNADIRLLLQLVEQRRLLVEDKRRFVNRLINTLKQYYPQPLEWFSHRDSSLFCELIIRWPSLQQLKRARSDTVRHFMNARGGPAVAYTEQRVTSIANAIPLTTDKSVIEANVLMATALASQIKLVGELIRTYDERIESLFDTLPDAELFRSLPGMGPCLGPRMLAALGDNRDRFNSAEEIQNYAGIAPVTERSGQKSWVHWRWQCAKFVRQTFVEWAAKTVNSSYWAKLYYQGLREKGKSHQSAIRALAFKWIRIIYRCWKTRTCYDEAKYLLALEARKSPLLMP

SEQ ID NO: 78078 - protein, 350 aa, unidentified
MLIIGCDYHPGFQQIAYVDSETGELQERRLQHPEETEKFYRDLGQRKVRVRVGMEASGHARWFERLLEELSFELWMGDAAKIRAKRVRKQRTDRLDAQHILKLMLKDDFPKIWVPNWENRDLRQLLWHRHRMVQTRTRIMNQLQAVTINEGVRYKKRLWRDAGRKQLESLRLAQWASRRRQDLLEVLDRIHPTIAELTQAIENEAEKCCEARRLMTHPGVGALTAVAFVLIIGEAHRFDCGKQIAAYLGLVPEEDSSGERRRLGHISKQGNSLLRFLLVEAAQATARSDGRWRNQFFHLAQRRGRKIAKVAMARRLAVRLYWMWRRGWDYEQLQSFGSHAGQPGNPHGVQ

SEQ ID NO: 78079 - protein, 405 aa, unidentified
MAALTLVAQTRPYIIGVDCHARTHTYAIIEAATRRQIACEQFPTTSAGISRALAWAGRRTDGDMGCLWAVEGVGSYGARLARAVVEAGYDVAEAPRMNARGRRGLGKSDPLDAAAIGTAVLSLEEFQLRTPRQDEGTRAGLRILSAARDQLTRERTMNVNALIALLRAHDLGIDARKPLVPAQIATISRWRERQEQVELSIAREEAVRLGRRILEVTTQLAANQKRMTELIQQSPAAPLLEMMGAGAVTVATVLTAWSHPGRVRSEAAFASLAGVSPLPASSGNTVRHRLNRGGDRRLNRALHTITMTRMTHDPGTREYVAKRTQEGRSYREIRRSLKRYLARTLYRQLNTLYGIADPMRPTPRTDPLTHVCQGANVSSPTKIVSVDLGGLDECESIPRTVGPKA

SEQ ID NO: 78080 - protein, 446 aa, unidentified
MTTLAGVMVLVPSVSCLPEPSDQRLPSPFPYTKALTAMTTDIDFSAKPVAGVDTHTDTHTVATVTATGRHLATETFPTTRAGYTHLTEFLNKHGVGTVGVEGTNSFGAGLTRHLIDRGYTVVEVLRPKRSIRRRDGKSDPVDALAAARQVLSGEGLSTPKDSTGPVESLRALQITRKQLVSTTTTLITTIKSLLVTAPDDIRTRYGTMTNHTLVNALVYCRPSPDLSDPRNGVLTSLKILATTYRALRVQCDELEARISALVSMINPHVSSIVGCGALVSADLLISIGDNPERIHSEAALANLCGVAPLPASSGRTNRHRLNRGGDRRANSALYRIALVRMRYDQRTKAYVARRTAEGLSKKEIIRCLKRAIIREVYRVICTKRSTPQPRDLRRDELKELRIAKQLTQVYVAQHLGCAPARISDIETGKRPLTELASAYEKFLKTV

SEQ ID NO: 78081 - protein, 349 aa, unidentified
MEQYAGIDVSLDSASMCIVDAQGKIVKEAKVACEPEVLIAWFAAHGTPMARIGLEAGPLSQWLFAGLKAAGLAVELLETRHVRAAFKAMPVKTDRKDARGIAQLMRLGWFRPVHCKSLPAQEVRALLTTRKLLQAKRHDVEMSLRGVLRGFGLKVGPTTPKTFEARVRDLVAHHDTLQTIADALLKARAVLEQEFKAIEKRLSALARGHAPTRQLMTTPGVGAIVALTFASAIDDPARFRSSRTVGAHFGLTPRKHQSGETDVTGRISRIGDHGVRVALYEAANVILTRAVRGSDLKNWALGVAKRAGMRKAKVALARKLAVVLHRMLADGTTFMASQGAGARAAAVAG

SEQ ID NO: 78082 - protein, 340 aa, unidentified
MEKASMIGLDIAKNVFEVHGRSAAGEVVLRRSLRRGQVEKLFAKLAPAVIGLEACGSAHHWARVLGKLGHQVRLMPPAYVKPYVKRNKSDAIDAAACWEAVGRPDMRFVPVKTIEQQAALSLHRSRDLLVSQRTQLGNALRALLSEFGIVAGKGKAGLAQLVDELHAGTLDLPADAVVAAMALADQRAALDAAADALERRITAQAKADEKARMLKTAPGVGPLSAHATLATLPDPSLFKSGRDFAAWLGLTPRLSGTGGKTRTGRITKQGNQPLRRLLVLGATAWLRQVKARPEKGSPWLRGMLARRPSKVVAVAQAARTARILWAMLTHNQPYRAPAIG

SEQ ID NO: 78083 - protein, 450 aa, unidentified
MSPLALDVVTKTDKTPVLGRMLSKYVGRKTSSIENGITKARNHSRQRGNIMRVVFGIDVSKASSEVAILVNGEKVHGYTIPNDAIGFNRLLGDLKTVHQPEIVFEATGVYSRRLQAFFEDNSYTYTRLNPLESKKQLDSLRVRKTDKIDAEKLAMSQFILNRKPSYVQEALYQELRDLSRFYQNLTEDIVCAKNRLHKVLQITFPELENILSAPTGEQYWNLVITFPCNSFVLESDDATLTAIIRQSTAKRISEKRVTYLVDKLTKLANQSYCAVKKTSPVIEEVKYYAGELLRLSEHRQGVVEEMVTLAQSLPEYEILLSIPGIAETTATSIIGELGDIRRFHSANQINAFIGIDLRHYESGNFLAKEHITKRGNPYARKILFKCIHNIASASHTNLCHIADFYEKRKRQSQVTSTKPHTIASIHRLIRTMYYLITHNKLYDYTSIQNR

SEQ ID NO: 78084 - protein, 375 aa, unidentified
MSIVMGVDQHRAQVTAEWIDVETGEISRARVRPADRAGVRRFLARFAGQQLEVALEATTGWRFFVEELRAVGATVHLAEPAETAARRGRKKRAKTDRADARHHRELLLAGRLPESWIPPDHILDLRAQVRLRHTLGEQRSEWQQRIQAVLYHHGCPQRRQLMTSEGRDWLEALVLPDVARQQITVARAMVDALELQIAPLDRQLRAYARRQRGCRALIDAHHGIGPLCAVTILAELGDVGRFDNSRDAVRYGGMDITVYQSDRHRSPGHLSRQGPPALRWALYEAAQAARRPGSPDRDWYLEAAEHLGGNRACLALARKLLKRCYHTLRELGADALQPPLVERRRGSVAARRASSGSVSQLERPATNERSDEQAA

SEQ ID NO: 78085 - protein, 366 aa, unidentified
MPSVGLLKPFPPYMEFTMIARSDAACFVGIDLHKDTLTACVLRGRDREVSYVKLACKCRDQIRSFFASLPQPSAVAIETVGFYRWLWTELEPLAGQLVLCDARGARALAGRRIKTDREDALNVALLLADGRLPLAWAPPENVQVLRNWTRHRNGLTRQHAKVLHHVKSTLNRLNFPGPVRLDAAALQRYLLAGVERFSADDLTMLWQHQRRLIEIEQDRAQSERRISELMRASEFARIREIIESVPGVGLVTAATVIAEIGDFSRFPDSKAIGRYAGLAPTVYASGNSSRLGHISKTGAPDLRWVLQQAAWTAIRCDAGFKKTWLRIAKTAGKKAAAVAIARKILVLMWTLQRKDEPYKSREPIAA

SEQ ID NO: 78086 - protein, 326 aa, unidentified
MHGVDADGQVVIRRKLKRRYLLAFFEKLPACLVGIEACATSHHWSRQLQALGHRVRLMPPAYVKPYVKRQKNDVADAEAICEAVTRANMRFVETKTVEQQSCLMLHRTRHLFIREQTAVINVIRAHLAEFGIVAPVGRKGVEELLRVIADPADRRIPEIARACLAALGTQLQRLKEQLLEFDRMIMAWHRSDETSRRLDEAPGIGPMLATAVVASVADPKAFRSGRNFSAWVGLVPKQHSSGGQDRLGHISKQGDRYLRGLFVAGALAVIRYAKIYGTRHRPWLTALLARRPTKVAAIALANKIARMTWAMMVKGERYKEPVALAA

SEQ ID NO: 78087 - protein, 342 aa, unidentified
MSTIQTIGVDLAKNVFSIHGVDAYGKCVLRKTVKRNKLLDTFAKLPPCLIGMEACSGAHHWARELLKLGHNPKIMASKFVIPYRQNEKNDANDAEAICEAVSRPKTRFVSIKSEEQQAVLCLHRIRQGLIKTRTATINQLRGLLSEFGIVMPQGRYSAQNTIGSVLEDAENGLPILARELLQDLSNKIQHLNLEVLHYDRRVSALVREMASAKALMDIPGVGEHSASAIVATVNDAKQFGSSRQFAAWIGLVPRQYSTGGHVHLGRISKRGEKHIRTLLIHGARAVIARCKEKTDRNSIWLNQLVERRGYKRAAVALAAKNARIIWALLTTGKEYKINYVNG

SEQ ID NO: 78088 - protein, 318 aa, unidentified
MNIIGLDISKDTIDATLHKINGSIHYIKFKNNDDGLKQFRLWIKGNRIRKAYIGMEATGIYYEKAADMLSSYYTVYVINPLKIKDYGKSRFNRTKTDKADSNLIADYIKRHQDTLIPYQIPKNKALQKLINLKNQLQQQQKQIKNRLHSTEEDFIRNIHQDLIDTIQDKMEQVKIAISEQIKKQTDYNHYRNLQTIPSIGKDTASVLYAQLTEKHFKTANQFVSYAGLSPAIIQSGTSVRGRGRLSRYGNRRLKSTLYMPALCAYRFNAFPKLINNLKKAGKPKMVIIVAIMRKLAKLAYYIVKTGQPYDAERHRLNQ

SEQ ID NO: 78089 - protein, 367 aa, unidentified
MNYKLKAAPTAISKEQNSQSGAKANRMVIGVDVHLKSYEAARKLDNDSVGVVQRWRSKEEFLLYAEKQLQQAQEVVVVYESGPLGFTLYWDLKARGIECLVCAPQSQEQKRKRRKNNAIDARTLSGNLFNYLNGNKHALQLVRVPTKAQEQARIESRQHDALVQERKRIAAMGNSLLLSQDYGSWKNWWRPKAFERLSQLVAPWVLKQLQRWITILGELDRQIQQAKVELTQHYQGPRPKGMGAPSLAQLNAEVLDWNLYSTERKIGCLAGMVPSEWSTGEGQRLGAITKVGLPAIRRIITEMVWRMILFQPQYKAVQKWREVLEGSNRGLKKKAVVAIGRRLIVDIWRLQTGRISAQELGLIMIEA

SEQ ID NO: 78090 - protein, 359 aa, unidentified
MAVIEERERRIVGGVDTHKDLHVAAVVDEQDRVIETRCFATTRQGYRQMLAWMRSFGELQRIGIESSGSYGAGLLRFMQQAGIAVLEVTTPDKQDRRRRGKNDDLDAQNAAHAAFAGQRTVTPRSRDGMIESLRVLMACRKTAVSARRVALQMIHNTIVCAPDGLRDQLRSLTRMQLVRTLAAWRPDLTAYRDLDSAYRIGLKSLARRYLELHDEIADLDAMVAAIVDELAPNLVARNSIGHIGAAQLLLTAGDNPERLRSEASFASLCGVSPVPASSGKTVRHRLNRGGDRAANSALHIIAIGRLRTDQRTKDYVARRTAEGHSKLDAIRALKRYLAREVFTLITQRRKEINATRIAA

SEQ ID NO: 78091 - protein, 360 aa, unidentified
MQRNKISFKGQKIFVGIDVHKDSWRVAIAPEVGVIKGHSQKPSAQELFDFLNKHYPDGDYLAVYESGFSGFSTYYALETVGIACLVIHAADVPTSQYDEVMKTDKVDATKLVKSLKSGLLKGIYIHKKDDLDARAVIRLRKTIQKQLGGYKSRVKHLLYNNGVQLPEKYSKPGTYWSRAFIKWLKEDVVLLSSTRDSLDLLIDQVESIRNVLLNATRKVRKLSNTQRYRTNMELLTSIPGIGVNVAMGLLTEIGDVKRFHKETEFASYLGLIPTSHSSGDKIVYGEKTFRGNKEMGPQIVEAAWIAISRDRGLGCAYTHYKKKMIPQKAIIRVARKLSNIILAVLKTGKKYETYQWNEIQ

SEQ ID NO: 78092 - protein, 311 aa, unidentified
MTIHPCYIGCDISKASLDFYDPDTSKLVSVGNTPDAIAAHLQVYRDRSVFVVYEATGTYDRALAHALAETSIPSHRINPMQAKRFAQAIGQKAKTDPLDARMLADLGARLTPVADNRPAPEREALAGLHRRRDQLVELRKRERTRVKEETCPRLKASHDQVISLLSEEIALFDEEIAALIKADQKMCREAALLQTAPGVGPVTVTTLIALMPELGTINPKQAASLAGLAPFNHDSGKLKGRRCISGGRRRVRRALYMAALNAVRRSDRFQTFYQRLTARNQAKKVALITFGGKTGPFPFSIPPHLESYSSF

SEQ ID NO: 78093 - protein, 348 aa, unidentified
MRFYTHQHCYTCGIDLHARSLYVCILDNTGQKLVHKNIKASPEALLKLIADYRDDLIIGVECMFSWYWIADFCEDHGIEFVLGHALYMKAIHGGKAKNDKIDSEKIARLLKGGMFPYAYVYPRGLRSTRDLMRRRIKLARERGDLMAHIKNTLSQYNLPAHSQNLRYEKHREPMRSAFSDPSVQRSIDLDLARIEFYDEQLAKLEWYLKRTAKSVDPKTVILLQSIHGVGDILSLVILYEIHDIARFPRVQDFVSYCRLVKCQRESAGKKHGTGGAKIGNPYLRWAFGEAAVLFLRGNPQAQRWLEKKTRKHNKAKALTILAHKLGRAVYFMLTRETLFDQERFLVSS

SEQ ID NO: 78094 - protein, 410 aa, unidentified
MEVLHRRCAGLDVHKKTVVACVRLAEENKVVTEVRTFATTTAGLLALSAWLSENGCTHVAMEATGVYWKPVWHVLSDGEFELVLANAAHVKNVPGRKIDVSDAAWLAELLAHGLIRGSFVPDGQTQELRTLLRTRKQLVREKTRHTQRIHKTLEDANIKLESELSDVLGKSGRAMLEAMVAGETDPVRLAALAHSGVKASQATLQEALRGRVTQHHRFLLRLHLGQVDAIDTAIVTIDGEIEAHLAPFRIGVELVSTIPGVSGLSAEVIVSEIGLDMSRFPTDGHLLSWACLSPRNDESAGKRRSTRMRKGSPWLKTTLIQCAWAAKRKKGSYLQAQFLRLKSRRGPQKAICAVAASILTAAYHMLKDGTLYQDLGADHFKRRSKTTQTQRLVKRLQHLGYAVDIKPLAA

SEQ ID NO: 78095 - protein, 374 aa, unidentified
MSSKGITWVGLDAHKHSIQVAMLLPGHEQPLSWQEANEESAVRRLARRLNREAPGEVRACYEAGPLGYGLQRDLEAQGVICEVVAPSLIPIKPGERIKTDWRDARKLAELLRAGLLTEVQAPKEADEALRDLCRGRDTVRQDLMRARHRMSKFLLRRGYRYHDTQRHWGVRHMKWLRPLRFDHAAAQAIFDHYLLTVDHLDERLRQMDGQLEAFGGEDPYRQPVAWLRCFRGIDTVTAVSLVAELHDFRRFRSARALMAYLGLVPSEHSSGEQRRQGGITRAGNFHVRRLLVEAAWHHRHRPVLSQPLRRRREGQPAAIIALADRAQERLHARFVRMTRRGIHYNKTVVAMARELVGFLWAALYPRDVEAPPSV

SEQ ID NO: 78096 - protein, 331 aa, unidentified
MFIIGIDPHKGSHTAAVLDHCETVIGELRVSADRRQRDRLLEFAASFTPRTWAIESASGLGALLAQQLVGAGETVLDVPPTLSARVRLLDAGCTDKTDPHDARAAAIVALRHSRLRRVTPVDHTAVLRMLADRHHDLTGLRTQAICRLHALLCGLTPGGAGRLLSAQQAGRILRGVRPTGPVELERKRIALELLGDVRRFDNQLLTVNERIVEAVLASATTVTDIHGIGPLGAAIILGHTGDIARFPTSGHYARYTGTAPIAASSGPKQRHRLNPRGNRQLNRALHVAAVTQVRNDTPDGPTTAASSTKARPARKRCGLSNARSPRPSTGT

SEQ ID NO: 78097 - protein, 317 aa, unidentified
MEVSLIFVGIDVCKAQLDVAIRPTAQILSVPNDKAGIKTLVKHLEKLRPTLVVLESTGGLERQVMLALVGAEISVVMANPRQVRDFAKSTGQLAKTDRIDAAVLAHYAEAIRPQPRPLPDELTLELRALTARRRQIIDMIVAEKNRLATASKAIKKRITAHITYLEHDLDDADQDLDRFIGKNPLWKENQEILCSTPSIGPVSSRTMLAELPELGTLGRKQISALVGVAPFPRDSGTLKGRRTIWGGRASVRGALFMATLVATRFNPVIRDFYKRLKAKGKPSKVALVACMHKLLTILNAMIKNKTRWSENFSLKTT

SEQ ID NO: 78098 - protein, 321 aa, unidentified
MIKKCNYVGIDISKLSFDVALKNEEEKYSHYKFSNDLKGFKALLKLIRGSQSICVMEASGPYYLNLATYLNKQGIGVCVINPLVIRRFCQMRMMRAKTDKKDAQMIAEYGKTETPNQWNPEADYVLELKQMQAYVEQLNKNRTGFIRQKEAFSFNSAPSTLVIKGLCKMIKAIEKEIQLIEEKMEALIKIEHQNLFNQLQSIPGIGRKTALALIVLSAGFTKFENAKQLCSYVGLSPRIFESGTSVKGKSRICKMGMSRIRAMLYVCSWAAKKYNKACIELYDRLVAKGKPKKVALIAVVNKLLKQAFALATKNEFYLEIN

SEQ ID NO: 78099 - protein, 324 aa, unidentified
MAKRITICAGIDTGKRKLDVAIDGSSLQLQVENTAEGHEVLLVWLRRHKVKRIGIEASGGYELPVVTKLRRKRFVVVVFQPAQVRAYAKFHLQLAKNDKIDAALIAACTAAVKKIHAAPDPRLQPFAEHLTLIDQIGEDIQLHKNRLETCRDPRIQKLWEEEISRLAKRQRVELKALAAAIRQHPDLAQRLNLIYSVSGAGMSTAVAILVRMPEIGKLSREQVAALAGLAPYDDDSGERSGARHIDGGRKRLRRALYTAALPASFFWNPHLIALYKRLKAAGKGHKSALIACARKLLIFVNTVVARGTPWQEQQPARATNPAAA

SEQ ID NO: 78100 - protein, 356 aa, unidentified
MSQKLDTSPAVIGIDIGKNSFHIVGQNRRGAIVLRQKWSRGQVQARLANLPPCRIGMEACVGAHHLSRTLKALGHDPRLMPAKYVRPYSKGQKNDYRDAEAIAEAVQRPTMKFVATKTADQLDLQALHRVRERLVGQRTGIINQIRAFMLERGIAVRQGLRFLRAELPCILATRTDALSPRMLRILEDLTADWRRLDARIEDLSSEIEALARQDKGCERLMSVPGIGPIISSAMVAAIGAGDAFSKGRDFGAWLGLVPKQLSTGDRTILGSISKRGNQYLRSLFVQAAWVVLVKIGPKHWDRYGLKSWIETASKRLHHNVLAIALANKLARIAWAVLHKGRAFECVKTNEAASRPA

SEQ ID NO: 78101 - protein, 397 aa, unidentified
MIAVGIDVSKSKSTVAILNGDGSIRAKPFDVHHVADELQALVDYIKRTSEPPTILMEPTSHYHYPLLKAFTEAELPVCLINPYQMKKYGDTELRKAKTDKRDSLRIAQYALEKSYSLIPYTPQDQKYEDLRFLSRQYSQRISTLTVAKVQLLSLLDETMPGITTILPLKSRDPDNCVLLRFIKRFKSFDVIRKMGKTRFLDSYQVLVKKTKDRFAGSKGLAIYELVLNSVTTRGENPLSAMTQDQCVDLVSTSQKAADEINLQMRIIAETMSEYKVLRSMAGVGDRLGPIILGEIGDIRRFHSGKALNAYAGNDAPPYQSGQFESRNRHISKRGNPALRKACFEVMQALKLTKPQDDPVYLFLLKKEQEGKPYNVAKMAAVNKFLRIYYARAMELYK

SEQ ID NO: 78102 - protein, 361 aa, unidentified
MLYFKFQIMETPIKQTAGIDCGMQELVVSFGLLVSSGNFIYRLTKSFVNNIKGFKQLLQWINEISSKETSVLFVMEATGVYHEKLAYYLIANNCHVSIVLPNKINAFAKTCISKKQDDQQASKVLAEFGCIKNLDEWQPPHPLFASLKQLTREKRQLQQEMAIIKNQLHVEQTKAITASASIKRMKARCRLIEKQITDVEKEIIDMLNSDAAIKEKTEKVCTIPGVGLPTAVTVIAETNGFNLIRNARQLVSYAGLDVVQKQSGTSVRGRAHISKKGNPHLRHCLHLPSFTAVKYNIPMQNLHHRIVEKQAIKMKGYVAVQRKMLMLIYTLWKKNEAYNPSIKFLEQPVEAALTELDQVRS

SEQ ID NO: 78103 - protein, 410 aa, unidentified
MEVLHPRCCGLDVHKATVVACVRLVIDGKIVKETRTFATTTAGLLALSEWLTETKCTHVAMEATGVYWKPVWHILSDGDLELVLANASHIKNVPGRKTDVKDADWVSDLLAHGLIRASFVPDTQTQEMRTLLRTRKQIVREKSSHILRSQKTLEDANIKLDSVITDIMGLSGRKMIEALIAGEKDPAKLARLADHRVKASQETLREALRGRVTRQHRFLLRLHLDQIDALDAAIAKIDREVEASLAPFRTAVEQVSSVPGVKDLSAQIIVSEIGIDMSRFPSSGHLISWACICPRNDESAGKRRSTRIRKGSPWLKTTLVQCAWAAARTKDSYFNAQFHRIRARRGPKKAIVAVAASILTAIYHMLKDGTMYQDLGPNHFSARDKQRQKNRLIKRLADLGYVVELVPQAS

SEQ ID NO: 78104 - protein, 352 aa, unidentified
MALPTLPHPQVLVTLGVDTHADSHVAAALDQAGRPLGTRTISTTPGGYAALLGWARRFGTVDRVGVEGTGSYGAGLARWLRAHGQLVIEVDRPDRAARRRQGKADDLDAHAAARAVQAGTATGQPKAGDGTVEMIRSLRLARRSAVKARTQAANQLKALLVTAPDGLRAQLRCLPPAELVTTAARLHAAAKPATPTDAAKLALRSIARRWLQLTQEITDLEVHLDRLVAMAAPALVAVKGVGTETAAVLLVAAGDNPERLRSEAAFAHLCGVAPIPASSGKTTRHRLNRGGNREANWALYLIAVGRMAWHGPTHAYVERRTKEGKSKAEIIRCLKRHIARELYGILVSRPAT

SEQ ID NO: 78105 - protein, 341 aa, unidentified
MQKSNYFIGLDIACDDFVASVYESPEKPVITKEAIENNPDGFSVLVLWLKEQGINSSNSVICMEATGVYSEACAHYLSANGFRVSVEPPLKVKRAFDPVGHKTDAVDSRQIAEYAYRYNDELRFWQPKQEIVEKIKQLLTAREQFTKQSTAIQNSIKAYERHVIKVPLIINAHQETLKELKKHIKEIDKELDRIIRQNPVISRITGQLKSIPGVGLLLASDLIALTGAFNDISSHKTLAAFLGICPYQHQSGKSVYRQPRMRNFGPNYARKLLMLAARSCATHNIEFRKYYMRKLAEGKAKQLVLNNISNKIVKIACALIKNNAQYNETYHSVNPLCFNMA

SEQ ID NO: 78106 - protein, 464 aa, unidentified
MEPFYLGVDVSKGYADFMILNSEKQPAVKGFQLDDTFDGHQSLYGMLDCFTAEHSDTILFAGMESTGGYENNWYKSLTEFQESFNIQTARLNPLGVMHNSKAELKKNITDKISAQNIAEYLIAHPEKVVYQQSNQLSGLRKHWGFIKMLTKHSTQLLNQLNTLIYTANPELLSYCQNGVPNWVLKLLVQYPCATNLKRAHAKTVAKIPYVSSQKAQQLVARAKSSVASSTDVTTEQLIVATARQILHLKKTIAEQTTQMIDECAIPEIDLLKTFPGISNLSAVGLFIEIQTIKRFANVKKLASFFGVHPVYKISGDSAGGFKMSKQGRKEPRKILYMITLSAIQCNPLIREIYQKHQKQGKHNMAVMGICMHKILRILYGMLKHNQPFNPQIDITNRVRSVRIKGDISVDNQSRRFQDYDQKAPVSRRQRKKRLERERSHSIGDTNSGITAPVPLPDIIANILP

SEQ ID NO: 78107 - protein, 453 aa, unidentified
MAHSTGLTRGDRRRNHQIAGLREVVGRDRAVLAIDLGEDKQVAVLMDHDNVVLARKIVLVKAHNLGSLLVWAGQHAAKHGFVGVTVACEPTGHRWKAVMGLADGAGMGFVCVQSLAVHRSREGDDYTRDKTDHRDSVLIGKLVTRLDCYLPERADTQWARLRHLGARRGRLVSEATACGQQVADLLSCAWPAVLECAAKPLESTTWLACLSVITARCNGNPSKIRKMGRATFVAAVRAELPYWDAKKISHRVLDRVWDALSDTRGVPAQRRGALERVHLVMADWRSARARLGDVQGRMLEVLDELGLRELVCSIDGLSGVGAAVILAETGDMARFASARSVVKHAGLNPAENTSATMRGQTRVSHRGRPQLRAAAWRAVWGALPHNPVLAAKFAHLTKRDTDRLAAGQARAACAAALLRWLYAVVTKRQLWDQRVASGLVPARSAGVELPAAA

SEQ ID NO: 78108 - protein, 428 aa, unidentified
MITAVRQRCAGIDVHRDFVMVCLMWGPTEGEAHWEIKRFDTTVPGLKQLDDWLRAEQCQDVVLESTGPYWEPVVNVIGEGRQICLANPQEVKNRRGHKTDKKDAWWLAHLYRHNMIRASYLPPAPVRQLRLLTRRRRELIRNAAQEKNRVQKLLEQSNIKLRSVLSDVFGVSGAAMLEAIVVEGKTDPAEIASLARGTLQHKKEAIAGALIGFQLPETHRFLIKQAMEHLATLVEHIEELDRQIQSHLVAHGMERAAELVESIPGIRRTSAAEIVAEVGPDVKAFPTPGNLSSWAGVCPGNKESAGKRGSSRTTKGNPYFRATLNQSAWASSRTKQSEFQKCYEKLSPRLDHKGAIVAVAHALVYAIYSVLHYQRPYRPVPTPAGPDQPRTQRLIRHHTRRLKQLEAWLPKAPPADWTTTLARLAQTE

SEQ ID NO: 78109 - protein, 402 aa, unidentified
MNAVGIDVSKGKSMVAIMRPFGEIVSTPFEIKHTASDIHSLVELINSVEGESRIVMEHTGRYYEVLAHQLSEANLFVSAINPKLIKDFDNDSLRKVKSDKADAVKIARYALDKWQNLKQYNVMDELRNQLKTMNRQFGFYMKHKTAMKNNLIGILDQTYPGVNTYFDSPARSDGSQKWVDFASTYWHVDCVRKMSLNAFIDHYQNWCKRKKYNFSQSKAEEIYGKAKELVPVLSKDAITKLIIKQAVDQLNSASTTVESLRTLMNETASKLPEYPVVMAMKGVGTSLGSQLMAEIGDVSRFTHKSAITAFAGVDPGVNESGSYEQKSVPTSKRGSSDLRKTLFQVMDVLIKTHPQDDPVYQFLDKKRAQGKPYYVYMTAGANKFLRIYYGRVKEYLSSLPES

SEQ ID NO: 78110 - protein, 346 aa, unidentified
MEHYIGLDVSLKLTSICIVDRRGKVEREGVVASDPEAIATFIKLHAPHVVRIGLETGATSTWLWTELNKMGLPVICIDARHAKAALKMQINKSDRNDAVGIARIMQCGWYKEVCVKDLDSHATKALLVSRALLVKIKRDIENQIRGLLKNLGLVIGRAKMNMFAVRAAQLAEDRSELFAAVDPLLKAREAVEQQIVDLDRKVLRLARNNAQVRRFMTAPGIGPVTALCYLATVDDPARFKRSRSVGAYAGLTTRRYASGEIDWTGRISKCGDKMLRSYLYEAANVLLTRVAKWSALKAWGIRLAKRSGLRKAKVAVARKLAVILHRMWIDGTEFKWSSKDAADQPA

SEQ ID NO: 78111 - protein, 337 aa, unidentified
MDATTYGVDIAKSVFQIHWVEPASGEICRRKLTRAKFTEFFAKRQPARVVMEACGGAHHWARQLSALGHQVELLPAHEVRKFVSGNKDDAADARAIWLAAQHPDIRRVMPKSAQQQAELSVHRLRSHWISVRTATINALRSLIYEFGVALPKGRSSALRWLAEHRSQIDPQLPPVMVHVLDAQLQALRQLDEQVQALEVHIDVAQRSNEAARRLRQVPGIGLLGATALAATLGDGSAWRNAREFACCLGLTPRHTGSGGKVRMGGISKRGDAYLRTLLIHGARNLVRCAKPSPWIEQMLRRRPFNVVATAVAHKLARTAWAMLAHGSAYAPRPQPAL

SEQ ID NO: 78112 - protein, 347 aa, unidentified
MDQQCHYVGLDVSLETTSICVIDDAGAIIWRGKCRSDPDTITAIVRQHAPGAVRVGLETGQLSNWLTLSLRRRGVPVVCMDARHAKAALSLQINKTDANDAFGLAQVVRTGWYREVAVKSMDAHTLRMLLVARSRLVSQRQATANTIRGLLKTFGLVVARGSKGLFPVRVREQIAGNPAVIAIIEPLLAVWHAIRDQVAMLDRQMLARARNDQVARRLMTIPGVGVVIALAYTAVIDDPARFRRSVSVGAYLGLTPRRYQSGEVDTTGHISKCGDSLLRGYLYEAAAVLLCRDGRASILKSWGLGLAKRIGMRRAKVAVARKLAVIMHRIWSDHSEYRWTAIPPTAA

SEQ ID NO: 78113 - protein, 386 aa, unidentified
MIYIGIDVAKDKHDCHIFDSDGVIHHDSFVFDNSRAGFNKLLEIIKSFDDKTKVGLEATGHYSENLLSFLTGNGLEVVVFNPLSVNRLRTAGTLRKTKTDKNDARYIARLLVGDSHPYSPQSYHTLQLKSLTRARFRLIKEIQPLKNRFRRLVHIVFPELETLFSKLDSPSILQMLAAYPSAKQIAGCDIRKLSSLLSKFSHGKIGRTKAEKLKTLAENSIGSGNSGDALELSLVAKRIIFFDRQKDVLEAEIATIMQALNSPITTIPGIGTVLGAVILAEIGNINSFASDAKLLAFAGCEPSTYQSGKYTAANTPMVKHGSRYLRNALYLAANMAYLHNPVFKDYIDKKRAEGKHFYVAMSHGMKKLVRIIFAVLTKNTPYAVSN

SEQ ID NO: 78114 - protein, 309 aa, unidentified
MDTTIVGIDVAKDRLDVAVRPSGELFVVERNAGGLELLVERLKPLAPTLVVLEATGGFETVAAAALAAAGLPVVVVNPAQVRAFAKAIGQRAKTDPIDAAVIAHFAEATKPEPRPLPDEATRLLADLVARRRQIVEMIGSERQREKRATARIKKSIARLIKALEKELASVNGDIDDAVHGSPAWRDKEDLLASVPGIGPIIARTLIADLPELGRLDRKKIAALAGLAPFTRQSGQWRGRSFIGGGRSKVRTALFMGAMTARRHNPILKAFFARLVAAGKPRMVALIAVARKLLTILNAVLRDQKPWQTA

SEQ ID NO: 78115 - protein, 323 aa, unidentified
METPQVSFKQVVSRGCGLDVHKKVVVATIDGEGLKKQTREFGTVTSSLKELRDWLLDNGITHVAMESTGVFWKPVYNILEPAGITVWVVNAAHVKYVPGHKTDKKDSAWLCKLLLAGLLKPSYIPAKEQRELRDLTRYRTKLVQSNASNKNRIIRILEDANIKLSSVLSSTSGVVGTKLIDKICDGEEITMQDVDEVYHKKLAATKEEIFEACQGFITQHHVYMLQIIRQEIAGTQHTIESLTRRIKEVLSPYENALELLKKVPGISSKSVEDLVAEIGLDMSVFPTEKHLASWAGMSPGNNESAGKKKADGQPGETNKLKLC

SEQ ID NO: 78116 - protein, 328 aa, unidentified
MATRRCVGIDVSARDLTVAIEGHAERLVFSNDAAGHERLVRRLCRRSARTRVCLEATGIYHLDLALALHRAAGVEIMVVNPMAARDFGRALMQRSKTDGVDAEVLLAYACRMPFESWRPPASEILDLRAIVRRIEALTLTRTQERNRLHAAGRCAELTGAIAWDIEAHLEHLAQSIERLQAQALAIVQGSAELVRRFERLTSVRGIATVSALRIMAELAVLPADMTPRQWVAHAGLDPRQVESGTSLHKPTRISKTGNVHLRAALYMPAMVAIREEPHVHAFAAKLIARGKKPIQAIVAVERKLLHAIHGMWSTDSDFNGEKFYAMSA

SEQ ID NO: 78117 - protein, 336 aa, unidentified
MYSGIDLHSNNSVVAVIDEGDHVVAQKRLPNDLTKIIGFLARWKDQLAGVVVESTYNWYWLIDGLQEAGFEVHLANTVAIKKYDGLKHSGDETDAQHLAHLLRLGILPTGTILPKEHRAVRDLCRKRMQLTRSRTSHILAVENIIARQLGARMTSNQVKRLTADAVDRLALPAEVALAIKSNVAVIATLNAQIEVLAKRLQETVGSRPQYGWLTSVPGIGQTLATVILLESGPIDRFASVGNFASYARCVDSVHTSNRKKKGEGNAKNGNKYLAWAFVEAANFAVRFCPEAKRFYERKKARRNNVVAIKALAHKLARASYHILKEGKPFDVTRCFA

SEQ ID NO: 78118 - protein, 345 aa, unidentified
MKYYAGLDVSVKETSICIVDQTGKICREVKVTSHPDDLIAVLKDPAWNMERIGLEAGPLSQWLFEGLARAGLPVICIETRHTKAFLKAQPSKSDRNDARGIAQMMRVHLYRAVHVKTLTSQKRRALLTARKLLQDKAIAIENDLRGLLRNFGLKVGVVGSAKFEARIRELVEGTLNLVEIVEPLLDARRNLREHFATLHRKLLMIARDDEVCPLLMTIPGVGPVVAVAYTATIDIPQRFKNSKAVGPILGLTPVLNQSGESHRVGRVSLCGDGMMRTLLYDAAQVLLNRVAKWSWLKAWAMSVAKRRGLQKAMVALARRLAVIMHRMWSDGTEFCWSREKLPAGA

SEQ ID NO: 78119 - protein, 417 aa, unidentified
MPLSPNIYQVYEDKTRWINTESISFERSFKMIYLGIDIAKKLHFAAAISSDGEILKEPFKFSNDHDGFQKLMSVIESFNDNNLIIGLESTAHYGHNLVYFLYNLNFKICVINPIQVATLRKNNIRKTKTDKVDTYLIIQAMQFYEHRFVAKFDIDVMRLRDFCRFRQKIMKSRTRLKIQLNTYIDQIFPELQYFFKSGIHGKACYAVLKESAAPIDIASMHLTHLTHLLEVASKGHFKKDTAVDLRVLAKKSVGTQDTSVSIQVAHTIEQIELLNRQLDELHLTIESIMVSLDSVIMTVPGIGYLNGAMILGEIGDIKRFKQPKHLLAFAGLDPSVYQSGNFKASKTRMSKRGSRMLRYALINAAHNVVKNNKTFHDYYELKRSQGRRHYNALGHCAGKLVRVLHKILTDDIIFSLD

SEQ ID NO: 78120 - protein, 349 aa, unidentified
MYYVSIDIAKLNHFASVVSADGEVLIKPFKFTNDNDGFCKLLSVLASYERGSLIIGLESTAHYADNLVEFLVSKCYQVCVINPIQTSTMRKNNIRKTKTDKVDTLVIARTLITQPHRFFSHEDIDLMHLKDLGRFRQKNVKERTRLKIELTAYVDRVFPELQYFFKSGLHQKAVYALLKEAPTPELIASMHLTHLTHLLEASSHGHFNKQQARELRILAQKSVGSSDRALSLQVTQSVEQIELLDRQIKDIESQMTEIMLGLDSVIMTIPGIGYINAGMILGEIGDIHRFSKPCQLLAFAGLDPSVYQSGNFNASHTRMSKRGSRVLRYALINAAHNVVKKQCDLQGLL

SEQ ID NO: 78121 - protein, 430 aa, unidentified
MDEVNRSRLEEFRQLRKEVRHSEEHLIVGIDIAKDRHHAFFGTATGKTLLKRIIFSNDHEGFGRLLEQAEALRVQHGLKKVVYGMEPTANYHKPLGEYLIKLGKSVVLVSGVTVARNRESLDGRWDKHDGKDSANVADLISQGKYLYYEHPSAELRGLRGLLSLKRRLKKQEHGYRVRIRNHLIAQYFPEMDRYYERLGAEGLSIVKWCWAASEIAQLDVDPLIERVTSRRVRMEKRWRLEEIWEKAGESVGCDGVPGLEHEAKVMVEGLRQLREMIKETERKIEELCKQFEEYRYLLTIPGFGPDVSAKVLGAVGDPERFLKGKQVLKLAGYDLSADRSGKDSDKAIPQISKRGKADLRYGLYQAALVASVKNRDVMIYYTNKIRGREREKGIHTKIRVKLAAKLLVIAWTLMKKKEAFNAAYLKAELN

SEQ ID NO: 78122 - protein, 339 aa, unidentified
MKVSTLGIDLAKNVFQLHGVGCNGQTVLKKKLTRDKFLPFLMQLEPCLIGMEACASSHHFARVLRQYGHEVKLIPPQYVKPYVKTNKTDAADAEAICEAVARPNMRFVQIKTAEQQAILVLHTERNILIRERTACANSMRAILAEFGIIMPRTLSQLYKKIPEILEEYDNELSPFVRCSVARQLEHLQGVEDQITLIEQELSRWAKTQPACQRVMKVPGVGLMTATYLVASVGNGQQFHSAKQFAAWLGLVPREFSSGGKQRLGRISKRGDRYFRYLLVHGARAVAAVIERHKGNMPWLYRLLNKKAYNVAVVAQANKTARILWSMLVHHTEYRTLSAV

SEQ ID NO: 78123 - protein, 359 aa, unidentified
MKMKQTNKRRNLYLGKEVFVGIDVHKKTYTVVARVEREVVKRWTTAASPQGLAEQLRKFFEGAKIQTVYETGFSGFVLHRTLVKGGINSIVVHAAGIEVAVNNRVKTDKRDAQKLAELLEAGRLKGIGIPSEEVEQRRILTRTREQLVGDRTRVKNRIRMKCHQMGLINYDENNQMTHKLVKELLSRTSSRELTIAIEAYWQIWKQLDEEISKIEQKIKEQAQEDSNESTYRSSPGIGLLSSRILSNELGNMSQFKNERELFSYTGLTPCEYSSGENIRRGKISKQGNSRLRQVLVEAAWRAIKKDKALGDFFERLYLRTGKKRAIVAVARKLIGRIRAAFRQGVSYQLGHQKIKTTTA

SEQ ID NO: 78124 - protein, 420 aa, unidentified
MEEITGDIEIVARVAGLDIGKATLMACVRVPDEDKPGRRLQEVRAFATTTPALLQLRDWLICQGVSLCVMEATSTYWKPPFYLLEDATECWVVNARDVKNVPGRPKTDKLDAIWLAKLAERGMLRPSFVPPPWQRELRDLCRYRRTLVQERTREKQRAEKLLEDTQIKLSSVISDIFGKSGRDMLEALIAGQANPAVLAELARGSMRGKKSVLQEALTGQFRDHHGWLLRMMLDRIDALSAQIDQLTSRIDEAIAPFAHQVAQLDEIPGVGKTGAQELIAEIGVDMTRFPSAGHLASWARFAPRARQSAGKAKPGTTGKGSPWIAGTLGEAVIGTARTKTFLGSRYHRLARKRGKQRAIVATGRSILVIAYHLLSDPGARFADLGPDWHDRIAPLRRKRQLIAELERLSGMKVTLKEAAA

SEQ ID NO: 78125 - protein, 330 aa, unidentified
MEPTTIAIDLAKRVFQIHYVEPETGAIHSKVLKRAQLAPFFANRPASRVVMEACGSAHHWARVLARLGHDVRLIAAQFVRPFVKSNKNDAADAAAIWEAAQRPGMRFVAVKTEDQQAMLAMHRIRQQLVRIRVMQVNQLRGLLYEFGVVLPQGRRASIEAAKAALASLADELPAMLLDSLQDQLSRLRALDEQIARIEQRILSWRRNDDACLRISEIPGVGVLTATAAVSVIGQAKTFRSGREFAAYLGLVPRQNGSGGKIKLGGISKRGDVYLRTLLIHGARSVISSSKHLPERLRQMLSRRPTNVVAVALANKMARNNLGAAGAWPNV

SEQ ID NO: 78126 - protein, 468 aa, unidentified
MNAKSIIMKTAYLGVDVSKGYADFVLIDEDMQQLADPTQLDDTTKGYKKCEQWLRKSITKHGLTQIRAAVESTGGLENNWLASFKTMLSGFDLSMIRLNPATVKFASKATLSTVTTDEKSALNIAQYLVRYGRSLDFNAPENPYLPYKKVLMQLRYLTKINTGSKNIFRQLLYESFPELQAFCPKDVPNWLIELLKKYPTPSRLARAKPAVIAKIKGITVEKAEQLIMAAKNSAASAKDDSIGLVMDTQIRQIQYEKEQIKKLKLYLERNVKGPEIDLLTSITGIGTYSAAVLMILIGDCNRFPSPRKLASFFGVTPEIRQSGDKKGHSKMSKKGSSLARATLFMCAKSAAIHDEHMKRIYTNHITRGKNYYQTMGVIMHKLLRMCWGVLTSKTPYNPAIDQKNQQNPVSAELQKDQEWINKRKEQAFDPLAPVSNRARKQRKEHLLSQAVRDGHVRDLESAPLLVET

SEQ ID NO: 78127 - protein, 339 aa, unidentified
MKYTPVGVDIAKHLIQVHFIDEHTGEVIDKQLRRQDFLMFFCNREPCLIGMEACGGSQHWARELTKLGHKVRLLQARFVKAFVMGNKNDVMDARAIWMAVQQPGKEISVKTEEQQAVLVLHRSRRQQVKFRTAQINALHGTLLEFGETIHKGRAAMEREFPEALERMKERLPPYLITVLENQYNRLNELDSLIEDIEKQLTSVARQNETCKRLLDIPGVGPLIATAAVATMGEASAFKSGREFAAYVGLVPGQTGSGGKIRLLGISKRGDTYLRTLFIHGARAAALLTKEPGPWVTELKKRRPASVAIVAMANKLARTVWAIAAHGRKYDKNHVSIRPN

SEQ ID NO: 78128 - protein, 437 aa, unidentified
MTVKFIGLDVHKDTIAVAVADGDGAREVRFHGTMANTPEAIRRLVARLSGPGVVLRFCYEAGTCGYGVHRQLRRLGVDCMAVAPSMTPRRPGDRVKTDRRDAMTLARLLRAGELTAVWVPDEEHEAIRDVVRARRQAKDDLVSTKLALRGFLLRHERRFPGRSAWNKTYWRWLGEQAFASPHQQLVFGEHLRRIEEAQARCDRLDAALAEAVAGWRLAPLVEALQALRGIALVVAATLVAEIGDLGRFETPKQLMSWLGLVPSEQSSGARVRRGAITKTGNGQARTMLVEASWCYRLPAREEQRYRARVQGLPEEIRSIAWRAQVRLCGRFRRLAAAGKPLPKVTTAIARDRRIRVGHRASGPARRGRPSLTDNAFCNRAEEARRATAIATWPACRGARERWEILDAQRGRPRRRCPTRRPRAAHDERRVMRWPIRG

SEQ ID NO: 78129 - protein, 355 aa, unidentified
MDNTKYIGMDVHTETISIAVLNSAGKLVMESVIETKALTVIQFLQGLRGDLHVTLEEGTWAAWLYDLLRPHVNQVLVCDPRQNAFLKVGNKSDRIDARKLAELLRSNLLRPVYHGEHGVRTLKELSRSYIAISGDLARVMTRLKAVYRSWAIPCAGKQIYAPRCRGEWLGKLSEAGVRRRAEIYYEQFDALRSLRQQVRRELLAESAKHKASKLLCQIPSIGPIRAAQLIAILQTPHRFRGKRQLWAYGGLAIETHSSADHRYVKGQIQPSKKQVSLRGLNRNHNHELKNIFKGAAIIAATKPGPLQEFYAALVAKGTRPEMARLTLARKIAAIILIVWKKGVSFDAQHLKPQTA

SEQ ID NO: 78130 - protein, 368 aa, unidentified
MEFMGIDLHTDCFNSCTLDEGTKKKTANYSIDEESLDKFYKTLTPETYVIVESTTNAFKFTELIQDKVKDVNISNTYAMKLISFTNKKTDKVDAEKLARVLKMQVLSGEEQIKRVDLPPDIIQDLRALFSTYKFLGKQRTQIKNRIHSLLKQNLFPFNRVMIFNNKMRNKILNISESRELKFQLSILFSEFDHIEETIKLLINEIELTGAPYMKEIDILTSMQGISVFTAIAIISDIIDVKRFPNSKKFASYLRSTPKVESSNTKTLIKSTNKQGRKLTVSLLYQSLNHFINSNRSIENWYYKLSKYKKVGKVRMGTCRRFITVIYQILKKEEYYWFMDSKNHDRKMHDYEVLLRKNSINISKWKEVS

SEQ ID NO: 78131 - protein, 395 aa, unidentified
MKKHNNSPMKSEQQPSKRAKSRGPVPRDTKEVMAELVGKLRKKLDPKVVAASAGEEHPRGGLRPNLDRLTAGVDLGDQWSHYCILGLEGETLAEGQLRTTQHDVAEFFQALNSARVVLEVGTHSAWVREIISSYGHEVLVANPRLMEGSKRRKRKNDRIDANKLARLGHVDPKSLYPMQHRSKEVRQDLVMLRARDALVAARTELINATRGLVKSMGTRLPNCSSPSFAQKVEEALPAEIREALLPLVRLAAALSDCIKGYDKKIEKLGSEKYGPTALLRQVTGVGPITALAYVLTLENPERFAKSRDVGPYLGLVPKQEDSGDSQPQLGISKAGDTMLRKLLVGSAHYILGPFGPDTDLRRYGLRLCERGGKNGKKRAVVAVARKLAVLLHGSG

SEQ ID NO: 78132 - protein, 345 aa, unidentified
MTIVETRAITGGVDTHLDVHVAAALDANGGVLGIESFATTTAGYRQLFDWLTGFGELARVGVEGTGAYGAGLARFLHAAGIEVIEVDRPNRQVRRRQGKSDPLDAVEAARAALSGRARAIAKTADGHVEAIRALVVAKRSARDMRIKMLNQIRHLGFTAPDQLRERFRGVPRSSLAERAAALRPRPDTDAVTYATKLALHTLGRRVLALDEDTAALDALLSELVRVTAPELLELYGVGVDTAAILLVAAGDNASRIGSEAAWAHLCGVAPVPASSGKVTRWRLNRGGNRQANHALWRIVFTRMGSEPRTRAYVQRRIDEGLIKPEIMRVLKRYVAREIYRHLPGN

SEQ ID NO: 78133 - protein, 339 aa, unidentified
MELYAGLDLHSRNTYIGIMDKAFNRVFKKRVSNHLEHILQTLDPFLAQLKGLVVESTFNWYWLVDGLMDAGYSSVHLANPSAIKQYEGLKHVDDKHDAFFLAQLLVLGILPQGYIYPKKDRPVRDLARKRMFLVQHKTAHVLSLQSLIQRCCAMKIRTNDLRHLTVKELEAWLGEEYLVLSAQANLDSINFFKQKIQRLEKAIRKRVKLKRAFHHLKTVPGIGDILALTIMLEVGDINRFPKVGNFASYCRCVPSRRLSNGKSKGIGNRKNGNRYLSWAFVEAAHLGRRYNERFRKYYNRKVAQANTSLATKALGNKLTRICYYIMRDQVPFQEELFCH

SEQ ID NO: 78134 - protein, 326 aa, unidentified
MLAPRQLDVLLLLPSGQHAQTFANTAKGFLALARWLAALKATPRVCLEATGSYSLPAARFLHQRGLTVSLVNPLAVHYFARTRMSRNKTDAHDARLIAQYGQQHQPRAWQPPAPAKEQLQQWVRIREQILEARVIALQHLESAPAATAGLFRAQLRLLDRQIAAVETQLRGAVQADAVLQKAVALLTSIPGVGLITAVTVLSIMPEIGQLESARQLAAFAGVTPSQNQSGTFTGRSRLSKMGHARLRKALYFPALTALRHNPRIQSLAIRLAQKGKSKMVIIGAAMRLLTHLIYGVLKHQKPFDPQHQNKTSPRAAASLQLAPGGG

SEQ ID NO: 78135 - protein, 347 aa, unidentified
MAIVGGFDVHRAQITFDYLDTDSGEVNAGQIRPATRPVLRQWLQRFVGRSDVAFAVEGCTGWRFVVEEFVRAGVEPHLAEPADTATQRGRKKRAKTDRADARLLRELLAQRRLPESWVPPSHVLEVRTLGRLYVALMDERRAWQQRIHAQLFHQGVASLRALLTPAGQFNLAAAELSPAGEQLVETAMAAVDTLTEQILPLRTQLQKLGAKQPGVLALTRQYGIGLLCGTIIWAELGDCRRFSNADQAVRFAGLDVTVWSSDGKRSAGRLARQGSPELRWALFEAAKAAARESSPDHEYYEAIRDRLGGKRPALSVARKLIRRCYHALRELGDQAWLPPSQVLPHAA

SEQ ID NO: 78136 - protein, 341 aa, unidentified
MQPSTIGLDLAKHVFQVHGVAADGQVVLRRQLRRSELLRFFRALPPCLVGMEACASAHYWARQLSALGHTIRLMPATFVKPYAKRGKSDAIDAEAICEAVTRPTMRFVPVKSVEQQSVVMLHRTRDLLVRQRTMLVNALRGHLGEFGVIGPKGISRLPDLLTLASSTPVCELPDLARECIELLLAQIESLQHRIRMIERSIAEWHRTSDVSRRLETIPGVGVISASAIAALVPDAGTFRSSRQFAAWIGLVPRLSGTGGKVQLGRISKAGNRYLRRLLTLGATSLVHYARRSPQKWAWVAALLGRRPTRVVITAVANKLARIVWAVLGSGERFQRPQPAAA

SEQ ID NO: 78137 - protein, 364 aa, unidentified
MLPRPEGRDDGLPKITPTHTQSVNRNLTAPIGRGPSIVASKRWCGPPRVYKRGHYSMNGEFYGADVSKDHLDVACGGRVERIENTKKAIRGFVNKMPAGSVVAMEATNTYHQELADTAHCAGMRVYVVNPRVTRHYREVRNLRGHTDRLDALTLAGFIEREYEHLREYQPQSAGQRRLKTLLRRRSKLVATRVKLEQSMGEIKEVRQEVKGVIDRLERLIKRIETLVEEQLDGNQDRARIAQIAGVGRIVSSALICDLESGSFRSADAFVAFYGLDPRPNDSGKSRGRRRLSKQGQRLGRMLLYNAAMSAVTTRAWAQIYQSCLNRGLTKVQALVVIARKIARTAWSIYTHKTVFHPARLCAAP

SEQ ID NO: 78138 - protein, 387 aa, unidentified
MYFVGIDISKFKHDCAIVDELGDVITPSWSFQNDREGFSLLKELLDALDGEKKIGLEATGHYGQNLKLFLENNDFSFIEFNPLLINQFVHSKSLRKTKTDSIDALMIAQYLMTVEYKPYPPSFYTFEKLKSLTRFRDNLIRQRSKQLVELTNILDKVFPEFKPFFKGRFSATALYILSHYASPEKISNMNSKSYEPLRHLSRGRFSMVDFVELKTLARNTVGSTSDYLLQEMEITIDIYNQLQSKVEEIELQIHDCVLALAPPILTIPGIGAASAAVILSEFGDLSKFNSPSKLLSFAGMEPGYFQSGTSESTGKMVKHGSSHLRYAMMNCAQTVINNEPTFAAYYAKKRAEGKEHRVALTHVAKKLLRVIYTLQTKELSYNPDLVR

SEQ ID NO: 78139 - protein, 349 aa, unidentified
MSNPMRWVGVDLHRRRSQIAIIDEHGELALSRRIVNDPGTFRELLGDPNGTHVALEATYGWEWLAELLGEAGYDVHLAHPLRTRAIAAARVKTDAVDAKTLAHLLRTGLLPEAYIAPPELRDLRELLRHRAVLTRMRTAVKNRVHALLARQGILPEHSDLFGKSGREFLARLELPDGSRRRLDSLMALIGDFDREITATTREIDARAKADERVKVLCQIRGVGRYTAMLVIAEVGDVSRFPTARHLCAWAGLAPSVRSSDGKARLGHISRQGSPALRWALTEAAQKIPTGGGPLRAMFERIAKRRGRNIAKVAVARQILTLCYYGLRDGEIRCLTHQPTNDNEELAEAA

SEQ ID NO: 78140 - protein, 325 aa, unidentified
MDTIRFLAIDLAKNVFQVHGVDAAGKLVLRRRVGRAQLTELVLRLAPCTIGMEACSSAHHWARQFLQQGHTVKLISPQFVKPFVKGNKTDGNDAEAICEALQRPSMRFVPIKSVEQQDVQSLHRARSRLVSNRTGLVSQMRGILAERGIVFAQSITRARREIPVIVADTSNALTPLAREMLADLMDQLHELDRRIAGFDRRIDLVFKASETCQRIAQIEGVGPKTATAIVAAVSDPKDFRNGRHFAAWLGLVPRQSSSGDRTHLLGISKRGDRHLRTLLIHGARAVLRTAPTKHDKKHAWALALKARRGANRAIVAIANKMARVI

SEQ ID NO: 78141 - protein, 337 aa, unidentified
MDYFAGLDISMDETHVCVLDREGVVVRESKTESTAQAVANELAKAPSCRRIVFETGRMAPILFHGLSQLGFPVICVESRQAYQALKSLATHKTDRNDARGLAHLARTGFFKPVHVKSLPAHAVRSLISARKKLVGQRVTLENQIRGLAVVFGIRLPRALTAAFVNQALKASEGIAGLSAAMRGLIAARTAVMTAVAAIDVDMRRMTRASGACRRLMTIPGVGQLTALAFVAAIDDPSRIRRSREIGAYLGLVPRRYQSGEVDYVGGISKCGDRRVRTLLYEAANVILTRYKGQLKLKDWAFAIARRSTMRKARIALARRLAIIMHAMLRDGTEFAPA

SEQ ID NO: 78142 - protein, 340 aa, unidentified
MTITTVGIDLAKNVFAVHCVAQNGKTVLVKPKVSRAALPELIASLPPCVIGMEACSGAHYWARVFRQYGHEPRLMAAKFVSPYRMAGKSGKNDAADAQAICEAVRRPHMRFVPVKDESQQAMQCLHRTRQGFIEEKTATYNRLRGLISEFGVIAPQSTDALRHIVSEQKNSLPLQVQQCVDDLLEHINRIEDNIAEYDRILSRMAKTDHRSQRLMELKGIGPTTACALVASIGNAHDFKNGRQLAAWLGLTPSQYSSGGKSKLGRITKAGDSYLRTLLVQGARSVLIGAEKRTDSFSRWVCKLVERRGYWRAVVAIAAKNARLCWASLHYGDDFRLYSAS

SEQ ID NO: 78143 - protein, 386 aa, unidentified
MQTLNDLSRSLIALEPASTLIAVIEMSLSSWLVAGIVPGIERQPLKKLAVDESALLRLLHRWREEAEKAGCRIERIVVAFEAGRDGFWLARWLKARSIEAHVIHAASVAVSREHRRAKTDRLDAELLKRAFLGWLRGERNHCKVVAIPTLKDEDAKRPSRERESLVGEQSRIVNRMKAALIRLGIRGFNPKLKRAAGRLDDLRTPEGEPIPPNTLAELRRDMERRRLISNQIRQIEEARLKRFEQAPNDGPHAMVRLLARVIGVGIETADMLVHEVLSRNMHDRRAIARYAGLTGSPDESGRKRREKGLARSGNGRVRRGMVQLAWRFLTYQKESALAQWYRARTENARGARKPMIVALARKLLIALWRFVWQGVVPDGIVLRPAQ

SEQ ID NO: 78144 - protein, 346 aa, unidentified
MKYFAGLDVSLEETAICVVDEAGAMVREARVPSEPEALVAFFQGSGLVLERIGLEACSLSAWLHESLVAAGLPAVCIETRRAKAAMGAMPNKTDRNDARGLAQIIRTGWYRAVHVKSPACRSWRALLTARRLLLNKMRDLENGLRAVLREAGLKLGTPTRKEFAARVRELTAADPVLSVLAEPLLTIIAAMTRELAQLTKRVLEIVRDEPVCRRLMGVPGVGPLTALTFRATIDQPERFRHSRDVGAHLGLTPKRYQSGETDVQGAISRCGDELARTALYEAAHSLLVRSRRWSALRAWGMQVAKRRGMARARIAVARKLATILHRMWADGTEFRWGKEGPMPAAA

SEQ ID NO: 78145 - protein, 369 aa, unidentified
MGDHITYVGLDVHKQGIVVAVAEDGLRGEVREYGRIANTPAALDRLARKLSREGVKLRFCYEAGPCGYGIQRHLSARGHECVVVAPSLIPKRAGDRVKTDRRDAASLARLHRAGELTAVWVPDAGHEAMRDLVRARLDAVHALRRARQQLSGFLLRQGCHYGRPAWTKLHRRWLAGLKFEHAVHHIVLEDYIAAVEAAQARRDRLTAQIEAMLADWTLAPVVAALQTMRGMALVNAATLIAELGDLSRFANPRQLMAYLGLVPSEHSSGASVKRGGLTKAGNSAARRLLIEAAWTYRFPARVSRELLLRQEEQPKPIREIAWKAQLRLCARYRKLARTGKPANVVTAAIARELAGFIWAIARRVPPTAG

SEQ ID NO: 78146 - protein, 320 aa, unidentified
MVKMKQYTPRYAGIDVSKAHLDVYLHPEGSHRRFNNDKTGWRALRLWLADAHLDGVVYEATGRYHKGIERYLGGHGFPIARLDARRARRFAEALGINAKTDPVDARMLAQFGAYLKPPVITLPEPALELLKELVAARRGLVAQGTRIANKRKTVVSQLLKRQLRQSAEQVRRQIARIDAECHEQARADPALAQRLAILMSITAIGKVTAMTLLADMPELGTLNDKQAASLMGVAPVARDSGTFQGKRHIRGGRAQVRQAVYMAALVATRFNADMKRKYQTLIENGKPPKLALTVVMRKLIILANALIRDNRKWQEIRPCS

SEQ ID NO: 78147 - protein, 319 aa, unidentified
MSNAVLGIDVAKKKLDVALMFDQKTLTRKFDNSPNGFKLLQGWLKSLHIEQVHACLESTGTYGEAVAEFLYEKGHRVSVVNPLRIKGYGKADLQRNKTDPADAKTIADFCLTKEPDDWHPLPAEIKHLQALTRRIEALQGMLDSEQNRLELAAPEVRPSLDRVIQSLEKEIELVRCLIKDYVDSNPDLRQQSDLLQTIPGIGEKTAQILLGELEFAAYPSARALAAQAGVTPSRTQSGTSVNRTRLSKLGNGRIRRAMYFPAIVAVRHNQIIKKFASRLSQNGKTPMQIVCAAMRKLLHIAFGVLKHNRPFDPNLASSI

SEQ ID NO: 78148 - protein, 313 aa, unidentified
MSENLPQTIGIDISKASLECHAYPAGTERQLANTAKGHKALIAWLRQWPIERIAYEATATYHRALEAALADWPCVKLNPERARRFAQATGTLAKTDRIDDMLLARMAATLQPPIRPARSAQQAQMAELINARDGLVRDRTALKNREKNLTIAFLKRQCRQRLEQIDRHIEALDTEIAKLITADAVLARRHQILTSIAGVGTLTANQLIATMPELGSLENKQAASLAGLAPIARQSGQWKGKSFIRGGRANVRQALYMPALVAARYNPDLKAKYQQLVTAGEPAKIAITAVMRKLNVTANALLKADRCWLQSPA

SEQ ID NO: 78149 - protein, 389 aa, unidentified
MIYVGIDIAKRNHFASAISSDGKELMKPFKFTNDGDGFQLLQSHLFELSRSDSIIIGLESTAHYGDNLVRYLVACHYNVCVLNPIKTSAMRKNNIRMTKTDKVDTFMIAKTLMMQDSYRFITFYDIDLMDLKRLGRFRQKTIKQRTRLKIQLTSYVDLAFPELQYFFKSGLHQKAVYALLKEAPTPQRIASMHPTHLSHLLAAASHGHFKKEQAKELRALAQKSVGANDSALAIQITHAIVQIELLNSQLDSIEAEMAGIMKFHDPVIMTIPGIGYINGGMILGEIGDIRRFSCPAKLLAFAGLDPSVYQSGNYTARRTRMSKRGSRTLRYALINAAHNVVKNNATFKAYYDKKMAEGRTHYNALGHCAGKLVRVIWKMLTDEVEFNLD

SEQ ID NO: 78150 - protein, 352 aa, unidentified
MSNVPIFVGLDYHQDSIQVCVLDQQGKVLANRAADNDCQAVAKLVKPLGVVQRVGIEACCGAADLGQQLVEQLGWNVSLGHPAYIAKIKSSPDKSDFSDGRLIADLTRVGYLPRVWLAPANIRELRQLVNHRQRLVDQRRAVKLQVGGVLREQRVKIDKDRGSRWSKAWTASARDNDRLSEHARWIVNDLLDELKHLDGKVAKCDQRLREATADDGEVQRLMKQPGIGEVTAWVMRAYIGDFGRFKTAKQLARYCGLSPCNASSGQKVADAGLIDGCNKLLRLTVVQAAHRLIRTIDRWHELAESMRARGKPACVIVGAVGNRWLRTLHHAMKPQSAKKQGGGGGEPSKEGD

SEQ ID NO: 78151 - protein, 442 aa, unidentified
MARKPSKQRFTVVHPDCAAIDVGGREHFVAVDPRHENPVQSFTSFTDDLLKMANWLESLGIKVVAMESTGVYWIPIYEILSERGFEVYLVNARATRQITGRKSDVLDCQWIWQLMTHGLLRGAFRPDDLTCCVRSLVRQRASKVKDQAQTLNRMQKAMSQMNIQLANVISDISGVTGMKILRAICAGERDPVQLAELTDRRIKAGKEAVARSLHGNWRREHLHALTQELAAYDFLEQQIADCDDAIKAALEQLPVLQNKPEPSNKPLRSPHRNGVQQTELHQTLWKALGVDLTAIPTIGVDTALVLAGEIGTDLSRFPSSQHFCSWLGLAPPTRISGGHRLAGGGPKIVNRAAQALKQAASNARNDKGFIGASHRARLTRMDTSCAIKATAHQLARLVYNLLTKKQAYVEQGLEEFETRSQDRQVRALLRKARKLGYQLVAA

SEQ ID NO: 78152 - protein, 387 aa, unidentified
MPEQFDSHNAVAAFDHDSTLVVALELSGKSWQAGAVVPGAARRPRRRLEPRDIAGLLKAIERWKAEAAGASREVRRVALTYEAGRDGFWIARDLLARGIEVQIMHPASIPVARPGRRVKTDRIDLDMLLRTFLAWLRGEPRVCSMVRIPSEAEEAMRRPGRERERLVGERIQLENRIENLLCLHGVADFRPRLKKAAERLDELRSFAGAPLPAQTMAELRRLMARHRLLSEQLREIEAERDRVARVAHPDGAERMIQHLAQIVGLGLETATLLVREMFCRPFRDRRAVAGFAGLTGTPFQSGGMAREQGIGKNGNPRVRRIMVQLAWRWLRFQPQSALAQWFAARTDGAKGRIRTVMIVALARKLLVALWRYAGTGEVPAGARIAAA

SEQ ID NO: 78153 - protein, 401 aa, unidentified
MRSLFGGIDIGSESHHVIILDGNGKVLYDRKVVHSFREFREVIGKFKELEEKEQGEIAFAIEGKNGYGAPFDRMLLESGFKLFNVDNLKLRRFREVFGAEWRNDRRDAKMLAKMLTLKDHMDVEEKAFIAVEKTPAVNEKLRILSRHQQSLIDEQTRIQNRLKKRLLEVCPDILEFGDTKGKKLLQLLKKYPDFRGYKRITLGALLKIDTIGKQTAVPIVEGLRNIQYVEELAGIYKPIILSCCRRLLELKKEIEMLDKELEETGENSPEVMQLRSIMGVGTKLSSRLMGELGDIKRFDRESQVAVYCGVACVDDDSGKSAKTKAVYKANRICKATMIDIAGCTIRYVQESKTYYEKKRAEGKDHNHALRCLARQLIKVIFRMLTEGREYICKEELKKKAA

SEQ ID NO: 78154 - protein, 341 aa, unidentified
MKNLFIGVDFSKEKVDVAIIFADGLTETAARVFNEFKTTVSGYKQLVKWVEQNSYGIDSSLWLFCGENTGDYSKGLCNFLYGKGYDMWLENAKSIKDASGLRRLKSDRADASMIAEYAMRNYDKAVMYEPLSESLAQLRELFLYRQMVVRHRCSFQVRRGEKRLTMEKSPTKTMISQSGRHIVSELNKEVEKIDKRIAELIKSDEELTEVFTIVTSVPGIGTQNAVCLMVYTDNFRRFNYDSRKIACYYGIAPFGKDSGTSVHSDPHVHYMANRQIKAMLTQAALAAVNFNPIMARYYMRLVERGKKKQVALNNVKNKLVHLITAMVRNRQLFSPEYKISA

SEQ ID NO: 78155 - protein, 324 aa, unidentified
MTDAVLGIDVSKNTFDTNLGAGTKARSKSFANSPAGWHQLIAWLGEHKIGQVHACLEATGRHGLGIALALHEAGHVVSVVNPAQIRDFARTKLGRNKTDQVDAVHIREYAELFKPRPWTPPSPAMRRLCELQTIRAGTVAGLTEWKNRRHSGIMDDLALSLAKTTIQHFTSQLEEVDQAIAETIDNDVELSAKRDLLVSVNGVGEALAGIVLAELPGPDILGSSAAVTAYAGLNPQQHQSGISVNRPVRISKIGNAVLRTALYMPALSAMRYNPAVAALVDRLKAQGRLKGKQIVIAAMRKLLVLCFGVLKTGKEFDPAMAMGK

SEQ ID NO: 78156 - protein, 364 aa, unidentified
MQLLRYCVGLDISKDSLQVCLSVIDADGRVVVKGSTKVANKVTTFGQLVQWVTRHRKLDDLPLRYVMESTGVYHEAVAWFLYQHDQAVSILLPNKAKHYLKSLGYKSKNDKIDAQGLARMGLEQQLTLWKPLSKNIYSLRMLTRQHQRFQELKTQCRNQQHALDYSALGDDFLVKQNTKLLAVYDQQLEALERAIQQLIKDDEVLHLQVKRLIAIKGLALLSVAVLIAETNGFEGFTNQRQLVSYAGYDVIENQSGNRSGKTRISKKGNSRIRRILHLPAFNAVRFGEPTCQALFERVYQRTNYKMKAYVAVQKKLLLLAYAVWRHEVDYNPSYFMSQSRIGKKIVPTSGTTQDQSTVVGLSFG

SEQ ID NO: 78157 - protein, 351 aa, unidentified
MMIIGVDYHPSFQTIAFFVEETGECGEQELNHSDGKAERFYRDLKQRGVSVRVGMEATGYSRWFERLLAELGIEIWMGDPAEIKTRRVKKQKTDRKDAQLLLRLMRENNFPQIWVPSPENRDLRQLLWHRHRLVQMRTRIMNQLQALAMNEGYRWKKKLFSEQGRAMLEKLSLAPWASRRRQELLELLDRMNPTIEELTAASEQEAKKRPEVLRLMTHPGVGPLTALAYVLIIGTPTRFERGKQIGTYVGMIPCEDSSAGKQRLGHISKQGSSLLRFLLVEAAQAAARSNPEWRRRYVHLAMRRHKSIAKVAMGRKLAIRLYWMWRNGCEYSPSLEFGSYVGQLGTGHGVK

SEQ ID NO: 78158 - protein, 399 aa, unidentified
MTYDFVIGIDVGKYFHHACVLDKDGKQVKSKRIDQSEHALRRFFDLFLALSSKILVVVDQPNNIGRLTVAVAQDMGITVKYLPGLSMRQLSRVHVGNAKTDVRDSYVIAHAGANLPDALRNVDRVQQVFSQLKVLNGIDEDLARSYTRLINQIRSSLVGSYPEFERVLRGQNIHRRWVLHMLAKYGGPTKIKRMGRARLIAFAKKYKARNPEKIIDGLLDAIKNQTVVIPGSEYVELGVAMSATDALAKLDHRKVIEEEVCALITEVPQTHILMSMPGIGPKTAAQILMTVGDFSDFKTASHMASYAGLCPQTNQSGTSINTKSPNRAGNKKLKNALWQSSFSAIRYHERSRQYYERKRKEGKRHNAAVVALARRRLTVLFTMMANHSLYQEPEEQKIA

SEQ ID NO: 78159 - protein, 412 aa, unidentified
MANRVAVVGVDWGDKQHAFEIRASDGRRRRGSFESRPEAVHAWVAELRGEYRGGTIAVAVEQNRGALIYALSRYDFIELVPVQPARSAAYRKMAHPSGAKSDPLDAGLLCDYVEKHGETIRAIAPTDPLTRELLLLSEWRRKFVEQRVALCQQLRDTLKQYFPQALAWGGELGAPMSLAFVEQWPTLEHLRRSRCSTIRRFYTEHGSRSAELIEKRLAEIRSAVALHSDAALMASLSAIAAALVPMIRTTSEQIARFDGRIAQLWSKHPDRAIFDSLPGAGSVIAPRMAAVLGTDRSRWTSSDLQVFSGIAPVTEQSGSRSWVHSRWRCPKFVRQTFHEFAEWSIPHCSWAGTFYRQQRNRGKGHHAAIRALAFRWIRIIVRCWKDRQPYDDQRYMDKLNAARSPNAATSAA

SEQ ID NO: 78160 - protein, 391 aa, unidentified
MTMYFVGIDISKYKHDCCIISAANQKVVSKFTFKNDKSGFEQLNLILNSLSTPEDIKIGFESTAHYALNLELFLENANHSFMEINPVLIKDFKKSQTLRRTKTDSIDCELIARWLMTVEYKPHSKGFYHAYSLKSLTRLRDRLIRQRSFYLVKITNVLDHTFPEFKPFFNERLSKTALYLLENYGSAEKMARMNSVSYEKLRSISRGKFSPQQFIALKELAANTVGVNNSIFDVELNSLLILYKTLVTEINTLEKEINLLIEEVHPHYLSVPGIGSISAAIIYSEYGDISNFDNPGQMLAFAGIEPGINESGTESHGGRMVKRGSSQLRYALINCCLPLIRFDMTFATYYAKKRAEGKPHRVAITHVAKKLIRVIYALERQNTDFCVQKLR

SEQ ID NO: 78161 - protein, 319 aa, unidentified
MNTIASNYSASTTRNVGIDVGKSTLDVFIYELDLHWQVANTDQDIRSLITTLKRYKLARIVAEATGGYERALVEACTVKGLPVIVVQPAHVRQFAKAQGLLAKTDKLDARLIAQFGAVMQPEVRSLPSQNVRQVKDLLARKRQLNEARTQELNRRQQATKALQASHTRIIKIYDKEIAWVNAQLEKAVAAVTEWRHTYELLSSVPGIGDGVTFTLLGELPELGRLTHRQISALCGLAPMNRDSGNLKGKRRIRGGRAPIRTVLFMAMLSAIQHNPIIKRFYTRLVENGKHKKVAITACMHKMITILNAMVRDDRAWQMT

SEQ ID NO: 78162 - protein, 410 aa, unidentified
MEVIVGCCAGLDVHKDSVEACVRRLESGGRIAQQTRHWGTMTRDLVAMGQWLRAEGVTKVAMESTGVYWKPIFNVLEEQFEVLLVNAKDLKHVPGHKTDVKDCQWIAQLLQHGLLKGSFIPPREQRELRDLTRQRAQVMGEHSRIANRMQKVLEDANIKLGSVASDIMGTSGRLMLQALMAGETDTDKLADLAKHKLRDKIPQLREALYGKVSGHHRWLLHLLWDQLITTEAFLARLDERIEHLTRPQQPVLAQLDAIPGIDRRVAEVLLAEIGADMTPFPSAAHLASWAGISPGINESAGKKRSGKTTKGSSRLRQALVQAAWAASHKKDSYFQAHAQNLMRRRGRKRGLVAVAHSLLLVIYHMLQKGTDYHDLGRDFLDHIRPQHLAKFHATRLQLLGLNVAISPIAA

SEQ ID NO: 78163 - protein, 322 aa, unidentified
MQYIGIDVSKATFVVAYSSDKGGEIRTFNNTTAGIRQFIGTLPKDGSIHCVMEATGNYSALLLYMLNVAGITVSMENPLKVKNFARAMLSTVKTDKIDARLIALYGEKMNPQPFKVQGEAILRLRQKRTVIRQLTKQITAMSNLRGSLACLPVPDKGATHTVDETIKFLEKKRDRLQAELTDLVEVEFSRQLALLTTIKGIGITLATALILTTGGFTYFQNAKQVSRYLGICPTYEQSGTSVNIRGHINRNGDAYTRGLLYVAAWTASRFNTKCGETYTRLRQNGKPGKLAMIAVANKLVRQAFAVVAHDKEYIDGFVSNRP

SEQ ID NO: 78164 - protein, 410 aa, unidentified
MEVVYPRCCGLDVHQKNVTACLLTVTSTGERQKELRTFGTMTDDLLVLADWLVVTGCTHVAMESTGVYWKPIYNLFEGTFELLVVNAQHIKAVPGRKSDVRDAEWIADLLQHGLLRGSYIPDRPQRELRELTRYRTALVREQARELNRLQKVLEGANIKLGAVASTMAGRSVRAMLEALVAGTTDPTALAELAQGRMRAKRAALQRALAGRLGAHQRFMLAEQLAHLEYLEEAIAHLNAEVRTRLHPFEVELGRLDTIPGVARTIAEVSLAELGTDMARFPTDRHCASWSGLCPGQDESAGKRRSGRTRKGSPALRSALIQAAHAAARTKDTYLSAQYHRLAARRGKKRAAVAVGHTILTIIYHILRTGRSYEELGGNFFDERDREHIARRQVARLERLGYHVTLERVPA

SEQ ID NO: 78165 - protein, 345 aa, unidentified
MQFFVGIDVSLESSSICVIDERGVIIKEGTAPSEPEAIGRFIRHQGRKVEHVGLETGSLSQWLHAGLVRQGFRVSVMEARHVHAAFGAMRVKTDRNDARGLAQLVRLGWFKSVHVKAPSAQETRALLNARQFLVDKVTGIENSMRANLRNFGLKVGVVSRRTWPTRARELASGIPALELLVEAMLKVRDVLLQELRTLDRKLLETARADAVVQTLMTAPGVGPIVALTYRNAIDDPTRFKRSKDVGPWLGLTPTRYQSGQIDRRGHVTKAGDASARTALYEAATTLLGRVVKWSALKSWGLRVAKRSGMKKARVAVARKLAVILHSMWRTQSPFAWAAEKELAPA

SEQ ID NO: 78166 - protein, 440 aa, unidentified
MTVLERNEQQPVTVGIDAAVVADHQIAIRGPGIREDFRASPTLAGMARLTERLAPHAGSLVVVEPTAGTWLPLTMAVTDAGCRIGFVQNRDSAQLRKAITGRTKTDVVDADMLARCETVLNIEDAPIPPAGQIGLRRALSRRHRMTVDAHRAECRLWALAIWAMPDVWRSAGGHAVAQPLLGRWPDLRAIGRARLASITEIVAAHSRDKNPERRAERIRTAAQGWHEFWLGRLDLDDLAWEIAEMCDDIDIADARQREATTHALDRWKRYWPDDVLTSVLGVGPICAATTRAWWGDGQHLRSAKAAGAFIGLNPSNWESGLSVSPSRSITKEGPAVMRLAYYQAANIARRRDPQLAAHYRKLMCERGHTHIQANCAVARKLAARTWAVLQTGQPYEPRDLDGNPINEATAVRLALELEVPADARRRNRATNPRRGRLDQH

SEQ ID NO: 78167 - protein, 343 aa, unidentified
MHITTIGLDLAKNVFQVHGIDNEGCVVVRRRLRRAEMLPFFGALNPCLIGMEACSTAHYWARELMAFGHEVRLMPASYVKPYVKRGKNDANDAEAICEAVTRPTMRFVPVKSIEQQSVIMLHRTRDLLVRQRTMLVNALRGHLAEVGIVAALGLPRVQELIAIVKDDTNERIEPLMRHCMEVIVDQLQDIQGRIGTLDQAIHAWHRQNETSRRLETIPGVGPITASVLAATVTNPSAFSSGRQFAAWLGLVPRQKSTGGKDRLGKISKMGDQYIRRLLIVGAHAVLRWGRTTKGSPWVLALLGRRPFRVVAVALANKMARIVWSVLARGGFYRDERSRGALPA

SEQ ID NO: 78168 - protein, 428 aa, unidentified
MTPNSESSTGVLFVAIDVAKQIHEVLIEPPTGGRQRWRMGNCQRDYDLLRQRLQAFQAPVRIGFEATGTYHRPLAYFLHQCGFELRLISSLAVARTRDALYNSWDKNDPKDTQVLLHLLKTEVTQRYHDPLVHAVNDLQEFAQTHYQISLRKVRVQHSIMTHYLPLYFPEADRYYTNSRAQWFTRLLHRFPCPAAITRYSREAFEQEAWTIVGRKVNKHGFLQDLYDTARQSVGLPVSEDSEAIQMFRVILTEHQQLCATRAAIEQQADQALCTHPDYQRLRTLPGVGPILALTILAEAGDLRRFLHHRQFVKFCGLDLSTQQSGQFRGTSRLSKHGNARLRYAFWMAAQGAVRVRENTFRQKYARYIKSDPQNPDRKRKALCAVAAKVARVAHGLIKTGTDYRPYFEATSPSGALRSRGPSRQGLTS

SEQ ID NO: 78169 - protein, 400 aa, unidentified
MVNVGIDLHKTQFTVCVRGRKGNRFMKYPTTEEGYQAFLAEAAGWQGKGEEVRVGVESTGNTRYFKSRMEEAGIGVTVINTLKMKVVNESVKKTDKHDAATIAEFLEKDMLPESTLCSHESEQLRRLLKARGALVTAEVVMKNQIHALLTAEGMEDVKGSLQSKRGRKQVLDALKEWKNGLVAQPLFTTIDYLEENIKGVEKELRDLTAGDRVVQLLMSIPGCGEIGAWTIRAWTDDIKRFSSAKKYCSYAGLAPWVQNSNETIHHGKITKRGPKELRTALVQVVMGIRRMKAKTLSWRLMERYEGLKKGKGSGRAIIATARKMAVIIWHMLSEDVGFDLGKMVDRKLAKKSEVMRGTELAVKEALEEESVEETEGEKKDEGVRKKAKTGVASKKRKKVG

SEQ ID NO: 78170 - protein, 416 aa, unidentified
MSLALPEALYFTGIDWAAETHAVCVLDSAGKIAAQFSIEHSADGIAVLLRRLARYGEADGMPVAIERPDGRLVDLLLEAGHPVVPVKSNAIKAWRDGEVLSGAKSDAGDAAVIAEYLRLRAHKLTAAPPYSDQTRALRTLVRARADVVEMRVAATNQLAALLDAHWPGAKAIFADLESKIALEFLTSYPTPASAARLGEKRIAAFCARHGYSGKRPARELLERLRSAPAGTTSQTVSAALRDAVLAAVGVLQALNTTVKNLDRSVTTHLGEHPDGKIFTSLPRSGQISAAQVLAEWGDCREAYAAPDSIAALAGVTPVTSQSGKHRAVHFRWACNKRFRVAITTFADNSRHASPWAATIYNNARAAGKDHPHATRILARAWIRVIYRCWIDGIPYDPAQHTAAAALARQSAGQTAA

SEQ ID NO: 78171 - protein, 480 aa, unidentified
MNVKATRTKKQVNVENQAIKLLSKEELGIKIEVIKKELRSYTWRDLETNGKFAKNDKLSFITDDMLIAGCDIGSETHYIRAIDVRGRELSSGAFEFSNTSEGFANAKAWVLALAAKNDKKQIVLGLEPTGHYWFALAAWMVSNGISVVQVNPYAVKQSKEIEDNSQLKDDRKDPKLIANLVKDGNYGMPYLPEKVYADMRRLSMFRDQLTEDRIRNINRLHRELKIYFPEYMDAFGKIDGAFTLEVLKVSAIPSDITALGAEGMKNIWHNAKLRGRGYSRANEIVSYAEKSVGLTDGTDAGREAVKWYAEQILKLDEQLAVIESALHEKCREIPYAENILEIRGVGENILAGILAEMGDISRFDDVKEIQKLSGMGLVACSSGKHKGQTKISHRGRKRLRYWLFQAAKSAVSHADEFKQLHEYYTTRTNNPLKKMQSLVVIACKILRVSYTILKTGTTYDPQKLLKDIKRPTASQAPMAA

SEQ ID NO: 78172 - protein, 588 aa, unidentified
MKITKTSAPQVIGVGIDTARYGHRVTFLRDDRQPAAAPLTVREDQQGYQQLRQKLEELHRKYPEAELRTHIDAAGQYATNLQRFLQSLDLPLVVSLGEPKRNKDYHKALFPKRTTDATESHAMARFAVAEQPPAAADVPEACYLLREVASRLQAAIKDTTRATNRLHNLLARVFPELDMHVSNVSAGWLLALLNKYPTPQKLAAAPKSALKKLPYVNIEVAEKLQTAAASTIGTLAGDVAESLVTHQVEQLETCLASVKKLEKLLVPAYQSLPRSGHVQVDTIPGIGTMTAAVLVAKMISIERFATPEHLVGYFGIFPEENTSGVDRQGKPIPPGTMCMSAKGADLVRRYLWNAAKSAIQCNPAVRKLYARLRARGTRGDVALGHCMRKLLHQVYGVWASDQPYSEAASMPRQPETPVAAPFVPAASDVPASPTQTQAAAGHKRDNPQRKVVTAAKLNVERIVEPVKDSSAGGSIDYAYLREQITLEQVLSHLGYLDHLQGRGAQRYGPCPFHVAKRERSRSFSVNLKKHVFRCCDPTCHLQGNALDLWALAHRLPLYEAAIDLAETFHLQTQRTREEATRNPELAIR

SEQ ID NO: 78173 - protein, 408 aa, unidentified
MELTAMFKRVIALDVHQAKITACAIVEHDDGRQEMSKLDFGAFKRDRRALAQWALQIRPEVVVMESTGVYWKSPFAALEAVGIIAWVVNARHVKAVPGRKTDVADAQWLATLARAGLLRGSFIPPVDLRQLRLVARQRQKLVGMLSAEKNRLHKVLVDAGIRINVLVSDVHGQSARAMIKALIKGQPMHEILDLKGRLGASREELFEALSTEQFSARHAFVADEIMQHIEYIEQRVARMDGYLLSGLAAWQPQLNLLQTIPGIDQIGAAMLLVEISADMSTFGSAERLASWVGICPGNNESAGKRKTGRIRKGNAWVRRLLCEFAQAAARTQCALKAKFDSLAIRKGRKKSVIALAHKMLRTIYAMLSSGTHYEDRSVDYEAMSVARNAPRWIKMLKKHGFIGQTAAA

SEQ ID NO: 78174 - protein, 340 aa, unidentified
MTEYVGLDVSMEETSVCVLDAEGSTVWEGKVESEPGAIERALRRRAPKAVRVGLETGPSSTFLWHELRAAGLPAICVDARHAQAALSMRLNKTDRNDAAGLAQLMRMGWYREVQVKQLGAHGDGALLASRALLVRQRCELENQIRGLLKNFGLRAKATKGRAFEQSVRALSARHALLKDVLVPLLGAWSALREQTAVLTRAVQERAKESAVCRRLMTMPGVGPLTALAFSSAIDDPARFKHSASVGAYLGLTPRRYASGETDRMGRISRCGDALMRSYLYEAANVMLTRSRGANPLKDWGAKLVKRAGFKKARVALARKMAVVLHRMWADGTDFVAQAGA

SEQ ID NO: 78175 - protein, 389 aa, unidentified
MLHDHLSDGPAAIRTQFGAIFVSLELSRSNWLVTSLSPGKGEKMSKHSITAGDVAGLLKLFADLKRKAMARTGQSYPIITIQEAGLDGFWLHRALQQEGIESHVVDPASIATPRRRRRAKTDRLDGETLLRALLAYKRGEPRVCAMVVAPSPEEEDRRRLGRERRTLIDERIAHVNRIKGLLFAQGISGYAPLRRDRRARLEALRTGDGRALPSYLTTQISRELDRLELLLDQIKAVEAEQDALLAAAGKGAGEQAAPDPVTMLLALKGMGANFTAVLWSEAFYRQFSNRRQLAAYAGLAPTPWRSGSIEQEQGVSKAGNPRLRSTMIQLAWLWLRHQGQSALARWFKAHSQRGRKTAIVALARKLLVALWKYVTAGVVIEGAVMKSAA

SEQ ID NO: 78176 - protein, 392 aa, unidentified
MIYVGIDVAKDKHDCFITNSDGEVLFKPFTISNNRNGFETLFQRIQSVSDDSNKIKVGLEATGHYSYNLLGFLLDKGLTTFVINPLHTNLYRKSLSLRKTKTDKVDSRIIATMMMSDMNLKSYSDTSYHNEELKSLTRYRFDKVKERAKLKSSVSRLICILFPELEKLVPTLHIASVYALLSEFPSADAVANAHLTRLSNLLSESSKGRYGKDTAVMFRDAARSSIGSHMPAKSLELKHTIKLIQELTAEIDEIEAAIKRIMDEEIQSPILTIPGISYRMGAMILAEIGDFSRFDSADKILAYAGMSPSTYQSGQLDNCYSHMEKRGSRYLRYALYNATKYVCHWDKSFGAYLEKKRSEGKHYNVALSHATKKLVRLIFAMEKSGKAYLPTT

SEQ ID NO: 78177 - protein, 338 aa, unidentified
MAKVTVIGLDLAKNVFHVVCCDGRGKVVGKKRLKRAQVLDYFAKLEGCVVGMEACAGAHYWGRQLKALGHQVKLLPPLYVKAYVRGNKNDYNDALAIAEAVVRPQMRFVALKTPEQQDIQALHRLRERRLQERTALCNQVRGLLGEYGLVLPKGVNVLRRRLPELLEDAENGLSDVFRRLLAESYRQLRELDAHIEFYATELARQSRLSEACQRLETIPGYGPIVASVFHSVVGDGSGYRRGRDVAAAVGLVPRQHSSGGKQSLGGMSKRGDRYLRSLLIHGARSVVVQAAKKNDPLSRWVNKVRAERGFNKAAVALANKMARIGWAVLHNKTVYQAV

SEQ ID NO: 78178 - protein, 311 aa, unidentified
MDEVFIGIDISKQYCDLAVIPDGVQKRFTNDEEGQQAILSFISPLRPARIVVEATGGYEMGVIRALADSRLPVVAVNPRQVRDFARATGCLAKTDTIDAGILAQFARAIQPDIRPLPEKEAEVLRALVARRRQLIQMLTMEKNRLEKSPLAGSEDIRDHIYYLTEALKKIDKDISRSIRKSPLWKEKETILMSMPGIGPVISCTLVAALPELGTLNRKAIAALVGLAPFNRDSGAYRGRRTIWGGRSHVRAVLYMGTISAIKFNPAIRAFYKRLIDAGKAKKLAITACMRKLLTILNTMMKNKTPWIEVAS

SEQ ID NO: 78179 - protein, 343 aa, unidentified
MRIVRVGVDLAKDVFQLHGVDQNDKKVWQRKLNRNEWIKVLLEKIEPGCVIGMEACGGAHHWARLLESKGFVVKLIAPQFVKPYLKSNKNDVNDAEAICEAMSRPHMRFVNIKNVVQQDIQATHRVRAELMDQRKAKSNQIRGLVSEYGLVAPREIHHLRSTIPCWLEELDNGLSERFRRLLHGVWHDLLILDQRIKALDQEIETLAANDPVAKRLQQLRGVGPMIATALLATVGDASQFNNGRQMAASLGLTPKQNSSGGKSKLLGISKRGDSYLRSLLVHGARAMIQMAKHKEDHLSQWVMRIANNRHPNIAAVAMANKTVRIAWATIRKGLDYQPELASA

SEQ ID NO: 78180 - protein, 336 aa, unidentified
MKNYVIGIDVSKEKLDLCLQFGEKILKEWELPNTVSDFKSSFRSLLKAHHFEASDLLVCAEYTGQYTYPLSCACEDLCLDLWLENPAQIKYRSGVKRGKNDRLDARKIAGYALRFQDLARLFSLPEKNLASLKQLVSERDMYMTDKGKYQGQLTDQKRFMSKEDYEKKSNRLTKLINELEARISEIEKEIDELITADETLSNQHKLLCSIDGVGDKTAVKMIVETNAFNDFDDARKFCCHAGVAPFKYDSGSSVRSRSKVSNRADKSIKALLHMAALVVATRQKEGELKDYYNRKVAEGKNKMAVLNAVRAKLVLRMFAVIKNNRRYEKNYVFSLA

SEQ ID NO: 78181 - protein, 419 aa, unidentified
MPPDYQVAAGLDVHKKFIQGTILWLNGTKIQQKFPRTPDGLLGLKDWIFEYKCDVVACESTSDYWVCIYDLLDDRVPVIVGNAADIKTLAHKKTDKIDSEMIALLALKGMIAPSRVMPRSHRDFRKLVRLRHFLVRKRTDIKNRIHSILDGELFHLSRILTDIFGASGKRILQGILEGASVDDILRSLPPHVRERKKVELHDLLNQTLSQGALMQLGHCLRVVKQLDTEIERITDEVHAYAVQKYPREYQILTSVPGIGTIAAITLLAEIGDFKEFLSGDRLASWIGIVPKVYQSANHVVKRSITKRGSRFARWILIQVAHAAARTRNTVLRDWYEMKKAVIGTGKAIVGLARKMITIIWHLIVNNEEYVDKYTESESPKPQKMHTIRIPASPNYTLEEVLTLLTDALGFLKKRDPDPI

SEQ ID NO: 78182 - protein, 405 aa, unidentified
MPYILALDVSMGHSYSVLYKDDTCLFEDEIEHTQRGFHALLEEIQHLPERPLIVFEATGIYSRPVEKFFQDHHFSYCLLNPLEAKKQMEENTLRSWKTDKSDAHRLAQTHLKKQRQPKEVQSNFYLEMRDLARFYQEIEKKITRLRMDLHNCLQLTFPELEQFFSNRLTPYALTLIRLFPHPDFVLASTRTKIKNKLINETRKKISANRAEQKADQIIHYAQCAYPAVEKDSIHCQKTIYYAELLQDLLEQKEALATQMIKKAEGSPCFLLYQTFPGIGALTAALLLGELGDITRFKTHKQLNAFVGIDIRRYHSGKYTGQDRINKRGNPKARKIIFFTIRNMIRQQRAAPNHIVDYYYKLKKQPIPKKDKVATVACMNKLLKCMHAMVRAHTEYDYAYAVSVDH

SEQ ID NO: 78183 - protein, 410 aa, unidentified
MKDTLFIGIDVSSQSNTVHVMDSAGDKLWQHTFKNSQDGCQDLVKQLLETQSKHGAGFLSFGLEATGCYGNLIAMYLRETDSIPRSDKVVRVLNPKQVSRFKQSYSELPKTDAVDAFVIADSLRFGRIGLRGTVVEDKYLSLQKLTRARFQVAKDLSREKNRYLQTLFLKFSGMTQNPLFGDNFGTTAMDLVEEFESVDQIAYSPLPELADFLNSRGKGHFVDPETLAKEIQKEARSSYRLPKAIQDSVNQVLAMQAQTIRFQEHQLKDYDRLIADQMTGIPNTLTSIKGIGPVYAAGILAEIGDVSRFKDQAALANYAGLSWSRHQSGKFEAEQTHLVHSGNRFLRYYLIEATDHVRKHDPELNRFYARKYEETPKTKGKRALVLTARKFVRVVYALLRDNRIYIPRES

SEQ ID NO: 78184 - protein, 482 aa, unidentified
MKKNNIYQNQSQQLLSLFEQAANNAKVMCVPIDYAKKDHVVMFCNGYGDILRKPFSVKNSPAGVDFLTDQVMRSCRQRAISEKHVFFGGEDVGSFADNFVSTLRCQGWLVAGVNAHEAKTQRENLQASTDRLDLMGIAKSLLNRRANCSPAQSGIYLNMRTVVRHRRKLVDIKTEVRNRIHTVVDRLFPGFLDESKSGITPFSKSSLWLMKERFSAGQIRRRRRSTFIEALRRLGTKKPECTADQLQQYATQVLKPPQDYVHMLQLSLAQHVKHFCCLQESIGQLEKEIALNLAQTQGAFLTSVRGIGIVLAAGVSAEIGNPYEQKPLNNLVSYCGIIPRVKQTGGPQGETKTGKVAKRCNRILKDYVVQSASHLGLHGPADLMSDYKRRDAAGQHADFGMARRYLRMAMCLMRTSQIYLPNGLRKAQAQMDERADYYLMNWPYLRDKWQKLGALETAFKADHPLGQWRKIVQQFYRIKLTL

SEQ ID NO: 78185 - protein, 370 aa, unidentified
MAHASTLFVGLDVHQETIAVAYVGEEREAEVVSVGTIGTRQGDIDKLMRKLHSKGKTLHFVYEAGPCGYWLYRYLTKKDRRCWVVAPSQIPKQAGDRVKTDRRDAVQLARLRRSGDLSPVYIPSVEDEAIRDVVRAREDVLKDLKAAKVRLKAFLLRQDMRYEGRANWTAAHRRWLATVVCPTPAQQIVFQEYVRAVSEQTERLQRLEAELPPLVQTGRWAPVVEAIQALRGVQFIAAVTLIAELGELTRFATPRQLMSDLGLVPSEHSSGERRRQGSITKAGNSHARRVLVEGAWAYRYPAKVSRHLQLRVETVPKAIQEISWKAQVRLCKRYRRLVARGTNINQVVVAIAREMAAFVWAIAREVAVGH

SEQ ID NO: 78186 - protein, 340 aa, unidentified
MINNFLGIDISKDRFDVSLSFISNKGKRETRNRSFKNNDHGFQGLLSFLQKHNVEQVKACMEATGCYSEALAEFLHNTGHFVRVVNPACIRFYAKSKHIRQKNDQTDAEIIADYCQRQEPIRWAPPSPELKKLKHLYRCSAALKDELTLVNNHLEKKERPPKEVANAWEDLAMNIKQKIERIKNSLRELLNKHKELLENFQLLLTIPGIGEESAVAILAEVPNIKAFKDARQLAAYAGAIPRNITSGTSVHAKPRLSKSGSRTLCKAMYFPAIVAKNHNPTIMTFCKRLKEKGKHNMAIVGAAMRKLLHIVFGVLRSKKAFDPDHIKNYRARSLAESLVL

SEQ ID NO: 78187 - protein, 487 aa, unidentified
MHPRTTNKFLETFDVYRFSFESAGALALDNEYSGFAVLPAHYIAFAERKRARPWTSIYHCGRYDVKPLATQQFTAYVGIDWADTKHDVCLQVPGNELREFDCIRHQLADIDQWAQSLHQRFGGPIAVALELAKGPIVYALQKYDFFVLFPINPLTLAKYREAFMPSRAKDDPTDAELALDLLMRHPERFTPLRPQSVQMRTLLSLTEHRRELVGDKTRFTNRLTNTLKQYYPHALDWFEQHDTLLFCDFLTRWPTFPQVKRARRASLEAFFYAHNGRRPNVISARLGAIKAAIPLTEDMGVIAPCRLQVLVLIEQLRTTLQAIDRFDREIAQLAPRLPDYCLFQDLPGAGPHLAPRLLAAFGEDRQRYQHADELQKYAGIAPVTERSGKKSWVHWRLRCPTFLRQTFVEWAGQTINKSFWAGAYYRQQRAKGSSYQATVRSLAFKWIRILYRCWQTRTPYDESAYLNALRKRGSPLLKHLELDAQSA

SEQ ID NO: 78188 - protein, 481 aa, unidentified
MKSRPPERGKITDHARRGPWNEMNRKQRREMIRKMQSEDLSLEVVHPDAAGIDIGNESHYVAVPPSRDRQAVRRFGCTTAELKAMADWLQQCRIHTIAMQSTGVYWIAVYDILEAAGLEVYLVNARDTKNLPGRKSDVQESQWLMKLHTYGLLRNSFRPPQEIRTMRTYWRQRNDLVRAAGAHIQRMQKVLTQMNIQLANVLSDVSGMTGQAIIKAILAGQHDPHKLAELRDPRVQASHAEIAKHLEGNWQEDLLFVLKQEQEGYEFCLQQMAECDRQLEQYLQQREDRSQGACLPKETRKGRLKKNKKGKPAFDLRAELFRMTGTDLTQIDGIDVMTATTVMSEAGWDMSKWETENHFVSWLRLCPDNRISGEKIIGRGRLRTNNRANIALKMAATTLRLSNTYLGAQFRRLRTKLGAPIAIKAMAAKLARLVYRMLRYGMKYADRGAAFYEVEHQRLQIKHLKWKAAKLGYQIVQAPSA

SEQ ID NO: 78189 - protein, 326 aa, unidentified
MSKKKLDLCLRSNGKDILYDVIPNDLSSIKSWLTRTFEKFFLSEDSLVVCAEHTGQYTYPLVCATKSIGVYLCLEDAAKIKYCHGIPRGKNDKIDACRIAMYAERYNDCLQPYTASELIIQKLKNLSTERSMLVADRAKYQSQLKDQVDYMEHSIYIAKCNRVEGIINTFTDYIAQIDLEIKELINQAPVIAHQMDLLMSVDGVGERIALKMIMETDAFTSFTDPRKFCCHAGVVPFVYVSGSSQRSKNRVSNRADKSIKHLLHMAALSVSQVKNSPLKKYYDRKVEEGKNKMSVLNAVRAKLVTIMFAVIRTDAFFSRNYQNSLA

SEQ ID NO: 78190 - protein, 360 aa, unidentified
MGQVKTFGGLDVHAAKVVAAIVDSDSGELRVQRLPGQTRQVVKFCAALPAPVRVSYEAGPTGFGLARELEAAGIGCVVAAPGKIERPAQDRVKTDKRDAERLVRLLMVGGLHAVRVPSPHEEALRDLVRAREAVRGDLMRARHRVGKLLLRHDLRFEGNNWTTRHRKWLADVDLSDPVAQAVLLDGVGAIDALVVRRDALEEQMAQVVPDSPWATTVAHLRCLHGIDTLSALGLCAEVGDFHRFARPGRLMSYLGLVPSENSTGTKRRQGSITKSGSEHARRLLVEAAWHYRRPSRKGRELVRRQAGQPQHVCAISWKAQQRLHRTWRRLDTERGKRRTVVAVAVARELSGFCWAVATAD

SEQ ID NO: 78191 - protein, 374 aa, unidentified
MSIVMGVDQHRAQITAEWIDVDSGEISRARVRPADRAAVRRFLERFAGQQLEVALEATTGWRFFVEELRAVGAVVHLAEPAETAARRGNKQRAKTDRMDARHHRELLLAGRLPESWIPPDHILDLRARVRLRHTLIEQHSEWQQRIQAVLYHHGCPQRRKLMQGDGPDWLSAQPLPETARQQITVALAMIDALGLQIAPLDRQLRPYARRQIGCRALIDAYYGVGELVAVTILSELGDCRRFQNSRDAVRYGGMDITVYQSDRHRSPGHLSRQGPPALRWALYEAAQHARFPNSPDREYYLQAAERVGGNRACLALARKLLKRCYHTLRELGDDALAPPTDQPPGSAAARRASSGSPPKTDRPPTREPTDALAA

SEQ ID NO: 78192 - protein, 460 aa, unidentified
MTLLDRLSSPLPCRYYLGLDIGYREHVAVVISLRTFVRGDERWKRARCLHFPSTQAGLAQLQRYLDHFSTDPGVFLGLCEPTGGHYGASAFQYLVDHRYDMRLVENATVGHMEERIFPGLPRTDEMATRVMARIGYLHEAVGEEFTLRRLELPDPDQAHLLALCRDSWKLSTTITRARNQFTQLLAVTFPELKTFFTGSVSTVAPVRLVAAYPTPALLAEASEEQVRTVLWKAGAYQHAHRVGELQALARSSAGLVPDPGRAWRLEWLTGFLLANFQYQTALDQRIEEVVQQWDGYELIVNVPYAGPPTLGVILAVTGHVERFSTYRKYIAYTGYFAGLRTSQTIDRTKMSRRGNRDLKRALFQIAAPLVWFDRGGNPYQELFRRKVAEGRKWYQAMPFVCATLARHIYHCLKFNDPYDAAKAFRGASLAPASEEEWLNLGANLDEHFEVMEASLCQMEG

SEQ ID NO: 78193 - protein, 343 aa, unidentified
MVHYVGLDVSLKQTSICVVNQAGSVVREDVVDSDPEAIAAFVRLKAPGAVRVGLETGPTSTWLWTELKRLGLPVICIDARHAKAVLKMQINKSDRNDAAGIARIMQTGWFKEVRVKDLDSHSVRALLSSRALLVKIKRDLENQIRGLLKNLGLVIGRAKFNVFATRAEELIADRPELVAVVRPLLEARKAIEQQVGDLDRKVLKLARYDVQVRRFMAAPGVGPITALCFKATIDDPTRFKRSRSVGAYVGLTTRRHASGEVDWSGRISKCGDAMLRTYLFEAANVLLTRVPKWSALKAWGIRLAKRNGLRKAKVAVARKLAVILHRMWIDGTEFSWSTKKVAA

SEQ ID NO: 78194 - protein, 423 aa, unidentified
MKVSKIKQIQPNTLIVGIDIAKQTHWAQMMLQGKLIGKAFSFQNTRESFENLVTTLKAYQQKLGATNIVVGMEPTGHYFKPLAYYLHGTGMCEVVIVNPYHVNRSKEFDDNSPSKNDRKDARLIAKLISQGTYFNLPLIFNIWAELRTANVSRMQLTQKRWQLKCQLITILDQYFPEFPEVFKNVLGKGAMYVLTHCPFPDNILELGEQTLSEGLRGATHNRVGQKRAQKLWEAAQNSIGIKEGVRGARLQLAHLVEELNLIHKQLEETEEMMSQLLKQTGLGDYLTSIPGVGMVTAAAFLAEIGNPDEYESYKQIQKKAGLNLRENSSGKHKGKTTISKRGRPALRQLMYQIAYVSVAKNAEMKAFYEYLKNRKENPLAGKQALIAVAVKMMKVMLAVCKNRSNYDGGKVGNQNLVVRMQAA

SEQ ID NO: 78195 - protein, 343 aa, unidentified
MQIRSVGIDLGKTTFHLVALGASGKVLVKKKFIQKQLLAFTANMQTSLIGLEACSGAHFLGRALKQQGHDVRLIAAQFVKPFVKSNKNDFVDAEAIAEAVERKNMRFVPIKTDDQLDLQAMHRVRDRLVSRRTAVINQIRAFLLERGMVFPQKPAKLKAAMADVLENADNALTPMMRNMIGMLWDEWKTVEQQIGELTDRLEQIAESDASCCRIRQIPGIGPIVATAIVAAIGNGAAFRKGRDFAAWLGLVPRQYSTGGKAKLLGISKRGNIYLRKVLIHGARAAAMRIKRDRFAIGGWMNALEARAPRNVLVVAMANKLARIAWAVLSSGEDYRPATSAIAA

SEQ ID NO: 78196 - protein, 342 aa, unidentified
MEDTMIGVDLAKAVFQLHGASMTGHLKYRKKLTRLQFRKFMADQPPSLVVMEACGSAHYWAREMVRLGHDVKLIAPQYVRPFVKRQKNDTTDAEAIVIAAQRPEMRFVAPKSQEQQARAVLFRARERLVHQRTELVNALRAVLYEFGHTVPKGIGNIKRIDAILEVANCDFPPLVRTECWHLVNQIAEQTTRIDAKTKTAKEMAATVDTARRLQTMPGVGPMTALAVEAFAPAMENFKRGRDFAAWLGLVPRQHSSGGKERLGRVSKAGQADIRRLLIIGAMSRLNWMGRKTIPEGSWLARMLARKPRMLVAIALANKMARGIWAMLTKNENYRDPALAVAA

SEQ ID NO: 78197 - protein, 343 aa, unidentified
MQAVTTIGLDIAKSVFQVHGVDAAGQVLIRRQLKRRVVLGFFQKLPVCLVGIEACASSHYWSRELQALGHSVRLMPPAYVKPYVKRQKNDMADAEAICEAVARANMRFVPTKTPAQQSCLMLHRTRHLFIRQQTAVINSIRAHLAEFGIVAPVGRKGVTELLHIVADPSDKRVPEVARACLAALGNQLLSIKEQIVEFDRMIMVWHRSNETSKRLHYIPGVGPMLATALVASVAHPRTFRSGRNFSAWIGLVPKQHSSGGKDRLGSISKQGDRYLRSLFVAGALAVIRYAKIHGTKHRPWLTALLARRPTKVAAIALANKLARMAWAMMAKGERYRQPVALAA

SEQ ID NO: 78198 - protein, 373 aa, unidentified
MNNSITYVAMDTHKKQHRVAMVYPNDEVIVEFSVKNTASEIRKMVRKIKRNAPGEIKFCYEAGICGFTLQRRIEALGCKCSVIAPSLTPCKPGERKKTDRRDAKKLLGLFMADMLTEVYPPNEQQEAARELTRCRAAAQENLKRIRHQLQKMLVRHGYVFIDGQHWTQKHLRWLEAVEFNQPLLKEVFDCYLTEMRHCLQRVKTLDKELEKLAQSEDYKEVVGILRCFYGIETLTAISIIAEVFDFSRFASAREFMSYLGLTPSESSSGEKEHKGPITKTGNKRARRLLTEAAWHHRHAYVLSKALSKRREGQPQWAIDIAERAGLRLRKRYYRLVYRGKLPCKAVTAVARELAGFIWSALIEYEARKKRKVA

SEQ ID NO: 78199 - protein, 342 aa, unidentified
MASTTYYTGIDLHKRSAYLTTLSREGTVIEQRKLPCRREALRLYFRCLDGAHRAVVETTTGWYWVSDLLEEEGVEMVLAHAKHLKAIAYAKVKTDKVDSRTLADLLRTNMIPEAHKISNELRPMRDVLRTRLRLVGRRIAAINSVHRLLEKMNVRAVAALPELMQLQARCHLDEVELLEKQIKRLEKTLRPELLPRDQVQRLLRIPGIGQVNAYTIYLEVGDIRRFPTEKQFFSYARLVPGASDSGTRTRHKRSKDCNRYLKLAFSHAAVRAIQYYPVVRDFYRKKKRRKPDPVARAIVAKELARVVYHVLTKEENFNGRFKGTPLKRPKREQWPLLPSPTA

SEQ ID NO: 78200 - protein, 338 aa, unidentified
MELYGGIDLHSNNSYIGIVNEENRVIYKDRRRNELPLVLSALAPYKGELKALAVESTFNWYWLVDGLMDAGYPVHLANPAAMKEYKGLKHKDDKKSALWLANLLRLNILPEGYIYPKEERPVRDLLRKRLHLVRHRTSHILSIKNIFARNLGITIKGDDIKTLTSRDIDRLISEECHRLAIMASVSTIHHLTGQVEQIEKTILGRVRLRDEFKGLLAIPGIGTILGLTIMLEVGHIGRFHEVGQYASYCRCVQSIRTSNDKKTGEGNRKNGNKYLSWAYVEAANIAKRYYPTIRRYYEKKAAASNTSVAVKAVSHKLARASYYVLRDHAVFDEKKLFG

SEQ ID NO: 78201 - protein, 342 aa, unidentified
MVEVSMIGLDLAKNTFHAHGESADGSVAFRKKLRRDKVMAFFAQQPRCTVAMEACASAHFWARSLGELGHEVRLVPPVYVKPFVKRQKNDAADAEAIAEAASRPTMRFVAVKSEAKQAQAMAFKTRDLLVRQRTQTINALRGNLAEFGVVAPHGSANVERLRAVVESVETPLPVAVAELAQKLLAQIDTLTEQIDAIEGDIKQRARQQDTSKRMMTIPGVGPICATATEAFAPPMESFKSGRDFAAWLGLTPRQHSTGGKQQLGKVSKMGQRDLRRLLIGGAMAVVRWAAKRGAPEGSWLARMLQRKPRMVVAVALANKNARIIWALLTHGGMYKDPAVAAA

SEQ ID NO: 78202 - protein, 358 aa, unidentified
MYKFMKKFFIGVDVSKDTVDVSFFDDDRMKSPEYLAQYSNSPKGFREMVKDLRMCCHGVSSGQWLFCCETTGRYDHPLCHWLVDHGMVVWRESALQIKWSSGIQRGKNDRVDSLRIAEYAWRHQDKMQKFVKPSESLSNLKAAFTHRRRLVEKRTATRCQLKSMSSEKGLSASVARMIVRDLSREIERLSASITTMDESIQKIIRSDSELDRNYRHIISVKGVGPITAVALIVCSGNFKAITSAKKMACYCGVASFRSQSGTSINRKASVSNLSNRQIKSLLSMAARSASRSNPVFAEYFNRTLSRGKPVALVYNNLRNKLITVVYKLIERDCDFDVDYMRMHSTGQRANEPAIREAV

SEQ ID NO: 78203 - protein, 400 aa, unidentified
MLSIGIDVSKGKSTVCGMKPGGEIVYTPFEIQHTREGMSELVSLLHNSGEEVRAVLESTGSYHCPVVAALLENGIFVSVVNSLRMKRFCSQSIRKVKTDRIDAMQIALYGLAYWQELQPTRLPEDTYRELQLLARQYYQMTSILIKAKVDFNALCDQVLPGMQELMNDHAGRHKLSDFVLRYRHTAHILEMGETRFRKDYCKWAEKKGYRNCERMAALIFATAQNGIPVLPNAPSTQIVITEAIRVLHTVEASRDAILTQMQALAKTLPEYSLVREMPCIGDTLAPRLIAEIGDVRRFHSKRALIAYAGIDAPPYQSGKFCANNRHISKRGNRYLRKTGYEVMQSYVMHKPANDPIFTFIEKKRGEGKSGKLAMVAGLNKFLRIYYGKVTELYRSLPAIE

SEQ ID NO: 78204 - protein, 391 aa, unidentified
MILAGIDVAKDKHDCFIMNSDGEILVKAFTFSNNLEGFNFLYEKIRSVTKPKDKIKVGLEATGHYSYNLLGFLLNKGLPTFVINPLHTNLFRKSLTLRKTKTDKVDSRTIAMMLMSDVALKPHTDTSYHNEELKSLSRYRFTKVQERSKLKTSVSRLVQILFPELEKIVCTIHMSSIYHLLEEYPGASYIASVHLTKLTNLLMEASHGRYNRNTAIKFREAARNSIGSILPAKSLELKHTIKLIRELTVEIDEIDAEIKKMMDSIASPITTIPGIGYSMGAMIISEIGDFSRFSSPDKILAYAGLSPSTYQSGQLNNCYSHMEKRGSRYLRYALFTVAQKVCIWDNTFAEYLSKKRAEGKHYYVAISHAVKKLVRVIFHLERTGQVYLKAA

SEQ ID NO: 78205 - protein, 345 aa, unidentified
MGNMYYIGLDVHKKTISYCVKDGSGRIHAEGKIPATRFDLDLWMKTLPQPWTVAMEATLFTGWIYDHLRPHAAAVKVAHPLMLRAIAAAKKKNDHIDANKIADGLRCDFLPECYMASTQIRERRRTLRYRNLLVRQTVQLKNRISGLLMEAGVSYNKQKLHKVEYFRELLKTNQDIDESLRPLLQLCRETLVRLQKTESALIRSLARDRFLVERVERLMTIPAVGPITALTWALEVGEVSRFSSIKKAISYCGLCGAEKSSGEHIQRTPLSKQRNKHLQCVLVEAAKMAPRLSPELALLYDRERQKGNANRATLAVARKLVAYLVAIDRRQRDFLVVEKKNQAAA

SEQ ID NO: 78206 - protein, 339 aa, unidentified
MKKRYLGVDLHRNCFTVYTRGTDGNGESREWSIRSLKAFAKTVRSSDAVAVEATGNVRMFCAALKDRGCRVVVVNPHQFQVISKSVKKTDEHDAKVLAEFLSKDLLPEVQMKDETHARVASLTQTRDKLVKLRTVLKNKVNNLLAARGILIRKESLASEKGLEAVLSAAVSELDLVELRILVDEIRHLNGSIKKLEDILSEQGPKLPGWSSLKSIKGIGDTGASILLSTIGDINNFADEGKLAAYFGIVPRVHNSNETERSGRITKRGCKLGRTALVQCALIAARYSPYLQSYYRRIASHRGTGKAIIALARKFLGIIYKTLKNGWVFEDFASYRLVGA

SEQ ID NO: 78207 - protein, 346 aa, unidentified
MDHYAGIDVSLECSSVCVVDASGKIVREGKVASEPEALISWFISLGYELSRIGLEAGPLSQWLFAAMREAGLAVELLETRHVRKAFEAMPVKSDRNDARGIAQLMRLGWFRPVHCKSIGAQETRTLLTARKLVQSKLRDVENSLRGILRGFGLKVGKTTERSFAGRIRELASGHPSLETITEGLLAVHAVLLREFNSFEKQVRRVARSDTRTRLLMSIPCVGPVVALTYGSAIDDPARFKSSKQVGAHFGMTPKKYQSGETDYTGRISKIGDAWVRTALYEAAHIMLTKPVKGCSELKSWAMRIARRAGMSKAKVALARRLAVIMHRMLVDGTLFNPASKQIAAAA

SEQ ID NO: 78208 - protein, 376 aa, unidentified
MERGSLMLNTTTFVGLDVHARSIKAVALDAMTGEVRSATFAYDAAAVAEWVGSLDPAAKCVYESGVTGFDLQKKLTALGVDCVVGAVSKMIKPSAGRKRKNDRNDAEFLARMLSVGNVVEVWVPDDECEAARDLARALDDAREDLKRCKQRLSKFLLRHGLVFSETNAKGQRKKNWTAAHWAWIRSISFPEKADDDVLAYYIDATRQAMEDKKRLERLVEAEASKPRWKKRVDSLRCLKGVDTMTAADIVFEAGEFSRFKSARSFAAWLGLTPSEHSSGESVRQGGITKAGNKHLRRVLVESAWHYLGCSPHSKDLAKGQAPDPGARRHAAKGVRRLVGRRAAMLERGVHKNKANVATARELACWCWAIGCMVESA

SEQ ID NO: 78209 - protein, 407 aa, unidentified
MICVGIDVSKRKSTVCFMAPGDKIIRRPFDVKHTKEELQPLVDEIRVQAKYDEIKVVMESTGVYHLSIAYFLQQNGIFVSVVNALKVANFNKAENFRHTKTDSIDSTNIARYGIAYWAKLPQFDLNGDKYFLLKRLCDAYLNFSEERSRILLQLQSQLEQTMPGIFDLFGGFDINSGKDKLLDFLEKYCHIEDIIAKPEAEFIASYCGWAKEKGYRSNESKAATIYAQAKNGIPSIPNNPIVRETIMWYVGLLRRADEALMASLTRMEDIAKDLPEYELVGEMGGVGRVTRVALIAQIGDVRRFKNKHSLICFAGLTPSIHESGKFRASQNHIVKKGPARLRKVLYQVMMSLVMHKIPKDDAVYRFIKKKEAEGKYKKVAKVAGMAKFLRIYYGRVMHLYRDLGLAA

SEQ ID NO: 78210 - protein, 370 aa, unidentified
MKNDTTLFVGMDTHKDSISVAYAEAGSAAPPVFLGPIGSRQADVDKLVRRLQGKAAKLVFAYEAGPTGYGLYRYITAKGHECRVIAPSLIPKKPGDKVKTDRRNAVGLTRLLRSGDLTSIWVPGVEDEAIRDLCRARDATLLTLKAAKLRLKSFLLRLGLQYTGRADWNAAHLRYLSRIVCPTPAQQIVFQELLRSVDEQVDRLARIESELAGLVPSWRLYPAVKAFQALRGVQWLVALTVTAELGDITRFDNPRRLSAFVGLIPSEHSSGASRSQGGITKTGNSRARRALVEAAWAYRYPAKVSEHIRKRIEDLPKPIQDIGWKAQVRLCKRFRRLTARGKHHNVTITAIAREILSFMWAIAKEVPIQG

SEQ ID NO: 78211 - protein, 440 aa, unidentified
MKSVQLQHKRSLIDGKIIIGIDPAKTKHQAAIIDTHGVQLGKSFSFDVSLDGYTRTLWQKLTQILTTFGRETTVFAIETSCNLWLTLAFYLHHEGYHVLLVSPLTTYHSRPMVNHDFSRTDPKDALLVASNARQGFFDLYEDFPPLGNAMHRLTITYCKLRKELAQNRARLRATLEQLFPEFLEIVEPDTQTALYLLKRYLFPCDFLDIDLPSEANAILAISRKRFGPQTLLQLQKAARHSIGVLKSQEEVIAERLSVKCWLALIETLSAQMQSVFTALADYGARLPEYTIVRSLKGISDLTAALFLGELRDIHRFSHYKQLEKKAGLNLRLSQSGQYVGARHISHIGSKRLSWLLYTMTEETAKWVPEIRAKYLRRQLHRRKHRKSVVASIPQLLKLIMVLVKEQRQYEIHPDSVVEMQALEKQYNQLKVQQKKIQQAA

SEQ ID NO: 78212 - protein, 365 aa, unidentified
MQKISTMRMSGKNIFQGQLTIGLDLGDRSSAYCVLNEAGEIVLEHKLATTPEAMKEVFGGMPRCRIAMETGTHSPWVSRLLTALGHEVIVGHAQKVRLITKSRRKDDRLDARTLARLARIDPELLSPVKHRSAQAQLHLAEIRARAGLVSARTALINAARGLVKSYGERLPKCHTQQVGREMTGALSMGLREALEPLLREVESLNERIKEYDQRIAKMAKQTYPETALLKQVKGVGDLIATAYVLTIEDPHRFRKSRDAGCFAGLQPGRRNSGDSEPQMHISKEGDEYLRTLLVQGAHYILGPFGEDCDLRRWGQKLSARGGKNAKKRAVVAVARKLAVLLHRLWVSGEVYEPLRNSQKAMSAAA

SEQ ID NO: 78213 - protein, 342 aa, unidentified
MYYIGLDVHKKTISYCVKDASGQVQQEGKVGATRWELDDWMKTLPQPWTVAMEATIFTGWIYDHLLPHAQQVKVAHPLMLRAIAAAKKKNDRIDAGKIADCLRCDFLPECHMASTAIRDRRRTLRYRHLLVRQMVQMKNRISGLLMETGVSHNKQRLHKVGYFRELLAGNEEVSESIRPLLRVSRDSIVRLQKTEYALVSSLQRDPLLAERIKRLRTVPGVGPITALTWALEIGEVSRFPSIRQAISYCGLCGDEKSSADKVTRTPLSKQRNKHIQRVLVEAAKLAPRQDHNLALVYEREKQKGNANRATLAVARKMVAYLLAVDRGRRDFIPFADSQSAAA

SEQ ID NO: 78214 - protein, 348 aa, unidentified
MKHIGLDVHSTTTNIVVLNDAGRRLLSRKVATTAKELREVISSIPGDKRLAVEESQMADWVVRELAPLVQEIIRCQPQYNRLISRSEDKYDEGDAESLAVLLRLNELKPVHHPVWEFRLFREAVRSYWLRSRDLARAKNRLKAFFLFNGIHEPSKRIYAQRYREGFRDQLRQRRGNLELAESLWEDVAYCRQKKAQHVRLMRPAGKPWAAEIARLQSIPGVGVIGAHTLVAYLERGYRFRNKRQVWSYAGLGLRRKESAERGFRKASRCGNRYVKNVIFLGVANIAAGQRRHALWEMWQQGMVSGVDARRMRRNVGRKMLAIAQQLLRSGERYTDDRVKRSTTGSRQQ

SEQ ID NO: 78215 - protein, 426 aa, unidentified
MKSTTQNAKIAAITEKTLIIGIDVGSETHFARAFNWRGYEFSRKPLEFSNTEEGFETFRIWIEELKEKHGMDKVIPGMEPTGHYWFNLGKFLQDNGMQPVHVNPHHVKKSKELDDNNPSKNDRKDPKVIAGLVKDGRYFRPYIPDGVYAEIRALSGLQVLAQSEITRLKNRIARWFSIYFPNYKDVYGNVGAVSGLMVLKVAPLPEDIVKLGVNGVNRIWRDAKLRGVGLKRAKTLVTAAEHSIGSRDAQEAARVELKILLSDYEMQTAREAELMALIEEKIMEVPYVDKLLEIRGVGLKTVIGFVAEVGDITRFDDPKQLQKLAGYAIVKNESGKHKGESHISYRGRKRLRYVLYEAAVSVVSHSPEFRSIHQYYTTREKNPLKKMQSMIAVACKLIRVFYLILQTGTTYDAAKLMSDIRRPVAA

SEQ ID NO: 78216 - protein, 408 aa, unidentified
MNTLYVGIDVSSKSNVVYLMLPNGDKHSNFSVANSHEGSTQLVKRILSALTSHSLDTVLIGLEATSVYGDNLVYFLREDATLAPFNRKIHVLNPKQVKKFHDAYNDLPKNDYVDSFVIADCLRFGRINKEVYMGDYRYKALQNLTRARFFAVQNLVKEKQRFMNVLFKKYSTMTQEKVFSDTFSTTALAVYDEFESAEALANMDLHELTDFIIEKGKNRFPDPDAVAKAIQKAARSSYRLPKTVNDSVNQVLSISITSMKALESQIKEFDKAIKAQMELLPNVLISIPGIGPVYSAGIMAEIGDINRFNSQAALAKYAGLAWKQHQSGGFESEVTRLIPSGNRFLKYYLCEAAFSLVRCDKEYSDFYHLKYKEVNRCQHKRALALTARKFVRLVFRLLKDNRLYCPAK

SEQ ID NO: 78217 - protein, 422 aa, unidentified
MPRRAAADAVTSEAEDEVVTSIDRYDEVDVFVGLDVGKGEHHAVALDREAKRLFDRALPNDERQLRAVIDQLASHGVVLLVVDQPATIGALPVAVAQAAGALVGYLPGLAMRRIADLHPGEAKTDARDAAIIAETARTMPHTLRSIQVADEKVAELSMLCGFDDDLAGQIVQVSNRVRGLLTQIHPALERVLGPRLDHPAILDLLQRYPSPAAMKTAGEKRLGNRLLKNAPRKGRVWAAEIMTALGEQTVVVTGTDAAALVLPRLAEQLQALRRQRDEIAIEVEKIVDAHPLQPVLTSMPGVGVRTAARLLTEVTTKTFATAGHLAAYAGLAPVTRRSGTSIRGEHPSRRGNKILKRTMFLSAFAALRDPESRAYYDRKIAQGKRHNQALIALARRRSDVLYAMLRDGTLYQPRPAQPALAA

SEQ ID NO: 78218 - protein, 347 aa, unidentified
MNFYNNTHPYYCGIDLHARVLYVCIVDQEGNTCVHQEIPADPDKLHQLLGSYIGNIVVGVECMHCWYWVSDFCEGIGVDFILGHALYMKAIHGGKAKNDRIDSFKIANLMRGGNFPLAYVYPKAMRATRDLLRRRTKIVRHGGDLKGHVANTTSQYNLPPNKVNLKNKDAREQLKTTFPDEVVQRNIDLDMAILDCYSKELSKIEWYIQQQAKQHQPVHFHLLKSVWGIGPILALTILYEIGDINRFESVQKFASYARLVKCKAESAGKSYGTQGNKIGNAHLKWAFSEAAVLHLRGNKKAQNYLLKLQRRMSKAKALSTLAHKLGRCVYFMLKNETVFDESKFIKG

SEQ ID NO: 78219 - protein, 343 aa, unidentified
MKLIRVGVDLAKNVFQVHGVGRGEKVVWRRRLGRERWLEALVDKLEPGCEIGMEACTGAHHWARKVQQKGFTVKLIAPQFVKPYVKSNKNDATDAEAVCEAMARPSMRFVAVKTLEQQDIQAVHRVRSALVEQRTAKANQIRGLVAEYGLVAPRELVQLRTAVPLWLEGTENGLSSRFRRLLAGLWQDLKALDDRVCELDREITSIAQSDPAAKRLQQLRGVGPIIASALVAAMGDAHHFANGRQMAASLGLTPKQHSSGGKERLLGISKRGDRYLRSVLIHGARAVLRTAKDKNDRLSLWVTSLAQRRHPNVVAVALANKTARIAWAMLTNATDYQPDLIKG

SEQ ID NO: 78220 - protein, 363 aa, unidentified
MKEVYYVGLDVHKDMIQMAVLGSKGKEPVMAKGLPNDPMKIVKELGKYYEKGKVQVAYEAGCMGYTLHRTLTEFGYDSRVIPPNKVFHHGDDKVKTDKRDALDIAWMLRRDEGESIAIPTKEDEAVRDLIRCRGDIQENLKSMKQRLLKFLLRKGVNYENDRYWTGKHNKWLSALHFEEKMEQLTLEEYFDEIRRLEEKLGRIEKVIEETAQWPIYAEKVKKLRAFRGIDYLTALSLLVEIGDFKRFPCAEAFMSYLGLVPGESSSGKKRKQGGITKTGNGHLRRLLTESSWHYARPNQVSKRLIKRREGTDEGTIRYADKAMKRLHEKYTRMVFKGKTKQTAVTAVARELSGFIWGVMNNAV

SEQ ID NO: 78221 - protein, 373 aa, unidentified
MNSILYVGMDVHKENYTLCCYSFDDEELMYKQTIEPDYKMILKYLERVRSRYHEEEVEFVCGYEAGCLGYTLYHQLTNHGVKCIILAPTTMGITNNDRIKTDKRDAGNIARCLAFHTYSAVHIPTVQDESVKEYIRMRDDQKKALKIIKQQILAFVLRHGYRYDGGKNNWTIKHVNWLKSLNLGGVLQESLQEYLITYEYLTNKIERLDQRINELAADERYREQVKRLICLLGVKNLTALAVLVEIGDFKRFANAEKLAAYLGLVPSEDSSGGKQKRGSITKAGNTHVRRLLVESAQSYTRGKIGHKSQELKRRQNGNSPEVIAYADKANERLRRKFYRMVLSNNTNRNVAATAIARELACFMWGLMTDNIAS

SEQ ID NO: 78222 - protein, 326 aa, unidentified
MAQISGIVGIDISKEKVDACIRPLGVRLSKPSTRAGRAELIGWLREHNVGLAVMEASGGYERDWAAALRDAGLAVSIVDPKRARHFARSAGCLAKSDPIDAAMIAWYAEVFAANLRKQADDADRERLDRLMTARALLKKVATQIQQLGEHRQPSVVVKARQAIMKPITAELAKIEAVVAALLEAKAAFAERGEILQSVPGVGPIFAAGAIAWLPELGHVDNKEIAALVGVAPYIDDSGNRKGERHIKGGRPKIRDLLYMAALGAATRHNPVVKAHYQQLRARGKPKKVALVACMRKLLVILNTMLKRRQKWRPPAVAMAPAQRAAA

SEQ ID NO: 78223 - protein, 360 aa, unidentified
MTYGSTEPRKAAGLTVGLDVSDTYTSLCVVDEEGNMIEEGRVRTTTPALERRFSALPPCRMVLEVGTHSPWMSRLLAGFGHQVIVANPRQVRLIAESDRKRDRTDAELLARLGRVDPALLRPIRHRSAEAQQDLALLRARDTLVRVRTQLISHVRGAVKATGERLPACSATSFHRKAGPHLPAPLHPALQPLLATIADLTARIRDHDRLVEQALGERYPAARLLRQVPGVGPLTAMTFLLVIEDPGRFRKSREVGPYLGLVPRQRQSGEREPQLPITKAGDPLLRRLLVQSAHYTLGPFGPESELRRWGLGLAGAGSSRAKRRAVIAVARKLAVLLHRLWVTGEVYEPLLGERAMQARAG

SEQ ID NO: 78224 - protein, 456 aa, unidentified
MGARRKTKQKPAMVEPVEIPDAEHELVIERAAAIDVAKAAGKVCVRLPGKSGRRFSRVWDLPARSGAITELAEHLVELGIEKVTVESTSDYWRIWYYLLEDQGLDVQLVNARDVKNVPGRPKTDKLDAVWLAKLTEKGLLRPSFVPPAPIRVLRDYTRLSEDLIRERTRYWQRLEKLLEDAAIKVSAVASKLDTLSTRDMVEALIVGERDPHRLADLARGRMKAKRSELITALDGRFDDHHAELARLLLAQSDALSAQIGALSARIEQLIDAMDESDHHTGDRTASGSAGPQAAGAPHTGEQATAPTHATTASGGDSDTATVIEPTRLTTVERLDEITGVGQRAAQTIIAEIGLDMTRFPTPEHLVSWAKLCPRTIQSGPVIRGGKTGKGNPYLKGALGEAAAAAARTDTFLGERYRRLVKRRGRLKALVAVARSILVIVWVCPERGREFDVGRAS

SEQ ID NO: 78225 - protein, 418 aa, unidentified
MKNNPASIPCERFLALDIHKHYVLVGGMNSLKEWVLRPRKVQMSRFPEWVQKNLKPTDAVVLESTSNAWEIYDLIFPLVAKAVVANPLKVGQIAGSKVKTDKLDVERLLILLIADIVPEVWVPPHHVRDLRALISHRWRIHKQIAMTKNRLHSFIHRFNLIPPAGPLFSEKNLSWWQEQEFSFMVRLQIEQDLLILEHLTAHKEAVHQELACLSNRKPWSKDVVFLMQIPGLGVVLSMTVLSAIGEISRFEDSKNLVGYAGLGAGIHSSGLKHQDKGITKAGRKELRWAMVEAAWGAVRSDPHWKAQYEQLKKRGKHSNAAIVAIARKLLVSIWHVLTKGEPQCHSTDEDLAYKMLIWSQRMDEEALRGMTRQQFAKYGLLRLGKGLDLTRIVRNGLPRRIAPTAEVLALLPELNLLE

SEQ ID NO: 78226 - protein, 411 aa, unidentified
MSYKIAGIDVHKKVLMVVVIDGTTPEEKPERRRFATMPSDLHRLLIWLREQGVEEAVMESTAQYWRSVWLELEPHMRLHLAQAFSNRAPRGRKHDFKDAERLVRRLIADELILSFVPGGEQRTWRSMTRMKLQMTRDRVRLQNQIECLLEEMRIKLSMVVSDLLGASGLRMLRALAAGETDPKQLAQLGDKRLQCTEEQLVDALTGRPQPMHREMLALQLERLQLIDMQIAKLNGLIAQAMKPHQEAVMRLAEVPGLGVDSAQQIIAEVGEQASTFPSAAELTSWVGTCPGKDESAEQNHSSRSAKGNKYLRRVLNQAAHAAVKKKGSYFQVVFRRLLPRLGYQSAIWAVAHRLCRVVWKILHEGVRFIEHGIEPDPKAKIRHARRLAQALRKLGYQVTITPTNLASEMQR

SEQ ID NO: 78227 - protein, 326 aa, unidentified
MEVVHARCAGLDISKTDAKVCVRIAGRGRRKPSATVTTWSATSSVILRLADMLAEQKVTCVVMEATGDYWKPFYLLLAESGLPVMLVNASQVRQIPGRKTDVADAVWLADLAAHGLVRGSFVPDLEVKELKDLVRARTILVRLRGEEVQRLEKLLESAALKLSSVISDLNGVSGRRMIEALIAGERDPEVLAGLGHGLLKASRAELAEALTGRFSDHHGFLAKMHLDLIDSYTARIADLAARIETYFDPDRPAPGPGPSLHRARELLVTIPGISLVGAEQILAEIGTDMTVFASPGRLASWAGLAPGAHESAGKVKSTRCRPGNST

SEQ ID NO: 78228 - protein, 447 aa, unidentified
MTIDPEDIPDADHESVIDRVCAIYVAKASGKVCVRIPHPSVRGRRTSKVWDVPATCAAVSELAEQLLAERVERVTVESTSDYWRIWLYLLEAAGLGVQLVNARDVKNVPGRPKTDKLDAVWLAKLTEKGMLRPSFVPPADIRQLRDYTRLRIDLTRERTRYWQRMEKLLEDALIKVSSVASTMTAKSVRDMLEALIAGERDPQRLADYARGRMQAKRGALIEALSGRFEAHHGVLARVLLNQIDVLNAEIAALTQRINDQLAAITAVAVPPTGRDTLQAKPTATGVVAAQRLCEVTGIGELTAQVIIAEIGIDMTRFPTAAHLVSWAKLSPRTVQSGAVLHGGRTGKGNPYLKGALGEAAAVAARTDSFLGERYRRLVKRRGKLKALVAVARSILVIVWNLLADPSARYHDLGPDHYLARTDTQRRVRTHLSQLAALGYRVTIEAVA

SEQ ID NO: 78229 - protein, 413 aa, unidentified
MSASVTVPGAREWLAVTLSCLNLSCDRKSERRPRPRDDGHGLIEVRSGELNAWLPGRRFLIVDQHFEEGNVIAVGIDTHKDSLAVCAVDDLGRKLGELTVENGRQGFRRLQRYLAELPTPRRVGIEGSGGFGAPLAHVLRAAGEEVVEVPARLTARQRRRLRGPGKSDPGDALAIARVVACEADLPPAGRSGLASDLKVLCSYRTQLLGERTRQANRLHADLTVLAPGYAGQLPAFGSAVRQRGVGELLALRAGVRARLAERRLARVVALGTEIDALEEQIAALVRACGTRLTEIRGVGTLTAARLLAETGDARRYPSAAAFAMAAGVAPIRASSGKVQRHRLNRGGNRQLNLALFTTALVQSRCDPRARGYLERKRAEGKSWKEAMRCLKRHLANVVYRQMIADLTEGRLAI

SEQ ID NO: 78230 - protein, 342 aa, unidentified
MAIAVLGIDLGKNSCSVVGLDGSGAIVLRRRLHRENVIKLARGLAPCVMAMEACCGAHHLGRILRDQGHEVRLMSPEYVRPYVKSHKNDDWDAEAIAEAATRPTMRFVELKSCDQLDMQSLHRVRDRLVGERTALLNQLRAVLMERGITIAQGRRKLEQHLAAMLEGEEVRLSQRVRILVEDMRAEWRELDRRIEVFDDEFAALAKTDAAARRLVSIPGIGVLNATALVAAIGSGATFARGRDLAAWLGLVPRQMTTGGKPRLLGISKRGNKYLRKLLVHGARAALPTLSASPTPIGQWLQGLMARAHKNTVVVALANKLARIVWAVLRHGGIYNAAAVRVI

SEQ ID NO: 78231 - protein, 348 aa, unidentified
MRFYTKTHKHYCGIDLHARKMFLCILNASGEVLLHRNIATSPETFLKAVAPFRDDLVVGVECMFAWYWLADLCAKEGIEFVLGHALFMKAVHGGKAKNDKIDSHKIAVLLRGGSFPLAYVYPPEMRATRDLLRRRNHLVHKRAELLAHIKSTAIQYNLPEIGIDLTYEGNRKEVDQLFPDPQVRKIVQVDLAMIDAYDDVLKVLEPDIEKTAKRQDWHALMLLRSVRGIGQILGLVMLYEIHDIERFPTVQDFASYCRLVKCIHESNSKKKGTGGAKIGNAHLKWAFSEVAALFVRHNPSAKKLMDDLIKLHGKGKALTILAHKLARAVYYMLKKNVPFNLEKFLATA

SEQ ID NO: 78232 - protein, 342 aa, unidentified
MHGVTTIGLDIAKSVFQVHGIDAIGRVVIRRQLKRRYVLAFFQKLAPCVVGIEACATSHHWSRALQALGHTVRLMPPAYVKPYVKRQKNDAADAEAICEAVSRANMRFVATKTPEQQSCLMLHRTRHLLIRQQTAVINAIRAHLAEFGVVAPVGRRGVAELLDVAAASSEERVPEVARACVGALGVQLRLLKAQILEFDRQIMAWHRSNETSKRLDEIPGVGPALATALVASVADPKAFRSGRNFSAWIGLVPKQHSSGGKDRLGSISKQGDRYLRSLLTAGALAVIRYAKIHGSKRPWLTALLARRPTKVAAIALANKIARMAWAMMVKGERYKEPAALAA

SEQ ID NO: 78233 - protein, 404 aa, unidentified
MSIDAREETAAIRTQFGAIFVSLELSRSLWLITSLSPGGGEKMSRHDVPAGDVAGLLARFAELRSKARGRTGTLYPIIAIHEAGLDGFWIDRVLRQEGIESYVVDAASIAVSRRRRRAKTDKIDGEALVRALLAFKRGEPRVCSMVRAPTPEEEDRRRICRERKALIAERVRHVNRIKGLLFSQGVGDYEPLRRDRRRALEALGAGDGRPLGVNLKAQIGRELDRLELLLDQIRAVEAARDALLAEAVEAEAAPLPATASSPATTPSPARMLLRLKGVGPEFAAILWTEGLCRSFANRRQIAAYAGLAPTPWRSGTIEREQGVSKAGNPRLRTTMIQLAWLWLRHQPQSALARWFHQRLSGAGKGRRKTTIVALARKLLVALWKFASAGVVIEGALMKGGAANG

SEQ ID NO: 78234 - protein, 427 aa, unidentified
MLKINYMSTLFVGIDISSKSNVVCAIDFFKNQLLKSSVSNNQPGAYDLISQIVSVMHKHTDLNTVVVALESTSIYSIHIANYLSSSEELMPYHPYVFCLNPKVTANYRKSFIGMSKTDLLDAFVIADFAHVRRIETDPWRGSQFLALQRLTRHRLHLVEALTREKTYMVSNMFLKFSELSILPKEERPFCDNYGATASSVLTEFLSMEEIIDTSPEELIAFLCEKSRNRIEDLDKTVDLLKKAASDSYRLDKCLYEPLNISLPSSFNCIDAFKNEIKIIEKAILKAIAGLHPNAYTILMSIDGIGPVFASGILAEIGDITAFHSQDALAKYAGLTWTRNQSGEFEADESRMTKAGNRYLRYYLGEAANSMRNHTVEYHDFHYKKYNEVPKHKHKRALALTSRKLVRLIFGVLTKEKLYSTDKADASS

SEQ ID NO: 78235 - protein, 332 aa, unidentified
MDIAKNVFQAHGVDAGGKTTLTRQLRRGQVIGYFEKLPPCLVGIEACATGHHWARELTKLGHTVRLMPASYVKAYVKRSKNDAADAAAICEAVTRPSMRFVPVKTIDQQAALTLHRCRDLLIRQRTQLINALRAHLAELGMVAATGKAGVKDVIAIVTGTQLPEPMRQALQALVKQLAALQEQIGELERSIHAQHRASDRSRRLETIPGIGVIGATAIAATITDPSAFKSGRELAAWIGLVPRQNSTGGKERLGGISKQGDRYLRRLLVAGGMSVIRHARTHPDKHPWVMKLLAKKPAKVVAVALANKMARIAWAVLAKGESYRAPALVVVV

SEQ ID NO: 78236 - protein, 316 aa, unidentified
MSEFTSFVGIDVSRNVLDVYGLPSGEHWQLSNDQAGCASLVERLKPLGETVLVVMEATNVFWRMAATALAGAGLACAVVNPRQVRDFAKSMGMLAKTDAIDARVLALFAQRVNPPVRALPSAQCQVAAEMLARRAQLMGMRVAEKNRLATANAKKVRKDIELTIAFLGKRLAALDEEIDQWLKSTPIDQSRANLLQSFPGVGQTTARSLLITLPELGSLSGKQIGALAGLAPFAKDSGNKRGQRHIAGGRSIVRSALYMPAISAIQHNPVIRALYQRLLKAGKHHYVAITACMRKMLVILNAMLRSNQPWRAPQNA

SEQ ID NO: 78237 - protein, 343 aa, unidentified
MSIVGGLDIHRKQITFDYVDTETGEVRRGQICPADREHLAKWLARFAGQDAHFALEGCTGWRYVAGEIIAAGLTPHLADPAEAAHLRGPKRRAKTDRADARHQRVLLEQGRLPECWVPPSHVLECRALLETYLDLREQRTGWVQRIHAVLFHHGAPNIAGQQLGTAEGAAALRAAAAHCSPAGQLQLAIAAQMLLVYDERLHQVRRQLLDRARHTRGAAELTARLYGVGPVTGLALTCWLGGAGRFSSSRKAVRFAGLDITVYSSDGKRSPGHLSRQGPEVLRWCVYEAGKAHARASAPDHAYYAQVKERIDGKRAALSEARKIIRQAMHILAGLGDDALTAC

SEQ ID NO: 78238 - protein, 397 aa, unidentified
MTATHKPDCTFASAPVLYMALELSSGTWKLAFTVGLGQKPRLKTVTARSTVGLVCEIKAAKKRFGLSEDAPVLSCYEAGRDGFWLHRFLLAHGVQNQVVDSASIEVNRRQRRAKSDGLDAVKLVEMLIRWHNGERKVWKLVRVPSVAEEDQRQLHRELIELKAERTAVSNSIKGLLATLGLVVIVDETLPKQLENIRQWDGAKLPPSLHQRLLREFARWQLINRQIDDRERERSAKIRDDKTPQIQKVRRLMNLKGLGQNGAWLLVYEFFGWRQFKNRRELGSLAGLTPTPYDSGESRREQGISKAGNRRVRWMMMELAWGWLRYQPTSELSRWYQKRFAQGNTRLRKVGIVALARKLLVALWKYVEGGEEPRGAVMVGWENKRGYKGVKARQKKAS

SEQ ID NO: 78239 - protein, 344 aa, unidentified
MDNHTQYSGFAGVDLAKKVMQIHFVSGDGEITDKQVKRAEFLDFFRNRSKCLIGMEACGASQDWARKLEAMGHEVHLMSPKAVKPFVSGQKNDYNDAIGIYKAIFNGVRRVPVKSTEIRDLQTLRRIRSQVTKDRVKEINHVRGLLAEYGIVMGKSITAFNKGISSALESLKERGDVSPLVAEELRTTVESIKTKIERQKKLDREIEQLARGCKNYENFLKTPGVGPFTAAMLCVLLCDPDIFANGRKFAAYIGLAPRSRGSGGKYFVTSIPLKFNCDSESRAVFVECAQAIARYKNKSPWVEDILRRKPKKVALIAIANKLARQVWAMANKGENFKQMAILTA

SEQ ID NO: 78240 - protein, 339 aa, unidentified
MQVTTVGLDLAKNIFQVHGISENGDVVFNQALRRAQLLAFFEKLPPCLVGMEACGSSHYWARQLTKLGDDVRLIPAMYVKPYVKRGKSDAVDAAAICGAVTRPTMRFVAIKSEEQQGVLFLHRARDLIVRQRTQLSNMLRGLLAEFGSVIAQGVGSAIKFAKGVLDGDKPGIPDVAIDVLANLSNQLIALHLRVRWYEMRMRLQAKQDPRVMLLRTIPGVGPVTASAIVATAGDVSQFRNGREFAAWLGLTPLNRSSGGKEKLGRITKMGDRYIRRLLVTGMTSRLRQVKTHPERVDPWTRALLERKPVRLATVAMANKTARIVWAVLTKNEYYRPHNA

SEQ ID NO: 78241 - protein, 337 aa, unidentified
MWHVGIDLHRNSLTLAAVHDSGELRPPVRIECLDTGGIVSAVSAIRPFRAVVEATSHYRWLADLLAPHGRVLLAHPQRLRALTLRRSKTDRLDSQLLAQLLRLDQVPLAHIPAPRHQRLREMTRLRGRLVRGRTQVKIGLRLLLARHNRAAPYKCPFGPRGLYWFSRQDFGPVDNFIRDELLERFEHYRKQVAAIDERLEGLRPEYPEVAALIDMPGVGLYSALLVIGEFGDVTRFRRPKQAAAYTGLTTRVYQSGDRCHHGRISRQGSGWLRWVLLEAAMKFVRKDVPLANFHERIRKRSGAKIARVAAARKLAEICWKRLVRWHRSHPEGAATTT

SEQ ID NO: 78242 - protein, 428 aa, unidentified
MKNRNVQKLEAITPGTLVVGVDIAKETQWAQFVDYRGLELRKALKFRNHKNGFDSILASIETIYKNRRLDNIIVGMEPTGHYWKPLANYLLKNKVNVVMVNPYHTKRAKELDDNSQTKSDKKDALTIARLVRDGRYYEVYMPQDIFAELRVLSNSRISLMKRSNALKNTITAVMDEYFPEIVTVFKNPLKGKAAMQILKSCPFPSLILELGIDGVLFEIKKAVKKTVGRKKAQQLVETAKSSIGVGYGLVSAKLKLGLMIEELELLTKQLEQLEKAMEKALADTGYGEIILSIPGIGVVTAASFLGEIGDPMRFDHPRQICKMAGYNLIENSSGKNKSRTVISKRGRKNLRSILYQMAMTMVAVNDEMKKLYKYLKTRPNNSLKKKQALVVISKKIVTVIYNLIKKQTEYQAELVLGEFRKNQIKQAA

SEQ ID NO: 78243 - protein, 358 aa, unidentified
MNKSAASPWAVNNSAFNPCGIEVSHLTLVVALRGHDHDQPLREFPNTPKGHQAVLRFLHRSVLPVRVCLESTGLYGLDLALCLHQARVAVMVANPRAVRHFATALMQRSKNDQLDAVVLREFAARMPFVAWRPPSAAALKLVAVARRLEALTDMMAAEKNRRHAASLSAALPAIIRRDVERSIQTQQRAIERLTRAAQEFILDDPELARRFQLLLSIPGVAATSALHLLAELLLLPAGMDVRQWVAYAGLDPREYTSGTSVHKKVRISKAGNKHLRRALYMPALVAVQHQPHLRAYYEHLQARGKTKLQALVATMRKLLHAIFGMFKHDELFDGRKVFAAHEVTPPAPVPEPQEVLCP

SEQ ID NO: 78244 - protein, 373 aa, unidentified
MPKYSTAFGMDVHLRSTTVCALDADTGEAVTRRFPGNPWGEIAGWMDGFPGPSLAAYESGYLGFAPQRELAGLGVECVVAAVSKIPRSAADSASKNDRNDAARMAKAILAHDISPVWVPSPEVEGIRDLAGAYDGATARLATAKQRLLAFLAKRGFVYGGTTPAGNPRKYWTYDFLRWLDKVRPEDDGGVRTLAALRNEVEAAAEARADLLSEYRAAVDASPIAAEVAALQSIKGCAFALAAAFSAEVGDFTRFRSGRRVTAYFGLAPSQRSSGDSVRLGGVSGAGNALVRKLAVEGSWCYAAARHQPKLMPRDTGVPLEIRMHGRKGSERLLRRREEMLARGMPAAKANAATAAELVRWLWALGMMCREGAE

SEQ ID NO: 78245 - protein, 341 aa, unidentified
MEKFIRIGVDLAKNYFQVHALASESSPAVKRKLARSKMHRFFSQIEPSFIGMEACGSAHYSARELKAMGHDVLLMPPSYIKPYVKRGKNDAVDAEAICEAMSRPGMRFVLIKSVEQQATLMLHKTRELLVKQRTMSVNALRSHLSEFGIIIAKGIGRIDELLKLAEVDTTLSDAAKTAVKALAASLEGIEKAIGDREGQIADAHARSDMNRLLARVPGVGKLIASVITASTPDPSVFRSGRDFAAWLGLTPRQNSSGGKQTLGGISKQGNRHIRKLLVLSATSLLRSVSKRKGALAGWLSALLAKKPARRVTVALANKLARIIWAIMRTGAIFRAEIFAKA

SEQ ID NO: 78246 - protein, 410 aa, unidentified
MELLHRRCCGLDVHKETVVACLRLVADGKVTTEVRTFQTTTADLLRLSTWLAANECTHVAMEATGVYWKPVWHILDDGEFVLVLANAAHVKNVPGRKTDINDAMWLAELLAHGLIRASFVPDTQTQEMRSLMRTRKQLVREQSSHVLRVQKTLEDANIKLDSLLSDLMGKSGRAMLEALIAGETNPVKLASLASRRVKASPEELREALRGRVTKYHRFLLRLHLNQIDALDAAMATLDAQVEADLGPFRTAVELITSIPGVKNLVAHVIVSEVGIDMSRFPSAAHLISWTGICPRNDESAGKRRSNRLRKGAPWLKTTLVQCAWAAVRKKDSYLQAQFYRIKARRGPKKAIMAVAASILTAIYHMLKDGTMYKDLGRDHFDRRSTDRQKKRLIKRLTDLGYAVTIKPLVA

SEQ ID NO: 78247 - protein, 455 aa, unidentified
MKDQTKKKEVVSNDEFRLAIIQHQSGAIDVGSTMMMVSYADKNGEHHLLETSAYTDDLEGLARTLQTAGVQYVAMEATGVYWMALYELLEHSAIEVTLVNPQHFKNVAGQKTDVKDCQWLHQLQAHGLLRPSHIAPEVYRELRDYIHERNILQKQKSDTLNRIQKLLTRMNIKVQHLISDIEGVSGMRLLRGIAEGINDAEELLSLIDVQRLKADKTDLVKSLKGNYKIQYISILKRTLKAYDFFKAQMREYEELIEEVLIKMLPKDVQHGDPKIRVKTSHVRKNQYSINVKDYLQHITGIDLTRIDGMDEISILEIISVTGLDMKKWPTENHFTSWLNLSPRPKKSGGKIIGYQQRFTKNQATQCFRLAAQTMWKNKGSLGQLYRRLAYQKGSKKAIKALARKLAVIFYCMLKNKTEYEVDKLQIDTEKHKQIKIARLKKEAAKYGLIFKESAA

SEQ ID NO: 78248 - protein, 386 aa, unidentified
MARTVINPPAAKHDETVRCLFAMDLSKDSWVVAYSTPLSDKISHYTLKPCDWKGLLELIDRVRGRVVRELQRPVEVISCYEAGYDGFWLHRLLQAHGVHSHVIDPASLQVNRRARRAKTDRIDAEQQLRSLLAYLRGEPKVWSVVQVPSVEQEDARRQHRERDRLIEERVSHVNRITGLCAIHGIYDYHPLRSDRLQQLERLRTVQGQPLPPALKAELRRELLRLELLLKMIAGVEKERDAIVTDTASAHPNAAKIKELYRLRAIGPEFATVLVGEVYYRSFNNGRQVGSYIGMPPSPFSSGSTVREQGISKAGNPKARKTMTELAWLWLRYQPDSALSIWFRQRVGNTKGRIKRIMIVAMARKLAVALWRYLETGMIPQGAVLKG

SEQ ID NO: 78249 - protein, 342 aa, unidentified
MSEVSIIGVDIAKRVFQLHGAGADGSVVFRKKLTRAQFLSFLAEQPRCIVAMEACATAHDWGRQIERIGHTVLLLPPIYVNPFVKRQKNDAADAEAIAEAASRPAMRFVAVKTEEQQARAMLFRTREMFVRQRTQLINALRGHLAEHGVVAPRGRVYVKKLVDALADKNITLPEMVRQLGWIYVEQIGALDDRIAELDRSMHAEANQAEMTRRLQTMPGVGPITAIAVETFGPPMESFRRGRDFSAWLGLVPRQHSTGGKQRLGKTSKMGQRDIRRLLIIGAMSVIRAASRHGAPEGSWLERMLAKKPHMLVAIALANKMARGLWAMLIKRENYRNPVAATV

SEQ ID NO: 78250 - protein, 320 aa, unidentified
MSRKRAKLFIGIDVSKQLLEVAAHQHDYQFRCANKASAFGELIAELITLRPALIVLEATGGLERTVAAALRSAGLPVAIVNPRQVRDFARALGQLAKTDRLDAGVLAAFGAAIKPPPRPLKASDELELDALTGRREQLTGMLADEKNRRASAASDSVRDEIQEHIDWLTERIAELDQQLKKLLQASARWQIKDQILQSTPGIGPVVSYSLLAQLPELGNLNRQQISKLVGVAPLNRDSGQQRGSRHIYGGRAQVRRVLYMAALSASRCNPVIKVFYERLRARQKPFKVAITACMRKLLTIINFMVRDGSQWKSAPSNISA

SEQ ID NO: 78251 - protein, 281 aa, unidentified
MDGSKEHPQTTAGLDLGDKYSYLCLIDTESGEVIEEGRLRTSPEAFLRRFASERPMRIAIEAGTHSPWASRVLEELGHEVLVANARKTRLIYANKRKTDEVDAENLARLARLDPKLLYPVAHRGEDSQAHMAIIHSRQALVDCRTQLVNHVRGAVKSFGARLPKCPTRSFHKRAPEHIPEALLPALGPILEQIGSLTERIRDYDRQLETVSKENYAHETDLLRQVEGIGPLTALTFVLTLEDPHRFERSRSVGAYLGLVPASDHSREIEILRDASPRKATR

SEQ ID NO: 78252 - protein, 355 aa, unidentified
MNDAKYIGLDVHQATISATVLDSTGKLVMESILETKAATILQFIHGLRGSLHVTFEEGTCAAWLHDLLKPHVTRVLVCDPRRNALLKVGNKSDRIDSRKLAELLRSNLLRPVYHEHTGVRTVKELARSYLTITKDLTRVMTRLKAIYRSWAIPCACQQVYAPRYRAEWLAKISEAGVRRRAELYYQQLDALRPLHQEARRELLAEGRKHKAMNLLRQIPSIGPIRAVLLLALIQTPHRFRTKRQLWSYCGLALETRNSGEYRMVHGQLKRSKKVVAIRGLSKNHNHDLKNIFKGAAIRAAAVAGPFQEFYAALLAKGMKPPMVRLTLARKIAAITLLVWKKGVLYDAEHLKQQAA

SEQ ID NO: 78253 - protein, 351 aa, unidentified
MHHDIILSTDYHDQNCVIRWFDEANGSERVQSVPTAPESLLSVVARAEAVAKPRGGRVVWIQESTTGWARVQDLLGRRVVFQLANVVQMPLPPKARRKKTDKVDTARLQREYRQGQLPLAYRPPAWWRQVRRLVALRENLVNRRTALRNWLNRHLAHETWAERRNLWSQRGRRRLQALAEQMPRWDRLVWQTKLAELDQLGQHLQQVEAALFGVYRQWPRARRLDKIAGIGVVAAVSIAARIGPVARFARAEQLIAYAGLAPGVQQSDQTRRDGRIGGGGTDRHLRHYLIEATVWARHIPRYRAAYERTSQRRGPKIGRLVVARLVLRSIWRMLRRGEEFEPTATKRKETK

SEQ ID NO: 78254 - protein, 339 aa, unidentified
MMYGGIDLHSNNSVIAIIDDADRVVAQKRLPNDITKIVDFLARWQDELAGVVVESTYNWYWLVDGLQDAGFHLHLANTAAIKQYEELKHSDDETDAQHLAHLLRLGILPTGTILPREQRAVRDLARKRMQLVHSCTTHVLAVENIMARQLGGRMTSNQIKRLTADAVDSLPLAADVGLAVKANVAVIATLQAQIEVLEKRLQERVKPRPQYGLLTSVPGIGRTLATVILLETGPIDRFADVGNFASYARCVDSVHTSNRKKKGEGNVKNGNKYLAWAFVEAANFAVRFCPEAKRFHARKKAKTNNIVATKALAHKLARACYYILKESKPFDVTRGLVSP

SEQ ID NO: 78255 - protein, 323 aa, unidentified
MQGKALPERSAETRVYVGIDVCKDWLDVYLHPIGQKFRVANAPEGLKSLKRQIAGTPVALIVMEATAKYHRLPHRSLHAAGFAVAIVNPLRSRLFAEAIGQLAKTDRLDARVLAIMAESLEPKAAAPAPEDLEALQEIVRARSAAIADQTALSNQRLASRTAFLKAELGRRLKTLAASIARLDVEIDRRLRADPALRRRYDILISIPGVGPVAAIAMIAGLPELGACSGKAASSLAGLAPLACESGEKAGERRIKGGRGHVRKGLYFAALTAARFNPQLAAVYKRLRAAGKKPKVAITAIMRKLVVLANVLIRQDRPWTPIHA

SEQ ID NO: 78256 - protein, 364 aa, unidentified
MDVHLRSTTVCALDAETGEAVTRRFRGNPWGEVAEWMSGFPGPSLAAYESGYLGFAPQRELSGLGVDCVVAAVSKVPRSAADFSSKNDRNDAARMAKAILSHDITPVWVPSPEIEGLRDLAGAHDAATARLAAAKQRLLAFLARRGYAYGGTTPAGNPRRYWTYDFLRWLDKVRPADDGGIRALAALRNEVEAAAETRDDLLAEYRAAVAAGPLSAEVEALQSIKGCGFALAAAFASEVGDFSRFRSGRQVTAYFGLAPKQRSGADSVRLGGISGAGNALVRRLAVEGSWSYVQASHQPKLMPKGSGVPLGVRIHGRKGSERLLRRREEMLARGMPQAKANAATAAELVRWLWALGAMCREATE

SEQ ID NO: 78257 - protein, 343 aa, unidentified
MTKNTMIGVDLAKNVFQLHAASMTGQLQYRKKLSRQSFSKFLAEQPPAVLVMEACGSAHYWAREMIRLGHEVKLIAPHYVKPFVKRQKNDAADAEAIVTAAQRPEMRFVEPKTAEQQGRAILFRARERLVRQRTELVNALRACLYEYGHAVPQGIHQIKRIAEILDAHSSDLPDLMREECAELLDQIAEQTTRINARTAKIKTLAGEADTARRLQTIPGVGPLTALAVEAFAPPMENFRCGRDFAAWLGLVPRQFSSGGKERLGRISKAGQSDIRKLLIIGAMSRLNWLGRKSIPESSWLARMVARKPRMLVAIALANKMARTIWALMTKNEDYRVPAQAVAA

SEQ ID NO: 78258 - protein, 427 aa, unidentified
MGRLKIVYPVCCGIDVHRDFLIACIASTDKTGITSYEKRRFSTYTGQLRELGEWLIKNNCEDVCMESTGKYWFPVHNILVPMGLNVVVSHPKFVKAIKGKKTDKKDAQWIADLFKHDLVRGSFIPPEDIRQLRDLCRYWCKLTYCMSGEKNRVQNCLTVSNFKLDNVFSDVFGKSATAIMDQLLLRGGESFDVTPYIHKRCKTPIDVIQTAVDGAFSAEQAAKLQLIRKHIDNIESLKSALEEWILKLAAPYQKQIDLILTVPGIKEPMTAIRIIAEIGVDMSVFESAKHLASWAGLAPQNNESAGKKKTTRIGKSGAYIKPLLVQIALAASKSKVNPEVSGKFALIKKRRGGKKARIAIARRLLVAIYNMLVKNEAYNGALYQKSESVPKKRELTPKQAFDILRKQGFLIKDVDPPIPLPQSENVA

SEQ ID NO: 78259 - protein, 344 aa, unidentified
MSEVTTIGLDIAKHVFHAHGADERGAMVFSRKLTRGKLLDFFAKHPRCVVALEACGGAHHWARELQAMGHEVRLIPPAYVKPFVKRHKNDAVDAEAICEAAQRPSMRFVAVKSEEQQAAALVFRTRDLVVKQRTQIANAIRGHLAEYGWVAPKGAAHLAVLADLLEDGEIGETLPEAARPMFAMMVDMLAVLDRRIAELDKEITRRAREDEVARRLMTIPGIGPITATAIAAIAPPAETFAKGRDFAAWLGLVPKQASTGGKQKLGAISRMGERTLRRLLIIGASAVVLQVSKRGAPAGSWLEGMLARKPRMLVTVALANKIARTVWALLVKQEDYRAPVAVAA

SEQ ID NO: 78260 - protein, 313 aa, unidentified
MKEEKTFIGIDVSKEKLDVGVRPQVDFMTFANTEDGISLLTDFVQSKQPELIVLEATGGLEMAALRSLVVAKLPAVCVNPRQVRDFAKAMGVLAKTDKIDAHVIARFADSVRPEIRPLKTEETEILDAFNTRRSQIIIMLTAEKNRLTTASKWTKKDIERSIKGLEKALAKINREVENLIKKSPHWRHMDKILQSVPSVGPVMSLTILADLPEIGTMNRRQIAALVGVAPLNRDSGKYKGRRAIWGGRARIRSVLYMCVISGICHNPKIKAFYNRLISSGKKHKVAITACMRKLMIILNTMIKNGTCWNESGC

SEQ ID NO: 78261 - protein, 446 aa, unidentified
MAQRTRMKLDIANPNAAGVDVGSASHFVAVPPDRDDEAVREFTSFTEDLERLADWLVGCGIDTVAMESTGVYWIPLFELLEARGLTVYLVNARHVKNVSGRKSDVLDCQWLQQLMSYGLLSGAFRPKNEICALRAIMRQRTMLLSYQGQHIQHMQKALSQMNIQLANVISDVVGETGQRILRAIIAGERDPLKLAELKHGRIQASTEQIAMSLRGNWREEHLFALTQAVELFDAYSQALQRCDVRLESMLGALSRTKDEPGPTKRRRISKVKNAPKFDVRTYLFRICGVDLTAIDGIDTTTALKIIAEIGPDLSRFKSAKHFASWLGLCPGTKISGGKLLSGATKRTANRVAQALKMAAISLRASQSALGAYFRRMCARLDKGKAVTAVAHKLARLIYTMLTKGAAYVDQGQQHYEERYRQRVLFHLKKKAAAMGLELVPVQPQQT

SEQ ID NO: 78262 - protein, 318 aa, unidentified
MVNSIIVGVDIAKAKFDAALPGALGKGLKGQTFENNPQGFAQFRAWVGGPARVGIEATGPYWMSLAEDLHRAGWTVFLLNPAFVKAHGDSAGRRHKTDRADAALIADYVRTHNCEPWQPLPAELAELRELMRLYADVTEAAAALGQRQEGLRTPGARALQHEVAGALKEFARKILKAASQHARAHESLSQPVERLKTIKGVGEVTALILAAELPRQKSARSVANWAGVIPRHFESGESVRKSPKISKKGSDYVRSILYWPAITALRCNPAMQAFAERLKASGHTKMQIVGAAMHKLLRWAVGVVKSNTEFNALLHTPS

SEQ ID NO: 78263 - protein, 501 aa, unidentified
MKSASNTLPEEPVNAVTGGIDWARDDHALSVVDARGREIHRCTVEHSITGLREMLAVLARTGAGEVAIERPDGPVIDTLLEAGITVVVISPNQVKNLRGRYGSAGNKDDRFDAYVLADTLRTDRARLRPLTPDSAATVSLRRACRARKDLVTHRVGLANQLRAHLRNVLPGAVGLFAEIDSPISLAFLSRFDTQDRADWLTPTRLGKWLASAGYSGRTDPTVLHTRLTAAPRGALGDEGTANAPITRALVGVLTSLLEQIKTLAAQIDTQLTAHADAHIFTSLPRSGRVRAARLLAEIGDCRARFPTPESLACLAGAAPSTRQSGKLRAVTFRWACDKQLRDAVTDFAGDTRHANPWAADLYQRARTRGHDHPHAVRILARAWLFVIWHCWQDNTATTPPATRPCNASSPNKQRSKTGQLDTGLLTAVPPARSRRPRRPNRAFPPGRRGRCRRAPRRRSGCAASCLAAPRLSLGAPTSGCSRAPTVSPTALDHPRLFPRPG

SEQ ID NO: 78264 - protein, 391 aa, unidentified
MVCVGIDVAKDKHDCCILDSDGTIRADCITIPNNMDGFKQLLQTIRDCTKKSDKIKVGLEATGHYSYNILGFLLDNDLAVYVMNPLHTNLYRKSLSLRKTKTDRVDARTIATMLLSDVDLKSYTDIAYHNEELKSLTRYRFDKVQERAKLKQSVSRLATILFPELEGLVSSIHGTSIYALLSEYPGAKQISEVHLTKLTNLLTTASKGRYGKEKAIQIREEARASIGSVMPAKSLELKHTVKLIQELASEINEIEDSIQKIIDELNPPILSIPGMGVNSAAVILAEIGDFSNFSSPDKILAYAGCSPSTYQSGKLTNCYAHMEKRGSRYLRYALYNATKYVCHWNPVFAEYLAKKRAEGKHYNVALSHATKKLVRLIYALQKSGKAYLVAA

SEQ ID NO: 78265 - protein, 412 aa, unidentified
MNLVYARCAGLDVHKKTVVAGVRVPGPEPGERRGEVQTFPTTMAGLTALADWLTAHEVTHVAMESTGVYWRPVYAVLEGLMTVLLVNARHVKMVPGRKTDVRDCEWLAQLLECGLLRSSFVPPRPIRDLRDLTRLRKTLIRERGHHVNRIEKTLELANIKLGSVVTDLMGNTGRAILEALSLGIDDPDKLAACAQGLLRKKQAALREALVGRLTPHYAFLLQQHLSLIDALDAHIATLDARIAEAMAPFADAAALAQTMPGVATRAAQAILAETGVDMAAFPTADNFASWARLCPGNNESAGKRRPATTGQGATWLRATLQEVAWAAAKTKKSYYRALFHRLKARSDSKTAIVAVQHAMLVALWHMLKHRVPHQDLGADYFTRRDTERTRRHHVRRLEKLGYQVLLVKEEAA

SEQ ID NO: 78266 - protein, 391 aa, unidentified
MFYIGIDIAKKNHEASIIDSSGKSLSKSISFPNSTKGIEKFNNFIAEFGVTTNNCIIGMEATGHYWISLFSYIVDLGFTCYVINPIQSDAFRKMYVRQTKNDSVDSFIIAQIMRFGEFSISNFSDENTFALRNLTRYRFALVDECSDWKRKLVAILDQVFPEYSSLFSNIYGVASKELLSKYPLPEDMLSIPAEELGNLLYECSKGRLGINKAEEIQSRARETFGIKFAKRSFSFQIKQIISQISFLEEQLKEIEIEISCLLEDICPVITTITGIGSVLGASIVSEIGNISRFERANQLVAYAGLDTRIKQSGDFSATNTKLSKRGSPYLRRSIWLAATVAAFKDPALSIYYQGLRARGKAHGTAIGAVARKLTNIIFAVLRDQKPYTPNI

SEQ ID NO: 78267 - protein, 409 aa, unidentified
MSKRSIHVQATMYCGIDVSAKSLAVAIQRVHQPVEERSFPNNSNGHRALIVWLRKAKSPVRVSLEATGIYSLDLAFALDAAEEIEVAVLNPKVANRFAQTIRRSKTDAADAEVLAEYAHRMPFTAWIAPSASSMRLRSIVRHVETLSVQSAQNQNRLHAAHGSTSTPRMRCLGFKALSGVSGAPYPQTSAEAMTLIREDDLLRKRYELLISIPDIAQVSAMQLLAELSTLPSDLTVRESVAHSGLDPAHEISGSSVRKASRISRVGNRHLRRALYMPALVASRCDPHAKAFFENLLARKKARLQALIAVARKLLHAIYGIFRSGLKFAATIRRCSGKGIARSQVQTTKYRSIPSSAPAEIDTGVTKGPIGGRCRANLDIEISGFTAKRQKDAATRARGRLGTIEEICLR

SEQ ID NO: 78268 - protein, 391 aa, unidentified
MSMYFIGIDISKYKHDCCIISAADQKVVSKFTFKNDKAGFEELLTVLNSLSNPEDIKIGFESTAHYALNLELFLENAHHSFMEVNPVLIKEYKKSTTLRRTKTDSVDCESIARWLMTVEYKPHSKGFYHSYSLKSLTRLRDRLIRQRSFYLVKITNVLDHTFPEFKPFFNERLSKTALYLLENYGSAEKMARMNSASYDKLRCISRGKFSIQQFLRLKELAANTVGVNNSIFDIELISLLTLYKSLVKEIDTLESEIHKLIEEVHPHYLTIPGIGPISAAVIYAEYGDISNFSNPGQMLAFAGIEPGINDSGTESHGGRMVKHGSSQLRYVLLNACLPLIRFDLTFATYYAKKRAEGKKHRVAITHVAKKLIRVIYALERQDIDFNTQKLR

SEQ ID NO: 78269 - protein, 425 aa, unidentified
MRQVTDEVTVEAAELVECVAGLDVGKASVMACVRVPREGRPGWRRQQVRSFGTRTVELLELRDWLAAEGVTRCVMEATSAYWKPVFYLLEDVIAECWLVNARDARNVPGRPKTDKLDAVWLCKLAERGLVRPSFIPPPWQRELRDLCRYRRVLVQERTREKQRAEKLLEHTQLKLSSVVSDLFGVSGRAMLDALVAGERDPDVLAGLARGSLRGKIGVLREALTGHFRDHHGYLLKMMLDRVDALTGQIEELAGRIDQALVPFAVQVAQLDEIPGVGKNAAAEIIAEIGVEMTRFPTPGHLVSWAKFAPRARESAGRTKPGSTGRGNPWLGGAVGEAVMAASRTKTFLGARYHRIARRRGKQRALVAAGNTLLTIAWHLLSDPALRFTDLGPDWHDKISPIRRKRQLIAELERLSGMKVSFQEAA

SEQ ID NO: 78270 - protein, 396 aa, unidentified
MRRRAYGAARVNDVDVAKVVHGPDGLAVVVGVDVGKYKLLAVCRWADGRFERPWRIDNPGEIVELVALLKRLGAGRKLLVAMESSGTYGDAVRQALQDADIEVHRVSTKASHDYAEVFDGVPSQHDGKDAAVVAELAALGKSTWPEATRVLKLSSVTLLRVLWHYGSPQAVAADRAAAAQLARWGGRFLDTEKIKQLLAEARVSRGVRPGEWETRRIQDFAQQALQARAQGQRGQRRLRVLARGHTVLEAQGKVVGVPTACVLWVNTGDPRKFYAAAAYRKAIGLNLVERSSGTYQGQLHISKRGSARSRQWLYFAVLRLVQRAGVRSWYQAKKARDPDAAKSVLVAVMRKLALALYHVAVHDKEFDPRRLFARIMGSHTKTAPAFSPEKRVSVEG

SEQ ID NO: 78271 - protein, 334 aa, unidentified
METVHFLGIDISKKKFDAALTANGKDYYEVQVENCAKSIQSFFKILKKELSSLENVIVCLEHTGIYCQPLLDFLIKNQIRVCVEPALQIKQSQGMTRGKNDKVDAKRIALYAFKNLEELVFWKPQRESIQRLKSLLVLRERLVKMKIQLEVPINESQEFIDPSIQKDAIKHSSKTIKALRSDIANVEASIGKLVGEDQQISEQFKLVTSVPGIGKITALNVIISTAEFTRIREAKKFACYAGVAPFEHTSGSSIRGKTRVSKMANMTLKRLLHLAAMSAIQCCEELKAFYKRKVEAGKNKMSVINAVRNKLISRIFSCIKNKRIYQKNYSYALV

SEQ ID NO: 78272 - protein, 402 aa, unidentified
MYFIGIDWADEKHTIVILSESNKEVSAFEIPHSFDGIEHLKKRLKDLSIPVSNALCFIETSRGLLVSSLIQYGFTVYPLNPKVVDKHRKPSGAKTDFIDARLLADLGRKDHLSLRPLVLSDDLLQELRLLTRDQEGLIHSQTRLTNQLIASLKEYYPAALKFFTRIGQLCTLKFLQTFPSIDSLRKASREDVVIVLKTLRHKDPETKANEILEIISQPQIPVSFAVSKAKSRFTKVLVKQFIVLIEEIALYDKEILSLFKQHKDYEIFKSLPGAGKRLAPKLLAEWGDERTQYQSVASVQALAGTSPVAFQSGKYNKARRRTSCVKPFRNALHEFAWCSVRWEPWAKEYYYRKRKEGKSHHVAIRSLANNWVRIIFAMWKTEENYEPSVFLHAQKRHSQKVA

SEQ ID NO: 78273 - protein, 348 aa, unidentified
MEAYDGPQIVGMDLHRRRSVLVRMAEDGHKLSTVRIANSPARLAAEIKRAGLHPKVVLEACYGWYWAADTLAAAGAEVHLAHPAGVKAFSHRRVKNDELDARDLADLLRMGRLAEAWIAPAEIRELREITRYRGKLVQLRTSCKDQVHGVLAKLGIEVTCSDIFGAWGTQWLDELPLPQPYSWKVASLRQLTGWLSAEITVLEQVTADLLAGHDAYRAVQALPGIGPVPVAVDGIGDITRFRHPARLCSWAGLTPRHYESDTKVVRGRITKQGSRPLRWALIEAVQRTPAGTPIHQARDAIIARRGPQARNIAKVAAARKLLTCVFYAMRDGHVRALDTPGAAAPETA

SEQ ID NO: 78274 - protein, 431 aa, unidentified
MLKINPLSTLYVGIDVSSKSNYVCALDFFKNKYINSSFANNQPGAEELALKILECLNQHPDLTMVVAALESTSVYSIHIANYLSSCEELMRFKPYVFVLNPKCTANYKKSYIGLGKSDPIDAFVIADYARAGNIESEPWRGSQFLALKRLTRHRLHLVECMTREKTYLISNLYLKFSELQMLEGDDQPFCDIYGATSSSVLMEYLSPEEILASSEEDLIAFLAEKSRNRIKDISKTADLLKKAARDSYRLDKALYEPLNVSIASSFNCIETFKREIKGIDNAIEKEIKGLNPNAFIILQSIDGIGPVFAGGIIAEIGDITAFHSSDALAKYAGLTWKSNQSGDFDGEDTPMIKAGNRYLRYYLGEAANSMRKHNVEYGAYYRKKYNEVPKHQHKRALALTSRKFVRLVYGLLARNQLYSGVSLDTSIKDSN

SEQ ID NO: 78275 - protein, 347 aa, unidentified
MQIAVLGIDLGKNSCSVVGLDTAGQVILRRRLHRDSVAKLASRLPACVVAMEACCGAHHLGHVLQAWGHEIRLMSPEYVQPYVKAQKNDERDAEAIAEAATRPTMRFVELKNQEQLDMQSLHRARARLVNERTALINQLRAMLLERGITVAQGRRRLEQYLLALDSDDATPLPLSARMRLLLDDMRAQWRELDRRITAFDGEFVAAARSEEAAKRLSTIPGIGALNATALVAAVGDARSFARARDLAAWLGLVPRQVTTGGRPKLLGITKRGNRYLRTLLIHGARAALPSLATMEGRLGKWLRALSARAHRNTVVVALASKLARIAWAVLRSKIPYDVSIGEQPATA

SEQ ID NO: 78276 - protein, 339 aa, unidentified
MTIKSKNIVQESKPPFAGIDVGAEELILLIRKNGTSCKTQKFANAPADRARLVKKLANLPGIIVCLEATGVYHFDLSVALHDAGVALMVVNPKSSHNFAKVLMKNSKTDAVDAETLAQYAERMDFVAWARPSDEKIALRSFARRIDALTRQKAAAKNNLHALSQSQETPKSVLRDVKLAISQLERRINRLSGDALALIVEHPELERVFELLVGVKGIAQTSAIALMGELLLLPKGLSHREWVKFAGLDPRAFDSGKSVHKKTRISKAGNRHIRSALYMPALSAKQHDPHVKAYFQHLVDNGKLPLQALCAVMRKLLHAIHGMLKHDKPFDNTRFYAIPA

SEQ ID NO: 78277 - protein, 386 aa, unidentified
MEHDSTLYVGLDVHKDSITVVYAVGMSDVELFGKVGTMQIDLDRLCKRLQQKARHICFVYEAGPCGYGLYRRLVDKGFDCMVCAPSLIPRKPGDRVKTDRRDMAISQTDRRDAIKLVRSLRAGDLSAVHVPTVEDEAFRDLARAWSAAREDLKAARCRLKSFLLAHGIHYLGRPNWGPTHRRWLSTFSFDSAWQQLAFDEHRRSIEDRLAQCERLELALREAVISWRFYPVVLALQAMRGINFTSAIGLVSELGDLTRFEHPRQLMAWIGVTPSEHSSGGKRRQGRITKTGNSYARKLLVESAWSYRHPARVSIDIQRRHEGLPKPIIDRAWDAQLRLCRRYRKLVARGKTAHVAIIAVARELAAFIWDVGRLGMTLAAPQSEQAA

SEQ ID NO: 78278 - protein, 364 aa, unidentified
MVNHIFVGIDLGDKNSVARIAMDQNRGQRFGFVNDRRGRERLFERVKREAEQGGQAKIVMAYEASSCGFILRDEAEARGIQCAVLAPTKMEKSVEQRKHKNDDRDAEDVLEKLRAHVLAGNRLPQVWIPDAQIRDDRELVRTRGELVEKQTRLKAQIQMLLKRYGLEKPSDCKSGWTVRHRRWLEALTEWEGLGSGARAALSSLLRQLGFIEAEIGRIEKPIQDLAAEARHQPIIEELTQEPGVGLLTAMVYRTEIGYAGRFGRGRQVGKFVGLTPTSHESGEQTDRKGHISRQGPARLRKMLCQASWVHVLHDPSAKRVYQQLVSRNPKKKKIAIVAVMRRLAVRLWHRMRRAERWMQQMEAQ

SEQ ID NO: 78279 - protein, 357 aa, unidentified
MKIVGCDLHARQQTIAMVDAESGEFTEKTLDHEGNAVREFYASLKGPVVVGIEATGSMQWFLELLDELGIESRVGDPAKIRAAETRKQKHDRRDAGLILDLLLRDRFPTIWMPSTEQRDLRTLLRDRHQWVQMRSRLQHTLQAIALNHALRKGSGLWSHAGQTVLQALPLPPHTSDRGVALLSLYVQLEKRIRKLDQEVEHQVQQRVQARRLMRHPGVGPVTALATEVFLGDPDRFATGNQVASYIGMIPSEHSSGKRQRLGKMSKQGNSLLRYLWTEAVMHAAQKDPELKRFYRRKLIQKGMGKARIAAARKLGIRLWIMMRDQIDYQEFCRRGKLRQSGEAHAGMPDFNSGPALQ

SEQ ID NO: 78280 - protein, 320 aa, unidentified
MQTPTEVLNIGADVAKEEIVVACSQGSFPVRKLANQRSALLAFLKDLPAGSRIGMESTGAYHELLADAAHKLGFVVFVLNPKDARHYAKAVGLRGKTDRVDAELIARMVAHEHTKLHPWIAPTAEQREMARLIKRRAKLSSLRQALAMSLKGLEGFATDLKALRARFDQVLVRIDQRVKALVEASPDRKQHVTHLRTICGVGPVVSAALVNTLERVPLKSADAFVAFTGLDPRPDDSGQHRGKRRLSKRGPAELRRLLYVAAMSAKKKQAWKPLFEHYRAKGLSSTAALVIMARRIARTAWSIYTYKTDFDPARLTKSLT

SEQ ID NO: 78281 - protein, 313 aa, unidentified
MYYIRIDVSKKDLSVFNGKKDLKFINQEGLRPFKKYLKKKYKSFSDLVIIFEPTGIYSFNLKEFCAENSIKAYIVNPKRSHSFARSLGIRPKDDKIDARILYQFHRHIETKDIKVPQIDQQAKALASYLVSYEFALKQRISLSNHLESLRDKRLIALMKKDLKRAKKLEDKLFNDILECVSKNQNLKEDYQRLLTISGVGDKTAIALLTLFKTYQGTNRAQITALVGFDSTKRESGSSVRGKAKISKNGKGIYRKVSYLPAICATVHNQKIRIFYQRLLANHKPKKLAIIASMRKILLIAHAMYRDKTEYVAA

SEQ ID NO: 78282 - protein, 341 aa, unidentified
MEKFIRTAVDLGKNYFQVHGLESEGGRSISRKVKRSKMHEVYSQIEPCRIGMEACGSAHYWARQLTAMGHEVVLIPPAYIKPYVKRGKNDAVDAAAICEAMSRPDMHFVPIKSADQQAVLMLHKTRELLVKQRTMAVNALRGHLAEFGIVAAKGIGRVDELLALAKEDAALPPIAGAAVACMAQHLEGLDLSIETVDEEIVRAHRQNPTSRLLDEIPGVGTLIASVIAASVPDPGVFKSGRDFAAWLGLTPRQNSSGGKEKLGAITKQGNRYIRKMLVTGATSVLRVAGKRKGVLADWINALRARKPERLVAVALANKLARICWAIMITGEGFRTDFYVKA

SEQ ID NO: 78283 - protein, 331 aa, unidentified
MKNFFIGADVSKKTLDCVLYDTNKEKMRASYIKINNNKIGLENLIKWMKERKVVKNQALVCMEYTGKYSFDFAELLERKKIDFVLVPALKIKGSFAGARGKNDKMDAERIATYAYRYRDELVPTSLKDDKIVRLRDLMNDRKLAVKHAAAYKTIMTEYKEKKSALRYKRAERIVAEYKKQIAAIEKEIKELINSDEKMKKNYELLTSIPGISLVNAINLIVFTGNFEFFADARKFASYSGVAPFEYSSGTSVNKGTHVSKMANKMLKADLTQAAKVAINFDPWLKDYYERKRKEGKSYGCVLNAVKFKLIERVFAIVKRGTPYVNTMKHSA

SEQ ID NO: 78284 - protein, 416 aa, unidentified
MDSGCDSQIGGMQMNSVGIDISKGRSTIAVMRPFGEVVISPFEVRHTDSELSELARQLKSLNGETRVVMEATGNYHAPVAKLLHDAGLYVSVINAKLVHGYGNNDLRRVKTDKKDSVKLANYGLDRWLTLPRYVPEEDTRLLLKNCYRQYRQYSKVQTVLKNNLISLLDMVFPNVNRLFSSPIRGDGSEKWVDFVAEFWHCRCVSEKSQKAFTNKYQRWCRKHGYNFSEAKAHTIHAEACGHIDVIPKSETTKLLVEQAVAQLRATSAALAALKHEMQALASILPEYPVVMDMFGVGPTLGPQLMAEIGDVRRFYSKKALVAYAGLDAPPNDSGDVTGRHKSMSKVGASSLRRTLFLVMSVYLQNAPLDESVYQFMDKKRAEGKPYRVYMMASANKFLRIYYATVKAYLESLEHTA

SEQ ID NO: 78285 - protein, 307 aa, unidentified
MFIGIDVAKDRLDVHVRPGGEAFAVARDGEGVAALVERLQGVGPGLIVLEATGGFEQVVAAGLAGAGLPVVVVNPRQIRDFARALGRLAKTDRIDAEVIALFAERVRPELRPLPDDQARELDELVTRRRQVIEMMVAEGNRARRLTSRRLQKRIAHHQAVLQKELTEIERELDDTIRKSPIWRETEDLLKSVPGIGNATARTLIAELPELGSLDRRKIAALVGLAPFNRDSGTLRGRRMIAGGRAPVRAVLYMAALVASRRNPLIRAFYQRLLAAGKPKKLALTACMRKLLTILNAIVRDRTPWQTA

SEQ ID NO: 78286 - protein, 438 aa, unidentified
MSRRYTNHLDPQLPDGDQLWDGYDPAGEPLEDRLYLPCGVDPHGDICGVCFVHPYPQGKEVLCQKIIQNNDLKDMLWLIATGDGLAARYGAVPVYVFESTSIFWRAQRNFLHRAGYATATVCGRQTNHARGTVTRKTHNDLKDAYNIAKVFKQGESHASRILPEPLASLREYCRLHEFLTSYSVAIQNRMHCIRYAVFPEFDGLFSKSLGATSLALMQHELLLPYHLLHADLQDLTDLIRTASHGKLGREKAEALRLAAQATFPPPYASAGQSFSLSLLAQAYQHIHTQLLPPLHQRILAILSAHNFPFHYHLDEIPFFGPIVIGTFLSELGLPAWFHSVDSVVAWFGFDPAVSESANKPTGLTHLTKRGTKYGRRMMWLVANNWCKYNPQGRKLFQKERQQHKRSFDAAVCIVAAKLVRIAFAMLRDNAHFDITQAF

SEQ ID NO: 78287 - protein, 412 aa, unidentified
MELLTERCAGLDVHKASVTATVRVPDQAGGRLQQTRSFRATTAGLVLLGDWLASLGVTVVGMESTGVYWRPVYYLLEDDFQCWLLNAAHLRNVPGRKTDVADSVWICQLVEHGLVRPSFVPPKPIRELRDLTRYRKALIQERTREAQRLQKVLEDAGIKLGTVASDVLGVSGRAMLEGLVSGTHDPAVLAELAKGRLRAKLPALREALEGRFRAHHALLLGELLAHLDYLDEAVERLSTQVARVVAPFSPLLALLITIPGVSQRTAEVILAEIGTDMGQFPSAGHLASWAGICPGNNESAGKHRAGTTRKGSRWLRVALIEAANAAARGKGTYLASQYARLKGRRGHKKAIVAVAHSILVIAWHLLSTGQPYSDLGADWFMQRHSSEAYRNRLVRQLERMGHKVTLEPADAA

SEQ ID NO: 78288 - protein, 394 aa, unidentified
MKLVGIDVGKNSHHFCVMDKETGEFNVTPSSFLNNKEGFDFLINSLKPYSKKSILIGMEDTGHYHVALLKFLLSNGYTVALINPKTTDLTRKMEGGITKNDKLDTITICDVLDTPERKKQYRITKVDRFDLYEQRQLTRHHHNLKEELNIYCNRLQKSIDLVFPEFNTLFSSKYSIVYMNLLKTFGSAEAIASTDIRTIRKCFEVKGRGGRISLTPEKLKECAKNSIGISSEVETIQIKHLVSQITLIKEQIAEIDKKIEEFSITNNSPILSIPGISHFSGTSILAELGDIGNYSKPSQIIKFAGVAPYHYESSQYNARHTGITKKGSKYLRKTLYQIILTVINNNPVFKKYYLLKISQGKGHRCAQGHCIRKLLRIIYHLLETGQSFDPALLR

SEQ ID NO: 78289 - protein, 480 aa, unidentified
MSVKCNVPSGKNQAAKYTKSLEVVNPRCAGLDIHKEKIWACTSPFRDGVVPEVSTFGTDTGSLEKLAAHLQERGITTVAMESTGVYWLPAFLMLRQANLNPILVNPCDIKNIKGRPKSDRADCVWICRLHSYGFLRASFVPPDVVLDLRSFYYAHEKLTVDSASMLQRMNDELVKMNIRVDLILTDLSGASGIRLIEAILGGECSPERLYQLLDEQIMKKGKDVILPYLHGDYREGNLAILRTWYDLYLGIRKEISRINQKIYELLQSFPKKADAKDLPRVKKNYREDKLDFPYELRPIFFEIYGVDLTQLPGIGAGVLLALVCMVGTDLSPWPSAKHFVSWLGLAPINKESAGYRKSGSTQRINNLLSNAFKMAAMAAKRTTTDIGRTARHLAGRILPKKAKVATARKLAELVYNILQNGMELKVKTEEEYEQRRKQRDIQFFVKGLFKYIINGQLLPEVEKVYQEHCQGIKAASLTNA

SEQ ID NO: 78290 - protein, 427 aa, unidentified
MKNRNIKLEAITPNTLVVGVDIAKETQWARFVNYRGLETGTTLKFHNNKYGFDNILASVKSICKNKGFDNVIVGMEPTGHYWKPLANYLIMRGIKVVMVNPYHTKRAKELDDNSQTKNDKKDALTIAKLVRDGRYYEVYMPQDIYAELRVLTNSRTRIVKRRNAIKNTIRAVIDEYFPEIVTVFKEPLKGKTSMQILKSCPFPALILELGVGGVLAEIRKAVKKSVGRKKAEQLVETAKTSIGATYGIASAKLRLELMIEELELLNKQLIQIEGAMDQALTATGYKEIILSVPGIGVVTAASFLGEIGDPMRFESPRQISKMAGYNLIEDSSGKSKSGTIISKRGRKNLRNILYQIAIPMVLVNPEMKALYNYLKTRQNNPLKKKQALVVISKKVITIIYNLVKKQTEYNAELALGEFRKNQIKLAA

SEQ ID NO: 78291 - protein, 343 aa, unidentified
MQVVRIGLDLAKYVFEVHGVDNHGKVVVRKRLRRDAVVRFFANLPACLVGMEASNGAHYWARVLTELGHQVRLISPQFVTPYVKSNKNDRNDAEAICEAVGRPSMRFVPRKSSDQLAVQAVHRIRRRLVADRVRLVNQIRGLLSEHGIVIARDISQLRRGLAVIVGNDNDGLSEMVRSLMRELQTELAELDRRIATYDRRIREIFRASEPCQRLGKIEGIGPVAATALIAAVGDRTCFKNGRQFAAWLGLVPKQRSSGGRARLLGISKRGDRYLRTLMIHGARAALSRAGGKQDPRSLWLGKMRQRRHPNVAAVALANKNARIVWAMLSGDTAYEPALSVKAA

SEQ ID NO: 78292 - protein, 391 aa, unidentified
MDKAWAGVDAGKEFHWVHVLDASGTELLSRKVENDEAGLSTLIDEALSLAEDVIWAVDQPGGSAALLLALLWEQNQRVLYISGLTVDRSRNAYRGESKTDARDAHVIADQARMRPDLGELEAGEQQIGELQLLLARRRDLITDQSRTITRLRGMLLSLFPALERALDLNSKGPLTLLTHYQAPAQLRRAGHKRVAAYLKNRGVKGSNKVADKALAAAKAQSVTLPAQEVASRIVAELANDVLGFKERIESIDEEIGQRFFARPEARILTSLPGMGPILGAEFLVAVGDIRAFESADRLAAYAGLVPAARDSGKRVGNNKRMRGGNKTLKRVFYQSAFASLRSAPESRVFYERKRAEGKRHTQALIALARRRVNVVWAMLRDGTAFESRSAA

SEQ ID NO: 78293 - protein, 386 aa, unidentified
MCLSSMTQEDRTVHHDSNFTFVGIDAHQESLSLALIRPGEVAPSEVQRIPNRPSRVRDFFRRLLERGPVRATYEAGCLGFVLHRQLTKLGVDCMVAAPNLIPVRPGDRRKTDRLDAQRLAIFLRGDQLTAVKPPTPELEALRALMRTRMSMRKDVVRARHRVQKFLVLRGKVYREGTNWTQRHWRWLRGLRLDLDDDQDTFHYLLAELEHRIDSLKMLDDRIERVSHREEYRVPVSALRAFKGVATTSAMAIFAEIGDPRRFTSGRQLGALAGLYPSERSSGERTRRGGLDRAGNPRLRRILVEAAQHYARPTGPGHARRTRRKEAPPRAVDIARRADKRLSARYRRLAAVKHTNLAKCAVARELIAFLWSALIECQEQTEPITNA

SEQ ID NO: 78294 - protein, 337 aa, unidentified
MEYFAGLDVSMEETHVCVVDRDGEVIHEVKVPSTPADIEAALASAPACRRVVFETGRMAPMLYHGLTEHGVPVVCIESRQAYQALKSLTTHKTDRNDARGLAHLARTGFFKPVHVKSLPAHAVRSLIIARKKLVGQRVTLENQIRGLAIVFGVRLPRALSPAFIEQALRASEGVNGLSAAMRGLIAARDAVLAAVGAIDADMKKMVRASDACRRLMTIPGVGQLTALAFTAAVDDPERFKRSRDIGAYLGLVPRRYQSGEVDYTGDISKCGDRRVRTLLYEAANVMLTRYKRPLKLKDWALAIAKRSTMRQARIALARRLAIIMHAMLRHRTEFKPA

SEQ ID NO: 78295 - protein, 428 aa, unidentified
MTVKDCTSVKEFWQLKKEIRGSKDHLIVGIDVAKDDHRAFFGTANGKTLLKRLTFKNDIEGFEKLLARVKEMKVKHRLDELVLGLEPTANYHKPLGDFLIKCSHMVVLVSGVSVKRNRELLNGRWDKNDTKDSANVADLISQGKCLYYEYAPLLLKDLRGLLSLKRRLKKQEHGLRIRIRNTLLAQYFPELDKYYSKWEPEVLSVVRWCLDPSVIAGLEYDQFVSLVSPGSKNIRQQGRLEWIWKKAVYSIGCDAGEAVEFEAKVLVEELRHIREVIKETDAKIKDVCVRFPEYDYLLTIPGIGPDVSSKVLAAIGNPFRFNSGKQVLKMSGYDLSAKRSGKTSESAVPVISKKGKASLRYALYQAAFIASVRNKYFIAYYTNKLRGREREKGIKTKMRVKLAAKMLVIAWTLMKKKEPFDPGYLKID

SEQ ID NO: 78296 - protein, 458 aa, unidentified
MQNKFYLGIDVSKGYADFTILNKNKKVVEDNFQLDDTFEGHNQLFKILTDFFAGNPEAHIYAAVESTGGYENNWFNCLSKFQAQFNISVARLNPFGVNYNSKATLERNITDKQSAKNIAGYLISHPEKVTYQKEDYFAAERRQWTFIKLLTKQKVQLLNQLESFLYIANTEILAYCKDGVRMWTLKLLKQYPTAKDLANAKATTVSKIPYVSKARSEELVANAKRSVASAVDEVTAEVIRSLAMQIISLRKLIDLQTKQLEKNCDIPEVKLLKTFNGIGTYSAVGLMIEIVSASRFSNVKKLVSFFGIHPVYKQSGDGISAFKMSKKGRKQPRQILFNVARISIIHNPLMREIYASHLKKGMKKMVALEALMHKILRIIYGMLKNNTAFNPNIDSKNSKKIVIAKVSGKQNKERRFLKLIQNAPISRRQNKKRKEQNSSQNEKSFNTGSSSDSFPTCV

SEQ ID NO: 78297 - protein, 402 aa, unidentified
MHKDKKYSRFVGIDVAKKSHVACIIDRHGATLCKSQSFANSKQGYQRLRDMLKGIGQVRTFLVAMEATAHYWYSLHDELTRQGYQVVVLNPIQTAQQAKKDIRKRKTDKIDAFHIATLIKNGDYKPALVPGPLAMTCRQLTRLRVRWIQQNAALKQLIWSRLQPVWPEYEPLFKNPFCATGRKLLSVAPTPTDILALDREDLSELIRRTSRGKYGPIQAQQVFQAATDSVGMQRSLEGARVGIRTLLAQLDSVKPVHEQLKQEITQIAGQLPAYLFTLPGIDPLRAVSLFGETDPIEHFKKPSQLVAFAGLDLNVFQTGQYNAPQRRLSKRGSPFLRHTLWSMAYQAVYQEGDLRTYWLRKMSDGLKHKEAVTAAAIKLCHITWRILTDKRDYLPQGRPCYS

SEQ ID NO: 78298 - protein, 348 aa, unidentified
MPAFEWVHVQLHQQKGMISLSPPTICNSAFHIHCQDHRGKAVYRKKFTRPKLIEFLATCPATTIAMEACGGSHFMARKLEELGHFPKLISPQFVRPFVKSNKNDFVDAEAICEAASRPSMRFVQPRTESQQAMRALHRVRESLVQDKVKTTNQMHAFLLEFGISVPRGAAVISRLSTLLEDSSLPLYLSQLLLKLQQHYHYLVEQIKDLESQLKRKLDEDEVGQRLLSIPCVGTLTASTISTEIGDGKQYASSRDFAAATGLVPRQYSTGGRTTLLGISKRGNKKIRTLLVQCARVFIQKLEHQSGKLADWVRELLCRKSNFVVTCALANKLARIAWALTARQQTYEA

SEQ ID NO: 78299 - protein, 453 aa, unidentified
MTRKRKKESKANNAVLPVMRPDAAGIDIGATEIFVAVAPDRAAENVRSFPTFTQDLYALADWLKQCGVKTVAMESTGVYWIPLFQILEDCGFEVCLVNARHVKNVPGRRTDVSDCQWLQFLHSVGLLRASYRPEQEVCAVRSLLRHRESLVQMAATHVHHMQKALDQMNLQLHHVISDITGLTGLAIVDAILAGQRDPFTLARLRNDRIKASEEVIAKSLVGDYRPEHLFTLRQSLAAYRSYQKLIQDCDKEIRRGLDEFKSPTAQPPDTDISTDAKSKPQSNDGVLRNELKRVFGVDLTKIPGIRTGIAQTLFGEIGPDFTKFRSASAFASWMGLCPDNDISGGKVLWTGTRKVKCRAATALRMAAQSLHHSKSALGDFYRRMRAKLGAPKAITAAAHKLSRIIFHLITTRQEFDDSRFAAAQLRYEKRQEAKFRAKAQALGFQLIPIPQAG

SEQ ID NO: 78300 - protein, 428 aa, unidentified
MPYKIAGIDVHKRMLAVVVSDVEVDGEYAFERRQFGSNPAQLRLLADWLLEQHVEEVVMESTAQYWKPVWAALERYWTSTCKKREGAGPMSGTPHLAQAQSNRARQGRKNDFADAERLVKRLVANELTLSFVPDPEQRLWRTVTRTKYQLTRNRVQLQNRLEALLEECHIKLSSLVSDLLGVSARRMVQALADGETDPATLAALANHHLRATQEQLRDALGACQELNPLYRRLLKLPLEELQLIENQMGQLDQEIADLLRPYQDQVQRLAEVPGLGADSAQQIIAEVGPTAATFPSAGNLSSWVGACPGDDESAGVSHSHRSPKGNRQMRRLLNQAANAAVKYKGGIFEILYRRYVSRLGHKQTIGVIAHRLCRLIWKILYQGVRYEERGPDVRKKSQRYRAARMIRELQSLGYRVEQANSQSADVPA

SEQ ID NO: 78301 - protein, 329 aa, unidentified
MRAARPADNAPYKKESAMQKSTEQPKYLAVDVSKQELLVCFGKKTWAVANTAQACAALLKTATPGAHVVCEATGGYEQHLVEAAHAAGNPVSVIMPKRVRYYAYAAGLLAKNDRIDARLIARYAEAMKPPAQPKPERWQAELRELMRARNMLVVELNQQASRGERPSPIALVAELDKARAELLENHLKQIEQAIDSLIQANETLRQKAETIQQIKGVGEVSARIIVAEMPYLGSLEQGQAASALGVAPHPQESGGCKGKRYIAGGNARVRKVLYMAAVCASQHNPVLSAFYARLIAKGKPPKVAFVAIMRKLIELINRLLKNPNFVLAG

SEQ ID NO: 78302 - protein, 410 aa, unidentified
MLFIGDDWAEAHHDIEIEDEAGRLLVRKRLVEGLAGVTLLHELIAEHLDPSGEPDQVLVGIETDRGPWVQALLATGYLVYAINPLQVARYRERHSTSGAKSDPGDAHLLAEIVRLDRAHHRRIAGDSEIAEHVKVAARAHQTMIWSRVRQVNTLRSLLREYYPAALAVFGTDLASPDALAVLAAAPTPELGRRLSQSRIETLLRKAGRQRNIAATAARIKTALGSDQLTARPGVVPAYAASASALVAVLTTMVTQTEVLAGQVEQGFGRHPDVEIYRSQPGLGVILGARVLAEFGDDSDRYADAKARKNYSGMSPITRASGTKRVVLARYARNRRLGDALFRQAYSALRASPGARACYDRQRARGASHYQALRTLANRLVGILHGCLSHHTLYDENQAWHTPDDKLTIAA

SEQ ID NO: 78303 - protein, 472 aa, unidentified
MFWGLKTEDSNERRHSIPYSVTIGIDWADSKHDVFERYLDGSIYQHQIASAPEAVGEWLWALRSRARGGRVALGVETSRGPLFHILSQHSDWIDMIDIFPVNPQTLARYRQAFYPSRAKDDPVDSQLLEELIRSHPDRLRIYGPGPEMERKLELLCQQRRKVIGMAVELENQLRATLKEYYPLAIDLCASNGLRNKLALDFLQRWPTYALLKQARCQTLRSFYYAHNARNQALIEARLAKFSSSIPLTEDPAVIEPLSIVAKMLVHAIRAIEKTVEQLQDKIAALFAQHPDHFLFENLPGAGKNLAPRLLCVFGSDRSRWRDAAAIQKYSGIAPVIERSGKSSWVHRRLFRPKFLCQTFHEFAGQSIHHSKWAALYYERQRSKGKSHTCAIRALAFKWIRIIFAAGNLDNPTTKHSIFALSRTNTKNLSKLFDGLPQILTNHTEGGAQQIRQLTRLGPPRAAFQTCVALQRR

SEQ ID NO: 78304 - protein, 366 aa, unidentified
MTSVSSVAELIHLGMDTSVKEIVVAVLRPGEEVPVVDRIPGDEESVRRLIGRFPDRRLLSACYEAGPGGYELHRLLTSMGVACDVVAPSLIPKGSSDRVKTDKRDSVRLALTHRAGLLTPVRVPSPAEEAVRDLVRARGDLLDDRKRMQQRLNAMLLRHGRVWRGGKKWSYAHRAWVDRQVFDEPALAEAFSLYRGGLEAREAELTAAGARLAAWAAREPLAGPVARLGCYRGIAQLTGLTLAAEVVDWRRFASARAFMGFAGLIPTEYSSGSRSRRGHITKAGPEGVRTALIEAAWAYRYRPAIGATLHRRQAGQPPETLARSWKAQQRLHAKYAKMTARGKPPGVAVVAVARELAGFVWAEMIT

SEQ ID NO: 78305 - protein, 399 aa, unidentified
MIKDHEQVDIFIGVDVGKSNHHAVAIDRAGKKLLDRALPQDEAKLRSIIRSVTVKGRVLLVVDQPSTIGALPVAVAQAEGILVGYLPGLAMRRIADLHPGEAKTDARDAAIIAEAARTLPHTLRSIVLADEQAAELSMLCGFDDDLAKQATATSNRIRGLLTQIHPALERVVGKHLDHPAMVELLVKYPTPETLRKAGQKRVAALLSRHAPRAGKTWTQDVFAALGEQTVVVAGTNAAGTVLPQLAAMLKQLRSSRDEILTQVEALVEAHPLHLVLTSMPAVGVRTAARIITEVAGKEFKTAGHLASYAGLAPVTWRSGTSIRGDHPSKKGNKNLKRAFFLSAFAALKDPLSRAYYDRKRAEGKRHNQALIALARRRCDVLFAMLRDGTFYQAPTAKTV

SEQ ID NO: 78306 - protein, 380 aa, unidentified
MSIMSSTMYFVGLDVHKESVTAAVFRDRDAEAMRVDRLNNDDKSLRRYFDRLAKTGRVRACYEASGAGYVLQRALSEWGYTCGLAAPSLIPRRPGEHRKTDRRDAIKIARDFRDDRLTLIHIPSELDERVRDVVRCRETFQREIVKSRHYILKFLRRRGFIYREGTHWTMRHFNWIRALLEPGMLADHDQVVLTEYLTLLDFKLQRRDALDRRIEELALTARYKPVVDRLCCFRGIRTQSAMVLATELGDLRRFESPRQLMAYVGLVPREDSSGDRRRLGAITKAGNARVRHVLVQAAWNYRRRPSVGKALKQRQEGQPPDVIAHAWKCQHRLYRVYHRLAERKPRQLAATAVARELIGFVWAVLHELDVTQYQEVSHAA

SEQ ID NO: 78307 - protein, 339 aa, unidentified
MKVYAGIDLHSSNNYIGIINDKDQRLFKKRMPNDLDAVLSALEPFQQDLHGIVVESTYNWYWLVDGLQDHGYHVHLANPSAIKQYEGLKHTDDQWDSFWLAHMLRLNILPEGYVYPKEERPVRDLLRRRLMLVSQRTSHILSLQSMITRNLGINLSGNAIKRLTGDDAEQLFKDPCLVLAATNNISVIKFLTERIRLIEQSVLSRVKLRKEFAPLLTLPGIGKILSLTIMLEVDNINRFPKVGNYSSYSRCVKSVRLSDGKKKGVGNTKNGNKYLSWAYVEAAHHAKRAYPYAKRFYQRKEAKTNGIIAIKALSNKLCRASYYVMRDQVPFDKEKLFRS

SEQ ID NO: 78308 - protein, 347 aa, unidentified
MNFYTQPHKPYCGIELHARAMYVCSLDQQGTKLVHKNLPTTPQAFLRLIAPYRQDLVVGVECLFTWYWLAALCAKEGSAFVLGHALYRKAIHGGKAKNDKIDAHKIAALLRGGMFPQAYVYPAEMRATRDLRRRRCHLARKRAELLAHIHNTNSQYNLPEIGKRLANKSNREDVAAHFSDPSVRKAIEVDVSLLDHYDQLVSKVELYLTRSAKAHDVQTFARLQSVPGIGQILALVLFYEIHDIRRFPRVQDFVSYCRLVKCAKESGGKRLGTSGKKIGNVHLRWAFAEAAVLFIRQSQPGKAYFATLEHKHGKAKALTVLAHKLGRAVSYRRTREQAFDLQRFVTT

SEQ ID NO: 78309 - protein, 314 aa, unidentified
MSTPGVVAGIDVSKDWLDVAMRDESLRVANDAAGVSGLIDRLRGAGVEWVVMEATGGYETQAASTIAGAGLRLAVVNPRQVRDFAKATGRLAKNDRIDAQVIAAFGQAIEPEIVRLPDEQTRELQGLLMRRQQLVGMRVQESNRLALMAGAMRKQIKSHIAWLDKAIDEVNTDITARLRKSPVWREKDELLRSLKGIGPLTSGTLMACLPELGQIDRRGIAALVGVAPFNRDSGTFRGRRAIWGGRAQVRRMLYMAAIAAIRSNPVIRPFYERLVARGKPHKVAVVACMRKMLTILNAMMRSNTHWTPAFHGAN

SEQ ID NO: 78310 - protein, 434 aa, unidentified
MTLVVFRHIQSWYLTPSFFEYNRLEEKMELPVLYKRVIGLDIHQAQITACALIEEDDGTSRTEQRQFGGFKRDRRELAQWVEVLRPDEVIMESTGIYWKSPYAALEKMGIIAKVVNARHIKQVPGRKTDVGDAKWLALLARAGLLRGSLVPPAKWRELRVVARQRQKLVSQLASLKNRLHRVLSEAGVRLGVVVSDLHGQSARAMVKAIISGKSPHEVLSLASKRLKATREELFDAVQGELTGSHRFVLDELMQTIEETEARIGRFDVFLLEQLKSELPALRLLQTIPGVDLIGAALLLVEIGTDMTVFGSADRLASWVGICPGNNESAGKQKSGRMRKGNTYARRLLCEFAHAASRTTSVFKSKFQSLIIRRGHKRSIVAIAHKILRTIFFMFKRNEHYRDCAVNYEALSVQRNAPRWIKSLVKFGYISTSKA

SEQ ID NO: 78311 - protein, 377 aa, unidentified
MSKVRFVGLDVHADTIAVAVAEPGGEVRAHGVIPNRLESVRKLIGKLGPAEEIRACYEAGPTGYVLYWQLTQLGVACEVIAPSLVPMKAGDRVKTDRRDAEKLARCYRAGELTAVWVPDAAHEALRDLVRAREAAKKDQLKARHRLGKFLLRHGKRPEGMKAWTKQHLEWIGTHVKFDQPALEATLQDYLDEVKHVAERIVKLEKAIDEAVRQAPPQIRAVVEALQGLRGVAQTTAATIVSELGSLSRFESPRQLMGYSGLVAREHSSGNRVQRGSITKTGNAHLRRVLVEAAWAYQHRPNVTGFLLRRQKSLAISDEVKQIAWKAQHRLNKRYKAMSARGKNKNQIVTALGRELLGFIWAIATSVEKQQQAQAAAA

SEQ ID NO: 78312 - protein, 425 aa, unidentified
MNKDVLSTLFVGIDVSSASNYFCAINFEGKHILDFSITNNLPSSEIAVERIFNALQENDLKYVTIVLESTNVFSFHIANFLASNNSLFNFNSKVFVINPKESSNFRKTYSDMDKTDPQDAFVLADIARCGRINQQPYKASQLFALQRLTRQRFHLVKTIMREKAYMMSNIYLKFSSLYIAKKEDEPFSNLFGNTSKSIIADFTPDDIVNMSDEDMINFIMEKGKSRFSNPQENVKLLKKIARDSYRLDKVAYDPINVAISSSFNTINALEDNLKVIDKAIEKNVKGLCDNEFTILKSIPGIGDVYAAGIISEIGSIDFFKDNNALAKYAGLTWRKNQSGYFEAETTRMTKTGNKYLRYYLIEAVSSVKNHSKEFNDFYTRKYNEVSRGAHKRALALSARKLVRLIFGLLHHNQLYSATKLDNRSN

SEQ ID NO: 78313 - protein, 331 aa, unidentified
MRQIYGIDLSKEKFDVNFIDQTSQEQHSVVKNDLKNISRFLDSIPMDSHLVAEHTGVYGDLLLFLSNQMNIRISLCSGYSIKHSLGLRKGKTDKIDAARIREYGERFYDTLKETKVNSELMNELRELYSLRNHLVKERKMLQTKQKGVMRLAIRSIYAKEVYTRIVSQLTKEIRDIERQLLEIIHSDEEFSRNFDLVTSIKGIGPITTCELMIKTSNFKRIATAKRAASYAGICPFPNASGQMVKKSRISPMSDKSLKSLLFMCAKSAVAHNKEYRLYYQKKQLEGKPHYLIMTNVANKLIRTVYKIIESGCPWDSNYICYDPREENKKVA

SEQ ID NO: 78314 - protein, 342 aa, unidentified
MQRVYVGVDLGSSSFQQVGVNEPGVVVMKREFQTSAVHLVKAFSGLKGEIHVHLEAGELAPWAMEIIRPLVHRVVCSHPQSNAWIAKDADKCDRVDAYKLADLLRVNRFKEVHYPREQLRRDFKTLVQHYDELTQQQARLKTKVKARLRMQGVIVRGERVFSAPGRQAVLAAVKSVAVRTAIKQLYQVLDQSLASQTEARLLMLRTAQALPEIKWFKTAPGVGPIGACRFSAYVHTPQRFSSTRKLWKYCRLSISHRSSNGKPLRRPRLDRSGCGRLKDVSRKAFEAALRTHGDNAFKRTYQRALETTHDQTHARLTVQRKIISTLRAMWINQTPYSDQMTP

SEQ ID NO: 78315 - protein, 338 aa, unidentified
MKVYIGIDLHANNCVVVVIDEKGRKLHERRLRNDLPLIVEDLAPYRKRCGGVVVESTFNWYWLVDGLIDAGYDVHLANTAAIQKYSELKYTDDKTDARWLAEMLRLRLLKEGYIYPKEGRAVRDLLRKRSQLVQQRTAQILSIQGLVSRNTGAPPSGNTVKTMTAWELDALLSDPLVVRAARSNLQVYRCLDREIADLERLVLERTKSSPDFEHLLSAPGIGQILGMTILLETGDINRFARVGNYVSYCRCVGSQKLSNGKKKGKGNTKNGNRYLAWAYVEAANYAIRFSPRIKRFFERKRAKTNGVVAIKTVAHKLARGCYHALKDRVPFEVERAFA

SEQ ID NO: 78316 - protein, 390 aa, unidentified
MALFVGIDAAKDKFDACGIGEEGEKIFSLAATMDRKGFEKLIVHFKGNHSLLLGLESTACCHITLFSYLTAKGYKVVIINPLLISNFVKLQLRKTKTDKKDALTIAWFLMLRKEALENQTFSADLMELRDLARRRERLTDQATRLKGNMKRILSATFPELEHITGVFTKSILQLLTRFPSADALRKADVDTIAAIVVPRSWGKKSRTWVETLMATASTSVGLSSPAKELVLKQDASLLLYVEEQIKETTKLLMSVCNDRMKKDIEILTSIKGIGKTTAMNFLIEMGGDVNLYENDKKLIAAAGLDPSTYQSGKYEGASRISKRGNKHLRRVIWLTAKSAVFSNALFRAYFYKRRREGLPYKKAVLATAHKLIRVMFSMLVHQKRFEEGGK

SEQ ID NO: 78317 - protein, 428 aa, unidentified
MNVVDTIRREQFCQIKDEIRRSDDFLVVGIDVAKHKHHAFMGSATGKSLLRRLVFDNSLEGYCKLLERCKAIKAQNAFSKVVFGLEPTGNYHKPLARHLIKCAHHVVLVTGKAVKNNRELLNGRWDKNDTKDAANIADLVSRGKFLYYDYPSGSISQLRQLLSLRRRLKREEHSLRMRIRNNLLAQYFPELDAFYKACERESLAIVRWCLDPSRIAGMEFDDFFLMVTRSKRGIAQKKRLEKIHRLAVESVGCRMGPAAEYEAALLVQKLEQVRQQLDQIKDLMEDICSEFDEYRWLLTIPGFGPYICARILASIANPWRFDSSNQLLKLAGYDLGASRSGQRSDQAVAVISKRGNSELRYALYQAAHVASIRNRDFICYFTRMLRGRERERGIQTKMRVKLAAKMLKIAWVLMKKREAFDPAYLIIQ

SEQ ID NO: 78318 - protein, 433 aa, unidentified
MQDVEDEPLFAERVAGIDIAKAGIEVAIRVPSDTRPGRRQQETRSFGTTRGQLLALADWLRSWGVIKAGMEATGDYWKPVYFVLESQGLDCELYHAAQVKALPGRPKTDRADSVWLARITERGSLPSSFVPPEPIRRLRTHTRYRRHLTQARTAEKQRVEKLLEDGHLKLSSVISDIHGVSGRAMLEALIAGERNPKVLAQLARGSMRSKIARLEEALDCSFLTEQHAAVLAMMLATIDYYTAQIDELTAKIEVLAEPYLHQIEQLDAVHGTGRISAQDVIAEIGVDMTVFPTASHLVSWAKWCPQVAQSGGKRKGSNASGRGNPYLSAALGEISISTARTQSFLGARYRRLVKRMPKKKALVATGNSVLTIFHALLSDPAATYHDLGPGYYEQRMNVRRQARNHVRSLERLGYQVTIQAINPDTGELLPATA

SEQ ID NO: 78319 - protein, 457 aa, unidentified
MTKRNKKAKSQNFEMSKLPQHLQHINVNAAGIDIGSERHFVAVPEGRDEVSVREFGTFTTDLQALAAWLKQCGVTTVAMESTGVYWIPLFELLEREGFEVKLVDARHVKNVSGRKSDVLDCQWLQQLHTYGLLAGAFRPPDEICVLRSYLRQREMLTQTASQHIQHMQKALQQMNLLLHNVVSDITGVTGMKIIKAMLAGERDPRVLARNRDERCKNTTATIAKSLVGNYREEHLFALRQAVDLFETYQAKIADCDEAIIKQLEKQPEISDDGPPTPEKQTQARDRLRSGVDVRELLYKKSGVDLFAIPGLAADTLLTLTSEVGFDLTPWKTEKHFASWLGLCPGTKKSGGKVLNKKTKRHPNRAAQAFRLAAASLSRSKTALGAFYRRIKSRSGGKHAVTATAHKIARIYYAMLTQGTAYVELGQQAYELRYKERRLDHLKVQAKSLGFQLVPCAT

SEQ ID NO: 78320 - protein, 353 aa, unidentified
MAAKKRSVTGGVDTHGKTHHAAAVDQVGRMLGDQEFPASAAGYRALLAWLRSWGRVVKVGVEGTGTYGAGLARHLAAQHIEVIEVDRPDRKTRRRQGKSDPIDAIAAARAVLAGTATGAPKTRTGPVEAIRALRVARRGAVKARTAALNQLHGLLVSAPEPLRADLAGLRGRDLVGRCAGLRIDPTRLLEPVAATKAALRAIARRVQLLEEEIAVADARLRPAVVTVAPRTAALFGAGPDVAGQLLATAGDNPERLRSEAALAHLAGISPLPASSGRTDRHRLNRGGDRAANSAIHRIVLCRMRHDERTRAYVARRTAQGLSKREIMRCLKRYVVREVHTALLADFEDLASAA

SEQ ID NO: 78321 - protein, 395 aa, unidentified
MFIVGIDVAKRSHEVCMITSDGQTVQRPFSIRNNCTGYNLMLEKIRKHTNIKSQIVFAMESTAHYWLALFTRLRKDGYHVILLNPIQTSAMRDMFIRKIKTDAKDSFIIAELIRFGRYAESNVAQDRLLALKELCRNRFYLVDMAGDLKRKLIALIDRVFPEYEAQFDTIFCKSSVALLKKYPTPQRLSNAHLDKLTELLWNSSNGHFGEWKARELKELARNSFGVEDCDGAYSTLILLMLDQIQSLSGKADALEKEISRLFQSFDTMVTTIPGVGPIIGAVILSEIGDISRFSSANKLAAYIGVDPSVNQSGEFQAAHAHMSKRGSPYLRRCIWMASQVAVQRDPMFRAYYEKKAAEGLKYMTIIGHVTRKMTAVVFAILRDHKVYEPILPTAA

SEQ ID NO: 78322 - protein, 405 aa, unidentified
MDVVHSHCCGLDVHKKNVVACVITPEGKEIRTFSTMTDDLISMVDWLKDKGCTHVAMESTGSFWKPIFNLLELEDIKALVVNAKHMKNVPGRKTDVKDSEWIAGLLRHGLLQGSYIPSRDQRELREIIRYRRSLIDERAREINRIQKVLEGANIKLSSVASDVLGKSGRAMIEAIITGEEDPKMLSELALRGLKKKKPELQRALNGLIRHHQKLMLKTQLRHIDYLAAEIKQLDEEIKKRMLPFDEDLELLDTIPGVGRRTAEQILAEVGTDMNQFPSAAHMCSWAGLSPGNNESAGKRKSERTRKGNKKLRSALVEAARAAARTKNTYLSSQYHRLAARRGKNRAAVAVAHSILTIAYHIIKRKQPYIELGPTYYEERKRDTVIKQSIKKLESLGYKVTVESVA

SEQ ID NO: 78323 - protein, 412 aa, unidentified
MELTSSVAGIDVHKSLLVVVVGRADLPEPQWKRCKFGATTVELGRLAEWLQQHEVREVVMESTAQYWKPVWIALEKGFRLHLAQALSSKGPRGRKTDYRDATRLVKRLLSDELTLSYVPDAEQRRWRLLTRTRHQLTRDRVRLRNQMEGLLEEGQIKLSSVVSDLLGASGRRMLAALAKGETDPAKLAGLSDERLRVSTKDLQEALSGQLHPTHQALLRLALDRLDLMEQHLAKVDVEIAQALAAHQAVVERLCQVPGISVQSAQQILAEVGPQAAAFASAPQLASWVGVCPGRQESAGESTSNRSAKGNRPLRRVLNQVAWAAVKSQGSFFQLLFRRWVPRLGVKKAIWAVAHRVLRLIWKVLHEGVAYQERGPQPLTAPARRRRRARLLRELRKLGYDVTLSPRPATSPA

SEQ ID NO: 78324 - protein, 368 aa, unidentified
MDNDITAFVGMDVHKGSIAVAVAEAGRTAPRFVGTTGPQLAELLKALSHLGEPQRMLIAYEAGPCGYGLARQLGARGYRCEVIAVAKTPRKPGERVKTDRRDALMLARYLRAAELTPVVIPDERDEAIRDLSRAREDAVRARLKARQQLKAMLLRHGHRYTGKTSWTAAHERFLAKVSFDHPAQDVAYAEYRSAVREAHDRAERITAALHEQVATWRWQGVVRALMALRGVEFVAAVTLLAELGDLARFAHPKQLMSYLGLVPSEYSTGESRVQGKITKTGNGHARRILIESAWTYRLPARMSRELVVRNEGLPKTVRDIAWHAQLRLCSRFRRLQARGVHQTKTCTAIARELAGFIWDIARQVPAAT

SEQ ID NO: 78325 - protein, 412 aa, unidentified
MRVVHPICAGMDVHKEDVKVCLVWRDEAEERCEEVRTFSTMTRPLLLMREWLESHGCKVVAIESTGNYWKPIFNLLEGDFEVMLVNPGHLKYVEGFKTDPKDARWLASLLEYGLLRGSFIPPREIRDLRDMTRYRRRLIEEHTAEVNRVQKILEDANIKLASVASNVMGVSGRAILEALLSGEMTPEQMAELSKGRLRNKREELAESLVGRFRPHHALLLSRMLEHIDFLDNAIEDCDRVIEDMLRPFVLKIENMDTVPGIDVRAAQDIIAEIGLDMSVFSSHKHLCSWAAVCPGNHESGGKRKSGKTRKGNKWLRAMLVQCAHAAGHSRKTYLGAQYGRFAARKGKQRAAIAVGHSILEAVYFILRDDVPYQELGPEYFDKINKDHIIRNYKKRLEALGLVVEVSEAPVAA

SEQ ID NO: 78326 - protein, 351 aa, unidentified
MPRRSTVRAVTTIGIDMGKNTLHIVGLDSLGAIVLRERVSRGRITSRLANLPPCLIGVEAGMATHYVARELAALGHDVKQVPPAYAKPFRQGHKNDFRDAHAVAEAVQRPTTRFVPAKTNEQLDLQALHRVRSRLVSERTAVINQIRGFLLERGIIVRQGQRFLRHLLPDILAKRTDVLSPRMVRIVSDLAGDWRQLDERIETVTDEIETLAKSDDSCRRVMTVPGIGPLISSAMVAAIGNGTAFAKGRDYSAWLGLVPRQMSTGDRTILGRLSKRGNGYLRMLFMQAARVILLRPANWSKHGFGAWLVRAAQRLHPNVLAAALANKLARIAWTVLAQERSYQARVTKAAA

SEQ ID NO: 78327 - protein, 404 aa, unidentified
MYNAVGIDVSKGKSTVAVLQPGGTVIRKPFDVSHTSQNLNELADYLSSLDGTTKIVMECTGRYHEPMIKALSEAGLFISIVNPHLIKNFGNNSLRKVKSDPADARKIARYTLDNWTELRQYSGMDNTRTQLKTLNSQFSFFMKQKVAAKANLIALLDNTYPGVNKLFDSPTREDGSEKWVDYAYSFWHADCVRKIGLKAFTERYMSFCKKHHYIFQQDKPEKLFNASKELVAVFPKEKTYKLLIQQSIQQLNLASEHVERLRREMNELASTLPEYSTVMGIYGVGKTYGPQLIAEIGDVSRFTHREALTAFAGVDPGVDESGQHKSKSNRASKVGSASLRKTLFQIMTTLLQNAPEADPVYRFLDKKRSQGKPYYVYMTAGANKFLRIYYGKVKECLRNLEQTE

SEQ ID NO: 78328 - protein, 339 aa, unidentified
MALWVVPTPSHSRAAIFSQGASSLVDLAKSVDSHVKAVVEPSANFWIRVYDKLEEEGVEVKLSNPLRTKAIAEARIKTDKIDAKTLAYLLRGDLVAESYVPSRKNRDRRALIRHRASLMQMRVEVKNRIHALLDKHELSHGYTHLFGKQGLEWLRSLQLATPDHEILQSSLQVVETLNEQIRSMDIQIAKDATTEDKAKLLMTMPGVDYYAAMVLLSEIGDVKRFSSDEKLVSWVGLAPQVHQSGDSHWTGHISRKGSKRARWILGQCAQSARQHDPRMREFYERIERKHGSSKAIVAVARKMLAIMYVMLIRNEPYRGENRELTKQKHKRLDTLANTT

SEQ ID NO: 78329 - protein, 357 aa, unidentified
MTLTIVETRAVTGGVDTHADVHVAAALDPIGGLLGVAEFPATAAGYARLLEWLGGFGTVCLVGIEGTGSYGAGLSRHVTAAGIRVVEVDRSDRQDRRRQGKSDPLDAVSAARAAQSGRAAGAPKGRDGSVEAIRALMVAKRSAAGERTQTINQARALVLTGPDEMRARFARHAPAALVAGLASLRPRPGDVVGYATRIALRELGRRAEFLDGQLERLDELIVPLVTARAPGLLALYGIGPNTAALLLIAAGDHPGRLRSEAAWAHLCGAAPIPASSGKTPIPASSGKTVRHRLNPGGDRQANHALWRIVFTRLGSHPATRAYAERRTQEGKSKAEIIRCLKRYVAREVYPHLRPPAG

SEQ ID NO: 78330 - protein, 422 aa, unidentified
MKEESIEFAAYIGLDWADRTHVIRLRCAGSQAVEQREVTHTPEALAAWVSELQQRFGGRPVAVALEQSRGALVHALMSYDFVVLYPVNPKSLAKYREAFRVGGAKDDPDDAQLLLELLTLHRDKLRAWVPDDELTRTLVLLVQYRRQLIDERTSLTNRLTSLLKLYYPQALRWAGGLATQQAGEFLRHWPTLADIQRAPATTLRKFYLAHGCRKAELIEQRLQEIKLAQPLTRDLAVITASVSMVQAIVNQLRALITAVAQMEKQITELFGQHPDHDLFESFPGAGPVLAPRLLTAMGADRQRFSAAREVQQFSGIAPVTERSGQSCWVHWRRACPKFVRQSFHEYAARSIRWSPWAKAFYEQQRQKGNGHHAAVRSLAYRWIRIVYRCWQQRGPYSEATYQQALIKRHSPLAKLLPAPTQS

SEQ ID NO: 78331 - protein, 457 aa, unidentified
MAKTDKKGKKVVVNALEQIRQDAAGIDIGAEELYVAVPPDRDEENVRKFGTFTADLRDLAEWLKACRIRTVAMEATGVYWIPVYDILEEQGFEVYLVNARHLKNVSGRKTDVLDCQWIQQLHTYGLLSASFRPAEEIVAIRSLVRHREMLVQYRSAHIQHMQKALTVMNLRLTNVLSDISGVTGLKIIRAIVAGERNPHKLALFRDDRCSKSEAEIAKSLEGHYRPEQVFVLKQALDLFDFYDQQMQSCDLELEKMYQKFDPPQDPGTPPPSPRTAKRRKNQANFDLAAALYRMTGVDLTPIDGIDELTIQKVLSEIGTDMSKWPTVKQFAAWLHLCPNNQITGGKIKKTGVQPTQNRASAALRVAAASLHHSNSALGAYYRRMRARLGAPDAITATAHKLARIIYSMLKNCKPYNDPGNDYYEQQYRSRVLRNITRQAANLGFRLEPLQALGTEVS

SEQ ID NO: 78332 - protein, 320 aa, unidentified
MKWLGIDIAKRKFDLAVLNNGKIRSKVFENTLEGYKALLDWLATQGYAREELHACMEATSVYYEKLATFLHDAGIRVSVVNPLQIKAFGESLLTRQKTDRADAVLIARFAEQQSPMLWQPASCEIRELQRLLARLEAVQQMSVQEQNRKHDAEGEALESVLRILKQLKAEEEKLRQMIRDHIDQNPNLREQHALLTSIPGVGDQVSSHFMAWLRPERFDDARQAVAFVGLSPRHRESGDSVRGKSRLCKVGHARLRKILYFPAMSAIRYNTAAKALAERLTASGKSGKVVIGAVMRKMIHWMFGVLKSGQAFDPDLALAK

SEQ ID NO: 78333 - protein, 362 aa, unidentified
MMKLKYSICCGLDVHKNVIVATIVTTNKDGISEYKQKSFSTINSDIQKFHNWLIENNCYHVCMESTGKYWIPIFNYLENDIDVCLTHPKYVKAIKGKKTDKKDSKWIADLYKFNLVRCSFIPPKDFRQLRELSRYRFKLVCMKSSEKNRIQNCMTISNVGIASVLSDPFGKTATEIISYLLEHTADSMDEKAVRKLIKKGAKSKSDEIIEAIKGYTIETDQAKKLELARGHLEYLDDMITQTEVELYVRIKPYYEFVEFVSTMPGMTELSSTIVLAETGVDMDIFDDAKHLCSWCGLSPANNESAGKKKSVRIAKAGDYLKPMMVQCALAAIKSKKSLILQSNMVESKSDVDTKRQSLPLQE

SEQ ID NO: 78334 - protein, 367 aa, unidentified
MKKHSSKHDPLSSTDVELCTTICVDLAKQVFQLAGEDATGRVIYEDRIKSRQAFHDFLLKLPATVTVLMECGPGAQAWARLLQTQGNPVRILPAQRVAEHRSGAKNDRNDAHAILRAGRDTSIASIPIKSTTALAIQALHRVRRGNIKRHTALGNQMRGLLLEHGVSMPQGDAAMSTHIPRALEDATLPLPDLLRELLDELLADWLYLGERIAVLSKRLEATAQEDEVAQRLITIRGVGPIIATAIVAKQTEPSRFASGRMYSAFFGIVPDQHSSGNKIRLGRMSKRGDGYIRSLMIQGAHAVLSQLRPDSDQPDDRRLLRWLSRLGRKEAAIRLANRNLRIIWALLQSNQVYQRKPNNNSEAAMSL

SEQ ID NO: 78335 - protein, 411 aa, unidentified
MKFIVAAIDVHKKVLMVVVVDAADPEMVLARRRFGTTASEREHLVAWLKEHQVQEIVMESTAQYWKPIWLDLELHFAKLHLAQAHSNRAPKGRKNDFGDAERLARRLVAGELILSFVPDAEQRDWRSLTRGKVQLVQEVVRLGNQLEAFLEEVRIKLSSVVSELLGLSGRRILRALADGESDPDKLAQLGDRRLKCSKEKLADALKGQLQPQHREMLKLSLERLELLERQILKMDQMTAEAMNKYESAVIRLAEVPGFGPDSAQQVLAEIGPDAKSFDSAGNLASWVGVCPGSNESAEHNRSSSSPKGNCSLRRILTQAAQAAVKKKGSHFQKTFRRWLPKLSYNGAIWAIAHKLCRLVWKVLHDQVSYVEQGQELDPKAKQRRAKKMIQALRQLGYDVIISSPASQPAQG

SEQ ID NO: 78336 - protein, 400 aa, unidentified
MNEHDEIGVFLGLDVGKSAHHGHGLTPAGKKVFDKQLPNTEPKLRQVFDKLREKFGIVLVVVDQPASIGALPLTVARDTGCQVAYLPGLSMRRIADLYPGEAKTDARDAAVIADAARTMPHTLRSLELTGEITAELTVLVGFDQDLAAEATRTSNRIRGLLTQFHPSLERVLGPRLDHQAVTWLLERYGSPAALRKAGRRRLVEVVRPKAPRMAKRLIDGVFEALDEQTVVVPGTGTLDVVIPSLARSLGAVHEQRRAAEAQITALLEDHPLSKVLTSLPGVGVRTAAALLVTVGNGTSFPTAAHLASYAGLAPTTKSSAASIHGEHAPRGGNRQLKRAMFLSAFAALHDPASRTYYDRCRARGKTHTQALLRLARQRINVLFAMLRDGTFYEPRTPRLA

SEQ ID NO: 78337 - protein, 443 aa, unidentified
MTNAMTDQSSAIPEPEWGAFLAIDWADKKHAWSLCVPGAPRREHGEIEHSPEAIHIWITELTTRFAGRPIAVCIEQSRGALLFALSKYGNLFLYPIHPAAANDFRKAVYPSGSKSDSVDAEVLLDFLLTHRNRLRLWRPDTEQTRELQFLVEDRRRMVDEKTRCLNRLTQRLKMYFPQVLCWFGSVDSVLVWRFLEQWPHLEALRKARRSTLKTLLQRDGRYSPPEIEGFWPTIQDAIPATHDAAVIASSILFVKTIVQQLQLLHETIREYDKRIGRLTETHPDFAIVSSFPGVGKALAPRLIAALGTQRERFRNANELQSYSGIAPVQESSGKQHWTHVRRACPKFVRQTFQEWAQHSVARCEWAHAYYDQHRARGKQHQAIVRSLAFKWIRILYRCWQNHTPYQEAAHSARLARRSSASVKDVEIVWKKTAGFSKLAALNP

SEQ ID NO: 78338 - protein, 400 aa, unidentified
MVTRITAWAGIDIGKTHHWICAVDAEGRPLLSVKVANVEADLLAALAKVTAFATEVVWAVDIIGAPSALILALLAQADIGVRYASGRVVNTMSTAFTGEGKTDAKDAYVIAETVRLRRDLPVIDTVTDLTRELALLTGHRADLIADRVRMINRLRDVMTSVFPTLEQAFDYSSHKGALILLTEYASPKRLRRLGEARLTQWLRRRHVRDSAGVAARALAAARGQDIELPGQQVAEMIIVELANSLLQLDQRLKTLDQQIATTFRLHHQAETIESMPGFGPILGAQLLVAAGDLRVYPSAGHLAAAAGLVPVPNDSGRRSGNLHKPRRYSRPLRHVFYLSAQTSMMREGPNRDYYLKKRARGHTHTQAVISLARRRIDVLWALLRDNRTFSIEPPSLAVAA

SEQ ID NO: 78339 - protein, 353 aa, unidentified
MERFCVGIDVSARKLDVAWRGNKGRVERQTFENESAGHGELVQELKKRASGRMIRVVLESTGVYGIDLALALDRARFEVMVANPRASANFAKATMQRSKTDRLDSAMLLEFAEQMTFRRWQAPSLANLQIRSISRRVYAVMMTIRDEKNRMHAANQVDGMEVVKKSIRATIKALEKQVRELRAAALALIQSDAVLARRNELLLSVKGIGQISAIAILAELAILPADMTDRQWVAHAGLDPREVESGTSLRIPPRISKRGNKYLRAALYLPARVACRFEPGVADYAARLRERGKKPLQIHVAVMRKLLHSIHAIFNRNEDFDGRLYYLKPAAGAVGTSGIAPSAISEVSTALSA

SEQ ID NO: 78340 - protein, 388 aa, unidentified
MIAVDPHKASNTAAVLDPVTKTVIESARFANSADGYGQLASFAARWAQRRWAVEGCRGAGRSLAQRLVADGETVLDVPAKLAARVRVYSRGHGRKTDKDDAVSVGLAALDGTGVLLVARDDALVSLRLLCDRREELTAQRTQAVCRLHRLLAELTLGGMRRELSANKAQALLARIRPAGDVAAVRLQIARDHLTDIRALDARIKYLGIQIAALVTFASYNGTAPIDVSSGDQIRHRLSRAGNRRINHALHMMAVTQIRNRGSQGRAYYERKRLEGKTGKESLRCLKRRLSDLVYYQLIADRRGTIKKCGSPTTGRPTPPACTSPTSRHQPARPRPAPRPRPASTPSSRSTGAAASSPASRSSTPAPSCPPTSSTRPKSSAKAPPATHS

SEQ ID NO: 78341 - protein, 351 aa, unidentified
MLIVGCDYHPSFQQIAWVDTESGECSEQPLMHSNGEAERFYRKLKEQGVKVRVGIEATGHSRWFERLLAELGHELWVGDAAEIKAKRVRKQKNDREDARLLRTLLVENRFPRVWLPDVDNRDLRQLLWHRHRLVQMRTRVMNQLQAVALNEGVRRKRGLWSKTGRAQLESFQLMPWATRRREDLLELLDGLTPRIAALTAAIEKQVEQYPEAQRLMTHPGVGPLTALAYVLIIGSPERFRCGKQIGSYLGLIPCEDSSASRQRLGHISKQGNSLLRFLLLEAAQAATRCNPAWRREFLHLTMRRGRQIATVALARKLAVRLYWMWRNGRDYEMSLQFGSHVGQPGTAYGVK

SEQ ID NO: 78342 - protein, 312 aa, unidentified
MEKVYIGIDVSKESLDVAVHGVKNLMRVKNDQSGIQKVVRLAVKRNATLVCFEATGGYEMPLYVALSEANVSVAPLNPRQVRDFARSMGKLAKTDTIDARIIAHFASTVPGLKSRPIPDTQELKGIMTRRNQLVEMITMESNRLRGVSTDLSVSIKAHIAWLKQQLDEINGMLRSSIDQDPVCREKDDLLQSTPGIGPTVSAALVAQLPELGNLNRRQIAALVGVAPLNRDSGMSRGKRIIWGGRGRVRAALYMSTLVATRFNPVIRNFYERLLSAGKAKKVALTACMRKLLIILNAMIKHRTVWSNSHSPV

SEQ ID NO: 78343 - protein, 441 aa, unidentified
MEAVYRRCAGLDVHKDVIEVCVLPPAGQSGSPQRRRFATFTSDLTRLRMWLVSLKATEVAMESTGLYWVPVWRQLEGHIGKRLLCNPQQVKALAGRKSDRRDGQRIAEFLQDGRLDPSFVPPKEIQQLRELLRMRVSLVQEHNRLSNRVEKLLQSYGVKLSSVASDILGKTGQRILTALAAGQTDPDQLSWKAVGSLREKEAQLRRALRADFDEHSCWMLGVLLGQLKENEQWREQLEQRITEGMKPYEPIVIRLMTIPGVDRLTAWSMVAELGTDMSVFPDQRHCASWAGVCPGTNESAGKQHSTRTRRGNRYLRRILTQSAWATSRCKRGYLRAAFHRIAQRRGHKKAVVAIAHKILVAAYFIIRDQTTYLELGEDYFDLLHPERTARRLARRLERIGYQVTLTKAAATAPRSSEGQQPKKRGRPCKCAERGIDCKHKR

SEQ ID NO: 78344 - protein, 419 aa, unidentified
MSFKIFKFNCCGLDVHKTWIYACIGITDSNNRTEYKQARFSSFSKGLHQLCVWLAKYNCNDVCMESTGKYWIPVFNVLEKEDVSVILSHPKYTKPQKGNKTDRKDAKWICDLFMCDMVKPSFIPPADIRHLRDLVRYRFKLTCMITGEKNRAQNCLTVSNLKLDDVFSDVFGKSSRSITEQILQHPGEKFDVSPFVDSRCKTPIEEIQAAVDGNISKEQDVKLRQCLDHIDELQKHISEVEQEILRLSDKYEAALNLIRTVPGFDKNPMTAVQILSEIGGDMSVFPTAKHLVSWAGCCPRNDQSNQKIKSTRISRAGSYFKPVLVQVANALIKSKKHLEFTNRYKRIKARRGHKKAIIAICRMILTAIWHILSDLKPYTPEGFLESHPVKEGKVLSSSQALNFFKQRGYIIKDEPLSVS

SEQ ID NO: 78345 - protein, 408 aa, unidentified
MTVVGIDVSKGKSMVAAMKPGGELVAAPYEVRHSDIELSHLALDVLCMEPDTRVVMEATGRYHEPVAALLHSEGIFVSILNPLLIKQSGAGSLRKVKSDPKDALKIAKYGLDNWSTLREYTPMEAIRQQLKLCARQCDLYSKNIVMLTNNLISLSDKTFPGVNELFSSPEKADGHLKWVDFYRSFWHCDCINRMSPDAFEERYKKWCKRKGYHFSTDAADALYAASCGSYTTLPRDNNAKLLVTVAADQLIALRENQSKLEAEMLNLCKQLPEYETVMAMYGVGKSTGPHLMAELGDVRRFPHRSSIVAFAGVDPGVVGSGKMQLSSVTTSKRGSPQLRKALFQVVSTYVKCKPENEAVYQFYAKKRDEGKPFFVCTTAAANKFLRIYYARVKECLNAVESATQVEEG

SEQ ID NO: 78346 - protein, 334 aa, unidentified
MEKITTVGIDLAKAVFSLHGVDRTGRMVLRRTVRRDQLVKLVAGLSPCLIGMEACSGAHEWGRRFQELGHTVRLMAPKFVVPYRKSGKNDGNDAEAICEAVSRPSMRFVPVKSAEQQALQAMHRVRQGFVVERTATINRLRGLMSEFGVVLPLRSITVRRQAATAAENLPELARRAIGDLLDQLRVLDERIVGYDREIEAQAKLCEPAQRLMKIRGIGPTTALAIVATVGNAREFKNGRQFAAWIGLVPGQYSTGGKTRLGHISKRGDAYLRNLLVQGARSVLHTAAAHRDPVSRWALELQPRRGYYRTLVAIANKNARIAWALLAKNESLRTV

SEQ ID NO: 78347 - protein, 345 aa, unidentified
MSQQQIQYVGIDLHRRRSVIVRRDDTGTTLAVDRVDNSNLLAFERAIRAAGEHPDVVLEATLGWYWLADYLKGLGANVHLAHPLGNDWGHRRVKNDLRDAEDLVDLLRLGRLAEAYVAPPELRELRELVRFRSKCVALRSGLKAQIHGVLAKEGVTVPVSDLFGRAGRELLDTVHLGAAYATRVASTRELIESFETEIAMLEARITGLLGNDPGYQAIQRIPGVGPVLAAVFCAEIGDAHRFSSPEALSSWAGLTPRHRESDVHVHRGQITKQGSRIVRWAAVEAAQRHHGETKLARDFSRISSSHGEGPGARKIARVAVARKIVTLVYYGLRDGEIRCLAEKAG

SEQ ID NO: 78348 - protein, 390 aa, unidentified
MQVIADQAEAPSAIRSNLGAIFVSLELSRSTWLITSLLPGGSEKMSKHSVPAGDICALLARFSELRQKAFTRTGKSFPIIVIQEAGLDGFWIHRVLQNEGIESHVVDPASIATSRRHRRAKTDRIDGETLLRTLLAYKRGEPRVCAMVKVPTPEEEDRRRLCRERKVLIAERVQHVNRIKGLLLCQGVSGYEALRRDRRQRLDELKTGDGRALPDHLKAQISRELARLELLLEQIKAMEAERDALFAAAKATMPASGPVAMLLEIKGIGPEFAAILWMEAFFRSFANRKQVAAYAGLAPTPWQSGSVDREQGVSKAGNPRLRTMLIQLAWLWLRHQPQSALALWFKERVSRNGGRFKKTTIVALARKLLVALWKYVTAGVIIEGAVMKPA

SEQ ID NO: 78349 - protein, 411 aa, unidentified
MDIICVGVDISDGHSTVSAYAWGDVMVIKPRGVPHTVAALRELADETGRLPGEIRVVMEHTGRCWLPVAQVLREAGLFVCAVNPKLIRDFGDNKLRNIKTDKADSRKIARYGLRYWNELLPFAPTEATRQKLLEFSRQLNSNKLLTAQKNNLQAVVSATFPGVRKLLKSPAREDGHMKWVDFVCTFYHCDCVRRLSAGAFAERYRAWCKRRGYKVTTSGCSKIYALACECVPVLPCDRDTKLLIGEIARQFTAVSATVEVYRAKIFDLASTLPEFDCVMAIFGCGRTTGPQLMAEIGDPLRFADRIVDGKRVKGKKQLAQFSGVAPGNNQSGAYEQKNVKASKKGSPHLRRTLFQVVSTYLKRKPNDPIFHFLDRKRAEGKDFFVYMTAAANKFLHVYYARTHEKLQIQSA

SEQ ID NO: 78350 - protein, 339 aa, unidentified
MGRFIGVDLHKNMFVACFLDPEKDEKIFKSYKLNRLNEFKKDLKQEDVVAVETTTNTRYFVKGIKSAVKEVKVINTTEFQVISKSVKKTDKNDAYVIATFLSKGMMPEVRMKEEKVSELGSLAQTRDKLVKLKTALKNKIHSILSAQGIITERECLSSEKGLEKALSYRVSSIARVELEVIVEQIRGLNEGIAKIDKELIERGKGLEGHDSITSIKGIGDKSGTILLSVIGDINDFKDEKKLAAYFGIVPRVNNSNETVRQGRITKRGNKLGRTTLVQCTLVAIKYSEYLRAFYLKIKNKKGSGKAIIATAKKLLGVIYHTLKNKWVFEDFPNFVLKAA

SEQ ID NO: 78351 - protein, 347 aa, unidentified
MRKIIVGIDISKEKLNVCLLEGMNIVHEDEIENTVASLRKWFGRMRKFLKCCMDEVLLCAEFTGRYIYPLAIACHEEEVFLWIEDPSRIKNSFGLVRGKSDSVDARRIAEYAFRHQDKAVAYRLPSKELASIKILMTDRELVLSDRKKYEAQLSDQKRFMSKEDYAMQSKMWKSIVKELQKQLDFIDEKIDKLVSASESLSHQVELLKSVDGIGQRIAIAMVVFTDAFTRFDNARQFNCYAGLAPFTYTSGKSIYSKAKVSQRANKQIKALLHLAAVCAATHMKSGDYKEYYDRRVAEGKHPLCVLNVIRAKLVGRMFAVIKRDERYIKNYDRYSSEKKLSTPVQIS

SEQ ID NO: 78352 - protein, 340 aa, unidentified
MSLYGGIDLHANNSVIVLLNEQDEVIYQKRLPNALPTILEQLAPYHTEMQGVVVESTYNWYWLVDGLMEADYRVHLANPAAIQQYNGLKYTDDHSDARWLAHLLRLAVLPEGYIYPKAERAVRDLLRKRTHLVRQHTANVLSVQNIMARNTGGRFSVKHIQELTKQELTTLLTEETQVLAVTSSLVVLDCLQHQIKMLEKTVHKRLQHTPSYEQLLTVQGIGTILAQTITLETGAISRFPSVGNYASYCRCVDSTKISNGKRKGAGNVKNGNPYLAWAYMEAAQFALRFQPAAQRFYQRKLAKSRNNTVLARKAVAHKLARACYYMMRDLVPFEATKAFG

SEQ ID NO: 78353 - protein, 427 aa, unidentified
MLDNDYNRQVERRQRIKRTTLVTGVDIGNDFNAIAYMHKEGTVLGRYPKVFNSRDGFDQFVWITEELKKKHGMKDVLIGLEPTGHYWRKIAYFAMEQGYAVRFIKTTSIKHERELNESSSAKSDIKDAITLANLTREGKYIDTVIEDGVLRQLRTLSKVREKISRQSTGAKNLLHAVLDDYFPELKKLFHAMHTRGLWAVLETCPFPEDVLKCDQAAIAALITKASHSKIEGAKKAKALYLAAQTSIGLKYVGDADRYRLLTCLNDVKRTDKMLQEIKKEMAELLQQLPAAQYLLSIPGVGPLSAAIFFGELGNPEYFHRAKQIIKYAGYDPQESDSGKRIGRKVISKKGRWLLRKCLYLMSVRAVKHSTFFRKYYQRRLKTKNRFGQLLKKKEALCAVAIKLIKVIFALLRDKREFQDTVRFALAA

SEQ ID NO: 78354 - protein, 358 aa, unidentified
MNRTARRGAGQVIGMIDGRQVVGLDIAKSVFQLHTVDMNTGEIVNVQLKRAKVLEHFANMTPCLIGIEACGGAHHWARRLMAVGHHVRLIHAKAVRPFVSGNKTDAADARAIWLAIQQPGTKFVGMKTLEQQATLVLHRQRELLQKMKVMQTNALRGLLHEFGAIFARGKNALFSEIEATLESLGKDIPQYVADSLREQAQRIKKLAEDIKAIEQRLTQQLRTDADMKRVAEIPGVGLLTATAAIATMGDAKAFKSGREFCAWLGLVPRQSGTGGKVKLLGISKRGDTYLRTLLIHGARSVLTHAKEPGRWLEQIRARRPANVVIVAQAAKMARTIWAVVAKQQEYQRGYLSAKPQAA

SEQ ID NO: 78355 - protein, 365 aa, unidentified
MQKISTMQTSGKNILEGQLTIGLDLGDRSSAYCVLNAAGEIVLEHKLATTREAMKQVFGSLPRCRIAMETGTHSPWVSRLLMALGHEVIVGHAQKVRLITKSRRKDDRLDARTLARLARIDPELLSPVKHRSAQAQLHLTEIRARAALVSTRTALVNAARGLVKSYGERLRKCHTQQVGREMTRELSMGLREALKPLLQEVESLNERIKEYDRRIEKMAKEMYPETALLKQVKGVGDLIATAYVLTIEDPHRFQKSRDAGCFLGLQPGRRNSGESEPQMRISKEGDEYLRTLLVQGAHYILGPFGEDSDLRRWGQKLSARGGKNAKKRAVVAVARKLAVLLHRLWVSGEVYEPLRNSQKPMSTAA

SEQ ID NO: 78356 - protein, 402 aa, unidentified
MLPPNRFIGLDIHKSYFVAVGVDAQKQVVFGPQTIPNHQLDAWVEKFLLPSDAVVVEMTVNTYLFYDVIAPHVHSVIAVHPPNVTLVTGVKVKTDKKAALTLAQLHAVGMLEGVWIPPEPVRCLRAAIAQREKMVRLSTQAKNRLSSLLHRRHLAYSGKGSQFSPDQKDWWLALPLTDLEKLIVQTDLNTLEFAQKQIETIEQALKREAAKDERVPLLAQLPGVGVLTALTILAAIGTIARFGDANHLVGYAGLGTRVHDSGQVHQNGRITKAGRKDLRRAMVNAANMAVQHHPFWKKELARMETRLGRSKAIVAIARKLLVGVWHILTNEEADRHADERSIAASFINLAYKIGTKNLPNGINARIFTRQQLDRLKIGGGLKTIPWGSRQIILPPSALNAKK

SEQ ID NO: 78357 - protein, 339 aa, unidentified
MEHYAGIDVSLERSSVCVVDALGKIVKEAKISSEPAALVAFFEAIGFAVRRIGLEAGPLSQWLHAGLKRAGFEAVLLETRHVKAALSAMTVKTDRKDARGLAQLLRMGWFQQVHAKSIGSQEIRALLVARKQLLARLLDVELSIRGILRGFGLKVGQVTRKTFEARHTTLERIAEAMLSARATLKAQYEKLHKAVLAIVREDAVCRRLITVPGVGPVVAVTFKSAVDDPSRIAKSKAVGALFGLTPKKYQSGEKDVTGGITRTGDEMVRTALYEAANVLLSRITRFSKLKRWGIDVAKRRGSKRAKVALARKIGIILHRMWIDGTTYRWAEAKPIAAQA

SEQ ID NO: 78358 - protein, 445 aa, unidentified
MHYKRLLTWIDGSSSYLSVGLDVGADFTWMSIALPNGAFIGKPFKIVHSDPRSRDLAVTKIKEAQETYSLKSRCFLESTGIYHIPLLCFLRDKGFDCSVINPIITKNSTNINIRKLHNDKFDSKKAALVGLNVSLKTSIIPEDSIVDLRNLVRDYYYFKDLQSAVALKLTAELKMSFPAYAKVFSKVTTQSSLKLLSSYPLAGDMLEASKDDIVETIRSTARFGEAYALRKYDAVIAAAQDASVFGRALPSNAVRIRLYIDTYQEYQKHLDALLKALHETVERLQDTLIYDQICLLQSLRGIGFLSAVVLIAEMGDFKLFPSPKKLYAYFGLDPAVKQSGKLNGDKVHMSKRGSSLARRVLHMVALNNVKVDKGSGTPVNPVIYDYYTRKCSGKKKPVAMGAVMHKICNIIFAMLRDNKPFEIITPEEHCQRFAAEYPDKIRKAA

SEQ ID NO: 78359 - protein, 446 aa, unidentified
MSTLNSAEEKPFYAARIGLDWADQKHFWTMLTAEGKRTRGELKHTPEAIEIWAVELARSFGGRPIALALEQKRGALVAILSKYAHVHLFPLHPTNLSHYRSSVCASGAKSDPSDADLILDYLVKHPEWLRGLRPDTVETRSLQFLVEERRKLVNQHTSQLQILIYWLKQIFPQMLGWFDDMSTPLVGDLLLRWPQLPALKKASQNTLRKFFVQHNCRSEERIQQRLDEIGQAVPATTDAALLNTADLCIRLAVQVLAAQRAGIAEFDRQIEAIYEAHPDRFIMASLPGAGPALEPRLIAALGTNRERFESASGMACCFGIAPVTESSGKSCWVHWRWACSKFARQTLHEWANCSIRSCGWAREHYDKQRGKGKGHHASVRSVAFKWIRILFRCWRDRVPYCEERYLKALRMHGGAVAAVVGQPMPLPPAVQWESCGGFSKIVELSS

SEQ ID NO: 78360 - protein, 377 aa, unidentified
MKKELYLGLDVHQEWILTAVAEPGRRGEVRDSGAISCDLQAVEKWVGRLRKAHGKEVVLRACYEAGPCGFGIARRLKQLGVKCEVVAPSMTPTRAGDRVKTDKRDARKLARLLRAGELTPIYIPEPTDEAMRDLCRARTDAVDDRRRSRHRLKGFLLRHGYRYQGKSAWTEAHMRYLRELVLPHPAMKAILEEYLMAISAASEGIERCEVAMRDLLPQWRLEPAVKALMAMKGFQTVAAMIVVSELGEVHRFAHPRRVMAYLGLIPSERTSSDRRRQGAITKCGNAHLRWLLVECAQHYATAPKVSKELSRRQEGQSREVRALSWKAQNRLHHRYTRLFARRLPRNKAIVAIARELCGFIWALLRRQRCYQEQAASV

SEQ ID NO: 78361 - protein, 354 aa, unidentified
MSDIKYVAFDVHQATISAAVLNLDGKLLTQAVMQTDATAIRDFLRGLSGRVHLTFEEGTQAQWLFELTRPLVAEVLVCNPRENQSMKRGNKSDRKDALQLATLLRAGLLKSVYHGAQQTQTLKQLAHTYDSLTEDTTRCMNRLKAVFRSQAIQCAGRDVYYTRHRQAWLVKLKAAGLQQRAEFLYRQLDHLRELRRDAQKALLKEARQHRAFKRLAEVPGLGPIRVAQIIAAIGSPHRFRSKRQLWAYCGFAVITRSSVDYQVSGDKLERRTKSTQTRGLNQSFSRRLKVAFKGAALEALKTEAFKKIYERLTRSGVRAEMARLTIARKLAAVALAIWKSDEAYDETKLSKLAA

SEQ ID NO: 78362 - protein, 430 aa, unidentified
MGLSVPNAMPPEHDEQPMPYEWFVGIDWGSQQQQVCVLDRDRRRVGERVVDHDGASLARLADWLLSVAVGQPQRVAVAIEVPRGAMVEGLLERGFHVFALHPKQLDRFRDRHSAAGAKDDRRDAFVLADAVRTDQPSFRRLQLDDPQLLRLRDLSRAEATLLEDFRRSANRLREQLPRLYPQMLELCSAADAPWLWDLLDLAPPPAHAVRLSGEQVQQVLNASRIRRVKAHEVRTCFQAPALPVAPGAAEAAQAHCGLLLPCLRVLAAPLQACHQQVSALLHTLAEAPGEGGRPSDVAIVLSLPGVGRKMTAWLFAEAAQPWAERDYQVVRTHGGVAPVTKHSGKRRQVMMRRGCNARLRHALYQMARVAMQRDAHCSRVYAAWRAKGQRHAQALRTLGDQLLRILMAMLRHGTCYDASRMRREPVGQRG

SEQ ID NO: 78363 - protein, 317 aa, unidentified
MTIDRSVTVLGIDLSKDWLDAYLLPQGCSWHVENDPDKLAEWVKELPPGISLVVMEASGGLQNLPAAAFAKANLPVAIVNPKQVRDFTKASGQHAKTDAIDAQMIAQFGVKMQPSPRQLPDEAQALLAELLARRRQLIQTRVAELNRLKTAHAEPIRQNIEAHIQSLEKFLSEIDSDIDEQVRNSPMWRVNEQLLTSVPGVGTTTARVLLGQLPELGRLSRRKLAALAGLAAFARESGQWRGKRFICGGRARVRASLYMAALTASRHNPVLSNFYSRLIDNGKPPKLALTAVMRRLLTILNAIIRDQKPWTNYAINS

SEQ ID NO: 78364 - protein, 363 aa, unidentified
MTRYVGLDAHSKRCVYVIQDEVGKVIGEGSVPTTHEGLLVWRSRYELPPGTGVALESGTMAFFVARQLKALGLEPRVVDAHEVRSKSLRPNQKSDRRDALELCEGLRRGTYRSIVHVPSEPIERLRETLGRRRHLVRVKTMQVNAVKRLLRGAGQQVLSRSLQSEKGWERLLAAVASDPSLNEFCAVHRALWRCAHEQIAVLEASLREQQRPYQQELDRLQTVPGVGPIVAVTVRAVFSDVKRFPSAKHAASYAGLVASTFDSGERVQHGHITRRGSAELRAMLCEAAHHAGYRNNALSPYFLQLCARRGYKMAVVAVAHRLCRILYAMLRDGTEFDLKKLAVEQGHFEHTVVRRYRRAVATA

SEQ ID NO: 78365 - protein, 359 aa, unidentified
MEAISTKMQDFRDQNIYVGMDVHHKSWKVHIYSDEFELKSFSQEPDIERLSDYLKKHYPQANYQLAYESGFCGFWIQRAFTAKGINCNVVHAADVPTNNKEQLRKTDKVDSKKIAKGLKNGELNFIHVPDIDLELDRQLLRSRSNLVKDTTRIKNRIKAILKLQGIEIPESYSEGRWWSKSFIKWLSEIDFQNLSGKLTMQTQITELVFLEEQKKKIDTAIKELSKTDRYNTNADLLQTIPSIGLLTAMILLTEIGDINRFKRLDELCSYCGIVPNCHSSGETESTGGLSRRGNSTIKTVLIECAWVAVKKDPALLLYYKQQIVHMKGQKAIIKVARKLLSRIRYVLMNQKEYVLGIIE

SEQ ID NO: 78366 - protein, 428 aa, unidentified
MITAVRQRCAGIDVHRDFVMVCLMWGPTEGEAHWEIRRFDTTVPGLEELHAWLSAEQCQDVVLESTGPYWEPVVNVIGEGRQICLANPQEVKNRRGHKTDKKDAWWLAHLHRHNMIRPSYLPAAPVRQLRLLTRRRRELIRNAAQEKNRVQKLLEQSNIKLRCVLSDVFGVSGAAMLEAIVIEGKTDPAEIASLARGTLRQKKEAIAGSLTGFQMPETHRFLVRQAMEHLATLVEHIEELDRQIQSHLVAHGMQQAAELVQSIPGIQSTSAAEVVAEVGPDVKAFPTPGNLSSWAGVCPGNKESAGKRGSSRTTKGNPYFRATLNQSAWAGSRTKQSEFQKCYEKLSPRLDHKGAIVAVAHALVYAIYSVLHYQRPYRPVPTPAGPDQPRTQRLIRHHTRRLKQLEAWLPKAPPADWTTTLARLAQTE

SEQ ID NO: 78367 - protein, 369 aa, unidentified
MADRITYVGLDVHKESIVVAVAAGGLRGEVREYGRIANTAGALDRLMRKLGGEGVGLRFCYEAGPCGYGIQRHLSAHGHECMVVAPSLIPKRAGDRVKTDRRDAASLARLHRAGELTAVWVPDAGHEAMRDLVRARLDAVHALRRARQQLSGFLLRQGCHYRRPAWTKLHRRWLAGLNFAQAVHHIVLEDYIAAVEAAEARRDRLTAQIEAMLPDWTLAPVVAALQTMRGMALVNAATLIAELGDLSRFANPRQLMAYLGLVPCEHSSGASIKRGGLTKAGNSAARRLLIEAAWTYRFPARVSRELLLRQEEQPKPIREIAWKAQLRLCARYRKLARSGKPANVVTAAIARELAGFIWAIARRVPPAVG

SEQ ID NO: 78368 - protein, 416 aa, unidentified
MNAAGIDVSSRKSTVAVLRPFGEVVKLPFDVRHSAEDLSALAAQLKSIEGETRVVMEHTGRYYECVAEVLHEAGLYVSAVNPLLIKEYGNNSLRKVKTDKADAMKIAKYALDNWTELRDYTPMDTIRYDLKTLNRQFQLASRQKTATANNLIALQEQSFPGIRKLFDSPVRSDGTQKWVDFTHDFWHVDCVRSGSQDAFAERYRKWCKRNRYQFSMEKAAEVYALAKSAVVLVQKTSVTKTLVQEAANQLTAISRSVETYRSEMNKLASQLPEYPVVMEMYGVGESLGPQLMAEIGDVRRFERKQSLVAFAGIDPAPSESGDYCSRSNRTTKRGSPYLRKTLFNIMTVHLQRAPADEPVFQFLNKKRAEGKPYYVYMTAAGNKFLRRYYGKVMAYFSTLEGLPPVDMDSTGLHHAE

SEQ ID NO: 78369 - protein, 353 aa, unidentified
MKKMQEFIEKGKRIYVGLEDSKRTWRVCIRCAGMVVDETSMPAEYENLLRYLQRGYPECAIEVMYESGFSGFWLHDRLVGDGMKCVVTPAHTVTEEKSNKVKTDKRDARRLARNLENGDYKRCVVPDRERREDRQINRTLVQIQREIIATKNRIRRFLDFHGLNEGLPSGQWSTAMYYRLKHMELGHSLKLCLDTYLRLLQELEQIKKELREALRTLCAKERYQRSVTLKQSCPGIGWLTAIRLTLEWGDVSRFPTGKHIASFTGLTCGEYSTAETIRRGRITAQGSENVRGWLIQCAWRAIRRDPALREKFRNVWSSSGNKKKAIVAVARKLAVRIRALECTNNPYCLGVIQ

SEQ ID NO: 78370 - protein, 334 aa, unidentified
MVYAAIDIHKRAFQAAVLDPESGQLVEERFTADRESLARWAEPWRGRLAAVAIEATTGWRWVWRELAGMGFEVRLVEPVQARGLLGRRRSAKTDRLDARWLARLLAKEMLPESWIPPAEIQELRDRTRLRKALAEDRRRWGQRLHAFLLHEGWPCSKSNLLRPPGLRWAASLRLPAHARLQVDSLLAVMAALEAQLDTVDTELRRFARQDERCQALQSIYGIGPILACHLLAEIGEARRFRRAEQITRLAGLDPVVEESGETRRRGKLAKAGSPHLRWALVEAAVHAHRTSAPDLALYRATRERRDTTVARLTVARKIGKRAYHALRELELATT

SEQ ID NO: 78371 - protein, 352 aa, unidentified
MLIIGCDFHPSFQQVAIFDNRTGEMQEKRLQHRDEAERFYRELAGPPVRVGMEACGHYPWFERLLEELGIELWLGDAAEVRASVVRKQKTDRRDAEHLMHLLIEDRFPKIWVPSLEVRDVRQLLVHRHKQVQTRTRTKNQLQAMALSHGVQKKWKLWTKAGRAELEQLPLLPNAAERRQRLLEALDALEADIVELNRRVEEEVRKRPEAVRLMTHPGVGPVTALAMVLTLGPAERFASSKEVGSYLGLIPSEESSGGKQRLGRISKQGSSFLRFLLVEAGQTAARYDPQLKRFYRRLAVRKNRGVAKVAVARKLATRLYLMLREQWTYAQLSQAVMQVSPSHSVAGKQKPSS

SEQ ID NO: 78372 - protein, 334 aa, unidentified
MENIALIGIDLGKNSFHIHCQDRRGKAVYRKKFTRSKLIEFLATCPATTIAMEACGGSHFMARKLEELGHFPKLISPQFVRPFVKSNKNDFVDAEAICEAASRPSMRFVQPRTESQQAMRALHRVRESLVQDKVKTTNQMHAFLLEFGISVPRGSAVISRLSTILEDNNLPLYLSQLLLKLQQHYHYLVEQIKELESQLKRKLDEDEVGQRLLSIPCVGTLTASTISTEIGDGKQYASSRDFAAATGLVPRQYSTGGRTTLLGISKRGNKKIRTLLVQCARVFIQKLEHQSGRLADWVRELLCRKSNFVVTCALANKLARIAWALTTRQQTYEV

SEQ ID NO: 78373 - protein, 343 aa, unidentified
MQTVTTIGLDIAKSVFQVHAVDAAGKVILRRQLKRRHVLAFFEKLPPCLIGIEACASSHHWSRELQALGHSVRLMPPAYVKPYVKRQKNDATDAEAICEAVTRANMRFVETKTADQQGGLVLHRTRHLCMRQQTSVINAIRAHLAEFGVVAPVGRNGVEELLRVVADPDDRRVPEVARVCLVALGAQLRRLKDQVLEFDRMITAWHRSNKMSIRLDECPGVGPVLATALVATVADPKSFRSGRNFSAWIGLVPKQHSSGGKDRLGSISKQGDRYLRSLFVIGALAVIRYAKVHGTRHRPWLTALLARRPAKVAAIALANKIARMVWAMMAKCERYKEPVALAA

SEQ ID NO: 78374 - protein, 444 aa, unidentified
MAETKESTPVEPDWAAFVAIDWADQKHFWRLAEAGSGRQEYGEVENTPEAVDVWATGLNVRFGGRPIAVCLEQSRGSLVCLLAKYAHLVLFPVHPKTAAQYRETFCPSGAKSDPSDTASLLDLLLRHRDKLRPLAPDTTETRLLQILVEGRRLLVDEKTREKNRLTACLKMYFPQILQWFDEVDSAVVGELLKTWPTLPDLQHAHPGTLRRFFHEHNCRGEERIQERIAAIYQAMPATEDAAIVEGESLRARALVELLAVLRSQIATYDRRIAEVVAAHPERDLFASLPGAGEVLVPRLIVALGTRRERFDSAYEIQCFSGIAPVTESSGKNRWVHFRVACPKFLRQTFHEFAAQSIAQSGWARAYYEAQKENKKSHHAAVRSLAFKWIRIIYRCWKDGKPYDEETYLRSLKRTGSPLIDRFQPDTVGQWKTVAGFQKFSPLPS

SEQ ID NO: 78375 - protein, 406 aa, unidentified
MNAVGIDVSKGKSTVAILQPFGVVVAAPFEVSHTDSELDQLAKNIKKLSGETRVVMEATGVYYEPVARRLHEHGIFVSVVNPMLISDYGGNTLRKAKTDKKDAIKIASYALNSWLDLTEYKPEEDIRRSLKTLNRQVKKVIKVTNMLKNNLISLTVTAFPGINKLFSSPARDSDGHLKWVDFVAKFPHRDTVARLSLNAFKKKYKSWCEKNKYHYQDSKAEEVHAHARKCVAGVSAEETFCLMIAKAAEFVNAACENENALKKEMNRLSSTLPEYEVVMGMYGVGESTGPQLMAEIGDTRRFHNRRAITAFFGYDTEPDDSGQHISKSRPITKKGSSSLRRTLFIIIRAISTQKPIDNPVYVFLDRKRSEGKHYYSYMTAAAAKFLRIYYAKVNEVLNEKGTSVCT

SEQ ID NO: 78376 - protein, 322 aa, unidentified
MNQLTLYYGVDVSKDTLHISYQTGTDASGQPQWAYQTLPNELDALEQWSTQLPSNSHLIFEYTGTYSARLGWVLALHNRPFSILTPSQSKGFATTLKSISKTDRSDAVLLARYGQVFQPPVSQLTDETLHQLRQQHKHLNDLRISQQAVANQLHALSFDPRASQKVKASLLVLQQSYLTQIALFEAELDQLSLQELQTISERMQRVKGIGPASAQALCTATNGLTGFESAKAVAKFVGIAPTQTQSGSSIHRRGRMARTGLGYVRGLLYMAARSARKYNEGCKALYERLRAKGKCHKVAMVAVMNKLVHQVFAVVKNNVEFV

SEQ ID NO: 78377 - protein, 465 aa, unidentified
MQVKNPRCAALDLGKDVLVAAVRLQEETSVRRECRTFGTTTRQLLQLSSWLESEGINHVVMEATGSYWKSVWHVLEGQFELMLANPVHIRNLPGRKSDVNDATWMADLHAHGLISGSFVPPGPIMALRELTRTRKQLGREVARHLQRIQRIVDVAGLKITGPISDLLGTSGRAILKGLIDGETDPERLVDLAHPRMQAKRATLVEALRGTLTPHQRGLLRIHFHLIETIEASIAELDFQIEEAVRPFRELLTRLKDVPGFGAINAPALLGEIGVDMTPFKTHRHLISWTRLCPRLDESAGKTHSRRTLKGAEWVKPLLVGAAWARQGQGQLPPRPVSSASCPSRRQKGDRRRSRVAPHDRLPHDPRGHPLQRLGSPSLRSARPLSHCQAIGRPPRTTRLQRTDHRPGCLGEFLSSWGGDLVPPDPCTLYPATSRERHPDPAPGAPRGDKRLEGMASGGGPAGSRA

SEQ ID NO: 78378 - protein, 465 aa, unidentified
MKRKTSKVKKHPQRVVIDSDWEPVNAHAAGVDIGSREHWACVPESAAARNVCQFGTFTADLEAMAQWFKDCGVTTVAMEATGVYWIPLFQMLERHGFKVILANARQTKNVAGRKSDVQDCQWIQRLHTYGLLQGSFRPEDPYCVVRTYLRYRDELVAARSTQCQHMQKALQQMNVQLSQVLSDVSGVSGLAIITAILEGERDGAKLARLVDRRVRATPAAIEKALAGDYRDEHLFVLRQAYELYQTYEQKITACDEQIVLETAKLPTKVELADQPLPARKPGRKPYLDKMAGQDMREALYQKFGVDLTAIEGIGVLTGLVLLTEVGPNVSRFRTEKHFCSWLGLCPDNRISGGRVLSSRSRRVVNRASDALRMAACTLERSQSALGGFYRRMKAKLGAAEAVTATAHKLARLIYRLIKHGEAYVSQGLALYEEKFKERKLRALHKMAKSMGFELTEKEPLPSGVS

SEQ ID NO: 78379 - protein, 410 aa, unidentified
MPKIVYQICCGIDVHKSFVVACIATTDEKLVTTYKSKRFSTFTGDLRRLAAWLAEHNCRDVCMESTGKYWIPVYNILEPTCTIVLAHPKYAKAIKGKKTDKRDAKWIADIFKHDLINGSFIPPADIRQLRDLVRYRFKLTSYITGEKNRAQNCLTVSNIKLDDVFSDVFGKAASAITDRLLESNEPFDVRPYLNKKIKATPEEIQAAVDGTMCANQAEKLRIIRSHMANLELCKANLESEILSAAEKYLPQLDLVSTVPGIQSFSAVAIIGEIGVNMSVFPTSRHLCSWAGLTPQNDQSAGKKKTTRISRAGAYIKPLLVQCALASIRSKQHPEVANRYKAIKKRRGHKKAIIAIARMLLTAIYNILKKNEPYNAELYRQLDKPPIQREVSVEQAIFILQRQGYLVTAGT

SEQ ID NO: 78380 - protein, 405 aa, unidentified
MTQPATLHYAGVDWATRTHAVCVVDQTGAIRARFEVPNTGKSFTGLCRRLAKLKVAGVAIERPDGPLVEAMLEGGLKVVVVAPRQVKALRSRYRASGAKSDPADAYLLADVLRTDGHRLTPLTPDSDPTKILRALTRTRKDLQEARVALVNQLTSQLERCFPGAIGLFAELHSPIAVAFLRRYPTSHAAAALTQAKLAAFLRRLHYPGRTTVATLLSRIQTAPLSGISPAEAAGRAVCVAALLDAIQITARQERELEAEIIERLEVHADAKVFTSLPKAGHGVRAAALLAELGDVRARFPDNDCLAALAGAAPVTITSGKRRVVKFRWACDKKLRNALIDFADDSRHASPWAAKIYADALARTGRHPHAVRILARAWIRVIWRLWQDGVAYDPAKHRGAVRLLAA

SEQ ID NO: 78381 - protein, 313 aa, unidentified
MSQETFVGIDVAKDHLDVHILPSGTSARFDTDSRGLDALVEAIKKISPKSIVLEATGGYERVVAASLTTEGMPPAVVNPRQIRDFARATGRLAKTDKIDAQILARFAQTIRPVARPIPTDTEKALKELVVRRRQLVDARAKEKNRRGQMCSESALGSIQRMIKTLDQEIAQIDRELDDHIKHNPAMVEKYELLITTPGIGPNTARVIVVQLVELGQLNRRQIAALLGVAPMNRDSGSMRGRRMISDGRSDVRTIFYMATLVATRCNKKIREFYQRLRAAGKPAKVAIVACMRKLIGILNAMIKHNEPFMAFSA

SEQ ID NO: 78382 - protein, 400 aa, unidentified
MIEIGEVAVFLGLDVGKGEHHGRGLTPAGKTVFDKRLPNSEPKLRALFDKLSAKYGTVLVVVDQPANIGALPLAVARDAGCLVAYLPGLTMRRIADLYPGEAKTDARDAFIIADAARTMPHTLRALAATDETIAELDMLAGYDDDLAGEVTRTSNRLRGLLTQIHPSLERVLGPRIQHPAVLTILERHGSPALIRKAGRRRLIALIRPEAPRMAERLVEDIFTALDEQTVVVAGTGAATTIVPGLAGQLRAHLSQRAALERQIADLLEAHPLSKLLTSMPGIGVRTGTRILIDVGDASTFATSGHLAAYAGLAPASRISGSSIRGEQPSRRGNKQLKRAFFLAAFASLADPASRTYYDRKRAQGKTHTQALLCLARRRIDVLFAMLRDGTFYESRPASAA

SEQ ID NO: 78383 - protein, 360 aa, unidentified
MIVIGVDVHKQSLTAVAVDEAGRMLDEQTVAVADGALVAWASTLCGERLWALEDCRQLTRTLERELLSVGEELVRVPPKLMAPERRTGRARGKSDPIDALAVARAALREPSLSRPREDEQPFRDLKLLVDHRDDLVDERRRAQQRLRWHLHQLDPAFAVPAKSLDRPTHLDRVGRWLARRPPEVQVRVARDLVVRCRSLTRAIVELDRELRQCTAQLAPALLELPGCGAITAAKLLAEIGPIGRFETDAQLARHGGVAPLEASSGRVQRHRLDRGGNRQLNCALYRIAITQGRYYPEARAYLEQAEGRAGAKRSAASNDNSPASLQHTKSEPRLDIGATLAQSGASVPGASAIDARTSSR

SEQ ID NO: 78384 - protein, 319 aa, unidentified
MAQNGLVVAGIDVAKDKVDVCIRSLSLKRTFANTVEDRRALNGWLRRNKVGKAVMEASGGYEREWAKALRHAGIEVRIVDPKRVRSFARSAGRLAKNDTIDAEMITWFAETFDQARGQVYDAAREQLHQMVHARHALKDMQSRLTSQGEHALPAAVQQVHVRISKTIAVELVKIEAEITALIQATPHFAELAEIIESVPGLARITSAALIADMPELGQINDKIAAALLGVAPYDDDSGRRRGERRIKGGRRRTRNIFYMATLGAATRHNPVLKAFYDRLVAKGKLKKVALTACMRKLIVILNTMIARGEKWDANRYAVS

SEQ ID NO: 78385 - protein, 367 aa, unidentified
MKKVSTAVAKQSRNISRQRLTIGLDLGDRNSWYCVLDEAGTIQLEQRVRTTAKALQEVFGAMPRSRIALEIGTHSPWISRLLSELGHEVIVANARKVRLIGESRKKDDRLDAQTLARLARIDPELLYPVKHRSAQAQADLMMIRARAGLVRARTGLVNAARGLAKSYGERLRGCNVRNLNPEKAEGLSPELQRALEPLLATIEELSERIVEYNDRIEALAQASYPQVALLKQIKGVGTLIALTFLLTLEDPHRFGKSRDVGGYLGLQPGRRKSGESEPQLHISKEGDPYLRTLLVQGAQHILGPFGIDCDLRRWGLKLAERGGRNGKKRAIVATARKLAVLLHHLWVSGEVYEPLHNSSRLTVAAAA

SEQ ID NO: 78386 - protein, 416 aa, unidentified
MSVALPEALFFTGIDWACAEHAVCVLDAAGKITARFTIKHSAEGIASLVRRLARYGDPADLPVAIERPSGRLVDLLLEAGHPVVPVSPNAIKTWREGEVLSGAKSDAGDAAVIAGYLRLRYHRLAPAAPYCDETRALRAAVRTREDLVQMRVAATNQLSALLEAHWPGARAVFADVESPISLEFLTRYPTPAAARHLGHKRMAAFLVKHGYSGRRPAAQLLARLHGAPAGTAGRALTEALQDAVLAVVAVLRALNGAVKDLDRSVAAHLGEHPDGPVFTSLPRPGQINAAQMLAEWGDCRPAYDGPDCVAALAGVTPVTKQSGKYRGVEFRWACNKRFRRAVTTFAGNSRHASPWAAQIYAEARAAGKDHPHATRILARAWIRVIWPCWVNGVPYDPARHRAAAALAGQTPSQPAA

SEQ ID NO: 78387 - protein, 409 aa, unidentified
MHKDIPKGKPIIARGRAVVGIDIGKRKHAAAAVSPQGEVIARLASFSNTREGIDRLERDVLKKAGGPRKTLVAMEATGHYWMPLYHELRRHKYRCVVLNPIQTNSRSAVRIRKTKTDKIDSLAIARFLLTGDALATRVPDEKTSELRLLVRHRRRLVQARCDMERYAHTLIDRVFPEYEGVFCKPFLPSARALIRQVGIAPDEIVSHEEDVRHVLHRASYGRLAAEKVDLLLEKASNSIGSRQAESVAVEQLRNIFDYIETIEKQTADIESDLENRIEAMDSPLLSLGINSPLAATIHAESDPIGDFHGPDQYVAYTGLDPSVRESGDTIRGRSKISKRGSPVLRSALYQAAFCVYRKHDYFHRCYRKHRRKGRSHTSALVVVAHKLARVVWRMLTDNRKFTKRPPKRR

SEQ ID NO: 78388 - protein, 343 aa, unidentified
MQAVTTIGLDIAKSVFQVHGIDATGNVVIRRQLKRRHVLAFFQKLSPCLVGIEACASSHHWSRELKALGHIVRLMPPAYVKPYVKRQKNDAADAEAICEAVTRKNMRFVETKTPEQQSCLMLHRSRHLFIRQQTAVINAIRAHLAEFGVVAPVGRKGVADLLDIVADPSDRRLPEVARACLAALGVQLRLLKAQILEFDRRIMAWHRSNETSKRLDEIPGVGPALATALVASVADPKAFRSARNFSAWIGLVPKQHSSGGKDRLGSISKQGDRYLRSLFTAGALAVIRYAKIRGTKHRPWLTALLARRPAKVAAIALANKIARMAWAMMAKGERYREPAALAA

SEQ ID NO: 78389 - protein, 322 aa, unidentified
MSFSFSGVDENEQPVLRRQIRRGEVAKFFAKLAPARIGIEACGASHCWARVLRGLGHEVMLLPPQYIKPYVKRRKNDKIDAEAICEAMSRPTMRFVPVKSAEQQAALTMLGVRDLLVKQRTMLINAIRGHAAEFGITVAKGSKQVPELLGRLASEKGVPALAREMIAMLSSQLDGLDIKLTAIERRLMAWHRQDQTSQCLATIPGIGPITGVSFALKVPDAKAFRSGRHFASWLGITPREGSTAGRQKLGRISRAGDEDLRRLLVIGATAVIRAAKPGRTAPWLLALLARKSKKLAAVALANKMARIVRAMMVSGETYRQPA

SEQ ID NO: 78390 - protein, 402 aa, unidentified
MNSVGIDISKGRSTIAVMRPFGEVVISPFEVCHTASELSELAKRLKSLDGETRVVMEATGNYHAPVAKLLHDAGLYVSVVNAKLVHGYGNNELRRVKTDRKDAVKLANYGLDRWLTLPRYIPEEDTRLLLKNCYRQYRQYSKVQTVLKNNLISLLDMVFPNANRLFSSPIRGDGSEKWVDFVAEFWHCRCVSEKSEKVFTSKYQRWCRKHGYNFSETKAHTIYTEASGHIDVMPKSETTKLLVEQAVSQLRATSAALAALKQEMQSLASQLPEYPIVMGMYGVGPTLGPQLMAEIGDVCRFYSKKALVAYAGLDAPPNDSGDVVGRHKSMSKIGASSLRRTLFLVMSVYLQTAPLDEPIYQFMDRKRAEGKPYRVYMMASANKFLRIYYATVKAYLEASGQL

SEQ ID NO: 78391 - protein, 426 aa, unidentified
MRVMYDRVAAIDVHKDMVKVAIRVPGAKRGTRKTDVLEFRTFYGVLQAMARELRSRGVTHVVMEASGVYTDPVYYALRELDFTEVMVINPAHAKALKGHKTDAKDAIRLLDLYECGLLSGSYMPSEDLREVRDLARYRMKTVQARTSEIQRLQKTLETAGIKLSSVVSDVTGASATAMIEALISGERRGSVMAGLAQTRLRAAGKMTDLSMALAGRFTEHHALMCRLHRDRIKIFDDAVDDLDAKIAPLVARYAREAELLKTLPGFGDVVVAGWLGAIGPAPHQHFATASRLASWATLCPGNYMSARKSKGGRTGDGGAYIKPLLIQAAWGAVRVPGRLQARFHRLVRKFGGPRNKGARKRAITAIAHTLLKIAYTVLKTGQPYADLGADFYTRRESPDARQDYLIRQLQKLNPGCIITVTPAETA

SEQ ID NO: 78392 - protein, 341 aa, unidentified
MQVTTIGLDIAKNVFQVHGIDVAEKVIVRKQLRRSQVLEFFKTLPRCLVGMEACATAHYWARELTKRGHQVRLMPAKDVKAYVKRNKNDAADAEAICEAVRRPTMRFVQIKSAEQQGGLMLHRTRDLLMRQRTQVINALRAHMAELGIVAAQGTAGLKELLKIIAGERDARLPVDAHASLVVLAAGLHAVQTMIGTIDKRIIIEHRSNEASKRLRSIPGIGLLGASAIVATVQDPKAFRSGRDFAAWIGLVPREDSTGGKQKLGPISKQGDRYLRRILVVGAHAVLKLARQKPERYPWLTQLLARRPFKVVAVALANKMARVAWALLAKGGTYYRARAAAV

SEQ ID NO: 78393 - protein, 343 aa, unidentified
MSGAYEGKQIVGMDLHRRRSVVVRMTDTGERLETVRISNDPDYLRAVMARAGDAPEVVLEATYGWYWAADTLAELGANVHLAHPLGVKMFGLRRVKNDERDAADLADLLRMGRLPESWIAPPATRELRGWVRHRAKLVGLRSSVKNQIYAVLAAAGVAVSMSDLFGVAGRQLLATTLLAVESRSRVDSLLRIIEALDFEIDLYARLIAGRSRTDPGYHAIQTIPGVGPLLGAVFVAEIGDISRFQRPEQLASWAGLTPKHHESDTTVHRGRITKQGSRLVRWAAVEAVQRVPAHTRLGQTRDRVGQRRGRNIGAVAAARELMTLVFYGLRDHHIRCLTSTPAA

SEQ ID NO: 78394 - protein, 380 aa, unidentified
MTETTRPEECSAAGSTVYLAFELGSTTWTLAFTTSRAQRPRIRTIAAGELGALVKELAQARERLGVSPTAVIRSCYEAGRDGFWLHRWLATHGVENVVVDSSSIEVNRRARRAKTDRLDAGSLLHLLIRWAQGEPKVWSVVRVPTPAAEAARQVIREIETARQDRLRVRNRLQALLATQGIRCALTRRFPAQVATLQTGDGRPLPAPWQARLTREWTQLQAIQARLRQLRVARLDALAAGDARVAQVARQLCRLRGVAETGATICSAELFGTRAFTNGRQIGALLGLAPVPYRSDQRVQDQGISQAGRGHLRRVSIQLAWCWLRYQPDRALTRWFQQRFGAAGGRSRRIGIVAVARKLMIALWRFAEHGVIPEGATLKTA

SEQ ID NO: 78395 - protein, 387 aa, unidentified
MSEMFNPHAPATAYDHNTTIVVVLELSGKNWLFGAVAPGLSRRTKRSFEARDVEGVVRAIEQVKGESAKASLEITRIVVGFESGRDGFWIARALQQRGLEVYVMHAASIAVERRGKRAKTDRLDVDLLLTTLIGWLRGEPGRCAMAPIPSEEEEDLREPGRRRETLVKTRLKVENQIASLLIRQGIAGFKPRLKNCETKLGELRTFDGRPLPANTMKSLGLLLAQHRLLSAQLHEIEEARQQVVKVAKPDRLQRMIQALARVVGVGVETAIVLVYEVFSRSFKDRRALAAFVGLTGTPYDSGGSKTEQGISKNGNPRVRRMLSQLAWRWLGHQPESALAQWFRARLGGAKGRMKKVLIVALMRKLVIALWRLAETGEVPAGVRLAAR

SEQ ID NO: 78396 - protein, 339 aa, unidentified
MSEFTKKNHFIGIDISKDKLDLALVNEKSPGVFKDKIVDNSFKGFDDIQNWLSKQKVKLEDCLFCMEHTGTYGLLLFAWLGQMGVDYCVEPGLRIKRSLGMTRGKNDKVDARRIADYAFTNRAKLAPFSLPSNLLLQIKQLLTYRDQQTRIKVSLKNSRKSHVQYQHVTGLQSISEDLKNQIDECESRIEGIDEQIKNLIKSDETMKKNFDLATSVKGVGLVIAAFMLVTTNNFTGFENGRKYACYSGIAPFENTSGKYKGRTKVSHLANKRMKALLSNGANSARQWDPELKVYYDRKIQEGKEHNLVINSIKCKLVNRVFAVVKRQTPYVTTYQQNFA

SEQ ID NO: 78397 - protein, 373 aa, unidentified
MPRYSTAFGMDVHLRSTTVCALDAETGEAVTRRFRGNPWGEVAEWMSGFPGPSLAAYESGYLGFAPQRELSGLGVDCVVAAVSKVPRSAADLSSKNDRNDAARMAKAILSHDISPVWVPSPEIEGLRDLAGAHDAATARLAAAKQRLLTFLARRGYAYGGTTPAGNPRRYWTYDFLRWLDKVRPADDGGIRALAALRNEVEAAAETRDDLLAEYRAAVAAGPLSAEVEALQSIRGCGFALAAAFASEVGDFSRFRSGRQVTSYFGLAPKQRSSADSVRLGGISGAGNALVRRLAVEGSWSYVQASHQPKLMPKGSGVPLEVRMHGRKGSERLLRRREEMLARGMPQAKANAATAAELVRWLWALGAMCREATE

SEQ ID NO: 78398 - protein, 342 aa, unidentified
MTHYAGIDVSLEQASVCVVDANGKIVAEGKVASEPAALLAWFRSLGVELARIGLEAGPLSQWLYAGMTAGGLAVELLETRHVHAAFKAMPVKSDRNDARGIAQLMRLGWFRPVHCKSLAAQETRALLTARKLVQSKLHDVEMSVRGILRGFGLKVGKTTACGFAGRVRELVAGHPTLEVVAAALLAVRATMVRELSGLEKRVRTIARSDARARLLMSTPGVGAIVALTYVAAVDDPTRFKSSKGVGAHFGLTPRKYQSGETDITGGISKIGDPSVRAALYEAAHVILTRPIKGCTSLKSWAMRLARRAGMKSAKVALARKLAVILHRMWVDGTTFNAAAAAA

SEQ ID NO: 78399 - protein, 404 aa, unidentified
MFYAGIDWADQKHDALVLDEANRKRGAIRVAHSPEGLAKLDAWLSQMLGQQNKEQMACIIETTHGLLIAFLLEHGWPVYPVNPRTVDRRRSASGAKTDTIDAYLLAKTGRADLADLHRLTPDSEKVAELKLLTRDQDALIQMQTRLVNQLTACLKAYYPVALELFEKLQQKSTLLFLQTYPTAQAAMAASAEQIQQVLRQARHPQARRVAQEIVERLHQPHLQADAVTSRAKSRLMLVLVSQLLPLIEQIAQYDKEIETLFLTHSDHEIFESLPRAGQRLAPRLLAEIGDDRKRYQDASSLQALGGTSPVLFQSGMYAKAHRRMGCIKPLRNVLHQFAWQTTQCEPWARDYYQRKRAEGKSHTVAVRALANVWIRIIFAMWMHHRCYETVIFEQAQQQHARRAA

SEQ ID NO: 78400 - protein, 322 aa, unidentified
MSGPIAFVGIDVSKAHLDVALLPDATTFRVANDPDGGAELIARIASNTPPTVVLEATGSYHVGITLALAAAGMPPAVMNPEQTHAFIQSEGQRTKTDRIDARLLARFGQQKRPSPSPVLTQNARDLRELVACRDDFTKLLTMEKNRLHVVTDRTRSHHQAVIDHLVAERRTVEREIAALIAADAALTERLRIVRSRPGIGVVLGPVVLAGLGELGQDGAKGLASLAGVAPHIQQSGTRKAHGAIRGGRGTIRKALYQMAVTAVTRNPVMKAHFRQLRRRLPYKAAIIACARRMLGILNAMVREGLTWKETKVGQGQFLPDPA

SEQ ID NO: 78401 - protein, 480 aa, unidentified
MVYRNIGIDLGVTAKHKAQICDEKGIKVETFSFHITRENLDVLCSKALKGASQGTKLRIICEPTSMSWFPIAVYAKKNGHEVVRVKSHKTYDLRKYFSRNKKNDKLDAKLLSLMPMIDEKAVEQIYLPKSKLFMLERFNRQRERLTKELASIKNRLISLYHWAIPGLTNCFEDPFDNRARSFYRHFSNSVKAKESGIKGIKEIIEPACRQRMKEELPEKLYRIACNSCLLYEGSADWIDFESIQAEVAIELDHFDMLENYLSKIKERIKSMYDEVYPSKHLETIKGIGPTLGPSIIGIICDPNRFSSQKKLRSFAGLIPQQDDSGESNKKGLSLTQEGSARFRRDLFIAADVSRQWDPQLAKIYYTEMVHKGHCHYQAVCSVMTHLINRILCVLKENRPYRLLDDNGNQVSSKEAKSIIKERFVVPEEVRQRTRSRRSRKNRREEPIRNLLTRQLNAPQNSYPVPLETIIQNFEKIENAS

SEQ ID NO: 78402 - protein, 356 aa, unidentified
MMIIGCDYHPSMQQIAWVDRETGECGERQLTHRDGEAEKFYRELQQRGLRLRVGIEATGHTRWFERLLAELQIELWIGDPAKIRAKRVRKQKTDRQDAQHLLTLLLEDRFPRLWVPDPENRDVRQLLWHRHRLVQMRTRVKNQLQSMALNEGVQRKHKLWNREGRAELESFALAPWAARRRQDLLQLLDQFTQQIDELSLAVEQEAQRRPAVRQLMTHPGVGPITGLAFVLVLGTPERFGCGKQVGSYLGLIPCEDSSGGRQRLGHISKQGNTLLRHLLVEAAQSAVRCDTEWRKRFLHLALRRDPRIAKVAMARKLDVSLYWLWRNHPAPATTASTVRTWSSPGNTMVCRRTPTP

SEQ ID NO: 78403 - protein, 338 aa, unidentified
MNKFSGIDLHSNNSVVVVSDEADRIVYQRRLPNDPVQIRAALAPHREDLVGVVIEATFNWYWLVDELMKDGYCVHLANPAAIRQYDGLKYSGDFADAAYLAQLLRLGLLPEGYIYPAQGRPVRDLSRKRMQLVQCRTAQILAIENLFARQTGGQMQGERVKRLDEAQVNEFGFAPDVLLAMQANLAVMQTLQEEIGIIEKRLMERVKLHPDYALLNSVPGIGPILATTIMLETGTISRFAEVGNFSSYCRCVDSRRESNSRKKGEGNTKNGNKYLAWAFVEAANFAIRSCPEARRFYERKKRARNRIVAIKALAHKLARACYHMLREHKPFEVARCFG

SEQ ID NO: 78404 - protein, 319 aa, unidentified
MTIAVPLAVAAGVDAGQRFLDVALAPSGQTFRMPNLAEGIAEIIARLERSGVRRVVLEAIGPYAEPLVKALSVAGFEVGIVNPRRIKAFREAEGGRAKTDRLDARLIARFALTMPETLRPLPTDTQLELKALSLRRRQLTEMIAMEKTRMKQVRGTLLLDSHRAAIAALSAQCQAIEAELAKRIGDDAELRRVLHILKSIPGIGERVATLLITDLPELGQRDRKAIASLAGLAPHVSQSGAAPPRAAIAGGRPCVRAALYMAALAAARHHPKLRDDYNALRLQGKPGKVALIAIARKLLVTANALVKADTPYQGKTLDT

SEQ ID NO: 78405 - protein, 348 aa, unidentified
MRFYTKTHTHYCGIDLHAKTLYLCILDQEGQVLFHKNLRSRPEEFLAAVGPYREDLVVAVECMFTWYWLADLCRREGIEFVLGHALYMKAIHGAKAKNDRVDALKIAKLLRGGTLPKAYVYPPEMRATRDLLRRRLHLVRRRGNLLAHVQNTHHQYNLPVPTAKVAYAANREGVAEAFADPDVRKSLEMDLEVVGHYDAVLRDLELHLVRRAKQHDPQAFHRLRSVPGIGKILALTILYEIHEIERFPRVQDFLSYARLVKCEHNSAGKKLGTGGAKIGNVHLKWAFSEAAVLFLRNNPEGQQHLRRLAGRHGKAKALSILASKLGRTVYLMLSKERVFEMERFLART

SEQ ID NO: 78406 - protein, 318 aa, unidentified
MTTESSSVDYGVDVSKESLHIDGPKGLEGIANRPRPVHAWLKRVPTGACFAIEATGTYHVCFAELAHRLGHTVYLVDGFRLSRYRDSVGQRAKNDPLDAALLRRYLQREKGELTPWQPAPQGYTRLMRLLHRRERLVSTRTALAQSLADIPACRHSVRALLRRITAVIDQLERCIVTGVRESGWGEDMKRCRKIGGIGPLTSAGLAVIYQRGHFRSADAFIAFLGLDVRVRDSGKQRGKRKLTKKGDAELRRLLYNAAMSASRTAAWRPFYQRHLDRGFTRTQALVALARKLARVAFALMKNQSDYRPQVAQEDCIGP

SEQ ID NO: 78407 - protein, 347 aa, unidentified
MTLYIGVDFHPHQQTVSYCNTEHGEVEQISLAHNVELVRRFYEQFPKAVVGIEASCTAAWFEHLMNELGHELQVGNPTLIRARARSRHKSDKRDADLILELLLKGEFPSLWRRSTKSQSVLEQLRFRHQLVKHRTQVCNRLQALAHSAGLPKRGIQTKRARLALMAANFTETQSFERSQLFELLDDLSGRIKVIEKWLEEKAAGDAQVGLLLSHKGIGTLSALVVVHTLGDITRFPSSKEAVAYTGLDPLERSSAGKVRTGSISKAGSAVLRHLLGQAMHVAARFDGELKAFYKRVANRRTKSVAKVATTRKLLIRLFIMLRDGIDYQEFKRRGAAVGMPVLSHGLQ

SEQ ID NO: 78408 - protein, 406 aa, unidentified
MKQIVSVGIDVSKGKSTVCAMIHPNTIIKESFEVLHTVEEMSMLADYIGSLDGEIRIVMESTGHYHLPVAQFLYQKGFFICVENAYIIRQFSRIMLHGAKTDPLDAKKLAKYGLAYWSELKPYKFHPSCYTELSLLSKQYQTYIKLLIAAKQNVIHLMDEMLPGFKEALDTASSVQFSKVKYVDFAKEFYHVDMIKSMGKEIFRENYKQWCKEKGYRFQSEKADELFHLAEDGIPTLPTEFPSTRLCMEVATEQVSQLGYALEQILSQMQNLAKTLPEYQTIRQMGGMGEKLCVRFIADIGDVRRFHNGKALVAYAGIDAPPYQSGQYTGTKRRISKRGNSALRKTGYEVMKSLKSHPLKTDTRVYDFIIKKENEGKSRKQAKIAGLNKFLQIYYARVIEIYKNIA

SEQ ID NO: 78409 - protein, 344 aa, unidentified
MDISVLGIDLGKNVCSVVGLDASGAVVMRRKVRRETLIALAEKLPPCVVGMEACCGAHHLGRVFAAHGHDVRLMSPEYVRPYVKAQKNDDRDAEGIAEAATRPTMRFVELKSQDQLDMQTLHRSRDRLVGERTALINQLRAILLERGMAAPQGKRKLEQFLAVLMDERGGAVLSPRMVLLVEDARAQWAELDRRIAAFDAEFVRWAKENEEAHRLTTIPGVGAIVASALVAAVGQAESFERGRDLAAWLGLVPRQFTTGGKPKLLGISKRGNKYLRRQLIHGARAALPYVAERDTPLGRWAKGLASRAHRNVAIVAFANKLARIAWAVLRRGERFAVTGMPVAA

SEQ ID NO: 78410 - protein, 397 aa, unidentified
MYIVGIDIAKRKHEAAVIDGEGTVIIKPFSFTNNCSGYNRLLAMLAKAKLPLDEVSFAMEATGHYWLALFTRLQKEGFRVQVINPVQTNSIRSFYIRQAKTDPRDALLIAEVIRFGHFSESTLHPENIYELRELCRGRHAIVSMQADVKRKVVALLDQVFPEYETAFTNLFGDTSMAILQTCPTPKELSEMPLEELCHLIEVSSHKRFRMAKAQELQALARNSFGFAMAGDVFSTMIRLYAKHLVFLKQQVQEMDRKIAEIMDTLDTPITTITGIGPTLGAYILSEIGDISRFSSAAKLAAYAGIDPTMRQSGEYNGVRNRMSKRGSPYLRHAIWLAASSAVLHDPALKLYFQKKRDEGKPYMASVGHACRKMVSIIYAVMRDNKAYTPCIPNEISA

SEQ ID NO: 78411 - protein, 365 aa, unidentified
MREASVISERTSVGLDVHALSVVGCAIDGVTGELDRRRLTPDPAEVLAWVSSLPGPVRVVYEAGPTGFGLVRFLRERGVDCLVAAPSKLQRPAGDRVKTDAGDALLLARLLKLGEIVEVTLPTVEQEAARDLVRAREDARGDLMRARHRLSKLLLRQGIVYYGGQAWTGKHDVWLRSQRFELSGLQLAYDSAYEAMLHTVDRRDRLDRAITEMAMSSDYREVVQRLACLRGISTLTGFGLAVEIGDWHRFTGSSIGAYLGLVPSEHSSGKSRSQGSITKTGNTHARRLLVEAAWHHRKTYRTPGATMRARWDQALMPARVRGHEGNTRLHARWNAFTVRKKRPVIANVAIARELAGWCWSLAVLE

SEQ ID NO: 78412 - protein, 345 aa, unidentified
MKVTTVGIDLAKTVFQVHGVDERGNAVLRKQLKRKDVLSFFANLQACLIGMEACGSAHWWARKLAELGHTPRLMAPQFVKPYVKTNKSDRNDAEAICEAVARPNMRFVPVKLPEQQAVLALHRARQGFVKARTAQANQIRGLLTEFGIVIPKGIGHIAKRLPEILEEGENGLPGMMRQLLRRLGENLKDMDDHVGEMERQIKLWHRENEQSCKLEAIAGIGPITASAYVASLGDAKSFKNARQVPAWLGMVPRHEGTGGRATLGKISKRGDVYLRTMLIHGARSVIAQIERKPDQADEWLKKLLARRNKNIAAVALAAKNARIAWALLAHERGYQRDYVTPRPVA

SEQ ID NO: 78413 - protein, 316 aa, unidentified
MTDRPNFVGIDVSKAQLDVALRPSDEHDTLVHDAVGIDTLVARLRHVAPTLIVLEATGGWERPLVRALVAAALPVIVANPRHVRDFAKATGQLAKTDRLDAVVLARFAEAVRPPLRPHPDAATEALAALLARRRQLLDMLTAEKNRLSTAPPRVQRRIRAHVTWLTAELARLNEDLDAAIRQSPVWREQEDLLQSTPGVGPVMSRTLLADLPELGTLNRKQIAALVGVAPLNRDSGTLRGKRQVWGGRAPVRAALYMATLVATKCNPVIRSFYLRLRGVGKAPKVALVACMRKLLTMLNAMMKHRTPWRSSAVQKA

SEQ ID NO: 78414 - protein, 395 aa, unidentified
MNKVIHYVGLDVHKETIAVSIAPQNTTEVRRYGIIGGTLDAVDKLIKKLSADNVELRWVYEAGPCGFVLCRHLRSKGFVCQVVAPSLIPKKASDRVKTDRRDADQLARLYRAGELTAIHVPDQEDEAIRDLVRARTSAVVEQRKARNRLKGFLLRLGYRYTGKSGWNDAHKRYLSSLVMPRPAQQIAFQEYIHAINDATERLERLSQAVEDALPGWKWEPVVRTLMSLRGVQLLTGMTLVAEVGDFSRFDDARSLMNFFGLTPSEHSSGGSRVQGGITKCGNVHCRRVLTEAAWHYRLTPKVSEPLQKRQEGQSKEVRLIAWNAQKRLHQRFRQLSAKKKSVIAAAAVARELTGFVWAIARQVKPVERPAAPEISRTCRGKVYRLNPEKKMQPAK

SEQ ID NO: 78415 - protein, 465 aa, unidentified
MRTKSRRTKGIEEAHPFAGMSQVNKDAAGVDIGATEIVVCVAGDATTQIVIASRVSYGKAFGNYTVDLQSIGRWLKEYNIKTVAMESTGVYWIPLFEELERQGFECLLISSRSLRRVPGRKSDIQDAQWIQTLHSYGLLESSFRPQGDLVGLRTLLRHRGELVDHRSPHVQHMQKSLLQMNIQLSQAVSDITGQTGQAILRAIVGGERDPQTLAALRDRNCKKSEEEIAKALTGTWGEEYLFILKQALELFDYYTRQIEGCDAEVERMYALTRPEWEGGELQPPSQSKRNSHSKNAPKNQKEIRQHLKRLAGVDISAVEGIGVSGAQTVIIECGTDLIQFPKEGNFSSWLGLAPKHEISGGKVLKNRTLKTKNRAGQAFRMAAQSVKRSDCVFGMMYRRFRSRMDNRQATVATAHAIARVVYRMLKYKVEYESIDVTEYEKQYEEQQIKYMKKKAAKLGYQLVPA

SEQ ID NO: 78416 - protein, 304 aa, unidentified
MSKDRLDVAVGSTGAVRGFDNDAAGHVALARHLRTVAPARVVLEATGGYERAAVAALAAAGLPVIVVNPRRAREFARAAGVVAKTDRLDACVLALYAERLKPAPRPLPSPQQQVLEDPVARRAQLVGMLTQEKNRLRQAAAPRIQKSIEAIIKALRKQIDDAEDDIAREIEDSPVWKDAAERMDSVPGVGFKTVCVLLGALPELGTLSRQCIAALAGLAPVNRDSGKMRGKRTIGGGRADVRTALYLAALSAVRHNPAIKKFYDRLVEAGKPKKVAPTAAAHKLLTILNAILRETTTWRNPMTT

SEQ ID NO: 78417 - protein, 429 aa, unidentified
MNYNTQNAKIASITEKTLIVGIDVGSETHYARAFSWRNYEYSKKPFAFSNDEAGFAAFKEWMDDIAEKHGMEVIIPGMEPTGHYWLNLGAYLQEQGMKPVHVNPHHVKKSKELDDNNPSKNDRKDPKTIAGLVNEGRFSYPYIPTGIYAEIRNLSNLRIQTQEEITRIKNRMARWFSIYFPEIKDVYRNPDAVSGLMVIKQAPLPCDIRELGVEGVNKIWRDARLKGAGIKRATTLVTAAEHSIGNTEAPRSARKEIRNLLEDYEGYKKRMDELMEEIEKTLSEIPYIDKLMEINGIGIKTVSCFIAEVGDIGRFDNPKQVQKLAGYAIVADSSGKHNGESRISHRGRKRLRYALYEAAISVIGKNKEFKEIHSYYRTREKNPLKKMQSVIAVACKLIRIFYTILTKGVDYDGQKMLNDIVRPEIQLAA

SEQ ID NO: 78418 - protein, 354 aa, unidentified
MSQTLNAAIAVVGIDIGKNSFHIVGHDERGAIVLRQKWSRGQVEARLANMPPCLIGMEACVGAHHLSRKLRALGHDARLMPAKYVRPYSKGQKNDFRDAEAIAEAVQRPTMKFVATKTADQLDLQALHRVRERLVSQRTGIINQIRAFLLERGIAVRQGQRFLRAELPRILATPPDVLSPRMVRIIEDLAGDWRRLDERVEGLSNEIEAIARQDTGCERLMSVPGIGPIISSAMVAAIGGGDVFTKGRDFAAWLGLVPKQISTGDRTILGKISRRGNRYLRVLFVQAAWVVLIKPTVWERHGLKPWIEAARKRLHHNVLAIALANKLARIAWSVLARGRAFEARKMDQAANQSA

SEQ ID NO: 78419 - protein, 357 aa, unidentified
MRIIGCDLHTRQETMAMVDTETGEVVEKTLQHEGEKVREFYSALPRPVQVGIEATGSMLWFLNLMEELGIDSQVGHPAKIRAAEPRKQKHDRRDADLLLKLLMENRFPSIWMPSKELRDLRALLWHRHQWVRTRTRVQNALQAMALTNGLRRGKSLWSQEGQHAIASLPLGPHAAHRRTALQALYRELDADINALDKRVLEQALERPEARRLMTHPGVGPVTALATDVFLGDPVRFENAKALASYVGMIPSEYSSAGRQRLGGLSKQGNPLLRFLWCEAAIHAVRRDPLLQRFYRRKLVQKGMGKARVAVARKLGIRLYIMLRDQIDYEEFCRRGQMRQKNGAARAGIPEVGYGPSL

SEQ ID NO: 78420 - protein, 343 aa, unidentified
MTKLNVIGVDLAKNVIQVSVLSPSNRELRNSSLTRRKFAEFLGRQRPSLVAFEACATSHYWARVAQRHGHQVKIIPAKAVFPFRQGHKTDENDALAVAEAARRPNVKLAPLKTVEQQGMQAIQRSRELLVHERVSLSNHLRGLLMEFGIVIPQGFASLYRLLPEILEDGENELPDLYRPTLNLLYGRLCDLREDLERLNREIEVLVQANPVCRRLTALEGVGPIGSVLLYATLGTGEAFANGRQFSAYLGLTPKQFSSGGKVNLVGISKRVANRRLRAVLITGARAYVYHMKEPKTAKDRWLWAIVERSGKCKAAVALANKNVRTAWAMLTQNTEYQRNPLAA

SEQ ID NO: 78421 - protein, 400 aa, unidentified
MISVGIDVSKGKSTVCILKPYGEIVSKPFNITHTQKDLSELSSMLFRLNDEVKIVMEATGIYHLPVLTYLQEKGFFVSVINPYLMKSYRNESLRKAKTDKIDSRIIANYGIDHWFKMKEFQTSGEIYEELKLLGQQYRHYMKLHLLSLAELTHLLDLTMPGIKNLLASWNETNRKDKRSDFVERFWHYDVITSMSEQEFTEEYILWAKEKKYVPSQEKAKVIYTLAQESIPTLPSETSLVKMLVTEAVRVLKEVDATLGLILSRMQEIAKTLPEYSVVREMGGVGNTLAPKLIAEIGDVRRFRNGKALVAFAGIDPPPYESGQFVGCNRKISKRGSASLRKVGYETMRSLKMRSRPEDPVYRYVVKKESEGKSKKSAKIAGLNKFLRIYYARVTELYKNI

SEQ ID NO: 78422 - protein, 339 aa, unidentified
MKYTPVGVDIAKHLIQVHFIDEHTGEVIDKQLRRQDFLMFFCNREPCLIGMEACRGSQHWGRELTKLGHKVRLLQAHFVKAFVMGNKNDVMDARAIWMAVQQPGKDIAVKTEEQQSVLVLHRSRRQLVKFRTMQINSLHGTLLEFGKTIHKGRAAMERELPEAQERMKERLPPYLITVLENQYNRLNELDSLIEDIEKKLTSVARQNETCKRLLDIPGVGPLIATAAVATMREASAFKSGREFAAYVGLVPKQTGSGGKIRLLEISKRGNTYLRALFIHSARAAALLPKEPGPWITELKKRRPTSVAIVAMANKLARTVWAIAAHGSKYDKNHVSIRSY

SEQ ID NO: 78423 - protein, 396 aa, unidentified
MTTIGIDIGGRTHVVARCRDGQARADHEILRVSEDRAGFTILDAWLDRQPEPVTLVTMESSGHYWMPLASHLRRRVVPVAVVNPLAAKYFARSRLGRTKSDPADARSLAEMAMRDTPDARDPLAGAELRQAARFAMTLVEEQAKVCQRLIRLVELGFPELSELFEDPTCRTAREVLRVAPTARAATRRRTSTLANANGSPGHRRLGTARAERLQAAAADSIAVPELDAEVAFEVRLLLDQYDLLERQITDADHRVAGLLDGELARRIQTIPGVGPSIAATLISEIGDIGRFTDFDGLLAYAGVHPAERSSGKKGSNPETSWHMSKAGNAHLRAAAYRMALVGIQHNPVIAAHYARKRAAGKSKMNALGHCMRKALSIVWGVWRNGQDFDPDWAVED

SEQ ID NO: 78424 - protein, 482 aa, unidentified
MKKRNIYQNQSQELLSLFEEAGSSAKVMCVPMDYAKKDHLVMFCNGHGDILRKPFSVKNSPEGIEYLIDQVTRSCRRRGIKKEHVFLGGEDANSFAENFVSTLRFKGWLVAGVNAHDAKKQRVNLQASTDRIDLMGIATMLLNCRANCCPAATGIYRNLRTLVRHRRKLVVMLTEVKNRAHGIVDRLFPGFLNENKSGIVPFTQSSLYLMENRFSPKQIRRRRRQKLIEILKRFGTSKAEETALKLQQYAAKVLHTPDEYIDTLQISLAQHVKHIRCLKESIVQLEKEIAVNLAQTQGAFLTSVRGIGIVLAAGVSAEIGDPYEQKPLNNVISYSGIIPRVKQTGGVDGKTYTGHVAKRCNRILKDYVVKSAYHLGLYGPEDLMADYKRRDASGQHADFGIGRRYLRMAMSLMRTSQVYLSPRLRKADTALEERAGHYLTSWPFLRDKWKKAGALEAAFSKDRPLGLWRQIVQKLYDITLKL

SEQ ID NO: 78425 - protein, 343 aa, unidentified
MDHFAGLDVSVKDTSVCIVDDTGRLVREVKVASEPEALLAVLANPAYHFKRIGLEAGPLSQWLFGALAEAGLPVICVETRHMRAVLQAQINKTDRNDARGIAQMMRAGLYRPVHVKTLRSQKLRMLLTHRKLLQGKAIAIDNDLRGTLRNFGLKVGVVRTVKFEVRIKELVENLPDLAVLVEPLLIVRRVLREQIAILHRRLLAIVRGDDVCRRLMTIPGVGPVVALTYRATVDVPARFRNSKAAGAVFGLTPSKHQSGEINRTGAISKCGDKMMRVMLYEAAQSMLTRTSKWSWLKAWAMKIARHRGMKKAIVALARRLAVIMHRIWVDGTEFQWARETAVA

SEQ ID NO: 78426 - protein, 356 aa, unidentified
MSHEVKYIGMDVHKEAIVIAVLNESGKLVIESVIESKASSILQFLHGLRGELHVTGEEGTWAAWLYDLLQPQVQHMVVCNPRRNALLKEGSKSDKVDARKLADLLRTGMLRPVYHGENGVRTLRELGRSYQTIGKDLTRVMNRLKALYRGWGIPCAGTQVYAVRTREEWLDKLPQAGVQRRAELLYQQLDGLQALRREVRPELLAESRKHKAAKLLRQIPCIGPIRAARLIALMQTPHRFRSKRQLWTYSGLGVETHDSAQYRFVRGQLQLSKKPQQLRGLNRNHNHEMKEIFKSAATRASCGRGPFYDFYAALLAKGMKPEMARLTLARKIAAITLTLWKKEERFDAEQLKTQAA

SEQ ID NO: 78427 - protein, 372 aa, unidentified
MKQNIIHIGLDVDDTQYHGAAFNKATGEVVDFKCRPTLKGLLQQLDRMARHFKDHKIKLCYEASYVGYCLQRDLISNGVHCDIVSPSSIPSPRGKAIKTDRIDAGYLAQFYANELLTIVQPPDEEQEQDRDLLRSRQKVMQQRNQLRKHLQAVLRRSGLHYRAETGNKSHWTKHHYCWLERTIDGLTGSLKVNLELLLRQLKALNEVLTEYGQQIDLLANSPRYQCAVQSLTCYKGIKNVFALTIITEIGDIKRFSHPRKLVSWVGMDIREYSSGGKYNRFEITKHGNRYIRTAFVEANQRGYRTAKIGQDLKSRRKHIAPELVNIADRCLRRLNKKGNRLLLAGKHPNKVKVACAREMVGFVWESLNKAAA

SEQ ID NO: 78428 - protein, 346 aa, unidentified
MEHYAGIDVSLELSSVCVVDGRGKVVKEAKVASEPDALASFFKGLGFPVKLIGLEAGPLSQWLHSGLMRAGFEAVLLETRHVKAALSAMTVKTDRKDACGLAQLLRMGWFQPVHAKSIGSQEIRALLVARKQLLGRLLDVELSIRGILRGFGLKVGQVTRKTFEARIWELVTGQATLERIAEAMLSARATLQAQYEELHKAVLGFVREDAVCRRLMTVPGVGPVVAVTFKSAVDDPSRITKSKAVGALFGLTPKKYQSGEKDVTGGITRAGDEMVRTALYQAANVLLSRITRFSKLKRWGMDVAKRRGSKRAKVALARKIGIILHRMWIDGTTYRWAEAKPIAAQA

SEQ ID NO: 78429 - protein, 410 aa, unidentified
MMEDAMGGGVDIASIVRCEPMELPMQTLNDLSRSLIALEPASTLIAVIEMSLSSWLVAGIVPGIERQPLKKLAVDESALLRLLHRWREEAEKAGSRIERIVVAFEAGRDGFWLARWLKARSIEAHVIHAASVAVSREHRRAKTDRLDTELLKRAFLGWLRGERDHCKVVAIPTLKDEDAKRPNRERENLVGEQSRLINRMKAALIRLGIRGFNPKLKRAAGRLDSLRTPEGEPIPPNTLAELRRDMERRRLVRNQIRQIEQARLEHFEQTPNDGPHAMVRLLARVIGVGVETADMLVHEVLSRNMRDRRAIARYAGLTGSPDESGRKRREKGLARSGNGRVRRGMIQLAWRFLTYQKQSALAQWYRARTVNAVGARKPMIVALARKLLIALWRLVRQGVVPDGVVLRPAQ

SEQ ID NO: 78430 - protein, 452 aa, unidentified
MAQAKPQVIDDEEHERVYERVAAVDVAKDTGMVCARTPHRSRPGARQSTVWTVKARMASIRALGRQLKADGIEMVTLESTSDYWRIWFFVLEAAGLAVQLVNAAQARNLPGRPKTDKLDAMWLARLTELGLLRPSFVPPAAIRALRDYTRARTRLVQERTRCFQRLEKLLEGALVKLSSVASKLTTESAKDMIKAMIAGERDPHTLAALARTRMKAKHDELVEALAGMFDDHHGELAQILLDQAAFCDARIAQLTARITAAVAAMPAAWGVDADGTTGPDAGTGPDAAALPAVQRLAEIPGVSPDLARSIIAEVGLDMSRFPTAAHLVSWAGLCPRARQSGPRTRAGKKNQGDSWLRNSLGQAAIGAARTTTTFLGERYGRIARRRGKAKAQVAVARSILTIIWHLLADPAVRYADLGAGYYQTRTDTDRKLRNHIRQIQALGFEVTLTKAV

SEQ ID NO: 78431 - protein, 344 aa, unidentified
MEQVYYVGLDIHKKIIAFCIKQVDGTIVAEGKIDANRKALKQWAESTPGPWIGAMEATIFTGWVYDFLKPYARQLQVGNPLMMKAITAAKKKNDKLDARTIADLVRCNLLPCCYMAGEEMRDLRRVLRYRNLLVRQAVRMKNRMATLLMETGQEYNKKKLHGAKYFRELLEKIQDVPESFKEILQMSRGALELFESCQKRLLKELVNNKVLRERVQRLMSIQGVGEVTALSWALEIGDVQRFTSIRKASSYCGLCSAQVESGGKITRMPLSKQRNKHLQSVLIEAAKLAPLYNQELADVYNKEQQRGNNHNQATITVARKLVAFLLAVDKSGKAFVKKAEQQAA

SEQ ID NO: 78432 - protein, 379 aa, unidentified
MRHVCGLDVHKDSVFVCILNEKGVVFQEKFGVLTPELERMVGVIMEHGVTEVGMESTSVYWMPVWRVMDPYVEQKLVNPYFIRQLPGKKSDVKDAEWIATCILKGLVRGSYVPEERIQRLRQYDRRIFDLNDDIVHKLARLDAALQRCNIRLSNYVSTTDCKSYGDVVDAIARGETSPDALLRCVHGRIVNRHGADVIRSALTGVVTPVDVDVIRQLREEIELARRHRDECQRRMDGLCSEWFPEQYANLQTIPGVKARSATAIIAELGTDMSSFEDAAHLVSWAGLRPRNDESAGRIKARGITHGNKYLRKTLIECAWGASRTRGCFYSRFSHHQTVVRRKSRMKVQVAIARKMLSAIWFILHDGVAYRDFEGDANAA

SEQ ID NO: 78433 - protein, 343 aa, unidentified
MSIQHAVVVGVDPHADTLAAAAIDAAGAVVWQATVANTTEGVLGLIQAAGNGARRWGIEGTGTFGRLLCDELLTTGARVLEVPTRLTARLRRRSGYAKTDPIDAAAIARAVLADTLGPVRHHPVVEALRVLVRQRETLVTAQVQATNRIRSRLRELDPATARELPRLRSRATLNRLTELVTDNPNPHHQALAFTIRLEAAETLERIKHIKQLDTRIRHTLPHPGHQLMTITGIGLVGAATIIANTGDINRFPTDGHYATYCGTAPLDASSGRQQRHRLNRWGNRTLNRVIHTAIITQLQRRAEAHHHITRRLSQGSTKPEAIRTAKRHLTRRIYRLLKHHPLT

SEQ ID NO: 78434 - protein, 369 aa, unidentified
MTGRFTLGIPIPRLSMGRHVFSLMNPNGCRGPSGARIDKAGRQSLMKQAHSELFIGIDVCKDRLDIADDSGSPIWSVANDDAGVSTLTARLKSLKPALIVMEATGGLETLPYAALTAAGLPSVVINPRQARDFAKAVGKLAKTDAIDARVLARFGAAVKPAVRPIKDDKAQELAALVTRRRQLIAMLTAEKTRLKQAPKWIRKDIKAHIQTLEQRLLKLGAEIAKNIKNTPGWKEKDDLLKSVPGVGDVLSMNLLANLGELGTLNRREIATLVGVAPLNRDSGRCRGRRMIWGGRAEVRAALYMAALSASRYNPVIKAFYQRLILKGKKPKVALTACMRKLLVILNTMVKNKTTWNPGQFYILDLNHGC

SEQ ID NO: 78435 - protein, 311 aa, unidentified
MTDDTIGIDISKATLDIHRLSDGKAMSFSNCPAGFKSLAKFCAKTAVARVVYEATGAYHSGLERALGAHLPLVKVNPLQARRFAQAQGVRAKTDAVDAKMLAEMGNVFALEPDEPADKIQHDLKELRSFRAGLLKDRTGIICRLKTQTLSITRRQSKARLAQVDKQISEINDEVARLISSSDTLAHSMKILRSIPGIGAVCAATILTEMPEIGSMDRKQVASLTGLAPMTRQSGQWRGKSFIQGGRKIVRDALYMPALVAMRHNPEFKAKYQALIKAGKPPKVAITALKRKLIELANALIKANRNWEPKGA

SEQ ID NO: 78436 - protein, 312 aa, unidentified
MAMLSFCGIDVSKDHLDVVVLPQGWFFSVSNDTAGWAELVVRLRPLTVSAIGLEPSGGYERGIIRALLAAGMSVRRINPNKLRQFARARGVLAKNDRLDARLIAEYVAIMPTRVVQRDAAVERLAEIVTMRRQLCDEHVAAENQAAHLEDAMLRRLSKRRQTRLEADIRLLDKRLAEMVAANVALAQRYELLISMPGVGPVLAFTLIALLPELGKMSRKQIAALVGLAPYDFDSGKLKGHRSIYGGRMPVRNVLYMAALSASRYSPALKTFHKRLAAADKKSKVIIVAVMRKMITTLNAMLRDSAAWQPRSA

SEQ ID NO: 78437 - protein, 352 aa, unidentified
MWYTGIDWADEHHDALTIDEKGHQMGSIRVDHTPQGLAKLDTFLMQIIGSASKEQMACIIETTHGLLIVHLLEAGWPVYPVNPRTVDRRRSASGAKTDTIDAYLLAKTGRADFADLHQKSTLGFLRAYPTLETARAASLQEVQQQLKHTRHPHPADAAASIVELLHHPQLQADVVLTRTKSRLMLALVSQLLPLMEQIANYDKEIHTLFLTHEDHAIFESLPRAGQHLAPRRLSEIGDDRQRYQDASSLQALAGTSPVLYQSGMYSKAHRRLGCITPLRNALHQFAWQSTQSEAWAQDYYQRKRTEGKSHTVAIRALANVWVRIIFAMWTHRECYQTATFELAQQHHARRAA

SEQ ID NO: 78438 - protein, 472 aa, unidentified
MRYIGLDLALTTAHKAVVLDEKGQAITNVISVKATATALEQLFQCARETAPEDEPLVVVMEPTGMAWFPVAVFCQRQGVQVYLVNSQQVADLRRYYRKHAKSDRIDARVLARLPMVSPEKLHALELISAAKLACQRGCKEQDRLIDLTTAIHNRLRAIDRFAWPGLEQVLPDNASTLTRWFREHWYDPSRVIALGASGLQQAWQESGPKSAEMPPSEEWAAELVQLAQEVLALYGSEAEFLDYAYLQAEVTREQALLAMLEEEHKRLQLKTVRRLYRQLHPSRNLESLYGVGQDGAAVYFSFIGNPERFPDHAAFRGWSGMIPRSSQSGASEAKGLHISQAGPDLVKKFSFMGAETARQWDPQIAAIYYDQIVRHGKHHTQALCACATHLLDRIWTILKEDRPYELRDVDGTPVTARQARQIIDLRYTVPKEVRQRNNQRTRRTRREQQAEKQHKRESRPSGVRGKSETSSG

SEQ ID NO: 78439 - protein, 326 aa, unidentified
MQFIGIDVSKKRLHGAWLRDPQQALTRPKGVDNSPEGHALLLAWAQRATGTAPGELCFVLEATGVYHEAVALFLHQASCQVAVANPLHIKRFAESLGIRTKNDHHDGRVLALYGHQRQPKAWQPPPAYVRDLRALLRRLEALEEDRQREVNRLEKAQIEGVPSSVIDSLQGMLVTLAKEIERLREQIDNHIDTHSDLKEQRAHLETIPGVGPKLSAWFLALFRLKDFRDAKQAAAFLGLVPIEYQSGTSVLKRPRLAKNGDGRWRARLFLPALTAARYNADIRALYERLIATGKSKMSAVGAAMRKLVHIAFGVFKHRRPYQPQSA

SEQ ID NO: 78440 - protein, 467 aa, unidentified
MLSDAMQTLAGRDADMTAEATGATSQRRVASCPVRERPRISWMRGDAPPRISFGRLRSRALGQAPPHRRREPGMIYAGVDIAKTDHVIGAVDERGAEMCPPMPFKNTEAGLERAVAWLEGLAGSPSDVVVGMEATGHYWMACYSFLVARGYSVAVINPMQVKAVRKLKGLDKVKNDRVDAGLIAEALRIGQYDETRLATDEMASLRSLSRYLQSLRGMVAELKTQCICLMDAHFPEYAGIFSDMFGAGSRAVLSKSPLPFELARRRADSLARDIAEASRRGGESSGYAAKIKAAAKSSIGVRLGQEAASFQVKSLIRQIEFADSECAGVEARLRSLLDEVEPLVLTIPGVSYVTGAQIVSEIGDVSRFRNAPALVSYAGLNSSVSQSGRFDSGGGPITKHGSPYLRRALWLAANRARQYDPGLRAFYDRKRAEGKPHRVAVTAVARKLCHIVFAVMRDQVPYDPGRE

SEQ ID NO: 78441 - protein, 408 aa, unidentified
MDLTPMHRRVIALDVHQAKITACAVIEHDDGRLEITQRDFGAFKRDRRALAQWSLEIAPEVVVMESTGVYWKSPFAALEAVGITAWVVNARHVKAVPGRKTDMADAQWLATLARAGLLRASFIPPLLMRQLRLVARQSQKLVGMCSAEKNRLHKVLVDAGVRINVVVADIHGASARAMVKALIADKPMHEVLDRKGRLRASRDELFESLSTEQLSPVHRFVAEEILQHIEQIEQRIARLDEYLLRGLKAYEPQLRLLQTIPGIDLQGAAMLLVEIGSDMASFGSAERLASWVGICPGNNESAGKRKSGRIRRGNAWVRRLLCEFAQAAARTRCALKAKFESLAIRKGHKKSIVALAHKMLRTIYAMLSTGDHYKDKTVDYEALSVARNAPRWMKMLRKHGFIATPAAA

SEQ ID NO: 78442 - protein, 354 aa, unidentified
MDGLKHQREKRSMDHFAGLDVSVKETSVCIVDDTGKIVREVKVASEPEALLAVLNNPAYHFKRIGLEAGPLSQWLFGALAEAELPVVCVETRHMQAVLKAQINKTDRNDARGIAQMIRVGLYRPVHVKTLRSQKLRMLLTHRKLLQSKAIAVDNDLRGTLRNFGLKVGMVGTVKFEARIKELVENLPDLAVLVEPLLIVRRVLREQIVVLHRRLLAIVRDDEVCRRLMTTPGVGPVVALTYRATVDVPARFRKSKAVGAVFGLTCSRYQSGEIDWSGRISRCGDEMMRVMLYEAAQSMLYSKKWSWLKAWAMQIARRRGMKKAIVALARRLAVIMHRIWVDGTEFRWTREAITA

SEQ ID NO: 78443 - protein, 454 aa, unidentified
MPKTTSGGRPEFKPVNVRAAAIDIGSKMHMAAVDPACTDTPVRAFGTFTQDLHDLADWFKACGVTSVAMESTGVYWIPAYEILEQRGFEVILVNARYAKNVPGRKTDVSDAAWLRQLHSYGLLRGSFRPDAEIATLRAYLRQRERLVEYAAAHIQHMQKALMEMNLQLHHVVSDITGVTGMRIIRAIVAGERDPDVLATHRDVRCHSSSETIRAALVGNDREEHVFALTQSLELYDTYQAKMLDCDRKLECLIAALSNGGTKPVGKLPKPRVKNKQVNTPSFDVRTALYGVLGVDLTEIHGLGPSLSLKLIGECGTDLSAWPTAKHFTSWLCLAPGNKVSGGKVLSSRTRRSSSRAAALLRLAATTVGRSDTALGAFYRRLALRAGKAKAVTATARKIAVLFYNTLRHGMTYRDPGADHYEEQYRSRVVANLRRRAKSLGFVLHAAPGGQLAVS

SEQ ID NO: 78444 - protein, 398 aa, unidentified
MLSIGIDVSKGKSTVCGMKPGGEIVYAPFEVQHTRKEMSELVSLLRGSGEEVRAVLESTGSYHCPVVAALLENGIFVSVVNSLRMKRFCSQSIRKVKTDRIDAMQIALYGLAYWQELQPTRLPENTYRELQLLARQYYQMTSLLIKAKVDFNALCDQVLPGMQELMSDHAGRHKLSDFVLRYRHTTHILEMGETRFRKDYCKWAEKKGYRNCERMAVLIFATAQNGIPVLPNAPSTQIVITEAIRVLHTVEASRDAILTQMQALAKTLPEYSLVREMPCIGDTLAPRLIAEIGDVRRFHSKRALIAYAGIDAPPYQSGKFSANNRHISKRGNRYLRKTGYEVMQSYVMHKPANDPIFTFIEKKRSEGKSGKLAMVAGLNKFLRVYYGKVTELYRSLPQ

SEQ ID NO: 78445 - protein, 409 aa, unidentified
MKLFVGIDVSSQDMKACIMSFDGETLASLTVDNNLIGSSYLRDQIVDIAQKHVIQEIVIGMEATSVYSWHPAMFFHEDESLKRFQTKVLTINPKLIKKFKESYVDLDKTDHIDAWIIADRLRFGRLRQSVVMQNQFIALQRLTRMRYHLVHNLTREKQYFLEHLFYKCSSFTTEVESSVFGNAIMELLLEQYSLDEISAMDIQDLAEFLRIKGKNRFTDAEYVAKSIQKAARSSYRLSKCVEDSIDLLLGTSIESIRSVTKQIKELDKAIKKLLDGIPNTIQTIPGIGPVYSAGILAEIGQIERFDNQASVAKYAGLTWNKHQSGLFEAEETKMIRSGNRYLRYYLVEAANSVQRNEPEYRAYYLKKYHEVPKHQHKRALVLTARKLVRLIDTLLRNDQIYTPRRKVNK

SEQ ID NO: 78446 - protein, 397 aa, unidentified
MSQVVGIDIGAYKHVAAVCRSGEAKADKQVFRYAATRPGFNELDLWLERQGPLERVVMESSGHYWWPLASHLYRRGIPVAVVNPLEAKYFAKSRLQRSKSDPADARTLAALGMAEQLRTREPLLGAEVKEAARFCMRLVRDQANVCQRLTRLIEIGFPELKEAFEDPTCDTALAVLRQAPTARAAARRRLGTLADAIRPGGSRRLGETKAHRIQELAKQTIAPPEMDEQMAFEVGLLIQQYDLLAKQIEQAEVRVAGLLDSELALRLQTIPGVGAATAATLIAEIGDIWRFDDFDQLAAYAGTHPKEQSSGRHGEKAETSWRMAKTGNSYLRSALYRMAVVGIQHNPIINEHYRRKREQGKAPMNAIGHCMAKALAIVWGVWRSGQSFDPNKRGRKP

SEQ ID NO: 78447 - protein, 371 aa, unidentified
MNSIVYVGMDVHKEQYTLCCYSYDTDKVEYKQTIPSDYKLVLKYMEQIRSRYEGEVSFVCGYEAGCLGYSLYHQLKDHAVDCKILAPSTMTITNTHHVKTDKRDAANIARCLAFHTYSEVYVPDNDDNDVKEYIRMRDDQKLYLKKVKQQILAFVLRQGKRFEGGKTYWTIAHLKWLKTLELSDLQREALDEYLLTYEYLTEKISRFDERIEELASVERYEEKVKHMSCLLGIKTHTALSMIVEVGDFERFEKAPKFASFLGLVPSEDSSDTRVNRYSITKAGNSHLRRLLVEAAKSYTRGNVGHKSVALKQRQKGNPPEVIAYADKANERLKRRFYKMTLNRGVNRNVAATAIARELACFIWGMMTEHVS

SEQ ID NO: 78448 - protein, 313 aa, unidentified
MSQNNPHILYVGLDVAKLTLQLHLAGRFHLLANDAKGHAQLLKHLRGQPAAHVVCEATGGYEQAVVRALQTAEVPVSIVEAGRVRYFARAQGQRAKTDPIDAAVLSEYGTLFKPAATEPASPQQQQLAELAQRRRQLIHLLISEHNHAEHYTDAFRVRQARQLVKALEKQITQCDEAITTLIAQDPELARKAERLKTIPGVGPVVAATMLAEMPELGSLTTQTAAALAGVAPYNRDSGGQTGVRRINGGRVAVRCALYMATLSAVRHDRILKEFYLRLRAAGKKPLVAMTACMRKLVILMNRLLKNPDFQLAN

SEQ ID NO: 78449 - protein, 344 aa, unidentified
MAIVGGLDIHRRQITYDWIDTTTGESCRGQLSPATRVELRAWLAQFGGQPADFALEATTGWRFVAEELEHAGYAAHLAEPADTRALRGPKRRAKTDRTDAHHLRELLRAGILPESWMPPAHIADARTQVRLRRALIGERTGWYQRIHAILFHHGLPERSQLLTADGRAWLARVQLPTVARRAVELALRMIDQLDTELDLLDGELVRIARAQPGCTALMGRYGIGWLTAVSIWAEFGDVRRFANSRQAVRFTGLDITIAESDGKRARGHLARQGSPVLRWALHEAAMCAARPSSPDHAYYLQVKQRLGSKRAALSVARKLAREAYHTLRTLGDQALVPAELPTAA

SEQ ID NO: 78450 - protein, 366 aa, unidentified
MERERTSVGLDVHARSVVACGIDDVTGEMFRARLVPQPDAVLGWLGGLPGPVAVVYEAGPTGYGLARLLTSRGIRCVVAAPSKLQRPSGDRVKTDAKDALHLARLLRLGEIVPVTVPGVAQEAARDLVRAREDVRGDLMRARHRASKLLLRQGIVWSGGTAWTVAHHDWLRRQSFDQPALTLAYDSALETVLLTADRRDRLDKAIAQMAADPAWSPVVDRLQCLRGVSTLTAFGLAVEIGDWSRFTGSSIGAYLGLVPTEHSSGASRSQGSITKTGNTHARRLLVEAAWHHKRPYRTPSATMRSRWDRAPAAARARGHAGNQRLHQRWQSFDERKKRPVIANVAVARELAGWCWSLAVLEDPGETR

SEQ ID NO: 78451 - protein, 366 aa, unidentified
MLGVLMSKATKEAPVSEQYVGRQIVGMDLHRRRSVLVRMTESGEHLETVRISNDPEYLRAVMERAGETPEVVLEATYGWYWAADTLAELGATVHLAHPLGVKMFSYRRVKNDQRDAADLADLLRMGRLPEAWIAPPACRELRGWVRHRAKLVGLRSSLKCQIHAILAAAGVAVPMSDLFGAGGQQLLGAARLAPESRARVDSLRRLIEALDFEIELFATLVARRLREHPGYRAIQQIPGVGPVLAAVFVAEIGDITRFQGPEQLASAGLTPKHHESDTTVHRGRITKQGSRLVRWAAVEAVQRTPAHTRLGQIRDQVGARRGRNIGVVAAARELTELVFFGLRDGDIRRLSTPRTPARPPARTPAA

SEQ ID NO: 78452 - protein, 410 aa, unidentified
MDVIVERVAALDVHKASVTACVRVPAADGGREPHLAEFATTVRGLLALRDWLAAHAVTQVVMEATGVYWKPVWHILEDDFELMLVNARHVKQVPGRKTDMSDAAWLCQLAEAGLLKANFVPPKPIRDLRQLTRYRKTQIAERQREAQRLHKALEDSNVKLDCVASDLLGASGRAMLDALVAGTTDPEVLAELAKGRLRQKIPALREALEGRFNDLHALLIGAILAHLDFLDEQIERLSEAIEERIAPFERAVELLCTIPGVQRRTAEVLIAELGPDMTVFPSARQLASWAGQCPGNDRSAGKQRSGRTRKGSRWLNAALKDAAMAAIRTKNSYLRALYERHRSRIGHGKAIGAVKHSMIIAVWHMLTTGQLYDDLGPDYYRRRDPARATKRLIAQLEALGHTVTLQETAA

SEQ ID NO: 78453 - protein, 393 aa, unidentified
MFYVGLDIAAEKHDCCIMTEERQVLKQFVFRNDAEGFEFLKKTLTKLAPTEEIKIGLENTGVYGSNLVQFLRRNGYKTYTFNPLLINKSIQATTLRKTKTDKADAKFLAQYLTWDNSQPDHDVSYHISELKSLSRLRFSLVQQRSKCKTQAKGVLAQVFPELTQVFSDVFGTTARTILSLCPSAQRIAAYPVPQLADLLRTTSRGQLGLEKAELLHALAVHSVGNSSVALELQLQIYLEQITQLSFHICRCEAALRTILAQMDSPITTIPGIGTVLGATILGEIGDIFRFSSPAKLLSFAGLEPSITCSGKSVSAPGRMVKHGSHYLRWAFGQAARCIILRDQTFAAYASKKRAEGKHFNVVCSHVAKKLVRLVFALLKNHSSFIPNYSSLAA

SEQ ID NO: 78454 - protein, 353 aa, unidentified
MDDQLIQNEVILGVDTHLDMHVAAVISHAGKLLGTLATPTNTAGYLKLLAWARSWGCVRRAGVEGTGTYGAGLARVLRGQGIEVLEVNRPDRAKRRLQGKSDPTDAENAARSVLSGTATAVPKSQSGAAEAMRTISVARRSAVKAKTQTINQLRALLVSAPQDIRERLWKAKPEQCVAGCAHLRHLGSTTLLQTLATTLRLLAKRWLMLAAELKEIDTALEQMTSQSAPHLREQFGVGPQTAAALIAVAGDNPERLHSEAALATLCGVSPLQASSGKTIRHRLNRGGDRSANNALWTIAMVRMRSEPRTRAYVERRTAEGLSNKEIHRCLKRYIVRELYPFILADLVAAANVS

SEQ ID NO: 78455 - protein, 312 aa, unidentified
MPAKLPPCYIGLDIAKDQLDYCLSDTVEGRCAYTPEGCAELIKKLRPIKHARVICEASGGYEKLIVAELLHAGLEVCVVQPGRVRALAYAEGLMAKTDRIDARLLRRFGEKVEVRLAPPTDPALITLRELLEHRRQLTTQLVEVNGRMALAGRTLRKFLEEQKGFLESQIQKVDKMIDEHIDQNPDLKNKSERLQLVKGVGRILAATVLAYVPELGQIEDSQISALIGVAPYPKDSGKTIAPRHVRGGRAQVRHVLYMAAVCAARSNPILAAFYQHLRAKGKPAKVCLVAVMRKLACLMNKLIQNPNFALAQ

SEQ ID NO: 78456 - protein, 420 aa, unidentified
MVYLERGYNLKELPWSKIVSNSFLFKEACMILVGVDVAKDKHDCYIMTSEGEVLFKSFTIANNMEGFNQLYEKILSVIDNFDNVKIGLEATGHYSYNILGYLLDKGLTPYVINPLHSNLYRKSLSLRKTKTDKVDSHIIASMLMSDVSLKPYSNTLYHNEELKSLTRYRFTKVQERAKLKISISRLVTILFPELEKLVPTLQMNSIYALLYEFPSAHAISKAHLTRLTNLLNTTSKGHYIKDKAVLIREAAKNSIGSNMPAKSLELKHTIKLIKELTSEINEIEEEIKIIMNKINSPILTIPGIGLSTGAQILAEIGDFKNFSSPDKLLAFAGLSPSTYQSGNMYSSNAKMEKRGSKYLRFALFNAAIYVSYWEPTFSQYLKKKRVEGKHYYVAISHVVKKLVRLIFHLEKTNERYSTVV

SEQ ID NO: 78457 - protein, 347 aa, unidentified
MTLYIGVDFHPHQQTVSYCNTEHGEVEQISLAHNVELVRRFYGQFPKAVVGIEASCTAAWFEHLMNELGHDLQVGNPTLIRARARSRHKSDKRDADLILELLLKGEFPSLWRRSTKSQSVLEQLRFRHQLVKHRTQVCNRLQALAHSAGLPKRGIQTKRARLALMAANFTETQSFERSQLFELLDDLSGRIKVIEKWLEEKAAGDAQVGLLLSHKGIGTLSALVVVHTLGDITRFPSSKEVVAYTGLDPLERSSAGKVRTGSISKAGSAVLRHLLGQAMHVAARYDGELKAFYKRLANRRTKSVAKVATTRKLLIRLFIMLRDGIDYQEFKRRGSAVGMPVLSHGLQ

SEQ ID NO: 78458 - protein, 377 aa, unidentified
MATTRTVLRDQLTAKPGDLYMSLELGDKHWHISIGGERRSVSHYIVEAGHTEEVADCIAKAAARLHTARVHSCYEAGRDGWWLHRWLTELGVDNIVVDPASIEVNRRARRAKTDRLDADKLLAMLVRHHRGERVWSVLREPSPGDEDARRAHRELQRLTHERIAHTNRISSLLVLHNLRPRIVIGGRDWPVWWNAHREQVPPTLRAELEREAVRLKVVKEQVRAIEAARARELAEGKQPLVAQLVRLRAVGAKGAWVLVKEVFGWRHFANRRELAGSLGLVPTPYASGDSEIEQGISKAGNRRVRALLVELAWSWSRLQPGSALTQWFNRRFAGAGKRMRRVGIVALARRLAIALWRYLQTGEIPIGARLKPAGSGI

SEQ ID NO: 78459 - protein, 392 aa, unidentified
MVVSVGIDVSKDKHDCFIVSSGGEVLADAFIIPNTMDGFHYLLQRIRHCTAPQDKIKVGLEATGHYSYNLLGFLLDNGLTTYVLNPLRTNLYRKSLSLRKTKTDRVDARTIASMLLSDAGLKPYTDTAYHNEELKSLTRYRFDKVKERAKLKSSIARLVCILFPELEKLVPSLHIASVYALLEEFPGAKQVANTHLTRLKALLETASNGHYKRDMALEIRNAAKNSIGSQMPAKSLELQHTIRLIRELDREIDEIEEQIQSIMDELHSPITTIPGLGFRMAAMILAEVGDFTRFDSPDKLLAYAGMSPSTYQSGQLKNCYPHMEKRGSRYLRYALYNATKYVCHWDPTFADYLAKKRAEGKHYNIAISHAAKKLVRLIFAMEKSRQPYCSAA

SEQ ID NO: 78460 - protein, 483 aa, unidentified
MQQVELGQGRFDIASKKKKKKVQEKERIMSIRIIGIDLGVSAKHKAMILDPASNEFIGKKVIFRARPGELERLLQRARAGAPEDVEVVAIMEATGMAWYPVGVYLHRQGVTVYRVNGQKTKDLRQVLWKHAGSDRIDSRVLAHLYQLAPDRLTAWWPVTGEQLALQRACRAYAYWREQDIALQNRLQAYDQWAWDGLGKVVPAVAQRWMRQHWYNPWQVQAAGAAHLVAAWQAASPQQPADTDWIARWLARAQEMTTLYGSEEMVGYEDLQAIMGHSLTLLDQYNQEQERLTQEKIEPLYRRLYPDCPLTTIYGIGLQSAAIYRAFIQHIDRFSMVEKFRLWCGIVPGSKQSGEAEAKGLHITQAGPNLVKATLYFNAEVARQWDVQLAAIYHKQMVNHGKHHIQAVCACASHLANRIYAVLKQNRPYQLRDLDGKPITIEQSRELCKQFRVPDEVRQRNNKRFRRARAEQKAEAQAQRQQRR

SEQ ID NO: 78461 - protein, 339 aa, unidentified
MKNSSNSFNFFIGIDVSKLTLDVTLLNPVKGVKKYKQFSNTSDGMILLNSWLRKVDGFKYHYSIFCFEHTGMYTRVLLEFLMNKKANVWMESSLHIKKSLGLNRGKNDKIDSLRIAEYAYRFTDKAVLLINNNPELIIIKDLLTSRDRLKRSLQSILTAVRELTKIDKEQGKKMELLNLHAIRGIKNSIQQIEKQMLDLINRNKQFTEYYDLATSIPGVGKVLAIKLIVYTKAFTRFNNVRQLACYCGVAPFEYRSGTSIRGKAGVSKFANMDLKSTLHLASISAIQHNPELKKYYLRKTEEGKSKMTVINAVRNKLLARIVAVVNRKTPYVQIMKIAS

SEQ ID NO: 78462 - protein, 487 aa, unidentified
MRPRTTNSSTQTFDVYRFSFESAGALAFVNEYSGFAVQPAHYIAFAERKLARPGSPIYHCRRCSVKPLSERPFTAHVGIDWADAKHDVCLQAADSEQREFDRFAHQVGSIDQWAKSLHQRFGGPIAVALELAKGPIVYALQKYDFFVLFPINPATLAKYREAFKPSGAKDDPTDAELALDLLLRHPERFAPLKPQSVAMRTLLSLIEQRRELVDDKTRVTNRLGNALKQYYPQALDWFEQRDTILFCDFLSRWPTLSAVKRARKAGLQAFFYAHNGRRPKLIDDRIDSIRAATPLTDDMGVIAPYRLQVQVLVEQLRVTLQAIDRFDRQIAAVAATLPDYALFSPLPGAGPHLAPRLLAAFGEQRERFMSADELQKYSGIAPVTERSGKKRWVHWRWQCPTFVRQTFVEWAGQTINKSFWAGVYYRQQRDKGSSHQAAVRALAFKWIRILYRCWQAGTPYNESTYLNALRQRGSPLLKRFHPTVQNA

SEQ ID NO: 78463 - protein, 406 aa, unidentified
MLNAVGIDVSKGRSTVAVLQPGGVIVHKPFDVPHKSKDLHDLAQYLGALEGDTKVVMESTGRYHEPIRNVLSEAGFFVCTVNPHLIKNYGNNTIRKVKTDSADAKKIARYTLDNWAELREYTSMDTTRTQLKTLNSQFSFFTKQKTAAKTNLIALLDTTYPGVNKLFDSPVRADGSEKWVDFAYSFWHVDCVRKAGITAFTDRYKRFCKHHGYEFQENKANTIYKNSKNLIATLPKEAVYKELIQESIRQLNLLSENVEHLRKMMNELASTLPEYHTVMNMYGVGPTFGPQLMAEIGDISKFQHREALTAYAGVDPGKNDSGQEVHNSSHASKCGPSRLRHTLFQIMTTMLQNGVKENDAVSSFLFKKKAENKPYLVYMTAGANKFLRVYYGKVKECLRDQEEAEQ

SEQ ID NO: 78464 - protein, 320 aa, unidentified
MISSPRFVGIDVSKDTLDVAIRPDGTHRQVPNTDEGFDQLVALLRPLAPALVVLEATGGYQRRVVAALGLAGLPVAVVNPARPREFAKALGRLAKTDKVDAEILAEFAERMRPQTRPLPDTQVQQMQELLGRRGQLIGMRTAERNRLGSALSRAVRRSLEAHVEWLDEQIASTEKELDEAIEQSELWKANDELLQSIPGIGPGVARTLLFELPELGRLSREEVAALAGVAPMNRDSGRWVGKRFIAGGRVVVRNAVYMATLAARQFNPALKKFADRLAEAGKPAKVVLIAVARKLLVIANAILRDRKPWRDVTANSVALA

SEQ ID NO: 78465 - protein, 338 aa, unidentified
MSIVGGIDVHRRQLTFDYCDRATGELCRGRIAPADRQGFRSWLSQLPPGGDFALEGCTGWRYIVEELAAAGFVAHLAEPADTSALRGNKQRAKSDRADARHLRELLMSGTLPESWIPPAHVLETRTTVRLYKDLSDERGAWTQRIHAALFHQGVETFTGTLASDVGRVFLDKADLSPAARRAVETGLAHIETLNKTLTPIKRDLSKFSLAQPGCSALREYFGIGGLLSVAIWAEMGDTRRFSSSSDAVRHTGLDITVYSSDTKRAKGHLARQGPSVLRWALYEAAKSAAKPVAPDHEYYLSVRERLGAQRATLSVARKIARWVHHRLRELGDEAFAPV

SEQ ID NO: 78466 - protein, 312 aa, unidentified
MTELFIGIDIAKDTFDISVLPTKEQWSNENNPSGIADTVERLKKLKPAHIVLEATGGLETHLAAALYTAGLLVAIVNPRQVRDFAKAMNILAKTDKIDAGVLALFAEKVRPECRPLPTEEERELKELIVRRNQLIDMRTAESNRKRWVNSEQASHSITVLLETIKQEIESIECEIKNRIKESPVWREKEKLVKSVPGIGEKTAFILIGSLEELGTLNRKKIAKLGGLAPMNDDSGKIKGHRKIIGGRADVRNALYMATLSAIRFNPKIKTFYTRLIKAGKPFKVAMTACMRKLLTILNAIMRDNVPWNCISA

SEQ ID NO: 78467 - protein, 466 aa, unidentified
MLSDKEPLMKKNKKDQNKKRTKNKTQKIFQTVNPNAAGIDIGSEEHWVAVPEDRDEQSVRKFGCFTSDLYALADWLKQCNIETVAMESTGVYWIPLFQVLERRGFEVKLVNARHVKNVPGRKTDIQDCQWLQQLHTFGLLSGSFRPEDSICVLRSYCRHRENLIQYASAHIQHMQKALIQMNLQLHKVISDISGLTGMRIIKSILAGERDPLTLAKMRDPRVKNSAEIIAKALEGDYRQEHLFALKQAVEAYEIYQNQIRDCDREMEAYLAKLDSKIDDENLPPSIRKNQKPKGNAPRFNLRAHLYRISGVDFTQIHGLDASNVYTILSEVGLDHNAFPTVKNFTNWLALCPNNRITGGKVKSSKTRKAKNRAADAFRLAAMSAGKSSSAIGGYFRRMRSRHGGPEAITATAHKIARIFYHLWRTGEPYQDHGQDYYEQKYKERVLANMRKKAKNLGYEINLIPVT

SEQ ID NO: 78468 - protein, 325 aa, unidentified
MTYIGIDISKATFVAAFLHGKSYRTETFPNDAKCIRRFISKLDPAIHHCVMEATGNYCFLLLYLLDKSGIRASLINPKKIKNYARVMMSVTKTDSKDACLIADFGERFKPKPYKFPSEQIMILKQKKTVLRQLQKQLTATKNLLSSLEPLPVKDKKCLTSLKQTVTFLEKQIKYMQQEMEAVVTDVFDRQLKLLTSIKGIGVTLATALIIATGGFIYFDNAKQLSRFIGICPTIEQSGTSINIRGHINRNGDETLRSMLYVAAWSASQHNKACKECYQRLRGNGKSGKVAMIAVANKLVRQAFAVVTSNNSYIDGFVSTKPDTTV

SEQ ID NO: 78469 - protein, 345 aa, unidentified
MEITTLGLDLAKNVFQVHGISSTGEVVVRRALRRAQVIPFFSKLAPCLVGMEACGTSHHWARELTGLGHEVRLMPPAYVKPYVKRGKTDASDAEAICEAVQRPTMRFVPIKTLEQQAALALHRTRDLLVRQRTQLVNMIRGVLGEFGIELPKGITYALAFVRRVVAGEAPDVPQLAAKVIGALAEQALEGQARIRKLERELLAWHRSSELSQRIATVPGVGLLGATALAATVTDPAQFRSGRQFAAWLGLTPLQNCSGGKERLGRISKMGDKYLRRLLINGMTSIIARNAYRPGVADARVTALLARKPLRVATVAMANHTARAIWAIMTRGEIYRAPTAREAVAA

SEQ ID NO: 78470 - protein, 403 aa, unidentified
MNNVAGIDVSKGKSMVSVLRPFGEVVAKPFSVGHTGSELKELADYLKSLDGETRVVMEHTGRYYEPVARFLHDEGVFVSAVNPKLIKDYGNNTLRKVKTDKADSRKIARYGLDNWAELRQHTPMDTIRMQLKTLNRQQSLYSKTKTMMKNNLIALLDQTYPGVNALFDSPVREDGSQKWVDFATAFWHVDCVRNMSLAAFAERYRKWCKRHGYNFSQSKAVEIHAGAQDLIAMLPKDTLTKTMVRQAIDALNAVSASLERLKAEMQALAAQLPEYPVVMAMHGVGDSLGPQLMAELGDVTRFTHRNAITAFAGVDPGADQSGTHEAKSTRVSKSGPPELRRVLFLVMDCLLKTMPEDDPVYRFMDKKRAEGKPYLVYMTAGANKFLRIYYGRVKEYLAQLENS

SEQ ID NO: 78471 - protein, 347 aa, unidentified
MSITMIGLDTAKSVFQVHAVNEAGKVEIRRKLRRSELIAFFEKQEACTVVMEACGAAHHWARVLTGLGHDVKLIAPEVVRPFVTKGKKNDAADAAAICEAASRPDVTFVPIKSLEQQGILALHSARSLLVKQQTMLANAIRGLAAEFGLIAPQGIGKLGELMALVEADEAFPEKAQQAVRGLLDQRRWLAESTETFEAEIVAHARHDETARRLATIPGIGPITASLIAATVADIGVFKSARHFAAWLGLVPRQHSTGGKTRLGRITKTGNREIRRLLVLGATSMIYRAETWNSAAGAWVRKILERRPARLVTVALANKMARIAWAVMTRKEVYHAKGRAAAVAAVAA

SEQ ID NO: 78472 - protein, 390 aa, unidentified
MSQSFDASKSLTAFEQDSTLVAVIEMSQSKWLVAAVVPGIARQPLKKLDADAGALLKLLQRWREEARKAGREVKRIVCAYEAGRDGFWLVRWLQARTIETYVIHAASIAVSREHRRAKTDRIDTELLMRSFLGWLRGEKRHCSMVAIPTMVEEDARRPSRERESLVAEQTRTVNRVKAALALLGIGGFNPRLRKAAQKLETLRTVEGTPLPENVHAELRRDLERLRLVHDQIRTIESERLRRLAQAPAAATGPHAMVRLIAKVLGVGIETADMLVNEVLARNLRDRRAVARYAGLTGAPDESGKRRREKGLARAGNGRVRRGMIQLAWRSLIFQKESRLVRWFRARTADGRSTTRKTMIVALARKLLIALWRLVTTGEMTEGLKLRPAGT

SEQ ID NO: 78473 - protein, 361 aa, unidentified
MHDSTTWIGMDVHKESIVVAAVNGAGGTAARWETPNTAKGKERLAKRLSEFGTIRCAYEAGPCGYDLRRFLEAKGIPCDVIAPSLIPKKPGDRVKTDKKDAEKIARMHRMGELTAICVPTPAQEALRDLLRAREDANEDLVRRRHRLQKFLLRQGRRHEGKNWTRDHWRWIRAQKFEDRNSETVLSEYTAAIDQEIERIGRLDAQIEQESKNPEIAPSIARLMTLRGVKTLTAMTILSELIDLSRFPSARKLMDFVGLVPGEYSSGQKQWRGSITKSGNSHVRRVLVEAAWHYRHSPRSTGAAIKKRREGQPPEVIETARKAELRLYKKFTRMVMRGKKTTVAATAVARELAGFVWAIGRI

SEQ ID NO: 78474 - protein, 332 aa, unidentified
MMAQNGVVVVGIDVAKDKVDACIRSVSQRQTFPSTAEGRRALIRWLRKHKAGKAAMEASGGYERDWAKALREAGLEVLVVDPKRVRSFARSAGRLAKNDPIDAEMIAWFAETFVEAKSQAHDAAREKLVQIVNARQSLLDMQTSLQNRGEHSTPEVVQKMQARLLKKIASEVAKLEVAIAAQVKATPHFVELAEIIESVPGLGKATSAGLIAAMPELGQASDNVAAALLGVAPYDDDSGQRRGNRHIKGGRRKIRNLFYMACLGAATQHNPVLKAFYDRLVAKGKEKKVALTACMRKLICILNTMIARRQKWDVTRHKASDPARPLPSACPA

SEQ ID NO: 78475 - protein, 408 aa, unidentified
MLFVGVDWAEEHHDVCVMNTDGRVQAKGRVSNDLAGIAKLHDLIAGAVPVEVDDDDVEVVVGIETDRGLLVRALVAAGYRVLAVNPLAVDRYRDRHRVSGAKSDPGDARVLADMVRTDAHQHRPVAADSDLAEAIKLVARSHQSAIWSRRRLANQLRSALREFYPAAQQAFDDLTHPDALEVLALAPTPERGRRLSRSKIASALRRGGRKLNIETRSAKVQDALRSEQLTQAPVITDAYGAIVASLTAVIAAHNTQIAELEEVLETHFGQHPDADILRSLPGLGVVTGARVLGEFGDDPTRYDSAKARRNYAGTSPLTIASGTRSIVRARHIRNRRLADALHWWAFNTITRSPGARALYDRRRAAGDTHSGALRVVANRLVAILHGCLRTHTPYDEHTAWGHRHDLAA

SEQ ID NO: 78476 - protein, 432 aa, unidentified
MGPVEVRGIQPTTGWMVIHMYFAGIDIAKKQHEACIIDDQGTTVLTMPVPNTQPGAARFLAAVRKRIGDDPHAVAFCLEATGHYWLSLYCFLTQQGYPVHVINPIQSDAIRNLYIRKSKTDRKDAFILADLLRMNQTEETCMASEVVLKLQTLSRTRFAFVNQVSALKQRAIGVLDRIFPEYASCFSDVFIKTSRELLKNHSTPDEIAALDLHELTRFLESHSRGRLGQGRAERIQELARGTFGIGLAVDAFALELRLILSQIEFIEAQISDLESAIKLAMEELQSQHAPGSLEGEQHHVIETIPGIGTILAAAIIGEIGDIHRFSDARKLVAYAGIDATVRQSGEFTGSRNRMSKRGSPELRRAIWLAAVSARRFNAELSAFYEAKKQQGKHPMVATGAVARRLVHLIHSVWSREQPFDPDYRWSPSGSAD

SEQ ID NO: 78477 - protein, 368 aa, unidentified
MIEYKLKAAPTAISKEQKGQKGSKAKRILVGVDAHLESYQAASKIDNGAVGVAQSFRSKEALLLRLEKQLQQAEEVVVVYEAGPLGYSLYRDLSARGIKCLVCAPKSDEQKRKRRKNNSIDARSLVSQLFTYLNGNEQALQLVRVPTPAQEQARLASRQHDALVQERKRLGAMGNSLLLSQGYGSWKNWWRRKSFARLSQVVSSWVVELLNSWVDLLRALDEKVQHAKASLAKQCQGPRPKGVGAPSLVQLGAEVLDWSLYNSGRKIGCLAGMVPSEWSTGNGQRLGSITKVGVPAIRRIVTEMVWRMILFQPQYKAVQKWRAVLEGSNRGLKKKAVVAIGRQLMVDLWRLQTGRISAQELNLIMVEG

SEQ ID NO: 78478 - protein, 463 aa, unidentified
MQQPVEVQVDEHEQIVERVAAIDVAKASGMVCLRVPHESIPGRRVTKVWPVRASTAALVELGDHLRCERVQRVVMESTSDYWRPFYYLLEAAGLTVWLVNAAQAKNVPGRPKSDKIDAVWLAKLAERSMVAPSLVPAEPMRRVRDLARARFDLVADRARVKQRIEKLLEDALIKSSSVLTDVRGVSGRAMIEALIAGQRSPTALAELAKGRARARRADLAQALHGRFTDHHAQLARMLLGQLDELTARITQVTDLLDAAIRALPTPTTTTPTTTATTTTTHPSSRADGDQSVPTPEQAGYHSAVKRLCAVPGAGPDSVRAVLGEIGLDMSVFGTAQRICSWAKVAPRTVQSGRKTGRARTGKGNPYLKAALAQIATGAAKTDTFLGARYRRLIKRMPKAKALVALQRSILVIFFHLLADPSTDFDDLGSDFYQRRIDRARRATHLLRQLHALGYQVQLTDTAA

SEQ ID NO: 78479 - protein, 355 aa, unidentified
MTVTIVEEARPVTCRTAITGGVDTHADTHVAAALDPVGGLLGVEEFPATAAGYARLLGWLGGFGTVCLVGIEGTGSYGAGLARHITAAGIRVVEVDRSDRQDRRRQGKSDPLDAVSAARAAQSGRARGAPKGRDGAVEAIRTLMVARRSAAGERTRTINQARALVLTGPDDLRARFARHKPAALITGLAALRPRPGDVAGHATRIALRELGRRAQFLEGQLVRLDELIIPLMTARAPGLLAIYGAGPRTAALLLIAAGDHPERLRSEAAWAHLCGAAPIPASSGKVTRHRLNPGGDRQANHALWRIVFTRLGSDPATRAYAERRTAEGKSKAEIIRCLKRYVAREVYRQLRPAAG

SEQ ID NO: 78480 - protein, 368 aa, unidentified
MNTVYCTTIGADVSDRTTKICVMSKESGKPKIVRETTIPTTPDGFRAFLEGQDKSAPLVFETGTHCRWIDKVGTGMGFKTIVANPARLRMITESNTKNDKNDARTLARMALADVELLHPVRLRDDEHQKMVNLHEIRDQLVKERTAEVLQIRAIAKSMGFRIPDCSAECFHNIAKNSIPKELGDIVWPLMKELKSKAVTIKTVEKQMRKLAKSDVFKAQVERLMEIPNVGFITATCFVAVTGGDMDKFDRPRDIGPWLGVTPKQDQSGDIDRQCHITKAGSKMLRWKLTECAQRVLQKNSADMDLKVKGLRIRARGGKIAKGKSITAVARGLAVLMVAMLKKPDAPYVPLSEDKAKELAQIRAAMAAA

SEQ ID NO: 78481 - protein, 316 aa, unidentified
MVPSPLFVGIDVAKATLDIAVRPTAETWSVSNDATGIDALVLRLGALAPTLIVLEATGGYQGPLVAALVAAALPVVVVNPRHIRAFAQAVGILANTDRIDARVIAHCAEAVKPAPRPLPDAETQELRALLVRRRQLVEMVSAERARLDTVPPRIQDAIQAHIAWLTTQIAGLDDALTRASQTHPVWQAKDDVLQSIPGVGPVLARTMLGQVPELGTLGPKPLAALIGVAPFNRDSGTLRGRRTVYGGRAEVRAVLYMGALVATRHNPVIKTFYERLLAAGKAKKVALTACMHKLLTIMNAMVRDLKPWQPQEVPSA

SEQ ID NO: 78482 - protein, 446 aa, unidentified
MATKDWAAKTSDVPEGARRQWRSDRALRPPMRSPGRPEPSRAVQRQFWHLIATGITSAEAALKVGVSVPVGTRWFRHAGGMPPISLAVPTGRYLSFEEREEIALLRAKHIHVAVALDDFGGILGKEKFTADTAGYGQLIDWSMTHGHLLTFAIEGTGSYGAGLTAAVRRRDIGVVEVMRTDRRDRRLRGKSDFLDAENAARAVLAGHADAIPKTADGVVEMIRTIKVAKDVAVKARTSAMISLKAVLVNAPAGLREQLQPLSKMALIHRCAGLRPGSMTTVEAATKHTLRSIARRWQQLNDEITAHEKMLAELTTTIAPQLSAAFGVGADTAAEMLIVAGDNPERVRSEPAWARLCGVAPIPASSGMTTRHRLNRGGHRQANAALYRTVIVRMQHHEPTKAYVARRAAEGKTKAEIIRCLKRLLAREIWSLMRPLRVSPQTMECAA

SEQ ID NO: 78483 - protein, 345 aa, unidentified
MTEAYDGRQVVGMDLHRRRSVLVRMTMDGRKLETARIDNSPAALRAVIGRAGDKPLVVVEATYGWYWAADVLEAAGAEVHLAHPLGVKAFSYRRVKNDERDCADLADLLRMGRLPEAWIAPPPVRALREVTRYRHKLVSQRTSCKDQVHAVLAKCGIPVTRTDIFGRGGGIWLDGLLLPQPYAGKIASLRALIGVLDSEIARLEDQAAALLGGHAGYTAIQALPGIGPVLGAVIAAEIGDITRFRTPGQLASWAGLTPRHHESDVKVIRGHVSKQGSRMLRWAVTEAIQHQPAGTRPQQVKEAIIARRGAEARNIAKTAAARQLLTLVFYAMRDGHLRRAARPAA

SEQ ID NO: 78484 - protein, 359 aa, unidentified
MDGSKEHPHMTAGLDIGEKYSHLCLIDTGSGEVMEEGRLRTTPETFLRRFSSERPIRIAIEAGTHSPWASRVLEECGHEVLVANARKLRLIYSNKQKTDEIDAENLARLARLDPKLLYPLKHRGEESQAHMAVIRSRQALIGCRTQLVNHVRGTVKSFGGRLPKCPAVSFHNKAPEHIPDALWPALGPLLEQIGSLTQRIRDYDRKLQTISKEHYPETELLRQVEGVGALTALTFVLTLEDPYRFEKSRSVGAYLGLVPARDQSGDRDPQKRISKEGDETLRKLLVGSAHYVLGPFGQDSDLRRHAEKMASRGGKNAKKRAVVAVARKLSVLLHRLWVTAEVYDPLYNAHRRTKQEEAA

SEQ ID NO: 78485 - protein, 410 aa, unidentified
MEVIVERVSALDVHKAQVTACVRVPGADGVREPHLAEFQTTVRGLLALRDWLAAHRVSQVVMEATGVYWKPVWAVLEDDFELMLVNARHVKQVPGRKTDMSDAAWLCQLAEAGLLRANFVPPKPIRALRMLTRYRKTQVAERQREANRLHKALEDTGIKLDCVASDILGASGRAMLDALVAGTTDPVMLAELAKGRLRAKIPALREALEGRFDALHSLLIGAILAHLDFLDEQIDSLSDAIEEQLVPVAPAVELLCTIPGVGRRTAQNVLAEIGTDMTVFPTARHLASWAGQCPGNNRSAGKQRSGKTRKGSKWLNEALKDAAIAATRTKGTYLQSQYQRLRPRIGHGRAIGALKHTIICACWHMLSTGETYRDLGADFLARRNPQQATRRLIAQLERLGHNVTIQEAAA

SEQ ID NO: 78486 - protein, 407 aa, unidentified
MEVVYRCCCGIDVHKKLIVACLNKGGKRELREFGTMTGEIKQLGNWLSEAGCQMIAMESTGVYWKPLYNLFELMDLDTIIVNASHMKTLPGRKTDVKDAEWIADLLRHGLLKASYIPDREQREVRELARYRKSMIEERARELNRLQKVLEGANIKLDSVVTNINGKSARKLLDKIANNEAMTVDEVSGIIAGKMRPKLDEIMKSIEGITTPLQRMLIAKIVDHIDDMTRRIDELDGMMKEYTEKYEQAIAAIDELPGIARRSAEVIIAEIGTDMSRFPSAAHLCSWAGISPGNNKSAGRRKHGKTTKGNKALKSILAQCAKAASKCKGSFFSAQYQRIAARRGKNRATVAVAHSMLIAIYHVLNEGVAFRDLGADYYDNFNREHKIKSYLKRLESLGWVPETALAAA

SEQ ID NO: 78487 - protein, 328 aa, unidentified
MTMNPALSAFNHVVAFEVAKDSLVIHVLPADQQSVVANKPKAIRKALKAEMRRNAEASLGPLLVVCEATGGYERHVLEVCQELGIAAHKAHGSRVRCFARYLGLIAKTDSIDARVLALYGLKTPDLRLYTPPAPELLALRDLKTRRDQLQAMLFAETNRLEHARHASVSRSLKAHIESLRKELAALEAEIAAHIQASEALAQKARLMRTLKGVGPATVSSILAYLPELGSFTRGEAACIAGLAPINNDSGAFQGPRHIQAGRAAVRKTLYMTALVAIQHNPTMRLFAEKLRRKGKPSKVVIAAVMRKIIVTLNAILRSGEPWKHAKAA

SEQ ID NO: 78488 - protein, 472 aa, unidentified
MLPIQSLPLGHDISNEESVMPKRTSPGTKRKKHSRILEQINHSAAGIDAGAEWHFVAVPEERATPSVRKFATTTGGLYALADWLAAAGIDTVAVEATGVYCMPLLDVLDGRGLAVVLAKPASLKSVNDRRKTDMLDCQWIQMRHGFGLLRRSLRPTQMVAAFRTHSRQLRMLIEQASTAIEHMKKALTSMNIRVELAVSDITGRTGMHIIRAIVAGERDPMVLAGMRDERCAKSEQAIAEALLGKYSDEQLFALDQGLRTWDHYQLLIAECSQRLAEQSNAFEKKADRKNLPKARQPERERKNGLPLDSRAIYYEILGQDLTQIDSIGTSTTCAFIAEVGTNVDAFPSVKHFTSFLRLSPGSNISGGKNKSGKNRRTTNRLATALRLAAQTLTRSQSALGAFYRRKRAQLGAEKAITAAAHKLARMIYFTLKEQRPYLDPGPDHYLQRHRERIIRSMEKRAQQLGYQLVRAA

SEQ ID NO: 78489 - protein, 323 aa, unidentified
MNKGIKYFGIDISHLVFDVTDSDGNYYQFKNNPIGFKKFIKLLDIDSHCVMEATAYYHYQMAYYLLESGIKVSVENPLAVKRFIQMKLSKIKTDKSDSKLICEYAKQVELKLWQGNSKHQTERLQMTRLLSVYTKQSTMLKNKLHGESVLGNPSKAVVISLKRSLKQVQKEIKTLEEKLMILVKQVHQDVLTRLKSIPGIGNKTALMLVVLTDGFERFTSGSELCSYAGLNPVIRKSGSSVNGRSRISKIGNQKLLNLLFMCSFNACKYNKACRELYERIVAKGKSKKLALIAVCNKLLKQAFAIAKSGLTYDDSYRSILVKN

SEQ ID NO: 78490 - protein, 357 aa, unidentified
MNGLKHQKEKRSMDHFAGLDVSVKETSVCIVDDTGKIVREVKVASEPEALLAVLKNLAYHFKRIGLEAGPLSQWLFSALAEAGLPVICVETRHMQAVLKAQINKTDRNDARGIAQMMRAGLYRPVHVKTIRSQKLRMLLTHRKLLQSKAIAIENDLRGTLRNFGLKVGVVGKVKFEARIRELVENLPDLAVLVEPMLIVRRTLREQIVILHRRLLAIVRDDEVCRRLMTTPGVGPVVALTYRATVDVPARFRKSKAVGAVFGLTCAKYQSGEVDRNGRISRCGDEMMRVMLYEAAQSMLRSKKWSWLKAWAMQIARRRGMKKAIVALARRLAVIMHRIWVDGTEFRWTREQATAAAA

SEQ ID NO: 78491 - protein, 352 aa, unidentified
MIVLGADTHKRSHTIAAVAAATGELVGEQSVEVGAKGFAALLVWARGLEAERVWAIEDCRHVSGSFERFLIGRGERVLRVTTKLMADTRRRARDRGKSDRIDAVAVARAALREGLDALPAAQLEGPELDLRLLVDHRERLIRQRVALNNTLQWHLHDLWPELQLPGSSLFYGTWGPRVARRLARAEQSMRVRVARDELRRIRELSQAIKALEREIAALVAQVAPQLLCEPGFGPLTAAKLVGEVAGATRFSSDAKLARAAGVAPIPVSSGKTNRHRLDRGGNRQINATLHRIAVTRLRCHPETQDYIARKRSEGKSTKEAIRCLKRHLARRIWHLLQPPHPDRGTPPSPSIS

SEQ ID NO: 78492 - protein, 398 aa, unidentified
MVCGVDISKNSFNYCIIDNNLNKLKEGKFNLLKNDLIKFIQIVNEFNDITVIVESTGIYHINFVSFLLENGINVKIINPKTIKRFIDYYFANNSSKTDKKDAFAIALFGIKNPEIVNSANSSIPSSLKMIAREIESLSHQKSSVKTKIKAHLNILFPELEHNVDIFRKSILNILLKFPSAKSISVTDETQIQSIINNTNSTGKKVKFNANDIINLAKNSIASSNKALEIALVNYINQLFIIENSINELSKFFEKESEKYFKDDIDIISSIKGISKTSASKIMAEIENIDKFENFKKLIKFTGTDPVIKQSGNFKLNKSISKQGNPHLRNFLYQATNGVIKHNPVFKNYFRKKKSQLKSFKKAVIATLNKLIRVIFGMLKNKSKFDTKFHKNNLNLNLA

SEQ ID NO: 78493 - protein, 347 aa, unidentified
MADIIRIGMDTSKHVFQLHGVNGSEEPVLRRKLRRREMEVFFEQLPPTVIGIEACAASHHWARRLGSFGHEVRLLPPQLVKPYVKRGKNDAADAEALCEAMSRPTMRFVPVKDRDQQAALMLIGVRDRLVRNRTRLTNAVRGHAAEFGLTAAQGMKHVERLFERIAIDEALPALARRLFAMQAQEYAQLQAEITAVEAELMAWHQADERSRRLAAIPGVGPIGATLLTLKTPAPELFRSGRDFAAWLGLTPRDHSTAGKVRLGVITRAGDEALRSTLVVGATALLQHIRKGRGRNASPWLLELLKRKPPKLVAIALANKIARIAWKMMVTGDTYTRQPCGMTPAKAA

SEQ ID NO: 78494 - protein, 408 aa, unidentified
MQLMYARCAGLDVHSRQVVACVRIVVEQTVTYEHLTVSTTTRGLLELADWLAKHEVTHVAMEATGVYWKPVWHLLEGQVELLLANAQHVQNVPGRKSDVHDAQWLADLLAVGLIRASFVPPAPIQDLRDLTRTRKQLVRETGRHTQRLQKILEDANLKLTETISDIRGKSGLAILRALIAGETDPEKLAGLTRGLKASQQQLVDALHGRVTGHHRFMLKLHLEQIDAIETGLTAIEQRLTEALAPFRAARDLLKTMPGISDTVAAVILAEIGADISPFATAGHLVSWAGVAPRLDLSAGKPRSTRTRPSAPWLKTTLVQAAWAAARTKNSYFHAQFVRLKSRRGPKKAILAVAASMLTAVYYMFRDGVEFHDLGAQYFAHHDTEQITNRLLRRLRDLGVEVEVKNKAA

SEQ ID NO: 78495 - protein, 385 aa, unidentified
MNSVGIDLHRKRSHIAALDETGAQLLSRRIVNDPQTFLTLLEDVGECRIALEATYGWEWLADVLQDAGYELHLAHPMRTKAIASARVKTDAVDARTLAHLLRADLLPEAYIAPRELRDLRDLLRHRVALTRMRSALKNRVSAILAKNGIQRPYSDLFGPAGTRFLAELELREGPRRRLDSTLALIADFTREIDATSREIDARAKDDPYVEVLCQIRGVGRYIAMLVIAEVGDITRFPNARRLCSWAGLTPTVRSSDGKARLGHISSQGSPALRWALVEAAQHAGSGGGPLHDTYERIAKRRGKQIAKVAIARQILTLCYYGLRDGEIRCLAPRATTRAIRPPAVSMTRRADHAPPARGAAIPRASSAVVNGLARPTRQADGRPLD

SEQ ID NO: 78496 - protein, 406 aa, unidentified
MNGPVITVDVSKGSCHYQPYVENGKPMSKAKVLHDTIEGFEELSKTMEKLKEKSGNSNVVVVFEATGVYHRCLQKYLDDNSITYYIISPLMSAAYRKTNINANKTDSLDCGHIAKCFYGEQALRVYKKQADIYEDLRHNNRYYESELNFLRQRKTSFRALLDIIYPCIDKCFKGHASLYDEVPMMVLKMYPHPKLLLKHKEETIIKAIENKVHHETKFVRQIVNKMYEAASKCYSGCDEKDVEVIRLKESIVSLQEQESKCNAILNDLINKAMEVPYFKSVASIIGVGLNLASRIVAEIGDISRFNSRRAISAYAGLNPKIRQSGDIDGTHLAISKKGNRHLRCLLFLGASCNYRLKKHDQLYEFNQKKRQQSSCPLKPKAANIATAHKLLVIIYALSKNNQEYNS

SEQ ID NO: 78497 - protein, 342 aa, unidentified
MDIYTIGIDLGKTSFHLVGLNERGEVIVRKQFSRAQLLRFTANRKVHLIGMEACGGSHFLGRALLEQGHEVRLIPAQYVKPYVKTNKSDYIDAEAIAEAVGRPTMRFVPIKSDDQLDLQSLHRVRERWVSRRTAVINQMRGLLLERGITVRKGRRYIEAALPGILEDADAKLSGALRLLLAQLKLELDQMAKRLEEADALIEQTALDNEDCQRLVKIPGLGPVTATAVIAAIGNGAAFRKGREFAAWMGVVPREHSTGGKQKLLGISKRGNRYLRKLFVQCARAVLQQKTKQTPGLRAWLEKLTARSHHHVAGVALANKLARMAWAVLATGEAYRAPLPAAA

SEQ ID NO: 78498 - protein, 402 aa, unidentified
MNSVGIDISKGRSTVAVMRPFGEVVISPFEVRHTDSELSELARQLKSLDGETRVVMEATGNYHTPVAKLLHDAGLYVSVVNAKLVHGYGNNDLRRVKTDKKDSVKLANYGLDRWLTLPRYVPEEDTRLLKNCYRQYRQYSKVQTVLKNNLISLLDAVFPNVNRLFSSPIRGDGSEKWVDFVAEFWHCRCVSEKSEKAFTNKYQCWCGKHGYNFSEEKAHTIHAEASGHIGVMPKSETTKLLVEQAAAQLKATSAALTALKREMLTLAEQLPEYPVVMGMFGVGPTLGPQLIAEIGDVRRFYSKKALVAYAGLDAPPNDSGDVTGRHKSMSKVGASSLRRTLFLVMSVYLQNAPLDEPVYQFMDKKCAEGKPYRVYMMASANKFLRIYYATVKAYLESLEHTA

SEQ ID NO: 78499 - protein, 408 aa, unidentified
MSDVVPVVAGVDTHKDVHVLCVLDGLGRQVFTGSFQANEDGYNKIAAAIGDPKDCIVVGIEGTASYGAGLARRLTELGFEVVEVLRPKRDKRRRGTNKNDIKDAERAARDAIAGNGTSIPKTQDGWVEAVRFQLIARRLAVKTSTSAINTVKSLINTAPEHIRNKYSKMSAEDMMSSLQRKRSKNDELENAVYSSLRSLSLLWAESRTQADDAEKAISALLIEHAPALLNIYGCGTITAATLAVTAGDNPDRMGSESAFAALCGVSPVEASSGKTVRHRLNRGGNRQANCALYQIALTRMQRDKKTKTYVDKRMAEGKSKPEIIRCLKRYIAKEIYRALLNPSKTDKLTGAELKESRTALGFSQTDIGTMLGVPSIRISEIERDIKSNLELRERYRQTLDRLAIKIAS

SEQ ID NO: 78500 - protein, 339 aa, unidentified
MKKSDCPTYLGIDVSKGSLDCCLYNGTEHKTRSFNSNKLSTVQKIISHFKISPVSCRVVLEATGVYHSAAFIGFTSQDFDVAVENPLRIRSFATMKNLLRTKTDPVDAKTIAEYGFTNNPVSTKPKEAYQCKVVARLKLIGFFKKLIAQNRNHIEALNNNSFECNATSLITHLKNEINHLNVTINEIKSDIEKILTKHCPELYKQYKSIPGIGPTVAGAIICFYGDFSGFSNSKKAAAFAGLCPKVCKSGSSVDKKGSISKKGNSMLRTLFYMAALSAARCNDTCQEVYLRLRQAGKPAKVALIAVANKLLRQAMALARKGESFIENYKEISPCAAKTT

SEQ ID NO: 78501 - protein, 415 aa, unidentified
MEVMHPRCAGIDVSKRDAKVCIRVQGSGGRRTSSTVTTWGAMTNQILALRDHLAAQQVTVVVMEATGDYWRPFYYVLEADFEVMLVNARSVKNVPGRKSDVSDAAWLADLGAHGLVRASFVPPEPIRQLRDLTRTRTHITRERTREVQRLEKLLESAGIKLSSVATDITGVSGRLMLQALIDSQGTADPAVVADLAKRRMRSKIPVLTEALNGRFTAHHAFLTRLFLDRIDAHTKDIAALSERIDGLMAPFLPARDLLESIPGFSQIIAEVFIAETGGDMTQFPTPEQLASWAGVSPGSNESAGRVKSTKTRPGNRYLKGALGVAALNQAKSKKTYFSARYRRLASTRGPMKAIVAVEHAMLTAAWNMLTNAEFYRDPGADYYTRQDPAKTRARAVRQLEALGYQVTIQPVQQAG

SEQ ID NO: 78502 - protein, 375 aa, unidentified
MKEKVRFLGMDVHAETIAVAIAEADGEVRSLGTIANRAESIRKLVKKLGPAEHLNACYEAGPTGYVLYWQLAELGVACEVIAPTLAPMKAGDRVKTDRRDAERLARSYRSGDLTAVWVPDEGSESLRDLVRAREAAKQDQLRARHRLGKFLLRTGRRPAVGMKAWTSPYMAWVRQVQFTQMAREATMLDYLHEVDHMGERVKRLEQAITEAVKLATPAVQEVVKGLQALRGIAEISAVTIIAELGSITRFDTPRQLMGYSGAVPSEDSSGKRTRRGSITKTGNAHLRRIVVEAAWSYRYRPAIGPRLRKRQEGVSEPIKEVAWNAQVRLTKRYARLAAAGKDQRKIITAVGRELLGFIWAIGVKEETAVTQQMAA

SEQ ID NO: 78503 - protein, 337 aa, unidentified
MTLYCGIDLHSNNSVVAVLDEQDRTVYEKRLPNDLETITEVLCIYQSELAACVVESTYNWYWLVDGLMAAGFAVRLAHTSALPEYSGLKYSNDFSDARHLAHLLRLGLLPTGYIYPKEERALRDLLRRRLLLVRQRSLHHVSLQSLIARHSGQRLNTLQIKQLTKGHLADYLQGHALLGGEITRQARCWLETAIKKIERELQRHVKPREDYQLLQSIPGVGPILGTTIALETGTIERFASAGNYASYARCVKSEKISNGKYKGQGNKKNGNKYLAWAFMEAGHYGAIWNPRIKRYYQRKQAKAHIMVAKKAVANKLARACYHMLKRGEEFDVTRAFS

SEQ ID NO: 78504 - protein, 342 aa, unidentified
MQNDTRIAVDLAKAVFEIAVSDRPGRVGRRERLPRARFLSFFAQQPAATVVMEACGSAHYWGRRIEGLGHRVVLLPPYHVRPYVRRNKTDRTDAKGILEASRNEDIRPVPVKTVSQQVLTSLHRLRSGWMSERTARINCLRGLLRELGVFIPAGARQVVPAVWALVEDAEADVPATLRPFLAELCQEIRDIEARVDRVERQLQAMSQQLPVVGQLLTIPGVGLLTATALLAFIGDIRRFPSARHLASYLGLTPREYSSGLRRHLGRISKRGDGYLRTLLIHGARSVLLRARANQSDRLREWAHQIAKTHVHNKAAVAVANKMARVVWAVWTHARPYQPQLVA

SEQ ID NO: 78505 - protein, 351 aa, unidentified
MIIIGVDYHPSDQYIAFVDTETGEYEERQLNHSDREAEKFYRELAARGVSVRVGMEATGYSRWFERLLAELGIEVWIGDAAEIKTKRVRKQKTYREDARLLLRLLRENNFPRIWVPSAENRDLRQLLWHRHRLVQMRTRIMNQLQALAMNEGQRRKKKLWSEAGRAQLEKLPLALWASRRRKDLLELLDRMNPSIEELTAAIEREARKWPEALRLMTHPGVGPITALAFVLIIGTPERFQCGKQIGSYVGLIPCEDSSAGHQRLGHITKQGSSLLRFLLGEAAQAATRWDADWRRRYMHLALRRQRNIAKVAMARRLAVRMYWMWRNGWEYAEWVKFGSHAGQLGIRHGVN

SEQ ID NO: 78506 - protein, 411 aa, unidentified
MEPKLVVAGIDVHKRMLAVVVVDDDHPQQALDQRKFGSRLSELRHLAAWLLSHGVNQVVMESTAQYGRPVGLALEQDFELHLAQAQSHAAPRGRKSDFVDALRLARRFLAAELRLSFVPDAEQRSWRALSRSKHQKRRHRVQIQNQIEALLEESQMKLSSVVTDLLGATGYRILKALARGESNPEKLVELAANNLKASPEQLADALSGSMPPEYRGILALQLEELELMDKHIAEFSRQLGAALKSHQQAVLRLCEMPGIREDAAWQLIAEIGPQAAAFDTPEQLASWIGVCPGREESAGESKSNRSPKGNRTMRRLLNQIAWGAVRTKDCFFKELYHRLIPRLGIHKAVWAVAHRVAKVIWKVLHEQVHYLERGPLALDPMAMKRRVSRLSRQMRKLGYIIEVKPVAPATN

SEQ ID NO: 78507 - protein, 358 aa, unidentified
MEVLHPHCAGLDVHKDSVVACVRHMVDGEVRREVRSFKTTTKGLITLSEWLSVEGCTHIVMEATGVYWKPVWHILSDGEFELVLANAAHVKNVPGRKTDVSDATWLAELLAHGLVRGSFVPDQQTQEMRNLLRSRKQFVRERTSHVQRLQKTLEDANIKLDSVISDIVGLSGRRMIEALIAGETDPDALAALAHRRIKASPAELEAALRGRVSDHHRFMLRLLLQHIDAIDAAITQIDQEVDAQVEPFRTAVQFLTTIPGISELSACVILAEIGRDMSRFPTAGHLISRAGLCPKNDESAGKRRSTRMRKGAPWLKTTLVQCAWAAARKKASYLQAQFHRLRARRGAKRRLVPSPLRS

SEQ ID NO: 78508 - protein, 317 aa, unidentified
MNTQINQNEINVGVDTGKTQLDIYIRPLDIYFTVTNDEKGIKQAIKTIKKHKPTRIVIEATGRLEQAFIIACAKESLPFVIANPAHVKKFAGAIGQLAKTDKMDAKLIAYYSEALKPKLSTLKPATLRLMSDLMSRRCQLMEMRTMEKNRLQSMPKEITSSINPLVTVINNQLDKIDKKLHKLIESCDEYKIKNDIIQSVPGVGNVVAFSLLSNMPELGYITNKEASALVGVAPINRESGSFEGKRMIRGGRHQIRTAMFMSMMSAMQCNPVFKSTYQRLVAAGKPKKIAIIACVRKMVVILNSMVRDGVYWDPKMS

SEQ ID NO: 78509 - protein, 443 aa, unidentified
MAEPDGVEEIEQTGEIVERVAAIDIAKASGMVCVRTPHEDKPGKRVQRVFNTLATSGAILEAADHLICQGVTRVVMEATSTYWKSFFLLLESRGLECRPVNARDVKNVPGRPKTDKLDAIRLAKLAERGMLRPSFPPPKPIRELRDFTRARAVMTHERTRHKQRTEKLLEDAQIKLSTVISDIFGVSGRAMLEAMIAGGRSPKALADLAHGTIKAGPAALAQALTGRFEEHHAFMCRMPPDTVDYLSIQIDKLTARITTRLAGPSTTEDDDGPGQGTLMPITDVERLDEIPGIGPNTAQVILAEIGLDMSVFPTAGHLVSWAKLSPRTIRSGGKNTSGPTGKGNPWLRGALGEAAISAARTDTFLRARHRRIVKRRGHMKALVAVARSILVSVWHLMNNPIARYRELGPDYHTRNLDPTRKTRDLIRQLKALGHDVTLAPATA

SEQ ID NO: 78510 - protein, 426 aa, unidentified
MKVMHDRVAAIDVHKDMVKVAVRVPGAKRGTRKTDVLEFRAFYGVLQEMGRELRRRGVTHVVMEASGVYTDPVYYALAELDFTEVMVINPAHAKALKGHKTDAKDAIRLLDLYECGLLSGSYIPAPDLREVRDLVRYRVKTVQARASEIQRLQKTLESAGIKLSSVVSDVTGASATAMIEALVDGERRGAALAGLAQGRLRTAGKMADLSMALAGRFTDHHAVMCRLHLDRIKVLGEAVMGLDARIAPLVARYSREAELLKTLPGFGDVVVAGWLGAIGPAPHEYFATAQRLASWATVCPGNYMSAKKSKGGRTGDGGNYIKPLLVQAAWAAVRVPGRLQAKFNRLVRKFGGARNKGAVKRAIMAIAHTLLKIAYQVLKTGTPYTDLGAGFYASRESPQARQDYLIRQLQKLNPGSVITITPAEAA

SEQ ID NO: 78511 - protein, 411 aa, unidentified
MDILFPHSAGLDVHKRTVVACLFALGPDGVWQRHQRSFPTMTADLEALARWLLSYGITHVVMESTGVYWKPVFNVLAAQCEVWLVNAHEAMNLPGRKTDYSDAEWLTRLMRCGLLKRSFIPEVGQRDLRDLTRYRTRLTQERAAAANRLQKILEDANLKLAAVASDIQGVSARAMLEALIGGESDPAVLADLAVGRLRAKLPALVEALSGQVREHHRFFFRELLDHLDHLGQCIATVNARIAELTVPYAALIERLMQIPGVKRHTAEVILAEVGPNVTPWPTAQHLASWACLCPGNHISANKRRSGKTRRGQQWLRTALVEAAWAASRQKDCYLAAQFQRLRARRGERRAAVAVAHSILTIIYHLLADPTTVFQELGGDYFVKKNPEQERRRAVKRLAALGYEVILTPISG

SEQ ID NO: 78512 - protein, 347 aa, unidentified
MSDGIAGGQVVGIDLHLHRSVICRIDDHGEELGWVRIDNDPAALVAECRKAGRGAAVAIEATYGWYWAVDALLAAGSEVHLAHPLGMKALRKRKRVKTDPRDAYELANLLRLGSLPEAYIAPPDLRELRELVRHRRQLVKLATSIKGGVRALLAKHNIRLAASDLDGDTATGLMDALELPGTYAQRLASQRRLLLVLADEIASVEIDLHTRLRHHPGYCNLLKVKGIGPTLAAVFVAEIGDVTRFPTAGALCCWAGLTPRHYESDKTVHRGHISKEGDTLIRWAAVEAIQRQTEPVVKAVKDGIIARRGKNTRNIAKVAAARKMLEVVYYVLRDGQARCLTAATDAA

SEQ ID NO: 78513 - protein, 376 aa, unidentified
MREKLRFLGFDVHAETIAVAVAEPDGEVRSLGTIANREESIRKLIMKLGPADQLRACYEAGPTGFVLYWQLTQLGVECAVVAPTLVPKKPGERVKTDRLDALKLARSHRSGDLTAVWVPDEDSESLRDLVRAREAAKQDQLRARHRLTKFLLRTGQRPPLGLKAWTEKYVEWIQQVHYTHPAREATLLDCLNEVQHMEQRVKRLEQSILEVVKLAPAQVQAVIQGLQALRGVAHISAVTIAAELGNISTRFESARKLMGYSGVFPSEDSSGKRIQRGGITKSGNAHLRRIVVESSWSYRHRPSIGARLRKRQEGVPAQITEIAWKAQNRLHKRYMKLMAAGKDQRKVMTAVGRELIGFIWAIGVKAEAACMQQKAA

SEQ ID NO: 78514 - protein, 343 aa, unidentified
MKAARIGIDLAKNVFEIHGVDERDIAVIRKTLRREKVGLFFANIPSCLVAMEACSGAHYWARKLTDLGHEVRLISPQFVKPYVKTNKSDLNDAEAICEAASRPSMRFVSIKSGEQLTIQATHRVRSRLVGNRTALANQIRGILAEFGIVVARNLAALRRRLPEILGSDMAALDPMTRSLILDLQEELVVLDRQVRAFDKKIRQISAASEACQRLERIEGIGPLTATALVAAAGNGASFRNGRQFAAWLGLVPRHHSSGGRTRLLGISKRGDRYIRTLLIHGARSALGRIQHKKDPRSRWLRKLCAHKPYNVAAVALANKNARIAWAVLRHGEHYDQKRTVSAA

SEQ ID NO: 78515 - protein, 343 aa, unidentified
MKIMTGIDLHSNNVVCGLMDEDGKRLLQRKLPCDLDLILKTLAPYKAQIAQVAVESTYNWYWLVDGLEDHGYPVVLANPAKMKQYDGLKHTDDVSDVFYICELMRLGILPVSHRYNRQTRPVRDLLRRRMLLVQLRTSLILSFKSLHERTLGKRLRLQEVKSMSAEKAQASFTHASDQMICGEQVELMGQFAESVARIEKHVLTTTKDWTTFQRVQEVPGIGKILGLTIALETGEPSRFAGAGHFASYCRCVKSQRESNQKKKGENNHKCGNRYLGWAFVEAAHFAVRYDQQCQQFYERKKRKTNVAVATKALACKLAKAAWHVMHDDVPYNPQRVFGGKRDA

SEQ ID NO: 78516 - protein, 416 aa, unidentified
MSFALPDALFFTGIDWAAETHAVCVLDAAGTIAAEFTIEHSADGIAALLRRLARYGPPGGLPVALERPDGRLVDLLLEAGHPVVPVKPNAVKAWRESEVLSGAKSDAADAAVIADYLRLRARKLTVAAPYSDQTRALRTLVRARGDLVEMRVAATNQLSALLEAHWPGARVIFADVESPISLEFLTRYPTPAAAAHLGEKRMAVFCGGHGYSGRRSAAQLLARLRAAPAGTTGASLGEALREVVLAAVGVLQALNAAIKKLDRSAAAQLGEHPDGAIFTSLPRSGQINAAQVLAEWGDARQAYEHSDSVAALAGVTPVTKASGKHRSVQFRWACNKRFRQAITTFADNSRHASPWAARIYEDARAAGKDHPHAIRILARAWVRVIYRCWQDGIPYDPARHGAAAALARQPVTPTAA

SEQ ID NO: 78517 - protein, 330 aa, unidentified
MKTAGLDVSHKTVTLAINREGRTGKPREFKNSAEGHRALIRALRKAQVSRVCLKATGLYHLDLALALDDAGLALMVINPKAAKRFAEAMHTRTKTDAVDAAVLTEFAQRMPFQPWQRPDTLALTIRACARRIAALNQLRTQTKNQLHAAQLTTCTPDVLVAGLHQLIAFLEAQIESLRRQALDLIVSDEHLRQTFELLISVTGIAEASAIQLLGELLVLPDDMQAKPWVAMAGLDPRGHQSGSSVNQKPRLSKAGNRYLRTALYMPALSASRHDPNVKACYRHLIKTRGLKKLQAVCAVMRKLLHAIQAMLRNRTPFDSTRFYTPTETTA

SEQ ID NO: 78518 - protein, 344 aa, unidentified
MTYFAALDVSLRSVAVCIVDDQGNNHFEAKIPSEIEDIVECLEAFDGEIELIGFEAGMLTQYLHYGLTEAGYPVVCLEAHHVSDALKAMRNKTDKNDARGIAQLLRTGWYRPVHVKSVGSHQVRAMLSSRRVILKKCIDLENELRGLLRIFGTKLPPHLSHGIFEEVVTERIEADPTFKEALLPMLELRGMLYHAYVKLDTQIRRMAREDAVCQRLMTVPGVGPVTALTFKAGVDDPTRFKNSRTVAAHFGLTPKRQQSGETDYDGRISRKGDTDVRCALYLAAHALITRQKEASSLKAWGVKLMKSKGHRKATVAVARKLAVILHRMWIDGNDFQRHSEKRAA

SEQ ID NO: 78519 - protein, 371 aa, unidentified
MNHVTSIGLDVHARSITAVALDSTTGEVRSQRFGYSPAELASWILGFESPKAVYESGVTGFHLVRTLRALGVDCVVGAVSKMHKPAGDKRRKNDRNDAEFLARQLLAHNVVEVFVPDEETEAARGLSRALEDIREDLTRAKHRLTHLLIRWGHVWDERTPEGKRRGTWTKAHWQWIRRVELPEPAANETLDFYISEVRHMEAQKRAIERRIAQHASRPRWAGRVEALRCMKGIETMTAFAITVEAGVFSRFDTARSFAAWLGLVPSEHSSGERVARGGITKAGNSHLRKLLVEASWHYTRATEERKRALNDPGVPFAISSHAAAGIKRLVKRRRHFTRDLRKRPVVANVATARELACWVWALGRMSEGTLA

SEQ ID NO: 78520 - protein, 351 aa, unidentified
MIIIGCDFHTRYQQIAMADDETGELLLERRLDHQRGEAHAFYRTLPGPVRVGIEATGPIHWFERLLTELGHELWIGDSAKIRASEVRKQKTDERDARLILDLMLAKRFPKIWVPTPGERDFRQLLWHRHKLVCLRTTLGNQLHALAMSQGLCRKKKLFTKKGRGELTSLTLGFWASRRRAELLKLLDQVEAPVSELDRAVFDEVQRREEAVRLMSHPGVGPITALAFVLTIGPITRFPRSRKLVSYLGLNPSEDSSGERRRTGAISKQGNTMLRWLLVEAGQKAARSDPALRQDYQRLKFRRGHAVAKVAVARKLAVRMYWMLRSGADYARLVRRQGSPGATLVDASTPRF

SEQ ID NO: 78521 - protein, 419 aa, unidentified
MTAQQCTPPQAALVAIDIAKNRHEVLIDPGPGMRRRRLTVLNTRAEHDRLVATLAGLGKPVIVGFEPTGNYHRGLVHRLIAAGFEARLISSMALARPREALHNGWDKNDPKDAQVILHMLRIGASTVYSDPGYGRLNDLQELSKTHDMVSRAKTELWHRLLTHYLPLYFPEAERFQGNSRSDWFLALLEQFPTPASITALSKDAFVEAAWEVVGRKVSKARLLADIYETARSSMALPVRPDSPAIAMFRLVLAEGRSLIRQRDQIEAQAEALLACDADAARLRQLPGIGPIIALTILAEAGDLRRFGHHRQFLKFCGFDLATHQSGMFRGQTRLSKFGNARLRRSFWLAAQVAIRQRENSFQARYSRYIVKDSDNKHLRRKAITAVAAKMARVAHAIVCSGTDYRPFYERPVPSGRTSL

SEQ ID NO: 78522 - protein, 341 aa, unidentified
MNTTSYGLDIAKTVFQLYWVEPDGKCFNRHFSRPKLIEFLARREPGRIALEACGSAHWWARQLQAMGHEPVLLHAQYVRPFVQTNKTDAADAKAIWTAAQQPGMPVVAPKTESQQCVLSLHAMRRLRVKMRTMLVNQLRGMLFEFGVHFRRGLRTGLHEIVERMAEIEQDVPPTLFEFVREQLLSIEQLDQEIARLDQRIDAWARQNRACHAILAIPGIGMLTATAMIATIGDVHTFKSGRQLAAYFGLVPKQTGTGGKVWLGGISKRGDPYVRTLLIHGARAVLNHLRRKNQPGWSLRLAQRRPANVVAVAMANKMARTVWALLAHDRAYDRDYVSVRPA

SEQ ID NO: 78523 - protein, 313 aa, unidentified
MKTLHRRCAGLDVHSDSVVACARVIVRTKVTHEVRRFSTATRDLLEMADWLAAQGITHVAMEATGVYWKPIWHILEGRFELILANAAHIRNVPGRKSDVNDAVWISDLLAHGLIRASFVPPAQIQDVRDLTRTRTQLAREIAQHIQRIQKTLEDANIKLTSVISDIVGMSGRRILKAMIAGETNAAKLAELGSTRLKCPRAELTAALDGRVTAHHRFLIAHHLSLIEDMERHIAAFDARIEELLVPLRDALAQLITIPGVSRVSAQVILAEIGADMTPFSTSGHLLSWAGLVPRLDESAGKRRSTRVRRGRLG

SEQ ID NO: 78524 - protein, 396 aa, unidentified
MSMAELRVALDIGSKKHRVGIGSADGRLLEEFDITHDKEGFEQFFNRVSVFEQRFALPVVVAMEGLGGWARPLDRMIQQRGYELLNVNNVKLARFKEIFAAPAKTDKIDTRKILELMHMREVLPLAKRILHPVGQTPIENEQLKRFTRRRRQLIEEKTRVSNRLGSDLQAVSPGLLEITGDVDNLWFLNFLSAREDLSKLAGMKRSSLLKIAGVGKGYAARIALWQSGATFADETEWVSEMIVSDARRILDLIREIQALEARIETIAATSSMATRLRTITGFGPICSATLAGEIGNMERFGGEASLALYVGMTRLDNSSGQYTGTKNTRQVNTHARAAMMTAAARHIDYTPESKIYYDRKRAEGKSYNQAVRALGRHMVRVIWSMIKHERDYVQRS

SEQ ID NO: 78525 - protein, 411 aa, unidentified
MRRVIGIDVHRTFGEVVFWENGRLRHAGRIDMTRTALEGFGKTLLASDEVVVEATANSMAVSRVLAPFAARVIIANPLQVKAIAQAHVKTDKIDAGTLASLHAAGYLPQIWTPDAETERKRRLVARRYQVVRHRTRLKNEVHSILHTHLIPKCPHADLFNVRGRAWLAAQALLNDERAAIDRHVRELDRLAEDLALLDREIAQDAIDDPAVNRLMTITGVNLAVAAGIVAAIGDISRFNSPQKLVSYFGLNPRVRQSGLGPAHHGRISKIGRSHARAMLVEAAWTAAKTPGPLHAFFVRIRARRGHQIAAVAVARKLTVLCWHLLTKGEDYLWARPALVANKTRAMQLQAGHPQQKGSRRGPAYAYNIKALRDREMLIAAQAERNYEQFVSQWKARRPRAGARAPQFGKTT

SEQ ID NO: 78526 - protein, 369 aa, unidentified
MEKDTTYVALDDSKRKIVVGILRSGDTQPELREIANDPRQIRRLFERLKREGPVAACYEAGVSGYDLHRQLIALGVAGAVIAPALTPRRPGQRIKTDRRDAAKLVRLFRAGELTAIHVLDESEEAVRDLVRCRDDIRRDVLRWRHRVLKLLARHGRACLTGKNWSRAHWQWIREQRFDLPPLQRAFEATLFALEQALARQAELDQELEAVAATASYREPVGWLRCFRGIDTLSAIILLAEVVDFQRFRRPRELMAYLGLVPSEYSSGESQRRGALTKAGNSHARRILVEAAWHYRHRPTIGRALASRTHGQPDEVVAQAWRAQQRLHRRYRHLVGHGKRTPVAVAAVARELVGFIWAAMTRHESRRAAA

SEQ ID NO: 78527 - protein, 473 aa, unidentified
MKKHQRAKAKSKANQPIHVLQPDAAGVDIAANEIWAAVPPERTEQSVRKFAAFTADLKELVKWFLDCGVRSVAMEATGVYWIALFQLLEDAGLQVCLVNARHVKNVPGRKSDVRDCQWLQYLHSVGLLTGSFRPAQAICALRSIYRYRQELLSLAGQHVQHMQAALDQMNIKLHHVIDDLTGLTGQNIVQAILSGQRDPVQLAKLRDRRIQAAESTIAKALEGDWRKEHLFVLQKAWENWTGVQKQIQDCDKELSDYTRELEACTQVIKPVKVVHLKPELVGAEPVKQPPVQKRKVRKKTSKNQPDGPWQAELERFFGVDLTVIPGVSVLTALTLMTELGNDLRAFKTEHHFASWLCLCPDNETSASKVLRRRTRRSQNRVRQALRMAASSLHHEKSYLGDKYRRLRARLGAPKAITAMAHQLARIIWTLITRQIPFDQSLFAYHEKVNEQRRLKRLQASARQMGYQLTPIAA

SEQ ID NO: 78528 - protein, 400 aa, unidentified
MGQPLWAGVDAGKSDHYCVVIDADGKRLLSRRVANDEAALLELINAITALADGGELTWAIDLNAGGAALLIALLIGAEQRLLYIPGRTVYHASGGYRGEGKTDAKDAAVIADQARMRRDLKPLRPQDDIAVELRILTSRRTDLVTDRTRAINRLRAQLLEYFPALECAFDYSASKVALILLSGYQTPDGLRHAGAARLAAWLRKRKARNADAVAAAAIEAAKSQHTVVPGQQVAAAMVARLAEEVMTLDTEIGDTDAMIEERFRRHRHAEIILSMPGFGVILGAEFLAATGGDIAAFGNTDRLAAVAGLAPVPRDSGRISGNLKRPRRYNRRLLRACYLASHIAIRTDTASRIYYDRKRAEGKRHTQAVLALARRRLNVMWAMLRDHKPYQPTAPNGAAA

SEQ ID NO: 78529 - protein, 350 aa, unidentified
MEFFVGLDVSLDETHICVVDEGGRIIKETRALSEPKALAKAIRHKGRRIEHVGLEAGPLSQWLYEGLVREGFSVSVMEARHVRAAFAAMRIKTDRHDARGIAQLVRLGWFKRVHVKSLDAQETRALLTARAFLVEKVTATENSLRAALRNFGLKMGSVTRRTWEARARELADGNPVLEGIVEAMLRVRALLLDELADVDSQLIALAKSDPVTRLLMTTPGVGVIVALTFRSAVDDPDRFPRNRDVGAWLGLTPRRWQSGKTDIAGRITKAGDPRVRVMLFEASASILGRARVMSPLKEWGLRIAKRTSMKKAIVAVSRKLATILLAMWKSGTAYWATGRPPASAQDFAAA

SEQ ID NO: 78530 - protein, 368 aa, unidentified
MPSMQLRPDDVVVGVDTHKDQHVAVLLDGLGGRLAELYLPATAGGFAQLLAFSLEHVGPQGRLQAFGVEGTGSYGIGLARFLRRQGHTVQEVHRPPRNSERRLAGKSDTIDAEHAARQVLAGRSTAIPKTADGAIESLRLLKTARDTAVKARSSSMIALKATLVTASDQLRAELEPLTDHKLIEACAALPSAGWLAAPDTAMRHVLGSLARRWLQLHEEIKIHSKHLKMLTKTIAPRLVEAVGVGLDIAAEMLVTAGDNTDRIRSEAAFAKMCGACPIPAGSGKTNGRHRLNRGGNRQANAALYRAVIVRLRWHQPTIDYAARRTAEGLSKREIIRCLKRYLAREIYHLLPPVTDANQHTQTLAIKAA

SEQ ID NO: 78531 - protein, 489 aa, unidentified
MSTARKQREEKKGSDAQRSASKRKARDSHCQQGDGNRRRSKLTITNPDAAGIDVGARIHYVAVPEGRAEVSVRSFGAYTAQLDDLVQWLKDCRIKTVAMESTGVYWIPLFQKLEEAGFEVLLVDARQAKHVPGRKSDVQDCQWLQQLHSYGLLRAAFRPEDSICRLRTLQRHRKNLVESAAMWIQHMQKALNEMNLHLHHVLSDISGRSGLAILDAILAGERDPKKLASLADRRVEKSQAQIEAALTGDYRPELLFVLSQSLDNYRQMQEQIAQCDLSIEKQLAKMADCTNPNQASEPIQQSQDSAGCKPRKRKPKDGLELSLAGHLKRILGVDLTTIPGLNILAVLNLLSEIGTNMAKWRNEKAFVSWLGLSPNNKISGQRVLSSRTRKVVNRAATTLRLAVMILGKTNTPLGSFYRRKRAQLGAPKAITATARKLGCLIYRLIKNGQGYKEPDLHTYELKYKDQILNSLRKRANSFGFDLVEVPKAA

SEQ ID NO: 78532 - protein, 371 aa, unidentified
MQQSNTALYVGLDVHKESISIAYAPDTRDAEVVALGSIGTRQCDIDKMIRKLCSKSPRLVFVYEAGPCGYWLYRYLTKKKLTCWVIAPSLIPKKPGDRVKTDRRDAMGLARLMRAGDLTPVYVPEVADEAIRDLTRAREDAMKDLKSAKYRLKSFLLRQDIRYEGRANWGPAHLRWLSEVVCYTPAQQIVFQEYVRCVSEQHDRVQRIETELHDQALHWRLFPVVEAIQALRGVQFITAVSLIAELGDLTRFDNPRQLMSYLGLTPSEYSSGDRRRLGGITKTGNSHARKALVEGAWAYRYPAKVSRHLQLRLEKVTQPIQDISWKAQVRLCKRYRTLVNKGKHKNQVTVAIAREMAAFIWAIAKQTPLNV

SEQ ID NO: 78533 - protein, 337 aa, unidentified
MKYCGIDLHSNNSVIVVIDDEDRVVARKRLPNELARIVEFVASWRDELAGVVVESTYNWYWLVDGLQAAGFEAPLANTAAIRQYDGLKHSGDEADARHLAHLLRLGILPTGTILPRDERAVRDLARKRMQLVRGRTTHILAIENIMARQFGGRMTSNQIKRLSADDIDQMPIAADVGLAMNANLAVIGALDAQIEVLERRLRERVKPRPEYAFLTSVPGIGQALSTTILLETGPIDRFASVGNYASYARCVDSVHTSNRKKKGEGNVKNGNKYLAWAFVEAANFARRYCPEAKRFHERKKAKTNNIVATKALAHKLARACYHILREGRPFDVTRCFA

SEQ ID NO: 78534 - protein, 406 aa, unidentified
MVLVALYRRVLGLDVHQAQITACAIVEDENGEQQLIQRQFGTFKRDRKALAEWAASLNVELVVMESTGIYWKSPYAALEAAGLKTLVVNAKHVKNVPGRKTDVSDAQWLATLARAGLLRGSFIPPARLRELRLVARQRQKLVGQLAAEKNRLHKVLTDSGIRLGVVVSDVHGVAARKMVKALIAEASVQEILALASTRFKASREELFEALQGELTPSHRFVLGELMQHIEEIEARIARFDGQLLAGMAEQRNALALLQTLPGIDLIGAAMLLVEIGTDMDAFGSPDRLASWVGVCPGNNESAGKRKSGRATKGNPYVRRLLCEFAHSASRTTSVFKSKFQALLIRRGHKRSIIAIAHKILRTIFYMLKRGQCYRDSATDYEAMSVKKNAPRWIKALTKFGLLNQPA

SEQ ID NO: 78535 - protein, 381 aa, unidentified
MDVVYSHVCGLDVHKKTVVACIITPDEKEIRTFSTMTDDLLQMVDWIKSKGCTHAAMESTGSYWKPVYNLLETEEIQTLVVNAQHIKHVPGRKTDVKDAEWIASLLRHGLLRGSFIPPRDQRELRELIRYRRILIEERAREVNRIQKVLEGANIKLSSVASDILGKSARAMIEALIAGNVDPESLSELALRRLKNKKADLQRALKGLIGPHQRLMLQTQLRHVDELDALIQQLDEEIKRRMLPFEEDLERLETIPGVARRTAEQIVAETGTDMSRLPSAAHLCSWAGLAPGNNESAGKRKSGRTTKGNPKLRKRSHRGGTGSSPNETHVSVQSISSHCRQTRGQSGGCGGGPSDPDHRLPSAKGKTGLQRTGASLLRRTPA

SEQ ID NO: 78536 - protein, 346 aa, unidentified
MNQIIRIGMDTSKHIFQLHGVDAAERPVLRKRLGRKQVLAFFAKLPPTVIGMEACGASHYWARELGRLGHEVRLIAPQHVKPYVTRNKNDGRDAEGTCEAMSRPTMRFVPVKTAEQQAALMLAGIREQLIARRTQLSNTIRGYAAEFGLVAAKGLDKIEPLLAQIAQDEDLPALARQLFAMQGHQYAQLQAELKVIEAKLMAWHRANACSRRLAQIPGVGPIGATTLVMKTPDPRAFASGRHFAAWLGLTPKDHSTAGKTRLGKITRAGDEVLRRLLVAGATAVIQQVRRGRGRPSPWLLAVLKRKPPKLAAVALANKIARIAWKLMTTGESYDGARMPGASAIAA

SEQ ID NO: 78537 - protein, 348 aa, unidentified
MLADQLDYIVGVDPHRDSHAVAVVEVVSGAVVFEATVAASSDGYAHALKLVDEHAAGRRAFAVEGTGSFGAGLTRFLTVRGERVLEVGRLRRERRSGGKTDALDAVRAARSVLAKERPGTPRAGGERQALQALVAAREGAVNAKRAGLCQLRDLLITTPEPLRNELRPLTRARLLQRLAATRPGGGRDPELRGSMLALRSIARRVLQLTAEERELAREIETITRKLAPQLLEQPGVGPHAAAQLLLSWSHQGRITSEAAFARLAGAAPIPASSGQTVRYRLDRSGDRKLNRALHMILVTRKRSHPATIAYIERRMHEGKTRREANRCLKRYLARNLYRILEHGTPPAT

SEQ ID NO: 78538 - protein, 349 aa, unidentified
MDRYIGLDAHASSCTVAVIGPSGRKLQSQVLETNAKALISFLETIPKDRHLCLEEGTHANWLYEVLKVHVEEIVVAGVRQSRGPKSDKRDAFKLADELRVGSIEKRVYKESGGFAALRALSQAYTTLVTDSVRIQNRIKGLYRSRGIATSGRKVYLPASRQAFLEKLPGWLRPRGSTQYLELDAVNALKKQAAKSLLEEARRHKPYEILRTCPGLGPIRTAQLLSIVVTPYRFANKRSFWAYCGLAVVMRTSSDWARTQDGKWVWAALQRTRGLNRNSNHTLKQIFKGAAITVVGRRGDEPLYRHYLKLLDGGTKPNLAKLTIARQIASIALSLWRSKERYDPRRVLTS

SEQ ID NO: 78539 - protein, 354 aa, unidentified
MKRTSKHVGLDVHQSTTVATVREGNGRVIARAILATEAEALTAFMRGMRGSIWVAFEEGTQAQWLHDLLVPLVDGVVVCDRRGEQRQGNHGDRVDADELSERLWQGSLRAVYHGSRDRLALKELTRTYRNLAEDSTRVMQRLKALYRARAIRTKGQGVYHPKHRDKWLAKLEDPAVRFRAEVLYAELDVLRELRPRAKTAMVAEARRDPAWAVLRTIPFLGPVRVSMLLATLQTPWRFRTKRNLWGYAGLAVVTHVTAEYEIVNGRPVRRRRPPRTRGLNRNRNPVVKEVFKAAAAAATGRPGALQDYYLERVAKGMDPALARVTLARKLAAVTLRLWKTGERYDPSKLTLQAR

SEQ ID NO: 78540 - protein, 324 aa, unidentified
MAKRITICAGIDTGKRKLDVAIDGSSLLLQVENTAEGHEVLLVWLRRHKVKRIGIEASGGYELPVVTELRRKRFVVVVFQPAQVRAYAKFHLQLAKNDKIDAALIAACTAAVKKIHAAPDPRLQPFAEHLTLIDQIGEDIQLYKNRLETCRDPRIQKLWEEEISRLAKRQRVELKALAAAIRQHPDLAQRLNLIYSVSGAGMSTAVAILVRMPEIGTLNREQVAALAGLAPYDDDSGERSGARHIDGGRKRLRRALYTAALPASFFWNPHLIALYKRLKAAGKGHKSALIACARKLLIFVNTVVARGTPWQEQQPARATNPAAA

SEQ ID NO: 78541 - protein, 358 aa, unidentified
MDKIKNSKLDCTGQPVYVGLDVHKKSWSVSVFSRYGEFKTFTQPPQPDKLVDYLKHNFPGGEYHSVYEAGYCGFWIHDQLKERGINCTVVNPADVPTKQKEEQHKRDRVDCRKLARGLCNGAMEGIYVPSRQMREDRSLVRTRQAFVKKRTRCKNQIKGMLLFYGIHLSEEQILAPWSGALIKWIESIRMERDSGNIALKAHLEELAYLRHLTARVNRSILNLARSAEYAIPVKILKSVPGISTLTAMILLTELCDMARFASLDSLCSYVGLIPSIKSSGETEYVRGITPRRNAHVRWILIQAAWVAVRKDPALMMTFAQYCKRMRKNRAIVKIARKLLNRIRYVLKHQTPYVPCITE

SEQ ID NO: 78542 - protein, 440 aa, unidentified
MSQEDRSRLEEFRQFRKEVRGSTEYLLVGIDVAKDKHHAFFGTATGKTLFRRLVFENNLEGFRRLLVQAEAMKVQHGLKRVVFGMEPTGNYHKPLGEHLIRSGHWVVLVSGVAAHENRKTLDGRWDTNDTRDAANVADLISQGKCLFYEFPGGVFQDLRNLLSLKRRLKRMEQGHRVRIRNHLVAKYFPELDRYYEQSESTVLAIVRWCLDPSEIAGLEYQKFVQMVGSIRGRCSQEKRLQAIWKMAVDSVGCEAGATVEFEARVMVEGLRQIRESIREIDERIQEVCSQFSEYECLRSIPGFGPDVSSKVLGAIGDPFRFQKGSQVLKMAGLDLSAERSGKTSESAIPVISKKGKADLRYALYQAAFIASTRNQDFIVYYTDQLRGREREPGIKIKMRVKLSAKLLIVAWTLMKKKEPFHPGYLRVEGQSFSAEAGRER

SEQ ID NO: 78543 - protein, 356 aa, unidentified
MSRDIKYIGMDVHKEATVIAVRNGSGKLVMESILETEASSILQFIHGLRGELQVTWEEGTWAAWLYDLLQPQVERVLVCDPRRNALLKEGNKSDKIDARKLADLLRTGMLRPVYHGEHGLRTLRELGRSYRTISQDLNRVMNRIKALYRGWSIPCAGTRVYAPRYREEWLHKIEHAGVRRRAELLYQQLDGLQTLRRTLRPELLAESRKHKASKLLRQIPCIGPIRAARLLALMQTPHRFRSKRQLWTYSGLGIETRDSAQYRFVRGQLQHAKKPQQIRGLNQNHNHEMKEIFKGAATRASCGVGPLRDFYVALLAKGMKPEMARLTLARKIAAIALTLWKKEERFDAEQLKPQAA

SEQ ID NO: 78544 - protein, 343 aa, unidentified
MKLSRVGIDLAKNVYQLHGVDRHGKTVWKRRLKRHQWLKALLDKTEPGCEIGMEACASAHHWGRQLQSLGYTVKLMPPQFVKPYVKSNKSDAKDAEAICEAMSRPNMRFVTVKTVEQQDIQATHRIRSELITQRTAKANQIRGLVAEYGLVAPKHMSSLRAAIPCWLEDAENGLTGDFRSLLHAVWNDLLGLDDRVCEMDKLIKRLAENHEDCVRLQQLRGYGPMIATALIATVGDARQYRTSRQMAAAIGITPKQHSSGDRDRLLGISKRGDVYLRTLMIHGARSVVASAKHKDDPLSRWVTGIATKRHPNVAAVALANKTARMAWAMLRNKTDYDPDFAIR

SEQ ID NO: 78545 - protein, 453 aa, unidentified
MSEPSNESKGTSLEIVHPNAAGIDIGNAAHYVAVPPDRDRQAVRRFECFTEDLKKMADWLIQCGIDTVAMQSTGVYWLPAYEILTERGLRVFLVNAAHTKNLPGRKSDVQECQWLMKLHTYGLLSNSFRPTEEICVLRTYWRQRDAQVKAASMTIQRMQKVLTEMNVQIANVISDISGVTGMAILDAILQGERDRYKLAELAHPRIQASKEEIAKSLEGNWRSELVFVLRQERDIYREYQKKIGECDEAIQAHLKTMEDKAEPGSKPGTPKAGKRAGGNAPRFDLRGELYRISGIDLTRIDGINIMVAQTILAEVGLDMSKWPTEAHFASWLGLCPNNQITGGKVYHRGSRHVENRAATAFRMAATSLWRSKTYLGAKFKRLRAQLGAPKAITAMAHNLARLVYRMLRYGKEYVDKGMEFYQQRYQQQQIKWIEKKARDLGLVFTLTPESDVS

SEQ ID NO: 78546 - protein, 351 aa, unidentified
MPSKTHAVVVRTIGIDTGKNTLHLIGLDDKGAIVLREKVSRGRIAARLANAPRCLIGIEAGMATHYVARELIALWHEVKQVPPAYAKPFRQGQKNDFRDAHAVAEAVQRPSTRCVPVKTDDQLELQALHRVRSRLIGERTAVTNQIRSFLLERGIPVRQGLRFLRQQLPDILAKRIGVLSPRMTRIIEDLIGEWRGLDERIDHVTTEIEALARSNEGCRQLMTVPGIGPIIASAMVAAIGNGTAFATGRDFAAWLGLVPKQMSTGDRTIPGRITKRGNRYLRTLFMQGARVILLRPASWAKHSFGPWLTAAAQRLHHNVLATALANKLARIALTVLVQGRGYETRVTSEAS

SEQ ID NO: 78547 - protein, 371 aa, unidentified
MEHTRFIGLDIHKERISIAVAESGRSGAVEYLGEISNDPVAIGKLCDRLRRPGKMLAFCYEAGPCGYGVYRQLTSLGHRCDVMAPSLIPHKSGDRVKTNRRDATMLARLHRAGELTPVWVPDADHEAMRDLIRLRSVVRQIVTRTRQHLQGFLLRHGRKHGRGTAWRMAYRRWLSTLAFGHPAQQIAFQDYTDAVMDAERRLKRVEEQISGLLPEWNLRPVVDALQAMRGIALINAVVLVAEVGDFTRFSNPRQLMAYFGLVPGERSSGETIRRGGITKTGNTHARRALVEGAWAYRMKARIGRHKVDRIEALPKIIRDIGWKAQVRLCTRYRRLRARGKTANVVNVAIAREMVGFIWSITCTVQSTPKTA

SEQ ID NO: 78548 - protein, 310 aa, unidentified
MDATYVGIDVSKEKLDVHLRPSAEAFAVARDGKGLHELVERLRGVAPELIVVEATGGFETIVTAALAAAALPVVVVNPAQVRHFAKALGQRAKSDPIDAAVIADFAAAVKPQLRPLPDAAARLLAELVGRRAQLVEMLAAERQREERVANARVRKSLKRLIAALAKELKTIEDDIDGLIRSSPLWREKEDLLKTFPGVGETLARVFLADLPELGQLDRRKIASLVGVAPFTQQSGQWKGKSMIAGGRAAVRSAVFMAAMSAIRCNDVLRAFYQHLLALGKPKMVALIAVARKLLTILNAMLRDQKPWQHA

SEQ ID NO: 78549 - protein, 408 aa, unidentified
MELTPMHKRVIALDVHQAKITACAVVEHDDGRVEVTKRDFGAFKRDRRALAQWSLEIRPEVVVMESTGVYWKSPFAALEAVGIIAWVVNARHVKAVPGRKTDMADAQWLATLARAGLLRASFIPPVDFRQLRLVARQRQKLVGMCSAEKNRLHKVLVDAGMRINVVVADIHGASARAMVKSLIEGKPIDQVLDCKGRLRASREELFEALSTEQFSAVHRFVADEIMQHIEQIEQRIARMDQYLLEGLRAWQPQLNLLQTIPGIDIQGAAMLLVEIGADMTVFGSAERLASWVGICPGNNESAGKRKSGRIRRGNAWVRRLLCEFAQAAARTRCALKAKFDSLTIRKGHKKSVVALAHKMLRTIYAMLASGTHYQDRSVDYEALSVARNAPRWIKMLRKHGFMAETAAA

SEQ ID NO: 78550 - protein, 365 aa, unidentified
MTTRQHSTSSSTDPPVRREVVLGVDTHGEVHVAAVISPLGKILGTESSPATAAGYRQLLVWARKQGTVRRAGVEGTGTFGAGLSRYLLAQQVEVYEVNRPDRTARRLLGKSDPLDAQAAARAVLSGRVRARAKSGDGPVHSARIFKLAKDSAVKARTQAINQLKAVLVIADPALRERLSSLGNRELFRTCAHLGPDDGEDGENAVAQATHMTLRMLAERIEQLTGQINELNQRLTRLVERHAPQLLVPVGIGPDSAVTLLITMGDNPERLNTEASFAALCGVSPVEYSSGRRSTRRLNCGGDRQANAALHRIVFTRLLHDPRTQAYYERRTQEGKTRREIIRCLKRYAAREVFNLVRPVSRTPAL

SEQ ID NO: 78551 - protein, 400 aa, unidentified
MNAVGIDVSKGKSMVAIMRPFGEIVSTPFEIKHTSSDINSLVKLIKSIEGESRIVMEHTGRYYEVLAHQLSEANLFVSAINPKLIKDFDNDSLRKVKTDKADSVKIARYALDKWQNLKQYSVMDELRNQLKTMNRQFGFYMKHKTAMKNNLIGILDQTYPGVNTYFDSPARSDGSQKWVDFASTYWHVDCVRKMSINAFIYQKWCHRRRYIFSKSKAEEIYGKAKELVPVLPKDDITKLIIKQAVDQLNSASITVESLRTLMNETASKLPEYPVVMAMKGVGTSLGPQLMAEIGDVSRFTHKGAITAFAGVDPGVNESGSYEQKSVPTSKRGSSDLRKTLFQVMDVLIKTHPQDDPVYQFLDKKRAQKKPYYVYMTAGANKFLRIYYGRVKEYLASLPES

SEQ ID NO: 78552 - protein, 359 aa, unidentified
MYVAGIDAHATYLVVAIVSKAGELVQKATRIANAECHRLVELLERYRPVEAVVETSPAWPWLYDLLRGGNGFGFVLAHAKKLRAIAEANYKSDEIDAEILARMRVAGLIPEVYPKTIEEREQALLVRHRARLVRIRTAAANRIHAEIQCVGLRLERGRLLTQGGRQWVADHAWPLFGPEQRRLVRTHWALIRSLGPMIKGLDRQIERVGEEIPAVSVLRTIPGIGPYRGLLIATELCPIERFPAPKHVVSYAGLAPRHSQSGLRPIRHGNIPAGANRWLRGSLVRAVVSHLQQAPESWLSCYYHEQKQRLGWQVARVAAARKLARAIHAMLRTGEVWRDEAVAGERSELQVAHVAQTTF

SEQ ID NO: 78553 - protein, 359 aa, unidentified
MSTMPEAEVFVTLGIDTHKHTHLVVALDQLGRRLDELELPTTTVGFAELYAWASELGTIDTVGIEGTGAYGAGLCRWLRDRGVVVVEVERPDRKLRRNAGKSDPIDAEAAARKVLSGEATVTPKSGAGNVEMIRVLRLTRRSAVVSRSQVTNQLHALTVTAPPALREQLEGRTTRKRVAIAAKFRPGDEPDTVLAATRYAMKKLALRFRALDAEIKDLDRQLTRLVTTTAPKVVALRGVGIHTTATLLVTAGDNPDRLRSEGAFARLTGTAPMPASSGQTDRFRLSRGGDRQANAALHLIAVNRLLCDPRSKAYVKKRTGGTKANLDILRRLKRYTARELYPLIVEALTEAEPDLVPAA

SEQ ID NO: 78554 - protein, 342 aa, unidentified
MEHYAGIDVSLESASVCVVEAGGRIVREAKVASEPDALIAWFGKLAVEVSRIGLEAGPLSQWLYAGMREVGLPVELLETRHVRDAFKAMPVKTDRNDARGIAQLMRLGWFRPVHCKSLPAQELRAVLTARKLVQGKKHDIEMSLRGILRGFGLKVGPTTTRSFDGRVRELVEGHPTLLAVADALLLARATLGEQLGKLQKRLVSLARDDTRARLLMSTPGVGVLVALTYVAAIDDPARFRSSKAVGAHFGLTPKKYQSGETDVTGRISKIGDASVRTALYEAANVILTRPVKGSSLKSWAMRLAKRAGMRKAKVALARKLAVVLHRMLADGTRFTADKAAAA

SEQ ID NO: 78555 - protein, 410 aa, unidentified
MEVLHAHCAGLDVHKDSVVACVRHMADSKVTTVVKTFKTTTQELMALSNWLSDQGATHIAMEATGVYWKPVWHILSDGEFELILANAAHVKNVPGRKTDVNDATWLADLMAHGLIRASFVPDEPTQQMRDLLRTRKQMVRERSSHVQRIQKTLEDANIKLDSVVTDILGLSGRRIIEALIAGQTMPQALASLAHRRIHASTDELEASLRGRVTKHHRFLLKLHLDQIDAFDAAIASIDEEVDTNVEPFRAAIELLSTIPGISALSAQVLVSEIGIDMSRFPTAGHLISWAGLCPKNDESAGKRRSNRMKKGAPWLKTTLIQCAWAASRKKNSYLQTQYLRIRSKRGAKKAIGAVAASMLTAAYHMLKDGTFYQDLGPNHFDDRAKGKHVLRLVNRLHNLGFDVQITPLAA

SEQ ID NO: 78556 - protein, 337 aa, unidentified
MYYVGHDGHKDISAFCITTASGNVKETFKTTATPEGMDVLIEKMKGKKFKVLAEASTYTIDLHDYLVSKGVESYLAHPHDLKLITESCRKTDRNDSKTLASYLRLWDEHELDISISFVVDGDNRSLRELCRLRESVSEMKGSTMQQIKSHMRINGQYVEFEDLKTMKARKHIRENFCEDLCLMMLLDMYVVFEDKGKILDSEIERRFGDRREVQLLATIPGVGITTAAQLMSMIVDVHRFPTADKMRSYFGMAPTVRDSGGSLKHGHITRRGDPMMRKILSRVVAQLIKNAPNDNLAVYRESHRSAMRPGMLMVACMNRLLDIIYALLVRGTPYIHM

SEQ ID NO: 78557 - protein, 344 aa, unidentified
MDHFAGLDVSVKNTSVCIVDDTGRIVREVKVASEPDALLAVLTNRSYRFKRIGLEAGPLSQWLFSALAEADLPVICVETRHMRAVLKAQINKTDRNDARGIAQMIRVGLYRAVHVKTLRSQKLRMLLTHRQLLQSKAIAVDNDLRGTLRNFGLKVGMMGAARFEARIRELVQGLPDLAVLVEPLLVVRRVLREQVAILHRRLLAIVRDDEVCRRLMTTPGVGPVVALTYRATVDVPARFRKSKSVGAVFGLTCARDQSGERDRAGAISRCGDKMMRAMLYEAAQSMLVRSTRWSWLKAWAMQIARRRGKRKAIVALARRLAVILHRIWVDGTEFKWTREDASAA

SEQ ID NO: 78558 - protein, 426 aa, unidentified
MDVIHKCCAGLDVHKKTVHACIRQLTGDGRVIKEQREFDTMTRDLLVLGDWLAAHGVTHVAMESTGVYWKPVWHLLEGRVTQCLCNAQHIKKVPGRKTDTKDAEWLAQLLQYGLLEPSFVPPTPMRELRDLTRQRVQLTHQRTAITNRMQKTLEDANIKLASVASDITGVSGRSMIQAIIAGEQDAEKLAGLARGRLIKKTTDLQIALQGRITEHHRFLLRTLLEQLTHTEQQIASYDDRIDQVIASEVLDASMEAPEALPFAEAVELLDTIPGIDRTSAKAILAEIGTDMSRFPSAGHLASWAGMCPGNNESAGKRKSGKTPKGDRWLRRSLTQAAWAATHTKDSYLGAQYHRLAPRRGKKRAVIAVAHSILVAAYYMLKTHSAYEELGKDHFDQLQPDRLKHRLVRRLEDLGYNVTLDQERKAA

SEQ ID NO: 78559 - protein, 312 aa, unidentified
MTKFTIGIDISKDRLDVHRLPDGVSRCFSNDAKGHRALLAWLQHDPVDRIVLEPTGAYHRALERALATAGLPVAKVNPRQARRFAEALGRLAKTDPIDAAMLARMGIALEPETRPAVSERLETLKELRAARQALVKDRTATRNRQNNLTVPLLKRQAAQRLRQIETQLAAVDREILNLIRADEILAQHLRILVSIPGISEITAVTMIVEMPELGTLEPRQAASLAGLAPITRRSGKWEGRARIGGGRAQLRNALYMPALVAVRYNPNLKRKYEELRQAGKPPKLALTAIMRKLIILANALIRDQRCWVSNLA

SEQ ID NO: 78560 - protein, 323 aa, unidentified
MDKNTNFIGVDISKDRFDTWGTGSKYHRFENNEVGYEKFLLSIGKGSWVIMEATASYYQKLALYLYQNGVNVSVVNPLVIKRYIQMKLQHNKTDKADAKMIWKYATEQPLSRWVPEPAYIETCKLIYTSIGLYNKNTTALKNKLHSLESRGYTKGILVRSLKRQVNNLKKEIRVLEKQLETIIKNHESKMLLNLSSIDGIGKKTAMLLIICTNGFRDFSNHRQLSAYFGLAPVERSSGSSIKGVSRISKKGNPDVRNHLFLCSFTACHNNAQCSELYKRIVAKGKSKKLALIAVCNKLLKQSFAIARSGIPYDKNYASTVPLV

SEQ ID NO: 78561 - protein, 403 aa, unidentified
MNSVGIDISKGRSTIAVMRPFGEVVISPFEVRHTDSELSKLARRLKSLNGETRVVMEATGNYHAPVAKLLHDAGLYVSVVNAKLVHGYGNNDLRRVKTDRKDAVKLANYGLDRWLTLPRYIPEEDTRLLLKNCYRQYRQYSKVQTILKNNLISLLDTVFPNVNRLFSSPARADGSEKWVDFVAEFWHCRCVSEKSEKVFTNKYQRWCRKRGYNFSEEKAHTIYVEASGHIGVMPKSETTKLLVEQAVAQLRATSAALAALKHEMQSLASMLPEYPVVMDMFGVGPTLGPQLIAEIGDVRRFYSKKALVAYAGLDAPPNDSGDVTGRHKSMSKVGASSLRRTLFLVMGVYLQKSPLDEPVYLFMDRKRAEGKPYRVYMMASANKFLRIYYATVKAYLESLELTA

SEQ ID NO: 78562 - protein, 351 aa, unidentified
MSQKTAATVAHTIGIDTGKNILHLIGLDDQGAIVLREKIARGRIAARLANVPQCLIGIEAGMATHYVARELGALGHDVKQVPPAYAKPFRQGHKNDFRDAHAIAEAVQRPSTRCVPVKTDDQLDLQALHRVRSRLVGQRTAVVNQIRGFLLEHGIAVRQGLRFLRQQLPDILAKRSDVLSPRMIRIMEDLSGDWRRLDERIEHITKEIEVLAGTDVNCGQLMTVPGIGPIVASATVAAIGNGASFARGRDFAAWLGLVPKQMSTGDRTILGRITKRGNRYLRMLFVQGARAILLRPKSWAKHSFGPWLTTAARRLHRNILTIALANKLARIALSVLIQGRSYETRIVSAAA

SEQ ID NO: 78563 - protein, 320 aa, unidentified
MASRESLFIGIDVSKQTLDVAFGADPHAPRETIPYTDEGVQLLVTRLQRLQPTLIVLEATGGLERMVFAQLLQAGVPTARVQPRRVRALAHAEGRQATTDRLDARLLARFAERVRPPHHQATDEQRASLRDLLVRREQVIQMRTAEINRLTAAAPNLRPGIQQHIDWLDQEIRALAQERDNEAERTDEVRRKRELRDSVPGIGAITARNLLLRLPELGTIKRTEAAAVVGVAPYANQSGAQHKPRHISGGRRDVRSVLYMATLAATRRRLVRRAFDQRLCQAGKPRKVAIVAAMRKLLTILGAILRQQKPWDPAVHTSAP

SEQ ID NO: 78564 - protein, 405 aa, unidentified
MSELEKDLVFAGVDTHKDTHTLCLLDHMGRAIGTFGFAADAKGYDALAGKIGGPATCVGVGVEGTGSYGAGLTRRLLELGYCVYEVMVPGRARRKPGRPKSDPADAEVAARQVLARANLSKPKDQSGWTEELRQLMIARDRLVQATAAMINAAKSLIVTAPEDLRRSLEGLSRKNLRSALSTLDPAAGGIILALGSLGKAWDLQDREADAIEERMKRVLEANAPALLAIYGCGTVSAAALAVAGGGNPERLRSEAEFASPCGVAPLLASSGKTERHRLNRGGDRRANRALYQIAVTRMSYDQRTKDYVGKRKRDGKSKKEAIRCLKRYIAREVFRALRNPLEIKGPSWKDLRPARQALGITLVEAGKALNVGFQRVSYAETGRLMNVRFLEEYDAWLKSQAKRES

SEQ ID NO: 78565 - protein, 325 aa, unidentified
MQTQTNYTGIDISKLFFDVAFLQADRYTYHKFSNDRDGFKALLKVLPSDSHIVMEASGPYYLQLASYLYDAGLAVSVVNPLVIRRFCQMRMSRAKTDKKDAMMIAEYGKTEKPVLWKIPEQHVITLQQMEALLSSLGKERTALNNQLESFTHSGMLDKALKKEIVKELEHKDRLIKKLNKAMEILAAEHYAEMLSNLESIPGMGPKTAMALLVLSGGFNRFDDYRKLSSYIGICPRIFESGTSVKGKARICKMGMSRIRAMLYVCSWSAIRCNKACRDLYHRLVAKGKAKKSALIAVANKLLKQAFAIATQKTKYNENYSNSICF

SEQ ID NO: 78566 - protein, 328 aa, unidentified
MTKHITICAGIDTGKRKLDVAIEGRCEQLQVENTPEGHKALVAWLRKYGVKRVGIEASGGYEQPVVTELRRTRFVVVVFQPAQVRAYAKFHLQRAKNDKIDAALIAACTAAVRKIYAAPDPRLLPFAERLTLIDQISEDIARLKNRIESCRNAMIKKLWQEDIARLEKREKAELKALVASIRKHRDLARRLELINSVDGIGLPTAVAILVRLPEIGRITREQAVALAGLAPYDDDSGEQVGVRHIEGGRKRLRRALYTAALAASFRWNGQLIQLYQRLIAAGKEHKRALVACARKMLIFANTVVARGTPWRDEPPAVNASIAGPLSVS

SEQ ID NO: 78567 - protein, 272 aa, unidentified
MKFYTKEHKYYCGIDLHTQSMYICIINQHGNILVHKNIKTDPHSLLKIISPFLPDIVLAVECIFTWYWVADFCYEHNIPFVLGHALYMKAIHGAKTKNDKIDSHKIAALLRAGMIPMAYVYPAEMRATRDLLRRRMFFKHKRSELLGHIENTRYQYLMPVFHKKIAYKGNRKGIAERFPNPSTQMSIQTNLDLLTVYDKKIQEIELFITRHAKKHKPNDLYLLRSVPGIGEVLSLVILYEIHDIARFPTVQDFASYARLIKPKKESAGKKYS

SEQ ID NO: 78568 - protein, 315 aa, unidentified
MEAASWVGIDVSKARLDVALGMEGELFEAANDQRGIAALIARLSRLALARVVVEATGGLETALVAELSAAGLPVVVVNPRQVRDFARATGQLAKTDALDARLLARFAERVQPPLRALPTAAERELKAVVARRRDLVEMLTAERNRLGSAPKVLHREIAAHIRWLEARLKERDRELDRKLRGSPLWREQEDLLRGVPGVGPVLCATLLAELPELGKLDRREVAKLVGVAPLNHDSGRLRGQRTVWGGRAPVRTALYMATLSAVRFNPALKVFYRRLRGAGKPPKLALTAAMRKLLVILNAILKHRTPWSPACPIAP

SEQ ID NO: 78569 - protein, 330 aa, unidentified
MKIWNVILGVDVSKLTLDICCAEQNQHVKISNCSKGFEVLKKWCKVNGIDLNETLVVMEFTGGYEYRFIQFCEAFSIAYCRVPGLEIRNSMGMTRGKSDKADAFRIGRYGEQKVKELTPSKPMNRDILQLKQHLSLRKRLVRDRAGFESTVKEREHMYGINKTDTVVRIARAEIRTKQKHITQLEQQIAAMIKNDPEMLQNYRIITSIKGIGKINAWMTIAYTENFTSFPDGRTYAVYVGVVPFEHSSGTSIRKRKRVSHLAHKELKSELNQAAKAAITHDKELRAYAERKLKNKDYVLVLNNVKFKLILRMFALVKRGEKFVENYCRAA

SEQ ID NO: 78570 - protein, 357 aa, unidentified
MKITKKKVIGKAYVGIDVHKTSWKVCVLSSGGFKKEFSCNPQVEALVASLENMLPDFEFQCAYEAGFSGFWLADGLNETEGFTCIVVNAADIPTSDKERAQKEDKRDARKIASQLKAESLEGIYIPSAEDIAFRELQRLRSTITKDLVRAKARIKSFLFRSGINITSQEFPDSKQHWSARFIKRLNELPIENSALRFTLTQLVQTLINLREQQKTVLLELRTQIRNSKKEKMHEALCKITGIGEITSATIISEVIDINRFSSYEKYHSFIGLVPSTNSSADIEVVRGITNRANKRLRKVFVESAWIAIRKDAELHHLYHSLKMRMKPNKAIIRVAKKLANRVRFTLLELENEMLITT

SEQ ID NO: 78571 - protein, 415 aa, unidentified
MVVCRANNTSCRTEKDVAQPTLWAGIDAGKAAHHCVAINTGGQRVLSERVINDEGALLDLIRAVKELADGGSVQWAIDLNSGGAALLITLLLDDDQDLLYIPGRTVHHASGAYRGDGKSDAKDAAIIADQARMRRDLLPFRHRDKTAVDLRILCARRTDLASDRNRAINRLRAQLLEYFPALERAFDYAHRKAALILLTGYQTPDGLRRMGAPRLERWLRDRQAYNAGDLAARAIEAANLQRTTVIGQHVAAAVVARLAQTILDLNTELADVDTMIEETFQQHRLAAIIVSMPGFGSLLGAELLAATNGDLASFNTADRLAGISGLAPVPRDSGRISGNLKRPRRYDRRLLRVFYLAANNSIKTSPESRDYYDRKRSQGKRHSQAILCLARRRLNVLWAMQRDNTSYQPGLPRAA

SEQ ID NO: 78572 - protein, 350 aa, unidentified
MIIVGCDYHPGFQQIAFVDTDTGELQERRLQHREGAEKFYRDLAAQGMKVRIGMEASGHARWFERLLAELNFELWIGDAAVIRTKRVRKQKTDRQDAQLILQLMLENRFPQIWVASWENRDLRQLLWHRHRMVQARTRIMNQLQSVALNEGLRCKKRLWREHGREQLESFRLAPWASRRRHDLLELLDRLNPTIAELSQAIEQEVQKCPEARRLTSHPGVGPLTALAFVLIIGRADRFQCGKQIASYLGLVPLEDSSGNRRRLGHITKQGSSMLRFLMVEAAQVTVRSLPEWRSKYFHLVMRRGRKIAKVAMARRLAIRLYWMWRKGWDYEQVEKFGSHAGKLGTGDGVQ

SEQ ID NO: 78573 - protein, 425 aa, unidentified
MKKIDYLSTLFVGIDIASRTNVASAINFDQEYLIKWKAFPNTQTGTEDLAKEIASALSNHTELKSVIIAMESTSFYGVHAANYLSSCDLLLPFSVQVYCLNPKDVRNYKKSFTDLPKNDNVDSFVIADFARVGKIKIQPWRGSQYLALQRLTRHRMHIAECIAREKTYALNNIFLKFSEFALLRKDEHPFSDKYGATAEAILTEFMTNDDLINAPIEELVDFIYSKSRGRIAEPVQVADIIQTAARNSYRLDQCLYEPLTVSIASSFNCISAFEKELKAIDKAIEKTVRGLNPNEYQILRSVPGIGIVYAAGILAEIGTVKCFTSHDALAKYSGIVWKDNDSGDFQAEDKRMSKVGNRYLRYYMIEAAGSVARHEPTFALFYKKKFDEARTHQHKRALALTSRKLIRLLFGLLDKGTLYSPDKSR

SEQ ID NO: 78574 - protein, 381 aa, unidentified
MQPTLVKDFTRDEAILAVSLELAKSSWKVALYDGRREQPAVHTVAHPQAAGRLAEAMRVVEERKHAWGLGPATRVVVIYEAGQDGFWVARALTGQGYEVQVVDPASIPVARRARRAKTDRLDALRLVLSLWAWLGGERDRLRVVRVPKLEDEARRHWVRERGELQKEIGQHRDRMRKLLRTVGCWDEVDGEFERRLRQGAVVCYDDGALPAELRVRLARECERLALAQRQLAALEAELHQALPAPVQQCIARLMQLKGVGRVGATRLQLELFWREFDNRRQVGACVGLVPQPYNTGESRVDQGISKQGNRRVRALLVEMSWLWLRYQPDSALTRWFMRRTQGGQKRGKRIAIVAVARKLVIALWRYLKDGVLPEGAVLKAV

SEQ ID NO: 78575 - protein, 445 aa, unidentified
MLFLPSPRPAAPAGAVTLLVLEMVIMGIDAGMDVVHPRCAGMDISKNDAKVCVRSPLGDNGRFRSVVTTYGATTNEVQRLRADLGAAGVSLVVMEATGDYWKPFFFPLEQSLNVQLVNAKQAKNIPGRKTDVSDAAWLAKLAAYDLLTSSFVPPESIRQLRDLTRTRTHYAQEATREFSRIEKCLEDAGIKLSSVASSLTTKSCRTILDAMVAGQRDPHVLAELVEPGMRVKNAALVEALTGRFTTHHAFLIGEHLATIDEINTHIHKFDTQIDQVMRPFRDVRDLLTTIPGFSVTVADVIIAEIGVDMDVFPTAANLASWAGVCPGQNQSAGRVKSTRTRPGNRYLKGALGIAAMSASRSKTTYLSVKYQRIAAHNSKARLKALVTIEHTMLVIIWNMIRNGVVYNELGPGYYTRRNPNKIKNAAIRQLQTLGYTVELTPATAA

SEQ ID NO: 78576 - protein, 409 aa, unidentified
MEVILRCCAGLDVHKESVEACVRLMSAGGKVEHEIRHWGTTTRELVAMAEWLGSMGVTHVAMESTGVYWKPIFNILEAGFEILLVNAHHMKNVPGRKTDIKDCQWIAQLLQHGLLKGSFIPPRPQRELRDLTRQRTQLVDEASRISNRIQKVLEDANVKLGSVASNVVGASGRLMLEAMVAGEDDPARLADLAQRRMRSKIPQLKQALYGRLTEHHRWMLKLLLDQLQTTEQFIARLDERIAELTRPHKPVLEKLDAIPGVDQRVAEVLMAEIGPDMTPFPSDAHLASWAGISPGNNESAGKKRSGKTTKGSRWLRQALVQAAWAASHKKDSYFQAHARNLMHRRGRKRGLVAVAHSLLTVIYHMLKQDTDYRDLGPQFLDRIRSTQLIRFHVRRLQNLGMQVELTPTS

SEQ ID NO: 78577 - protein, 390 aa, unidentified
MANIIYIGLDVHKEKIQACAFLAAYGFGEDRVLANIELGGNYQEIIKFASTLKKKFGKETRFVCGYEAGCLGYSLCRHLQRCDIECHIMAPTTMSKEPGVRIKTDRRDAEMIARCLAYNTYKGVHLLDEEDESVRDYIRMRDDFKQMLKVVKQKILALLLRLGIRCDTCKTPWTQKHLQWLKNVDMGKGLNRETLDEYLKELDHLKDRIDNFDTRIHELCDTERYKENVKKLICFPGIKEHTALSFISEIGDFTRFGKAKNFAAFLGLVPGEQSSGSKVHRTALTKSGNIHLRRLATEAAQAAIRSSPSYKSKALKARQEGAPEEVIAYADRARDRIIRKYKKMIRGEDLLGGHKAHNVVVAAVAREMSCFICGMMNGWYDGADSDKLQT

SEQ ID NO: 78578 - protein, 335 aa, unidentified
MYYLGIDLHKDESHVAALDDDAEVVEEIRVANANLDEVAEEYAGVKAAIEATSNYYTVYDTLDEHLDVVVADPSQTKAIGYAEVKNDRLDAKLLAQLRRAGMIAESYVPSEELRECRALVRRRKRLVEKRTDFKNEVHSLLDKHGITSDWDPFNVNGRDILAIEDVSLGVVGDQLMESFLSIINELTAQIEELEELIEETAASLEETQLLMTIPGVSFYSSLLITSENGEIDRFDEAKQVVSYAGLDPVVRESSDSRTEGSISKRGSGDLRWVLVQCVQTVVHRCNDPYLGRFYARLKQRKNHQIAIVATARKLLVSILHMLEREEVYNPPEVSG

SEQ ID NO: 78579 - protein, 364 aa, unidentified
MVEDRRTVGVGLDVHKSSVRLAAVSGGELLGELSLPYDHERVERELRSWPGARVCYEAGPTGFGLYRHLVAAEVDCVVVAPGLVPSKPGDRVKTDKRDARRLAALHAGGLLTAIFVPSPEQEALRDLVRAREDARLDRMRARHRLGKFILRHDRRMPTTCWGVTRRAWLARQVFELPGQQQAFDDYLFAVDQVDRRIEGLEAELSRLAQDGPHRELIARLRCIRGIDTLTALGLAAEVGDFARFATATQFMSFVGLVPSERSSGESRRQGSITRAGSAHARRLLVESAWHARRRPTVGYELGRRHRGQDPAVLERAWRCQQRLHRRWQKMAGRGKPSQKIVVACARELAGFVWAIATDQPMKTT

SEQ ID NO: 78580 - protein, 335 aa, unidentified
MDRQYVGIDFHRRRSVIVRKDSAGDKLSVTHVANDPLAIAAVIAEAGAEPEVVIEATYGWYWIVDWLQAQGAHVHLANPSGLNWGTRRVKNDERDAVDLADMLRLGRLPEAWIAPPATRELRELVRYRAKLVGLRSGLKAQVHAVLAKEGVMPSARDLFGHAGNSELDALELAPAYRMRIASLRALIDVYNTEVGNFEREIQSRLRRDRGYRVIQQINGIGPTMAAILVAEIGDVSRFRSAEALCSWAGLTPKHRESDTVVHRGGVTKQGSRLVRWAVIEGTVRYHGGDKLAADWRRIAERRGKHKATVAVARKVLTLVYYGLRDGEIRCLAKTA

SEQ ID NO: 78581 - protein, 358 aa, unidentified
MTTVSKKQKWFNTIQLTHDDDLYVGIDTHKESFHVALWLNDAPAIDFVTPPHTDKLVAILEKLRPALHLVVYEAGPTGYSLARALKDADLPVSVVAPSKTPRQAAPDSKTDSLDARKLAEYAAKGLLRHITIPTRHQEARRQLTRLRQQLVAKQTRVKLQIKGFLLQHGIDQPAGLSHWSGNAVEHLKNIRLSKPLRYCLDTLIKELLFALAQVKSAEQKIKEAFSEKPICTTVKLLATHPGVGPTIAAAFAAEIFNPKRFRDKTQLAKYVGLAPSVHQSGQTLRDGPILKTGRPQLRCNLIQGAWAWIRKDTNAYKTFIRLVHNTGHQNKAITAMARKLAVHLWMMACENKPYNCAV

SEQ ID NO: 78582 - protein, 523 aa, unidentified
MRFDLEEISAVCALHPLIMNRSFHASRCLRGIGSTTRCANGLVVQTVHRSTPVTIALAIGHDPEPRFAEKGSSMIRYVGIDLHKRLLVACIVDEQGNVVATPRIEEVTRASVEQFCNEYLRSEDEVVLEVTTHVWAVVRLIQPHVSKVVVSNPITTKAIADAKIKTDKVDATVLAHLLRLDFLPTVWAPDEALSKLRELTSRRSRLVGTRTKLCNRIRTCLAMRLLDCPHDIPSAKGREWLQQVELDEDARHLVDSDLRLLDGVEQELAFLDKRLAQRVYEDKRVKLLMTLPGVSQNVAQAVVASIGEIDRFASPEKLASYFGLIPSTRQSASKCYHGNITKAGRVEARVALVQAAQCVRTDLGPLGYYFNKIKRRKCHNVAVVAVARKLAILCWHMLKTGLPYRYAKPTSVEAKLSKLRVAGSGQKRKSGVAKGQDPRTMRTKEEQHFKWTPALSTVLAKEGLDPPSAPKAGELKVLQNTKTMAYFESLQQETKRARRQKKATPETARSTATPISSIDEWKG

SEQ ID NO: 78583 - protein, 344 aa, unidentified
MDYFAGLDVSVKETSVCIVDDTGKIIREVKVASEPEALLAVLKNHAYHFKRIGLEAGPLSQWLFSALAEAELPIVCVETRHMQALLKAQINKTDRNDAGGIAQMMRVGLYRPVHVKTLRSQKLRMLLTHRKLLQSKAIAIENDLRGTLRNFGLKVGMAGTVKFEARIRELVENLPDLAMLVEPLLVVRRVVREQFAILHRRLLAIVRDDEVCRRLMTTPGVGPVVALTYRATVDVPARFRKSKAVGAVFGLTCSKYQSGEIDRSGRISRCGDEMMRVMLYEAAQSMLYSKKWSWLKAWAMQIARRRGMKKAIVALARRLAVIMHRIWVDGTEFRWTREPASAAA

SEQ ID NO: 78584 - protein, 343 aa, unidentified
MQTITTIGLDIAKSVFQVHGVDAGGQVIVRRQLKRRYVLTFFQKLSPCLVGIEACASSHHWSRELQALGHTVRLIPPAYVKPYVKRQKNDAADAEAICEAVTRANMRFVPTKTPEQQSGLVLHRTRHLFIRQQTAVINAIRAHLAEFGIVAPVGRHGVEELLNVVADPSDRRVPEMARACLLAFGAQLRRIKEQILEFDRLIRAWHRSNEMSMRLDEAPGVGPVLATAVVAAVADPKSFRSGRNFSAWIGLVPKQHSSGGKNRLGNISKQGDRYLRGLFVVGALSVIRYAKIHGTKHRPWLTALLARRPTKVAAIALANKIARMVWAMMARGERYKEPAALAR

SEQ ID NO: 78585 - protein, 449 aa, unidentified
MSRPQVIDDEQHEQVHERVAAIDVAKDSGMVCTRTPHPSRPGARRSTVWTVKARMNAVRALGRQLHKDGIEIVTLESTSDYWRIWFFILEACGLAVQLVNAAQARNLPGRPKTDKLDAQWLARLTEMGLLRASFVPPKAIRDLRDYTRARTRLIQERTRCWQRLEKLLEGALVKVSSVASKLTTVSAQDMIKAMIAGERDPHVLAGLARTRMRAKHDDLVQALDGMFDDHHGELAGLLLDQIAFLDGRIAQLGARAAELTAAIPEAWGINADGTTGPDAGGTPGAPVLPAVPRLAEIPGISDDLARAIIAETGLDMTRFPTAGHLVSWAGLCPSARQSGPRTRAGKKGQGNGYLRGSLGQAATGAARTATFLGERYHRIARRRGKAKAQVAVARSILVIIWHLLADPAARYTDLGASYYQTRTDTDRKLRNHIRQIQALGFEVTLTKTP

SEQ ID NO: 78586 - protein, 404 aa, unidentified
MVFVGIDWAEAHHDLCLLDEQGGVIDQLRIADSMEGVNQLQAVLARHAEQPGEIVIGIELSHGLLVQALRAAGYTIYAINPMAASRYRDRHAVSKAKSDRGDAKMLADLVRTDRHNHRPLLEDSEQAEAIKVLARSQKSLIWQRQQLVNQLRSALREFYPGALEAFADDLAAPSALALLALAPTPARGRTLSLSKIETVFRRAGRRRGVNERARATQVALRKPQLEQPTPLSEAMGVQVASLARLAAAVNTEIANLTSELAAGFEVHPDAEIYLSLPGLGVVLGARVLGEFGDGPNRFADGKARRNYAGTSPLTKASGTKKVVMARFVGNDRLADACQGWAFAAIQGSPGARRYYEAQRARGKAHRSALRALANRLVGILHGCLRHGELYSEVRAWPDRQEVAA

SEQ ID NO: 78587 - protein, 355 aa, unidentified
MSGEKYIGLDVHQATISVAVVDSQGKVVMESILETKASTLLEFLAGLRGSLFVTFEEGTWAAWLYDLLKPHVTEVLVCNPRKIPLLKQGNKSDKIDARKLAERLRLKDLKPVYHGETGVRMLRELARSYLTVVKDLSRVMNRLKALYRSWAIPCAGRDVYYRRHRSAWLEKIPEAGTRRRAEQLYQQLDMLQPLRLQARRELLAESRKHAITAKLRKIPSLGPIRSALAVALIQTPHRFRSKRQLWTYSGLGLETRDSGEYHYVRGQVRRRKKQATIRGLNKDYNHDLKSLFKGAATGASVKPGPLQEFYQRSLAKGIKPTMVRLTLARKIAAITLTLWKKGEDFDINKLNSQAA

SEQ ID NO: 78588 - protein, 428 aa, unidentified
MLKINPLSTLYVGIDVSSKSNYVCALDFYKNKYINSSFANNQPGAEELAQKLLECLKKHPDLNTVVAALESTSVYSIHIANYLSSCEELMPFKPYVFVLNPKCTANYKKSYIGLGKSDPIDAFVIADYARAGNIETEPWRGSQFLALKRLTRHRLHLVECITREKTYLVSNLYLKFSELQMLDKDDQPFCDIYGATSSSVLTEYLSPEEIIEASEEDLVSFLANKSRNRIKDISRTAELLKKAARDSYRLDKALYEPLNVSIASSFNCIETFKKEIKAIDAAIEREIKGLNPNAFIILQSINGIGPVFAGGIVAEIGDISAFTSSDALAKYAGLCWRSNQSGDFDGEDTPMIKAGNRYLRYYLGEAANSMRKHNVEYGAYYRKKFNEVPKHQHKRALALTSRKFVRLVYGLLARNQLYSGVSLDTSNE

SEQ ID NO: 78589 - protein, 409 aa, unidentified
MKLFVGIDVSSKDLKVCIMNHEGDTLKSFTVDNNLHGAGHLRDQIMDLADKHSCQDIQIGMESTSVYSWHPAMFLNGDEALKNRQAKVYTINAKLINKFKEAYVDLDKTDDIDAWIIADRLRFGRLPLTMVMQEQYVALQRLTRMRYHLTHNLVREKQYFLQNLFFKCSAFTNEVESSVFGNAIMELFLEQFSIEEISSMDVSSLADFLKEKGKNRFADPEKVAKCIQKAARSSYRLSKCVEDSIDILLATSIETIRSLKAQIKQLDKAIEKILDGIPNTLQTIPGIGPVFCAGILSEIGDINRFKDQASVAKYAGLTWRRRQSGDFEAEETKRIRSGNRYLRYYLVEAANSVKTYEPEFRSYYQKKYREVPKHQHKRALVLTARKLVRLIDTLLRNDQIYTPERKVNR

SEQ ID NO: 78590 - protein, 349 aa, unidentified
MKIIGCDFHPGYQQIAMLDLVTGEMTEKALSHERKEEVRAFYAGLEGPVRVGIEASGQSQWFERMLAELGHEVWIGDAAKIRASCERKQKTDRRDAELLLRLLAEDRFPRIWVPTAAERDDRQLLLHRHKLVRMRTQVKNQLQAQALNQGVQRKRKLWSEVGRKQLESLPLLPWASRRRAELLQLLDQLEASISELDRAVAEQASARPAAGRLMTHPGVGPVTALAFALTMGPAERFQRGKQVASYLGLIPSEHSSGGRQQRLGHISKQGNPFLRGLLVEAAQSAVRLEPEMRRAYQRLAQRKCRALAKVAMARKLAVRLYWMLRLQVNYAQLIQGSHAGQPGTFCGRG

SEQ ID NO: 78591 - protein, 386 aa, unidentified
MQKLNDLSRSLTALQPDGTLIAVVEMSLSSWLVAGIVPGVERQPVKKLAVDEFALLKLLHRWREEAEKAGRRIERIVVAFEAGRDGFWLARWLKARGVDAYVIHAASVAVSREHRRAKTDRLDSELLKRAFLGWLRGERDHCKMVAIPTVKDEDAKRPNRERESLVGEQNRIINRMKAALIRLGIRGFNPKLKKAAGRLKDLRTPEGEPIPPNTLAELHRDMERRRLVSTQIRQIEEARLERLVQTPSDGPHAMVCLLARVIGVGTETADMLVQEVLSRNMRDRRAVARYAGLTGSPDESGRKCREKGLARSGNARVRRGMIQLAWRLLMFQKNSALAQWFRARTENARGTRKTMIVALARKLLIALWRLVREGVVPDGVVLRPAQ

SEQ ID NO: 78592 - protein, 378 aa, unidentified
MKRVRFVGLDVHAETIAVAVAEKDEEVRSLGVIPNRAESIRKLVKKLGPAEELRVCYEAGPTGYVLYWQLTALGAPCEVVAPTLVPVKSGERVKTDRRDALKLARSYRSGDLTPVWVPDAAHEALRDLVRAREAAKKDQLRARNRLSKFLLRHGKRPPAGVKSSWTGNYLLWVKQEVHFEQFAQEFTLLDYWHEVEHAAGRVERLDRAVEEAVKSAPPQMRAVIEGWQALRGIAQVSAVTIVAELGQISRFARARQLMGYSGAVSSEDSSGERVRRGAITKTGNAHLRRIVMEAAWSYRHRPAVSRALRQRQEVVSEEVKEIAWKAPHRLHTRYRKLTARGKNKGPVITAIGRELLGFIWAIGVKVEGAQKEPLQRAA

SEQ ID NO: 78593 - protein, 325 aa, unidentified
MQNQTIIGIDVSSATLDIYSSGKVEKSIVIKNEKAAIRKFFNVYKKECLLIGMENTGRYNWALYEVLKDLHHQVYVVSPLHLKKSMGLVRGKTDKIDAIRIASFISKNHTDLPLWKPSPPAIQKLKILLTERSSRITSRTKLLKQQYDYAKMKHVGLDRPLLKLNMEQLRLIDHQLVQIEKEIELLIRTDERMDRQATLIRSVPGAGKVLSWVILAKTESFTTITEPNKMACYSGVVPFAHQSGTSIRGKNRVSGYADKAIKSILHLAAMSAIRLKNDLREYYLRKVAEGKNKMSVLNAVRNKIIHRIFAVVKNQTMYKNDLVLS

SEQ ID NO: 78594 - protein, 349 aa, unidentified
MVVLGIDAHKRSHTVVVVDDTGRKLGERTIATTTADHLDLLSWAEQFGADRLWAIEDCRQLSRRLERDLLSIGQRIVRVPPKLMAHVRDSARSYGKSDPIDALAVARAALREPDLPTARLDGPAREVRLLVSHREDLVAERTRIINRLRWHLHELDPSWQPPARSLWRPKHLAATTARLQGIDGMVARLARALLERCRMLSEEIAELDHELEPLVARLAPALIDLCGCATLTAAKILGETAGVERFRSRHAYARHNGTAPVPVWSGNRERHRLSRTGNRQLNTALHRIAITQARYHPPAREFLQRRRAGGDTKAESIRALKRRLSDVVYRALLADAARSAPPAAITMAA

SEQ ID NO: 78595 - protein, 304 aa, unidentified
MFGIGIDVSGENLDVAVHEQAFRQFKNNKRGWASLIRWLQRWPAKQVVLEASGGYEQKALDALHEAGLPMVRINPGRGRSFASATGKQAKTDRIDAMVLAHMADVLKLTRYVPPAAWQRRLGELCQRRRHLVQMRVSEHQRMRAFSEPSLISMLNQHLREIQKTIKQLDTTIAALLAEQEGWRDFAKLKGAGPVLMATLACELPELGRLSGKAIAALVGVAPMNRESGNWKGRRSITGGRAVVREALYMAALTAKRYEPRLKEFFESLVNQGKPGKVALVAVMRKMLVILNARKRDAEAQMASA

SEQ ID NO: 78596 - protein, 415 aa, unidentified
MKVVYPVCCGVDVHKTFLVGTIISTTDGVQPHYQKKRFSTYNSDLCKFADWLHLNTCLDVCMESTGKYWVPVFNILEECGIHVTIANPKWVKAVKGNKDDTKDSKWIGDLFRLGLVPGSFIPSKEIRILREFTRYRYKLVSMKSSEKNRFQNAFTVCNVALDSVVSDMFGKSATAITDYLISEDTFNPEHCVSLLHRSLKKKADSVLESIEGYSITPEQKFRMQIVRSHLEYIESAIAQMDSEIDAMVAKQESLISLLCTIPGVDRNSAITIISEIGTDMDQFGSSKRLCCWAGLTPGNNESAGKKKSFRITRAGVYLKPALVQVAHAAVKATDSSYYRSKYEQISKRRGKKRAIIAIARMILTAIHQMMTTGEVWNPTDLFKLDMPETLKEKQLAKAVRQATKFLEKQGLTVAS

SEQ ID NO: 78597 - protein, 387 aa, unidentified
MKRLKSIGLIGPFALSLNPNPYKIFGKTYVKVSRSGSNPFYCLIIIHKVMENFYLGVDVSKRKIDLCLRSNSTDLIIDVLPNDVTAISQWIKRQLNNFNIALSQLVICAEYTGKYTYQLVQSSKILNVCLCLEDPTRIKYSNGCPRGKNDKVDAHRIAVYAERYHDCLKIYQTAQYDIKKLRRLYSDRSMIVTDRAKYRTQLKDDKDYMDENIYDEKYKLFIQIISVLDSSIKALEEEMQKIVLQSPKIYNQVKLLKSITGVGDMLAFKMIIETEAFSLFDNNPRRFCCYAGVAPFSYTSGSSQKSKTRVSHRANKSIKFMLHLAALSATRMKETPLSIYYQRKVEEGKNKMSVLNAIRAKLVFIMFAVVKNDKPYSILYINILEKP

SEQ ID NO: 78598 - protein, 427 aa, unidentified
MQDSDQRKVSADSSKQIAGLPVVRHKVAGIDLGSERHWVCAATVEGSGREVADFGATTCELIRMAKWLNARKVESVAMESTGVYWIAPHEVLEAEGLEVMLVDTRQLARVPGRDKKSDPFDCEWIQRLHSCGLLMGSFRPKEAVCMLRTLVRDKGNLVAEAGDWLRRMQKSLDQMNVRVHRAVSDIDGVTGMAILRAIVDGERDARQLAKLRNPRCHKSEEEIAEQLSGHWREDHLFSLRQGLKMYDAIQERITDYEKEIPMRQALYRMSGVDLTGIDAIGVETVQVVLSEYGPDLSRFPTEKQFVSHVTLAPHKPTSAGKPVKKKKRNSASTRVAAALRMAASSLRHSQTALGAYYRHIARRIGGDVAVFATARKLATIIYRLLRWGQPYVDEGAQTYEQRYRENRIKSLTARAKELGYQLTPTTA

SEQ ID NO: 78599 - protein, 342 aa, unidentified
MTIVMIGIDLGKNSCSVAALDELGAVVLRRRMRPTSIVEFASKYAPCIVAMEACCGAHHLGRQLVARGHTVKLMPPEYVRPYVKAQKNDDRDAEAIAEAATRPTMRFVELKSQEQLDIQSLHRVRSRLVGTRTMLINQMRALLLERGITVAQGRHKFEKALDKILMEEALLAPGRLRDLLCEMRDEWSVLDRRVEALDKEFAQLARTDEMARRLTSIPGVGPLNATALVAAVGKAEAFEQARDLGAWLGLVPRQYTTGGKPRLLGISKRGNTYLRTLLIHGARAALPSLARTNTALGAWLRGLLARCHPNIVVVALANKLARIAWVLIRRETLFPLERASTA

SEQ ID NO: 78600 - protein, 345 aa, unidentified
MEPSHYVGLDVSQELTSVCVIDQQGAVVWRGKCATDPEAIAGAIRQHAPAVVRAGLETGVLSNFLTRSLRARGIPIVCLDARHAKAALRIQINKTDANDAYGLAQVVRTGWFREIAVKSMDAQALRLLLVARAQLVSQRQAIANTLRGLLKAFGYVMRKGAGGLFARRVREVCDGNPALSAIAEPMLAVWQSQREQIRVLDRQLLQRAKIDRSARRLMSIPAVGVIVALAYVAVIDNPERFRQSSTVGAYLGLTPRRYQSGDVDCTGHISKCGDGLLRAYLFEAANAILTRKVTDSTLRRWGQALVARIGLRRATVAVARKLAVIMHAICKNDRDFECAGLPARA

SEQ ID NO: 78601 - protein, 424 aa, unidentified
MTYRIAGIDVHKKVLAVVVADVASEGEVQFERLTFWTAPEQLKVLAEWCVEYGVQEVVMESTAQYWKPVWEALERYWQPVVRTAADATPMTGSLHLAQAQSNRARGGRKNDFGDAERLVRRHVAQELVLSFVPSAEQRLWRTVTRQKQQRVVARVRLRNQMEAFLEEAHIKLSSLVSDLFGQSGRRMLRALAEGKTDPAEIALLGDHALRATQAQLRDALSAARELHPVYRRLLNQSLEDLRVLDQQIQELDQEIAALLKQHQDAVQRLAEVPGLGPDSAQQIIAEIGPTAAVFPSAKDLASWVGVCPGDDISAGQSHSTKSPKGNKNMRRILNQAAHAAVKAKGSIFEVVFQRLRRGLDYKEAIWAIAHRLCRLIWLLLRRGVPYEERGPAVSAASKQMRASRMMRELRRMGYRVDPPQPQNA

SEQ ID NO: 78602 - protein, 405 aa, unidentified
MNAVGIDVSKGKSMVTILRPFGEIVSSPHEVRHTSDQIDDLIAKIRSLQGDTRIVLEYTGRYHEPIARWLTDAGLFVSAINPKLIKDFDNDSLRKVKTDKADSVKIARYTLDKWYKLKQYGVMDELRNQLKTMNRQFGYYTKLKTAMKNNLISLLDQTFPGANTLFDSPARSDGSQKWVDFVDTYWHVDRIRSMSLSAFTEHYQKWCKRKGYNFQPDKPEEIYDSIRNIIPVLPKDDVTKFIVRQAVTQVNTASAAVEELRTRMNDIASQLPEYPVVLAMKGVGTSLGPQLMAEIGDVTRFEHKGALTAFAGVDPGKNDSGTYSQKSVRTSKRGSASLRKTLFRVMDCLIKTMPQDDPVYAFMNKKRSQGKPYYVYMTAGSNKFLRVYYGRVKEYLSGLSEMAEK

SEQ ID NO: 78603 - protein, 413 aa, unidentified
MDVVVSRCAGIDIGKAEVVVCLRVPGARRKRVSEVRTFRAFTGEIVRLAAWLTEHRVTHVVMEATGQYWKPVWDVLAECGFELMLVNARHVKIVPGRKTDVADAAWLAELLEHGLLRGSFVPPRVIRELRDLTRYRKRLVQTHTSEGQRIAKILEDAGIKLDSVISHLLGVSGRAMLRSLIAGQRDPDQLAELARGRLRTKIPALTAALEGRFHQHHAVMIALALDHFEYLERMVVRLDERIDELMVQHAVARDRLDTIPGVGKRAAEVIIAEIGADMSVFPTAGHLASWARLCPGNNITGGKRKSGSTGGGNRWLRETLVECAWAASRQKDTYLAAQFWRLARRIGKKKAALAVGHSILVIAWHLLHDESTYADLGSDWFVRRIDNNTRRRDRLIGELQGMGYRVQLDKAAS

SEQ ID NO: 78604 - protein, 403 aa, unidentified
MNAVGIDVSKGKSMVAIMRPFGEIVSTPFEIKHTTSDINSLVELINSIEGESRIVMEHTGRYYEVLAHQLSEANLFVSAINPKLIKDFDSDSLRKVKSDKADAVKIARYALDKWQNLKQYNVMDELRNQLKTMNRQFGFYMKHKTAMKNNLIGILDQTYPGVNTYFDSPARSDGSQKWVDFASTYWHVDCVRKMSLNAFIDHYQKWCKRKKYNFSQSKAEEIYGKAKELVPVLPKDEITKLIIKQAIEQLNSASVTVEELRSLMDKTASKLPEYPIVMQMKGVGSSLGPQLMAEIGDVSRFTHKGAITAFAGVDPGVNESGSYEQKSVPTSKRGSSGLRKTLFQIMDVLIKTHPQDDPVYQFLDKKRAQGKPYYVYMTAGANKFLRIYYGRVKEYLSSLPESE

SEQ ID NO: 78605 - protein, 368 aa, unidentified
MERVIISGIDMHDDSLVCKTGCSKDEPTTNRFGNSVSGRKQYFRHLRRISNAQGNARIVVAYEASTQGFCLYDDCQDAGIECYILAPTKMRKSKKERKTKSDETDALLIFEILRGHVLAGNKLPSIWIPDDQTRLDRETVRSRLDLGLKLTVVKTQVQTLLKAHRLSKPADVSKTWTKPYRKWLVGQSKHWPALATLTRQIASVEHEITLLNAEVEELSKSMRYAQPCVDLVEKIKGVGLLTAMVYLTEMGDLSRFKSRQKLGSYLGLAPSSSESGQTDDRKGHITREGSSRVRRVLCQATWSHVRCGGESAPSYERIVKRNPKHKKIAVVAVMRQLGVRMWHVGLEAQRRGDVFGNEVIQAKEQKVA

SEQ ID NO: 78606 - protein, 371 aa, unidentified
MANAMKYVGLDVHKETLAVAIADEERGSEVRYVGVVPNDDDAVRQLVKRLSKSGTVLSLCYEAGPCGYGLQRLLTKLGQECIVIAPSMMPRRPGDHVKTDRRDAMTLARLLRAGELTAIWVPDEAHEAIRDLIRTRRSAKQDATAAKQSVRSFLLRHDRRFSGKTAWTKMYWLWLSKQAFDYPHQQLAFEELKQRLKEAQARVARLELALAEAVEGWRFASLVRSLQSLRGVQLVVAATLVAEVGDMTRFDSPKQLMAYLGLVPSEHSSGSRTHRGHITRAGNAHARTMLVEAAWAYRLPAREESRYLTRVADLPDEIQAIGWKAQVRLCQRFRRLSAAGKPQPKVNTAIARELVGFAWDIARRVSPAAAA

SEQ ID NO: 78607 - protein, 410 aa, unidentified
MDTLIERCAGLDVHKETVVACVRVPTRGGGREQCVQTFGTTTAQLLALRDWLVAHGVTRVGMESTGVYWKPVYYMLEDAVECWLLNARHLRNVPGRKTDVADAAWICQLVEHGLVRPSFVPPKPIRELRNLTRYRKAQIEERTREAQRLDKVLQDAGIKLSSVASDVLGVSARAMLRALVAGTRDPELLAELARGTLRKKIPALREALHGRFGPHHALLVGTILAKLEFLDEALAQLSAEIAQVIAPFTAEAALLRTIPGVDRRTAEALIAEIGVDMTRFGAAGRLASWAGWCPGNHESAGRQGSAKTRKGSKWLRTYLTEAAKAAAGAKGTYLAAQYARLRGRRGSARATVAVGHSILVAAYYILDRHQPYRDLGPDYFRRRHSREHQMRRLVRQIEALGFRVTLEEAA

SEQ ID NO: 78608 - protein, 370 aa, unidentified
MQTITRSQTLFVGIDVHKDTHTAVGLNPFGEKIFEMQIGNEAEDFISLIEKTKVEADKARLIPSFGLEDVHSWGERLSNFLVEEGLPVKAVAPILVDHCRSKMTHPEKSDSLDAQGVAEVMIQRIDTLSAYKLTEEAQKAKQIRELSLEREWLVKERSRLKNQLHILLHRMHNSGYRTKFKDPFSKKALRYWMRSALKDTDTILKQRMKRAVRRLLDLREEIQEIEEEMETMMKDSGQTIATASGCGAVIAAELIGEIGDVSRFHSPGALAKYAGCAPREHSSGKTIRWRKTRSGNRRLNRAFHRMALSQISRSGNDAARAYFKRKISEGKTKAQALVCLRRQLVNVVWMMMKHRTEYRYPQEKLVDFFS

SEQ ID NO: 78609 - protein, 315 aa, unidentified
MNETVVAGIDVSKENLDLCLLPSGASQRFSNNESGCAGLASVLADVAPSRVIFESTGGLEMLAVGLLSAASLPVVVVNPRQIRDFAKACGLLAKTDKLDAKVIALFGQRIEPEIRPLKDETAQELSALISRRRQLVDMQTAEKNRLSSAPKAIRAGITQHIGWLEEQISSFDDDISGFIQSSPVWKVKEQILTSIKGIGPVTAATLLAALPELGSVSRQKISALAGLCPYNHDSGKHKGKRAIWGGRAAVRSVLYMATLAAVRFNPVIKAFYDRLKKAGKPHKVAITASMRKLLVILNAMLRDDRKWDDSFYSFT

SEQ ID NO: 78610 - protein, 408 aa, unidentified
MERFYLGVDWADQFHQVWVSDFDGKKVVEKKVTQNIDGLAEFGRWLDEQRAKPIELWAAIEKPQGRIVDFLLDHGVEVYPVNPKALDRARDRFRMSRSKSDGFDAYVLAQFLRTDHGHLRALKPNSVQAQELKLLTRDQQRLGHQKTRLLNQLTATLKEYYSRPLEVFSDLETQIALDFLKQNPTPDDLSKLTRRQWNRFAKREHHLGAERAQELWEQLNQPQLTVPEHVVRAKAHILRVLLGQLDPLRKAVKSYEERIKSFFGSMPAAELFKGLPGAKTGTIIATLWAELGDPKSRWESFRHLQAEAGVVPVTKTSGKSRVVQFRFSCNKIMRHAAYWLAFVSLNRSEWANHYYRDQRAKGHSHHQSLRALGAKWLKIIFVMWRDHKPYDENYHLANIARQKMRQAA

SEQ ID NO: 78611 - protein, 400 aa, unidentified
MISVGIDVSKGKSTVCILKPYGEIVSKPFNITHTHKDLSELSSMLFRLNDEVKIVMEATGIYHLPILTYLQEKGFFVSVINPYLMKSYRNESLRKAKTDKIDSRIIANYGIDHWFKMKEFQISGVIYEELKLLGQQYRHYMKLHLLSLAELTHLLDLTMPGIKNLLASWNETNRKDKRSDFVERFWHYDVITSMSEQEFTEKYILWAKEKKYVPSQEKAKVIYTLAQESIPTLPSETSSVKMLVTEAVRVLKEVDATLGLILSRMQEIAKTLPEYSVVREMGGVGNTLAPKLIAEIGDVRRFRNGKALVAFAGIDPPPYESGQFVGCNRKISKRGSASLRKVGYETMRSLKMRSRPEDPVYRYVVKKESEGKSKKSAKIAGLNKFLRIYYARVTELYKNI

SEQ ID NO: 78612 - protein, 384 aa, unidentified
MLAANERPEAPTAIRIDLGAIFVSLELSRSKWLITSLSPGGGEKMSKHAVAAGDIAGLLAPFAELKRKAQARTGRCFPIIVIQEAGLDGFWIHRVLQAEGIESHVVDPASIATSRRRRRAKTDKIDGETLVRALLAYKRGEPRVCAMLRVPTPEEEDRRRISRERKALTNERVRHVNRIKGLLFSQGVSGYQPLRRDRRTRLEELRTGDGRPLPAHLKMLIGQIKAVEAERDAMLAVAPVGSAHFADCEQPAPAMLLALKGIGPEFAVVLWSEGLSRHFDNRRQVAAYAGLAPTPWQSGSIDHDQGVSKAGNPRLRTTLIQVAWLWLRHQPHSALSLWFKQRVKQNDGRLKKKTIVALARKLLVALWKYVNAGVVVEGAVMRTA

SEQ ID NO: 78613 - protein, 384 aa, unidentified
MKGARWHPAYYKESCGKNPDWLISSLFPLLFMSAIPSPTAPLKYVVGIDIAKDTFVACFGRIDVQQQLRFGKEATFDNTLAGFTDLLAWTSKQQTTTAPLWFVVEATGVYYEALAYFLADNQQALSVLLPNKVKHFAQSTEQKSKTDQLDARLLCRMGLERALPAWQPPTPALRQLRALARERQSLKRQGARLKTQRHAYTHRYQPDERTLERLAARQQLLKQQVKAVDQDLAALLEAEPELARKLAHLTSVPGIGLTTAIVVVAETNGFVLIENERQLASYAGLDVVQRQSGLSAQATRISRRGNVHLRQALYLPAVSSLRYNPQQMAFYARLRARQPSGKPGVIAVMRKLLLLCFSLWKNDRPYDPHYHPAHMAEKEVAPTT

SEQ ID NO: 78614 - protein, 370 aa, unidentified
MARTSTLFVGLDVHKETIAVAYVSAEREAEVMFLGTIGTRQCDIDKVIRKLQSKGQTLHLVYEAGPCGYWLYRYLSKKDLKCWVVAPSQIPKKAGDRVKTDRRDAVQLARLLRSGDLTPVYVPTVDDEAIRDVVRAREDALKDIKAAKARLKAFLLRQDIRYEGRATWGPAHLRWLAEVVCPTPAQQIVFQEYVRAVSEHTERLQRLEAELQTQVQTWRWLPVVEAIQALRGVQFTVAVTLIAELGDLSRFDNPRQLMSYLGLTPSEHTSGEQRRQGGITKTGNSHARRALIEGAWAYRYPAKVSRHLQLRLEKVPKVIQDISWKAQVRLCKRYRRLMARGKNANQVVVALARELAAFVWAIAREVAVAH

SEQ ID NO: 78615 - protein, 421 aa, unidentified
MYAVGIDVSKGKSTVSVFDQRKEMVVKPFDIPHTLTGLAALSELVKAQPGEVKVVMECTSRYHEPVANFLQQAGHFVSTLNPLAIRNAGNGVGVHEIKTDKTDSKKAAKFGIDNWYQLREYRPMETTRYQLKVMNQQFDLYTRQQTAQKNNVIALLDMTFPGINKLFDSQAREDGSQKWVDFSETFWHVDCVRSLSEKKFTERYAAFCKKHRYNFSSAKAAEIYAFAADLFPLTPKDEFTKFMMKEAISHLQATAKVVETLRSEMNRLASQLPEYSVVMAMRGVGESLGPQLMAEIGDPRRFAKKKSLVAFAGIDPGKKQSSEKDSKSVKTSKKGNPLLRKALFNVMTALLMHPSEDPVYLFLDKKRAEGKDYYVYMTAGANKFLRVYYGRVREYLTEQGVPLPAEALVPEDADSTIPEVD

SEQ ID NO: 78616 - protein, 335 aa, unidentified
MDEVIRIGLDTSKHVFQVHGVNAAEQAVLRRQLRRGEVERFFGALPRTRIGLEACGAAHHWARVLQALGHEVKLLPPQYVRPYVKRGKNDAADAEAICEALSRPSMRFVPVRTAENQADLMLHGARDLLVKQQTMLVNSIRGHAAEFGITARAGTANVGTLLERLAASPSVPELAREMFSRLAEQLEALERQLRAIDKRLAAWHRMNERSRRLAAIPSIGPVSATALAMKVPDASVFRSGRDFAAWIGLTPKDNSTGGRQRLGGITRAGDETLRRLLVAGAMSVIRHAKPGRTSPWLLDLLARKPKKLAAVALANKTARIAWALMMRGETYRRAA

SEQ ID NO: 78617 - protein, 343 aa, unidentified
MVTIGIDTHKATLASCAVDELGRELAVTTFANDPQGHRRLLAWAVLLGPDRRFGIEGAGSFGAALARGLLTAGEMVVEVPATLTDRERRHLRRRGKSDPADALAIARVVLREPTLHRVMPAATADDLKLLVTARDELQAERTRVANRLHADLLVLAPGYGERIPNLVAARHLAAVGRLLGRSPAVRVQLARKRLLRLRTLDREIATLEAQLADLVVASRSSLPRLPGIGMLLAAKLLGETGDVRRFRSGAAFAAVTGTAPIPASSGQTQRHRLNRGGNRQLNRALHYMAIVQARTHPPARAYVARRQAEGKTWREALRCLKRHLADVVYRTMLLDLQAAEIRA

SEQ ID NO: 78618 - protein, 395 aa, unidentified
MFIVGIDVAKRSHEVCMITSDGQTVQRPFSIRNNCTGYNLMLEKIRKHTNIKSQIVFAMESTAHYWLALFTRLRKDGYHVILLNPIQTSAMRDMFIRKIKTDAKDSFIIAELIRFGRYAESNVAQDRLLALKELCRNRFYLVDMAGDLKRKLVALIDRVFPEYEAQFDTIFCKSSVAVLKKYPTPQKLSNAHLDKLTELLWNSSNGHFGEWKARELRELARNSFGVEDCDGAYSTLILLMLDQIQSLSGKADALEKEISRLFQSFDTTVTTIPGVGPIIGAVILSEVGDISRFSSADKLAAYIGVDPSVNQSGEFQAAHAHMSKRGSPYLRRCIWMASQVAVQRDPMFRAYYEKKAAEGLKYMTIIGHVTRKMTAVVFAILRDHKVYEPVLPTAA

SEQ ID NO: 78619 - protein, 340 aa, unidentified
MSKITTIGLDLAKNVFQVHAIDETDGLVMRRPLRRGQVLAFFAGLSPCLIGMEACATAHYWARELRALGHEVRLMPPQYVKAYVKRNKNDAADAEAICEAVKRPSMHFVPVKTVEQQSALLMHRGRELLVRQRTMLANALRGHLAEYGLIAAQGLHKVAGLIAIVRDEQDARVPNVARQVLRVMAEQLGDLETRIAAVEAQIMAWHKSNPVSRRLVTIPSIGPIIATAIVATVADPSVFRSGREFAAWLGLVPRQNSTGGKARLGGISKRGDSYLRRLLVNGAHAVLLRSKAAKVDPWLLALRGRRPRLVVAVALANKTARIAWAIMSKQDTYRRTTAAA

SEQ ID NO: 78620 - protein, 417 aa, unidentified
MNDKFLWFVGLDWAHEEHRICLLDGEGKQVAERDVSHDGASLSGLCDWLLERTGAQPGEIAVAIETPRGPVVEVLLERGFAVFAINPKQLDRFRDRFSVAGAKDDSRDALVLGHSLRTDPHAFRRLAVDDPLVIELREWSRIYDELKGEQNRLTNRVRQQLWRYYPQAGELAEDIAAEWFLDLWQQVPTPAQAARVSEKAIARILKNHRIRRFDAAHVLRILRTPPLAVAAGTVEAATAHIGTIVARLRLINQQIREAERRLDELCDAIAAAAERAPGQICEQRDVAILRSCPGLGRINIATLLAEASEPLRARDYHALRVLSGVAPVTRRSGKSCIVIRRHACNDRLHQALYHWARVAIQHDPTSRRQYAALRQRGHSHARALRSVGDRLLSVLCTLLQRQVLFDPNYKTSQLAAA

SEQ ID NO: 78621 - protein, 314 aa, unidentified
MIIPLRCVGIDVSKRMLDIFDDALGAPERIANAPQAITELVARWRCGNVFIVFEATGVYDRELAEALRQSGIRFARINPARARDFARADGRLAKTDAIDARMLASFARAMAPAADQASDPVRNALALLAKRRDQLVHMRAQEKNRRSEAYDRAMIERITGHLVFLDDEIKAIEVEIKTLIKAEPEISEQARLMRSTPGIGPVACMQLIAQMPELGRIGPKQVAALAGLAPLNVDSGSYRGKRTIGGGRKRIRDALYMAALNTVRRNGPFKTFYQKLRSAGKPAKLALIAVARKLLTTLNAMLRDRKTYLRLQPS

SEQ ID NO: 78622 - protein, 417 aa, unidentified
MIRTKKMRFVNEKTMIVAVDIGKVSNQGYGRCPNGEEVKPFEFFNNGEGFKRFWERIWQAKEIHHLEGVVVGFESTGPYGEPLVQFLSERPVRLVQVNPMHTKRLKELEGNSPEKTDRKDPKVIADIMGLGHALTVIVPEGAAAELRRLTQARERAVQRKTVLWNQLQSLLALLFPEFLQVMKDLKTHSARYLLGHYPTPQEVCDLGLEELAVLLRRVSRGKLKLERARMVYEAARASVGIREGQRAICLEIRELLGAISATEGFIAGVEEEMARALEQIPYSPFLLSVRGVGKVTVAGLIGEVGDFRKFHTLAEIMKLAGLNLFEISSGQHKGRRHISKRGRPLLRKLLFFAALNMVRQKGLMRPFYQRLVGRGMRRIKALVAVARKLLGILFALVRDHRVYIPDYGKKGTVELAA

SEQ ID NO: 78623 - protein, 346 aa, unidentified
MLYAGLDLSRKRLDFHLLDAEGATVEVGAAPPDADGLDGLTQRLDRHGAPIRAAIESMNGARFVHDRLELAGWQVEIADAQKVKGLAPLACKTDRIDAWVLAELSRRELVPAIWLPDPAVRGERERARWRLHLVRHRSSLKQRVHAVLLAHGKPCPVSDLFGVRGRQLLARLGLPEPWQGTVEASLRLIDELDREINDCEAELRRLGAEHRYVPLLCTVPGIGWVLAYTIAAEIGDIARFPSPRKLAGYTGLYPRVYQSGERDLRGPLAKQGPRYLRWALVEAATHACTAPVYRDRYQRTKTRVGKQRGAKVAQIDLARRLAEAIWHMLTRNQPFAPAGATDPLAA

SEQ ID NO: 78624 - protein, 403 aa, unidentified
MNAVGIDVSKGKSTVAVLRPKGEIVLSPFDVFHNPKELGELVTLLKSLDGETKVVMEYTGNYYLPVAQFLQNNGFFVSVINAILIHDYGNKSLRKAKTDMKDSLKLASFALDRWLDLPSFSLSSDTRNLLKSYNRQYNQYNKLKVMLKNNLIYLLDLTFPNVNSLFASPLRKDNGHEKWIDFVLKFPHAECISKKSLSTFSKSYLSWCHKNGYHFSESKAQEIHEFACNCSPSLSLNESTSLLISSAISQLNCIAETLANLASEMNRLASSLPEYNVVMSMFGVGPVLGSQLIAEIGDVSRFHNKRALVAFAGLDAPPFQSGNFNTQSRSISKRGSASLRKTLFQVMSDILQQAPADNAVFQFMDKKRFEGKHFYVYMTAAANKFWRIYYARVTELLNSLQVA

SEQ ID NO: 78625 - protein, 373 aa, unidentified
MDSNATTYVGLDAHKRTVAVAMLLPGRSEPIEWQEAHDATVARRLARRLVREAPGPVECCYEAGPTGYVLQRRLRAEQVMCRVIAPSLIPVRPGSHIKTDRRDARKLAGLLRAGLLTEVHPPSEEQEALRDLCRCREDVQRDLLRARHRLSKFLLRRHCIYTQTKHHWGTRHLAWLSTLRFEDPVSQATFDSYFLAIQQLDERREQLEAQIAEFGTQEPYREPVGWLRCFRGIDTVTAVSLVAELHDFRRFSSPRQLMSYLGLVPREQSSGERERRGPITKAGNGHVRRLLVEAAWHNRSRPALGLPLRQRRQGQPARVIAIADRAQERLHRRFVRMTFKGKPSQKVVVAMARELVGYLWSVLYWQPEALSAS

SEQ ID NO: 78626 - protein, 343 aa, unidentified
MQAVTTIGLDIAKSVFQIHGVDAAGNVIVRRQLKRRYVLPFFQKLPPCLVGIEACASSHHWSRELQALGHTVRLMPPAYVKPYVKRHKNDAADAEAICEAVTRANMRFVAIKTPEQQSCLMLHRTRHLFIRQQTSVINAIRAHLAEFGIVAPVGRNGVEQLLDVVADASDRRLPEVARACLLALGAQLRTLKAQILNFDQQIMAWHRSNEASKRLDDIPGVGPTLATALIASVADPKAFRSGRNFSAWIGLVPKQHSSGGKDKLGSISKQGDRYLRSLFTAGALAVIRYAKIHGTRHRPWLTALLARRPTKVAAIALANKIARMAWAMMARGDRYKEPVALAA

SEQ ID NO: 78627 - protein, 341 aa, unidentified
MKPELSVVGIDLAKSLFHLVGMDERGKIILRKRLARGEVMPFMAKLPRVLVGMEACGGAHYWARQLRAQGHEVKLMAPQYVKPYVKTNKNDLRDAEAIAEAVTRPSMRFVPIKNVAQQDLQALHRVRERLMGARTALVNEIRGLLAEYGIVLPTGVNAFRNALAAKLEAEQAKLTPLSQELFGKLWAEFKQVEAEVAYYDEKLQAMATTHPESQRLVTIPGIGPITATALIAAVGEVGGFTNGRQFAAWLGLVPKQYSTGGQTRLLGISKRGDSYIRKLLIHGARATLRWARTKTDRRSRWIRGLLERRGWNRTAVAVANKNARIVWAVLSRGGVYEESTN

SEQ ID NO: 78628 - protein, 385 aa, unidentified
MKVTYQTCCGVDVHKSFLVATIVKTTGGIEPSYQKKRFSTFNNSILEFKQWLLDNDCHDVCMESTGKYWVPVFNLLEDDINVVIANPKWVKAVKGNKDDTKDSKWIGDLFRLGLVRGSYVPCKKIRILREYTRYRYKLISCRSSEKNRYQNALTVCNVALDSVVSDIFGKSSTSIIDYLLEQSGTSINHEEIASKLLRSLKSKEDAVIESVEGYQMTDAQKYRMRLVRAHMDYITAEINDVDKMMENMISSNPDFENAVQFLCTIPGVKRDSAITIISEIGTDMSQFSSSKRLCCWAGLTPGSNESAGKKKSVRITRAGVYLKPALVQCAHAAVKSDKSPYYKKKYDSLVKRRGKKRAIIAIARMILTAIYQMMSTGEQWNPSDL

SEQ ID NO: 78629 - protein, 326 aa, unidentified
MTRIICGVDISSTSLEARVGQEGAFASFPNNPQGIAALAAFCQAHQVELVAMEATGGYEQRALALLSEQGLPVAILNPRAVRRFAQSMGQLEKTDRLDAGMIAWYAQTRRSQPVCLSSARQQQLRALVTRLRQLTEVRTAQLNQSRLVTDPAVVALIDELLAVVARQIRELETSIAQLVAQDPLWHQLDQVFRSIKGVADRTVARLMAEMPEIGTLSNKTISKLAGVAPLARDSGKHQGQRAVRGGRASVREILFIVASVVGRYEPDFIAFQQRLSAAGKPRKVIRIALAHKLLIRLNAKARQVRQLHATSQATTAGSLVSKNTYC

SEQ ID NO: 78630 - protein, 482 aa, unidentified
MARRLVGIDLGVATAHTVVVLDEEGRVVARHRARPEQSSLEALERAALKDAPEGTRLEVVFEATGAAWLPVAVFFVRRGHLVYRVSTAKSSALRKFWSRHAKSNLIDAQTLAQLALIDDGLLAIELPEGARASLDRRVRAADRLRDLASAQKTRIRELARHVMPMLDEAVTGELGHADIAVLERYGDPRRMLRAGPARLTALIRKVSHGHHGEARAEAWLAVARQAVELYGNDPAVTFEDLAAELASEARLWRASETEHHAHAQARETAYQHVDPEGLARSLPGVATTGGPVIVAVMGRPGRFPNADAFKAFTGLTPKASQTGVSDRKGQAMTKAGPRRLRDQLVQSANTARQIDPQLAAVYWTQMVERGAHHTKALCIVASRLAGRAFSVMARGEPYVIRDVDGRPVSVAEARQIIAARYQVSEDVRRRRRSQQKGKSPQATPQGTAHRGDPPPPKLSRHSRPRSTAPDALDVNPEHASRT

SEQ ID NO: 78631 - protein, 412 aa, unidentified
MAEEIDWLVGVDWARTEHQVCVLDAAGELVGERAFPHSGAGLDRLCRWLLQVTGVDAARIGVAIEVPHGPVVETLLERGFAVHAINPKQLDRFTMAGSKDDRLDARVLADALRTDRPRLRRLRQVSDEIVALREVSRLVEDLQQERTRLTNRMRGQLWRYYPQVLQLTDDLGEPWILALWQQAPTPAKARRIHKATVAQLLKANRIRRTDAETVIATLRQPAVQVAPGTAEAACRHIRSLVARLKVVNRELKEATAELNQRTEAVSAAADATPGQPVEQRDATILQSMPGIGPIVLATLLAEGSDALRRRDYHALRSLCGVAPVTKRSGKRLVVVMRQACQMRLRNAVYHWARVATQHDAKSRRRYHALRARGHSHARALRGVGDRLLAVACAMLASGQTFRPESTEVAQPT

SEQ ID NO: 78632 - protein, 345 aa, unidentified
MSIVGGLDIHRKQLTFDYVDRATGELKRGQISPADRRHLAVWLRRFDGVADVEFAAEGCTGWRYVIEELRRAGVKAQLAEPADTAAARGRKKRAKTDRADSKLLRELLDAGRIPRCWIPPEQVLEQRALLGLYHDLRREHTGWVQRIHAVLFHQGAEALGTGGLNTEEGRQRLCQIAAGQLSAAGQLQVVTALAMLEVIEIHLEDLRRRLVRTAKQLRGAKTLTDAIYGVGPITALALCCWLGGADRFASSRKAVRFAGLDVTVHSSDTKRSPGHLSRQGPPVLRWCLYEAGKTSARTTAPDHTYYAGVKERIDGKRAALSQARRIVRQACHLLTALGDDAFATV

SEQ ID NO: 78633 - protein, 311 aa, unidentified
MTDHNIGVDISKSHLDVFRLEDKMAKRFDNSVAGFRALIRWLGKAPVARVVFEPTGAYHKAFEVALGTTLPLVKVNPLQARRFAEAHGTRAKTDAVDARMLALMGAAFNLEPQVPQSKETRDLRDLHVARAGLVKDRTRLRNRAVNQDLSVLKRQTKARLKLVEQQIAELDVEIVKLIEARESTARTCDILCSMPGVGAVSAAAMLTLMPELGTLDRKQAASLAGLAPITRKSGQWQGKSFIGSGRKPLRDALYMPALAAMRWNPDLKAKYEQMRAAGKPAKVAIVAIMRKLIEVANALVKANRKWAPKTA

SEQ ID NO: 78634 - protein, 350 aa, unidentified
MQDVSAASGYLGVDAHSETCTLYAVDQKGTIIMRCTVPTDPRQLRAAVSNLPPGYWAMLEASSVSFLVRNALASVMDRVIICETRENRLISNSGDKSDDKDAHRLARLLRLGEFKEVYVPSASWQEIRELVHSYDKVVGDVVREKNRIRAMYVRNGVRITDSAYGDGRHEALKKVNQPGLKPVFDAMYAILDAAEEAKDDLDHALRARLSRKKEYRLLKTIPGVGPVCAAIIVAIIVDPMRFTSKKHAWNYAGIGASEDSTGKVVKLKRNKHYNRLLKYAVMTAAQAAIKGDNRFARLYQTLLEEFADPKKPKKAATKAKKMVARAILAAALAMWKTGTAYKENTQAKSA

SEQ ID NO: 78635 - protein, 411 aa, unidentified
MDKIYDKCCGIDVHKKLIVACFRYGRKQEVREFGATTRELLSLTDWLKEGGCEMVAMESTASYWKPLYNILESSDLNAMVVNARHMKAVPGRKTDVKDAEWIADLLQHGLLQPSYIPGKDQRELRELVRYRKSLVGERTRELDRLQKMLEGANIKLSGTVSDINGKSARSILEYLLTGESIDEAKYDEMYKRKVIAHNLKATKEQIIDDLNGVMSSLQRRMMKELLIHLDELNIHIRNLDDEIDNFMKPEEKQASQAIQEVTGIGNTSAQAIISVIGTDMKRFPTDKHISSWAGLCPGDNESAKKRKSGKTRKGNSLLRTTLITCAHAAVKNKKSYFHAQFMRISAHRGTKRAYVAVAHSMLIAIYHILKDGVVFKDLGADYYNQFNKERKIAAYLKKLKALGWEAPVVAA

SEQ ID NO: 78636 - protein, 456 aa, unidentified
MPNYYLGADISKGYSDFIMLDAAKRPIEDSFQLDDTFEGHHQLYSIVSKFCNDHPKARIYAAVESTGGYENNWFDALIKFQSSLPLKTARLNPCGVHNNSKAGLERNITDPISAENVAKYMIAHSEKVTYQQQDPLCSLRKQWSFIKMLLKQKTQLLNQLESNLYAANPEILAYCKNGVPKWVLSLLGRYPTATKLAKAKRSSLTLIPYVTQSKANALINSAKKSIASATDQISAQIIKATVKQIQHLTKAIEAQVKIITKNCSVPEVELLKTFAGISDISAIGLMLEIGSVVRFAKAKKISSFFGLHPIYKKSGDGTWGFHMSKKGRVVPRQILYMVAMAAIQCNPLIQQIYLKHTDKGMKKKAALGVCMHKICRIIYGMLKHNMAFDPSIDRKNTQKSPQGKTKIRNDKTRRYQSFDTKAPISGRQNKKRKERKQSQSVNNAQCGIIEAPVPNS

SEQ ID NO: 78637 - protein, 374 aa, unidentified
MADIIEAFVAFDTSKLRNAVAIAEAGRTGEVRFLGEIENTGAAVAKLVRKLAGKYGRLTFCYEAGPTGYGLYRQIKSLGQECMVVAPSLIPKKPGERVKTNRRDAVSLVKQLRGGDLTAVWVPDPRHEAMRDLTRAREVAVEDLRCKRQQVSAFLLRQGLHYPGERTWTKAHRNWLMSQKLEYAEHRIAFEEMLLAMRQAQERIERLEQAIRVAVPDWSLAEVVTALMAMRGIDFISATAFLAEIGDLSRFPTPRELMGYLGLVPSEASTGDTIKRGPITKAGNRRARRILVECSWSYQHPPRVGKEKQERVAAAPQAVREIAWKAQCRLSARYRALTRKGKLKTVAVTAVARELSAFIWAINRQIINPRAAAR

SEQ ID NO: 78638 - protein, 349 aa, unidentified
MTVYVAVDFHAREQTVSYCNLADGEIHRRKLRHQHDDVRAFYQQFTGEVIVAFEASGYSAWFEQMLAELGHTVWLGNPAEIRRKAPRRQKNDRRDADLMLDLLLKGDFPRVHGFSEESRTVLRQLRYRHKLVKVRTIAKNSLQAIGINAGLPLQRRLLTAPGIAQLQALSLSPVLTQQRDEWLQLIGSMNERIATVEAQLQQRAKDDAAIALLRTHPGIGLLTSLALRYTLLPTSRFSTTRQVTAYVGLDCMEDQSAERRRMGSISKAGSKLLRFLLNEAGHTAARHDPELKKFYRRLLHRRDKPKAKVAVARKLLVRSFIMLRDQIDYAEFVRRGVAARVAREAHSLP

SEQ ID NO: 78639 - protein, 346 aa, unidentified
MDEAYDGRQVVGMDLHRRRSVLVRMSMDGRKLETVRVENSPAALRGVLARCGQGPLVVLEATYGWYWAADVLAAAGAEVRLAHPLGVKAFSYRRVKNDERDAADLADLARMGRLPEAWIAPPQVRALREVVRYRHKLVGQRTSCKDQVHAVLAKLGVPVTHSDIFGTGGGLWLDQLVLPAPYGAKVASLRALIGVLDGQITALGGEAASMLAGDKGYQALRELPGIGPVLAAVICAEIGDVTRFGKPGQLCSWAGLTPRHYESDVKVIRGHCSKQGSRILRWALTEAIQHQPDGTRPRQAKDGIIARRGNQARNIAKTAAARVLLTQVFYALRDGHVRSAGHPPAA

SEQ ID NO: 78640 - protein, 344 aa, unidentified
MSKTIMIGLDLAKNVFQVHGVDASGAVVLRRQLRRGQVEKFFSELAPAIVGLEACGGAHHWARMLERLGHEVRLMPASYVKPYVKRNKNDGRDAEGVCEAMGRPTMRFVAVKSVEQQAVLVIHSTRALLIRQRTMAANALRAGLNEFGIVAAQGIKGLRTLIEQLRNPSEGVIPEVGRATLLLLARQWEALDADIRALERQIERAARADEAACRLMEVPSVGPITASAAVAKVPNARVFKTARDFVAWVGLTPRGRGTGGKHRSGGISKQGDRTLRSLLINGASSHLRQQIARGVKDPWLRDMLARRPYKVVMVALAAKNARIIWALLATGERYRERAPVPAAA

SEQ ID NO: 78641 - protein, 523 aa, unidentified
MSATRVRQRSRSRRPEVLQKPAGVIHVRVQKVGPEHFGIVGVDCAKARSKWMLCDFFGNVLIAPTVVEHNRADLEAAVARLRQAQQVHALDDLIVAVERTGRYHHIVRQAFAAAGYEVRIVHPFTTKRYRQISDPGNKTDDTDLAAIHRAAVNGFALLERPVEPSWRELQLLVRHRRDLVFKTSALSAQIREHLEAALPGFASCFDKLWDRALAWTLLRHFESAPAMHEAGLPKLLELLRRQEVRFQRPTVERVFAWARQAAPRDEAAALHRRIGLALYDDRTRKTQEILERERDIAGYLTQTPYVLLLSFPGINVVSAADFAGEMGPIGNYANARCITGRAGLCPSRHQSDQVDLRNGPLRRCANRRLRAAILAIADNLILCNHHFNALAVRWRAAGKDPRHTHVKVAQRFCRIAYHMVAGGQVFHHPALQQRHYILDKLLAFHREHDTPMPETLTGLETAVGHIPSSAHADEAKPLAAELLRIHAGRRRGPQVLGDISPLVLARLGVGAVQSTESGERDST

SEQ ID NO: 78642 - protein, 318 aa, unidentified
MNTNTLQNINVGVDTGKSQLDIYIRPLDIYFTVPNTDKGITDAIKTIKKHKPQRVVIEATGRLEMPFILACDKAKLPYVIANPLRIKRFAEAIGQRAKNDRLDAELIAHYAERVQPELTKLKSENIRLMSDLVTRRNQLLTMQTMERNRLQILPKNISSTITPILTALKNQLEKVEAKIARLIERSPEYHAKSTILQSMPGVGKVLAASLISNVPELGFITNKQASSLIGVAPITRESGRFKGKRMIKGGRPQVRTVMYMAMMSAIQCNPVFKATYERLLAAGKPKKVAIVACMRKMVVTLNSMLRDGAMWDKDSVKS

SEQ ID NO: 78643 - protein, 404 aa, unidentified
MSTEFFAGLDWAVHTHAVCVIDASGTVRERFEIAHDREGLAELMRRLARFGASVRIAIERPSGLIVDALVEAGHQVFPIHPNAVKASRPRYRSHGGKSDASDAYLLADLLRTDGHRWAALAPQSASIRALRAVVRSRDDLVATRVALGNQLHSTLQAFWPGAACIFADITSPIGLAFLKRYPSPTKAARLSEAQLERFCRTQHYSGRRSPAELLARLHTAAQGLVAPLTAESMAQVVRSMVAVLNPLVAQISALTRRIESFVASTPDGQIIMSFPRAGRVCAAQILAELGDVRERFPTLDRLVAEAGAAPVTYQSGKTRSVAFRWACNRRLRQAITCLADNSRHANAWARSIYAAARARGCDHPHATRILARAWLGVIWRAWINRKPYDPKLHNAALKLASAGG

SEQ ID NO: 78644 - protein, 397 aa, unidentified
MIFVGIDVAKDKHDCFIISSEGEVLADVFTVSNSREGFEHLLQTINTCTGIGNSKIKVGLETTGHYSYNLLGFLLDNGLTTYVINPLHTNLYRKSQSLRKTKTDRVDARTIASMLMSDVSLKPYTNIAYHNYELKSLTRYRFDKVSERAKLKTSVSRLVNILFPELEKLLPTLHTASSYALLSELPSAKHIADVHLTHLTNLLYTASKGRYNRDRAIQIRETARNSIGTYMPAKALELKHTIKLIRELDSEIDEINIAIKEIMDKIDSPITSIPGVGLNMAAMIIAEIGDFNNFDSPDKILAFSGLSPSTYQSASSIIAMLTWKNEVLDIYDMLFLMLPSSFVIGTLFSSIILQKTLGRQALQCCCFSRCQEIGSFDFCNAKNRTTLFSQILKTFNF

SEQ ID NO: 78645 - protein, 371 aa, unidentified
MNDLIRIGMDTSKSVFVLHGVDAAEQPVLRRKLRRRQVVEFFDKLPAIKVGIEACGGAHYWARELGALGHHVLLLPPQRVKPYVARNKNDAADAEAICEAMSRPRMRFVPMKTTEQQAALMLVGVRDQLVARRTELSNAIRGYAAEFGLTAATGLDKIAPLLERLATDRTVPALAKELFATLGEDYAQVKLKLRTIEAKLMAWHRQNELSRRLAEIPGIGPIGASLLAMKVPDPKAFRCGRDFAAWIGLTPKDHSTAGKTRLGVITRAGDEALRSVLVVGATSVINQARRQKGHPSPWLVALLKRKPAKLAAVALANKTARIAWKLMVSGQHYNPHLAPKTCFVPPTGSVAPCSRRQGRFAPPAAVACGQP

SEQ ID NO: 78646 - protein, 339 aa, unidentified
MKYTPVGVDIAKHVIQVHFINEHTGEVVDKQVRRQDFLAYFSNREPCLIGMEACGGSQHWARELTKQGHKVRLLQARFVKAFVMGNKNDVMDARAIWMAVQQPGKEIAVKTEEQQSILVLHRSRRQLVKFRTAQINALHGTLLEFGETIHKGRAAMEREFPEALERMKERLPLYLITVLENQYNRLNELDSLIDDIEKQLTSVARQNETCRRLLDIPGVGPLIATAALAIMGKASVFKSGREFAAYVGLVPRQTGSGGKIRLLGISKRGDKYLRTLFIHGARAAALLTKEPGPWITELKKRRPASVAIVAMANKLARTVWAIAAHGRKYDKNHVSIRPY

SEQ ID NO: 78647 - protein, 371 aa, unidentified
MNTIVYVGMDVHKESYTLCCYSYDTDKVEYKQTIPADYKLILKYMEQVRKRYDGEVTFVCGYEAGCLGYSLYHQLNDHEVDCKILAPTTMAITNTNRVKTDKRDAANIARCLAFHTYSEVYVPDAEDNEIKEYIRMRDDQKQMLKKIKQQILAFVLRSGKKFEGGKTYWTIAHLEWLRNLDLTELAKETLSEYLITFDYLTEKIERLDKKIEELANRNKYKEKVKNMGCFLGVKTHTALSMIVEIGDFDRFEKATKFAGFLGLVPSEDSSGGDVNRYSITKAGNSHLRRLMVEAAQSYTRGNIGHKSIALKQRQKGCNPEVIAYADKANERLRKRFYHMTLKRCINRNVATTAVARELACFMWGMATNHIS

SEQ ID NO: 78648 - protein, 347 aa, unidentified
MRFYTKQHPFYCGIDLHARTMYVCILDQAGETLLHRNMPATPEALLKAIAPYREQIVLAAECMFTWYWLADCCAEHGISFVLGHALYMKAIHGGKAKNDRIDAHKIAVLLRGGMLPQAYVYPAEMRATRDLLRRRMHLARKRGELLAHVQNTNSQYNLPAIGKKIAYKANRDGIAERFADPAVQKSIEVDLALITYYDELLRDVELTIVKTAKHHDANTLYLLQTVPGIGKILSLVLLYEMHDIARFPRVQDFASYCRLVKCAKESAGKRSGTSGSKIGNAHLKWAFSEAAVLFLRDNPAGQKLLTRLEKKHSKGKALTILAHTLARAVYYMLKRQTAFDLDTFLRG

SEQ ID NO: 78649 - protein, 348 aa, unidentified
MLADQLDYVVGVDPHRDSHALAVVQVVSGAVVFEATVVASSDGYAHALQLADQHAPGRRAFAVEGTGSYGAGLTRFLTGRGEQVLEVSRLRRERRSGGKTDALDAVRAARSVLAQQRPATPRAGGERQALQALVAAREGAVNAKRAGLCQLRDLLITTPEPLRSELRPLTRARLLQHLAATRPDGRRDPELRGSMLALRSIARRVLQLTVEERGLAREIETITRKLAPQLLEQPGVGPHAAAQLVLSWSHRGRIGSEAAFARLAGAAPIPASSGQTVRYRLDRSGDRKLNRALHMILVTRKRSHPATIAYIERRLQEGKTRREANRCLKRYLARSLYRLLEHGPLPAT

SEQ ID NO: 78650 - protein, 335 aa, unidentified
MKHYAGIDLSMETSHVCVVDADGGKVDALCVDSTPEAIAAALERHGPVDRVVIETGRMTPSIALGLRELGVAIVCIDARQAHQSLKAMRANKTDLHDAAGLAQLARTGFYKEVHVKSPAAHGVRSVITARGHLVEARVRLDNTIRGLCATFGIRLGIGQGERFLARMRAAAAIPGLGEAVASLLDVRERLVEQIAQLDRQLKAISAASPVCQALMSIPGVGVQTSAAFAAAVDDAARFKRSRTVGAYFGLVPRRHQSGELDWTGRITKQGDGAVRKLLYEAANSILTRTRQTFALKTWALKIARRRGLRKARVALARRLAVIMHAMLRDGTLFEA

SEQ ID NO: 78651 - protein, 345 aa, unidentified
MAGVLASEHFRVSGDGHRALEAWARQFGQIVRWGIEGASAWGRHTAIFLVSRGDDVRDVCPNRTGRQDRARQRGKSDTLDSERIARETLAHPLLPRAFKRAGDDAGPDEQTELLSVWWKARCSLLKSRQHLLSEAEALLGDLPIALIEQLPDRKAVRPRLAALAGVTRRRRFDPPTTLRLRLLGDYRAQIAKLDAQEKQVTRELRTLVDASPTTLEQLCGLSTVSVAELLVEVGDPRRFTEGGFARFNATAPLAASTAEGPGEPVRHRLNPGGNRRVNAILYRMAITQLRCEPRAQALYANARAHGHTKKEARRILKRHLSDVVYRRMIRDLPDHDTADPRLVAA

SEQ ID NO: 78652 - protein, 356 aa, unidentified
MQTQVTKKIDFTGKDLFVGLDVHKKSWSVTIVVDGIEHRTFTQPPDPEALGKYLQRSFPGGTYHSAYEAGYCGYGIHRRLNDLGIKNIVINAADIPTTQKDKLHKRDPVDSRKLARGLEKNSLRGIHVFERDHEELRSLNRTRFYLMRDLRRSKNRIKSFLLYYDIPLPGEFDNNQWSLKFIAWLKQVKLQTIAGQEAFSHLITSYEHHRQQLLILSRLVRLRISQHDKELFNLLKTISGIGPLTASALITEIGDINRFPHIDDLGSYVGLVPRVRDSGETTHTGGITFRCNNFLRVLLVEASWQAIRQDPALMQYYHKHVINSKGHKVIIKIARKLLNRIRYVMKNRQPYVTGVA

SEQ ID NO: 78653 - protein, 350 aa, unidentified
MDRYIGLDAHASSCTVATVGPSGRRLHSQVVETNAGALIRVLRGIPGTRHLCLEEGTHASWLYEVVSPHVEEIVVAGVSESRGPKSDKLDSFGLAEQLRIGAIKRKVYKKPGEFGALRHRAKAYTLLVGDSVRVQNRIKGLFRSRGVAVAGKGVFRVAEREGWLKKLPATARCLAELLMQEQDGLLELREKAEEAMLAEARKHRAWRLVKSCPGLGEIRTAQLLPIVVTPYRFKNKRSFWAYCGLGIVMRSSSDWVRTQSGAWVKAPVQQTRGLNRNANRTLKGIFKGAATTVIGQARDEPLYRHYVQLLDGGTKPNLAKLTLARQVASILLAVWRNEEVYDPVRVDQAV

SEQ ID NO: 78654 - protein, 362 aa, unidentified
MGHNRSPSHLQSRKPSKRGSPSLIERIKPNAAGIDCGSEQHYVAVPPDRDPEPVRSFKTFTADLNRLADWLAACGIETVAMESTGVYWIPIYEILEERGLEVVLVNARHVKNVPGRKSDVLDCQWIQELHSVGLLRGSFRPAAEIAALRAYLRHRDKLIQGATSHIQRMQKALVQMNLQLHNVISDITGVTGMRILRDIVAGITDPKILAAHRDHRCRASKEEIIASLTGHYRAEHLFALRQNLELYDAFQRQIQDCDRAIDALLPTLAAQQDDPPRSLPPARSKKKPRDNEPRFEIRSHLHRLTGADLTQIDTIGPYTALQLIAEIGADMSRWRTEKHFTSWLTLAPRNKVSGGRLLSSKT

SEQ ID NO: 78655 - protein, 326 aa, unidentified
MNVIGIDVSKDKLDCLWLRELATGKAKSKVVPNKPSGYQALLTWAEKTVGCPVVEIWFVMEATGVYHEALAAALVAAGAPVAVVNPARIRNYAQALGQHTKNDQRDSYVIAHYGCTQRLQRWQPELPEVRELKALLARLEAVEKDAQRETNRLEKATISQASAVVIDSIQAMLATLTAEKKRLEKLVDNHIDGHPTLKQDAALLKSIPGVGAVLSRYLTMTYRSRDFQRASQMAAYLGLVPVEDESGSSVHRRPRMSKAGSSVIRAKLYLPAVVATRCNKQARELYQRLLRKGKTKMAALGAVMRKLVHMCFGVLKHQQAYSPLAT

SEQ ID NO: 78656 - protein, 391 aa, unidentified
MVCVGIDVAKDKHDCCILDSDGTIRADCITIPNNMDGFKQLLQTIRDCTKKSDKIKVGLEATGHYSYNILGFLLDNDLAVYVMNPLHTNLYRKSLSLRKTKTDRVDARTIATMLLSDVDLKSYTDTAYHNEELKSLTRYRFDKVRERAKLKQSVSRLVTILFPELEKLVPSLHIASVYALLSEYPGAKQISEIHLTKLTNLLAKASKGRYGKDKAIQIRDAARTSIGSVMPAKFLELKHTIKLIRELTSEIDEIEVSIQKIMDELNPPILSIPGVGIQSAAMILAEIGDFSNFESPDKILAYAGCSPSTYQSGKLTNCYAHMEKRGSRYLRYALYNATKYVCHWNPVFAEYLAKKRAEGKHYNVALSHATKKLVRLIYALQKSGKAYLVAA

SEQ ID NO: 78657 - protein, 376 aa, unidentified
MMVLGADTHKRSHTVGAVGELTGRVIADTTVRATQRAFEQLLVWARGLEDPDRVWAIEDCRHVSGALERFLLARGERVLRVQPKLMAGARTSGRERGKSDVIDAVAIARAAIREGVDTLPVAQLAGAELDVRLLVDHRERLVGQRTRLINDLRWGLHDLWPELEIPPRALIGPTWQDRVGRRLTRAEQSARVRIARDELRRIRELTRSIQALEAELAPLVAQLAPGLLAERGCGVLTAAKLIGEIAAIGRFATDAKLARLAGTAPIPASSGRTDRHRLDRGGNRQLNCALHRLAISKGRLDPETAAYLARKQAEGKTRREALRCLKRHLARRVFKLLQPSASMPQAAPAIGERPPAIAKPGQMIHCNPPAGTPALT

SEQ ID NO: 78658 - protein, 338 aa, unidentified
MAIVTVGIDLAKNVFALHGVDEAGAPRLKQPKVARGKLNALVAALPPCRIGIEACSGAHHWARQFQAHGHTVRLMAPKLVTPYRMTGKRGKNDAADAAAICEAVQRANMRFVPVKSEEQQSRLMVHRARQGFVAARTACINRIRGLLSEFGIVLPLKAEVVRREARNHLEELPGYANTVIGDLLSEVSHLDERIKQYDTHIRAMARDCTAAQQLMQLMGVGEITATALVAMVGNAREFHSGRQLSAWLGLVPGQYSSGGKARLGSITKAGDAYLRSLLVLGARAVLNAAKGKTDSLSRWALAVAERRGYWKAVVAIAAKNARMAWAVLTKGEAFKLPA

SEQ ID NO: 78659 - protein, 389 aa, unidentified
MSSRAAVAAVQPAPTVPAVRSIIYLGMDVHKDSITIAVLPQAAKAPTRLEKLPNDLPKLQKWIARIARDGEIHACYEASGAGYVLHRALREWGYACDVIAPSLIPKRSGVHRKHDKRDAADLARLSRAGELVAVRIPSEADERVRDVVRCRETFQREILKSRHYILKFLARRGFVFREGTNWCTPHLKWLQHLTTDGSPLAPEDRFVYREYHALLLYKLQRREELDRHIERLAELPTLAPMVKQLQCFRGISVHSAMVLATEIVDWRRFERPNQLACYLGLIPREDSSGDRQRLGSITKAGNSHCRHVLIQAAWSYRHRPQTSVDLKRRQEGQPPAVITHAWKTQQRLHQRYNHLSYRKRPQIAVVAVARELVGFLWAVMRELEPVQAA

SEQ ID NO: 78660 - protein, 395 aa, unidentified
MCKVIMIGCDLHEKTMLLKIAVGCEVPTMRSVRNTPEDRKKMIVDLKARAQQAGAQRIIFAYEASSLGFGLYDELKDARIECHVLAPTGLERSMQHRRRKTDERDAEQLLGALRAHVLAGNDLPSVWIPDEQTRDDRHLVRARVDLADKLTASKNEVKSLLKCNGVRRPSGLGSGWTKSYRSWLEGISGEDDPRLAPGASVSLQSKLNQIEFLDEQLQSLDEQVIKLAMTARYRDAFYELIAIKGVGNLTAMLFLTELGDLSRFANRRQIAAFLGLAPSTYESGEANDRKGHITRQGPARVRKVLCQAAWAQIRSDERAKATFDRLVQRNPKHKKIAVVANMRRLAIQMWHRASGHPRPDTSLRLDTAGPPRCPFPAAGPGRAGEGQATAKAQRG

SEQ ID NO: 78661 - protein, 438 aa, unidentified
MRRKKNKAIKKVHFESLPLIHPNAAGIDVGSKEHLVAVAPDRDPQPVRTFQAFTPDLHELAAWLKRCGIETVALESTGIYWISLYEVLEQYGFEIRVVNARHVKNVPGRSKSDVLDCQWIRKLHSFGLLNGSFRPEAQVRKLRTYMRLKDNLVVEGTQAIHHMQKALFEMNVQLSNVISDITGESGLRIIEAILAGERDPGQLAALCSTRIKASRQTVAKSLHGNWDEALLFCLRTALDTYRFSQKKIQDCDQCIERQLATFEIKTPLPDLKQTLQTQLHQVCGVDLTKIPGIKEQTAQIIISEVGLDMSPWNTEKQFSSFLGLCPNNLITGGKIRRRSTRKVYNRAADALRLCAQSLTHSKSALGAKYRRLRARLGAPKAIVAMAHHLARLVYRMLRYGQNYVEKGIHQYELKFRLQRIKWLKKEARSLNMQLVTAQ

SEQ ID NO: 78662 - protein, 361 aa, unidentified
MNSSRTPKKSRTKKTQKWERIIGIDIGDRWSHYCILNQEGEVVEEGRFRTAEDSLRKQFGGIEPARMAIEAGTHSLWMSEHLRQYGHEVLVAHPSELPTISRSDRKCDRVDAEKLARYARFDPGLLHPISHRSLAMQESLTVVRARDTLVRVRTELINAIRGFVKACGGRLPSSASSCFAQRCLAFVPPGLLPAVSPLFAQVEFVSEQIKNYDRLILQMAQNQYPETKALSQVQGVGTLTALTYVLTIADKHRFRHSRDVGCYLGLRPKRSQSGEHDPQLDITRAGNSYLRCLLTECANYIVGPFGQDSALQRWGRKLAARGGKSARARAVTAVARKLSVLLHRLWVTGEPYQPFPLGNAA

SEQ ID NO: 78663 - protein, 400 aa, unidentified
MLSIGIDVSKGKSTVCGMKPGGEIVYTPFEIQHTREGMSELVSLLHNSGEEVRAVLESTGSYHCPVVAALLENGIFVSVVNSLRMKRFCSQSIRKVKTDRIDAMQIALYGLAYWQELQPTRLPEDTYRELQLLARQYYQMTSMLIKAKVDFNAICDQVLPGMQELMNDHAGRHKLSDFVLRYRHTTHILEMGETRFRKDYCKWAEKKGYRNCERMAALIFATAQNGIPVLPNAPSTQIVITEAIRVLHTVEASRDAILTQMQALAKTLPEYSLVREMPCIGDTLAPRLIAEIGDVRRFHSKRALIAYAGIDAPPYQSGKFCANNRHISKRGNRYLRKTGYEVMQSYVMHKPANDPIFTFIEKKRGEGKSGKLAMVAGLNKFLRVYYGKVTELYRSLPAIE

SEQ ID NO: 78664 - protein, 365 aa, unidentified
MKILAIDLGKDKSVFVEYITGSTDPKQHTYGTIPTDPQHVHDLLAKTRPDRLVIEACPSAGWVHDLAAAMDIQTQVANTNDERWQWRRAKKKTDRVDALKCAQMSEMGCLPTVHVPSPQVRQWRSLIEYRHGLVDRRTAIKNSIRSIFHRQGERLPAGQKAFGVAGIAQLKKEAKPLSQCSALELWRGQLQVELEALESVHKQVLEVEAKLADLAKENQRVQLLQGAPCVGPRLSELVVAVLDEPGRFKNAKQVGAYAGLTPRRWQSGKSVREGHIIGFGHPLLRELLVEISWLGVRYNTWMKSVYENVRRGSDKRKKVAIVAVARRLLIRLWAMLRDGTKWKEPQVSVQRVGQTSDATPLAVSA

SEQ ID NO: 78665 - protein, 462 aa, unidentified
MADYRTPRGLDRSLLTMLVEGQWIDDHANLLICGPSGVGKSWLASALGNKACRDNRSVLYQRVPRLFSDLALARGDGRHPRLLRALGRVDLLILDGVDGLTQRHHSAKAWSPERHKEGRPSEMKFIRIGVDLAKNYFQIHALSSEDAPAVKRKLTRRTMREFFLKIEPCRIGMEACGSAHYWARELKAMGHDVSLMPPAYTKPYVKRGKNDAVDAEAICEAVSRPAMRFVPIKSADQQATLMLHKTRELLVKQRTMSVNALRGHLAEFGLVVAKGSGRVDELLGLAEGDATLPDAAVLAAKVLGQQIDALGSALDDLESEIAKAHALSETSRSLEEIPGVGKLVASVIAASVPDPSVFHSGRDFAAWLGLTPRQISSGGKPTLGTITKAGNRYIRKLLVLGATSLLNVVEKRRGGLRDWIVGLLAKKPARLVTVALANKLARIIWAMMKTGECFRTEMFAKP

SEQ ID NO: 78666 - protein, 326 aa, unidentified
MFFIGIDVSKAKLDCCLLLDVASNKRRAKVVANSKTGIVDLLVWCTKQQVPVHELHAIMEGTGVYHEQAALALSDAGATVSIVNPAQVKDFGRSLGVRTKTDGVDGFVLARYGALLKPKSWTPPAQEARTLQALLSRREAIAQDLQRERNRLEKADATDTPSLIRQSIDDSIDFLEKQLTKLQQDIDDHINKHPNLKDDRDLLMSIPAVGPQVGNHLLCVMHNHDFQSAEQLAAYLGLVPVERQSGTSVQGRPRLSKAGPARIRAVLYMAAIVATKHNPHVKALYQRLQERGKTKMSALGAAMRKLVHLCFGVLKTREAYQADYAI

SEQ ID NO: 78667 - protein, 415 aa, unidentified
MKVVFPTCCGVDVHKTFVVATIITTPADSLQPHYQKKRFSTFNSDLNRFADWLLEHNCLDVCMESTGKYWVPVFNILEKRGIRVVIANPKWVKAVKGNKDDAKDSKWIGDLFRIGLVKSSFIPDLNIRILREFTRYRYKLVSMKSSEKNRFQNAFTVCNVALDSVVSDMFGKSATAITDYLTSDESFDPEHCVSLLQRSLKKKAEQVLESIEGFSIADEQKARIKIIREHYDFIEKLIAKVDTCVNEMVAKYEGEINLLCTIPGIDRRSAITIISEIGTDMSQFGSSKRLCCWAGLTPGNNESAGKKKSVRISRAGVYLKPALVQVAHAAVKDNNHPYYKLKYERIAKRRGKKRAIIAIARMILTAVYSMFCTGEVWNPVDLYKVDMPEHLKEQQLAKAIKQATRFLEKQGLSVA

SEQ ID NO: 78668 - protein, 383 aa, unidentified
MNKMNSTVACAGMDVHYKFSNVTFRGSDGRIVSRQRLDHPDRRKLAVRLSCWPKGLPVVMEASFGWGWLSDLVEAAGLEVHLSNCYKLEQMRKARGWVKTNKKDADLVSLLPLEPWDWWRVWRAPPEVRDRREQMRFRADLVACQTEVKNRIHAIFHRHGIFHEFSDLFGGQGRRFLTELCMRGSPHLSPQALQALRGQVRLLDHLRRQLADVARILHQQLIQTPLIRRLKTIDGLGLILSHVVVSEIGQIERFRNHKALASYSLLAPRSNDTGQEDPGQSPKGRHLGQQGNRTLKWAFIEAAHGAVRSGGRWRAMYDRVTAGGTKDRNRGYIKIARELVKVVYAVWAKGVDYQPTAPARPGSRKKNKSRSGTGQLLHPMVHA

SEQ ID NO: 78669 - protein, 437 aa, unidentified
MVSTRSKVRIISGKSPAIFGKELVLMKDLLEISCGLDVHKDKIVACILSGPIGKTTVSEIREFTTLIPDMAALRDWIVSCNCHHVAMESTGIYWQPIYEILEDAYSGDITLLVVNARHMKNVPGKKTDMRDSEWIATLLRAGLLNGSFIPDKQIREFRYLNRYRKSIIRDITSQKNRVEKFLQSSGFRLSTFISDIFGASGRNIICHLIQHGCIDRESLDSCLKTKTRNHINEILVAVNGTLSQIQQDFLEMLMDHYDSLKSHLAEIETALEEAMAPFSLHIEQLTSIYGINTTASCAIIAEIGTDMSYFKTAEHICSWAGLCPGNNESAGKRKSTSITKGNPYIKSMLCEIAWVIAGKRNTYLSAWYWRIKQKKGAKKAIVALARKLLVIIYTMLKQGTLFGENCFETRRKNCEQKQVSHYIRELEKRGYHIEASA

SEQ ID NO: 78670 - protein, 343 aa, unidentified
MNDTIYDHYIAIDWSIKNMAIARMTKKSNKITAIDVPSDIEDLQAYLKNLRGAKILAIEETTTSQWLYAELKEYADRILICDPNRNKLLNEGPKTDKIDATKLVQLLKAGLMKEVYHSTDKFLYLRRIVSGYEDLVKAGVRLKNQRYALLRGCGKRGKEKTGSTLNSQGEQFVVDCFDRQIELYEKEKQCYENEFERLARKNSAIKHQKTLPGIGTINAVKIIARVVTPHRFPDKGHYLSYTGLTKLEKTSGGKYYGKRNPRYSRQLKNVYKSGALAAIGGNNPINDYYEYLIHEKGYSEHNARHKACRRLAILSLGVFKSGKKYQPYRRAHIEGGKEDTSGL

SEQ ID NO: 78671 - protein, 334 aa, unidentified
MENIALIGIDLGKNSFHIHCQDRRGKAVYRKKFTRPKLIEFLATCPATTIAMEACGGSHFMARKLEELGHSPKLISPQFVRPFVKSNKNDFVDAEAICEAASRPSMRFVQPRTESQQAMRVLHRVRESLVQDKVKTTNQMHAFLLEFGISVPRGAAVISRLSTILEDNSLPLYLSQLLLKLQQHYHYLVEQIKDLESQLKRKLDEDEVGQRLLSIPCVGTLTASTISTEIGDGKQYASSRDFAAATGLVPRQYSTGGRTTLLGISKRGNKKIRTLLVQCARVFIQKLEHQSGKLADWVRDLLCRKSNFVVTCALANKLARIAWALTARQQTYVA

SEQ ID NO: 78672 - protein, 372 aa, unidentified
MSNLRFVGLDVHAETIAVCVAEGSGEVRPLGTIANRLESIRKLVGKLGPVKQLRTCYEAGPTGYVLYWQLAALGVACDVVAPTLVPVKAGDRVKTDRKDAEKLARCHRAGELTAVWVPDAEHEALRDLIRAREAGKKDQLRARHRLSKFLLRHGRRPPEDTKAWTKKHLEWVKTQVHFEQAALEATLSDYFHEVEHAAARIERLEKAIDQAVENMPPGLRAVVDGLQALRGIAQITAVTIVSEIGSFSRFEPRKLMGYSGLVSSEHSSGNRIQRGGITKTGNSHLRRVIVEAAWAYQHRPWLGGYLLKRQRDLELSEETKQIAWKAQHRLHTRYKKLSAGGKNKNQVVTAVGRELLGFIWSIAVQIEAGFKA

SEQ ID NO: 78673 - protein, 318 aa, unidentified
MNTKTNQNVNVGVDTGKFQLDIYIRPLDIYFTVSNDEKGIKEAIKIIRKHSPGRIIIEATGRLEMPFIVACANASLPFVVANPVHIKRFAGAIGQRAKTDKLDAQLIAYYGEAIKPKLSQLKPDTMQAMSDLVARRNQLLVMQTMEKNRLQILPKELAMTIKPILTVFKNQITKIENKIVALIESCPDYQAKNCILQSMKGIGKIASASIISNLPELGYMTNKQASALVGVAPMNRESGRYKGLRKIQGGRHQVRTVLYMAMMSAIQSNPVFKETYQRLVAAGKPKKVAIIACIRKMVVILNSMLRDGVMWEAPEAIN

SEQ ID NO: 78674 - protein, 321 aa, unidentified
MSKSTKIVGIDVSKKHLDVYSEQEGSHRYENPEKGFKAMLKTYGKSSHYVMENTGYYHYRLAYYLRKKGLQVTVENALKIKRFIQMQLTRVKTDKADSKLIWQYGMTQELRIWELPDELKQESDGILSLLELYEKQSVALKNKLQGEASMGVPSKTVVRSMKRMLKEVEQEIKKLEEQLEALVMSRYAEEVKQLRSIPGIGAKTSILLAVFTDGMRRFESGGQLSNYVGLTPVIRESGSSVRGRSRISKMGNGKLRKQLFMCSFNAMKYNKTCKDLYERITAQGKSGKIALLAICNKLLKQAFGVVKSGKLYDENYSVKIS

SEQ ID NO: 78675 - protein, 400 aa, unidentified
MIDTGDVDVFLGLDVGKGEHHATAVTPAGKKAFDKRLPNTEPKLRELFAKLQAKHGTVLVVVDQPASIGALPLAVARDMGCPVAYLPGLTMRRIADLYPGEAKTDAKDAFIIADAARAMPHTLRAIDGEDETIAELEMIVGFDDDLAGEATRVANRLHGLLTQIHPSLERVLGPRLQHPAVLTQLERFGSPAQIRKAGRRRLVTLLRPKAPRMAERLVEEIFAALDEQTVTVPGTEAAALIVPSLAGSLTAVLDQRKLLAGRIEELREAHPLSKVLTSMPGVGVRTGARILIEVGDGSTFPTAGHLAAYAGLAPATRSSGSSIRGEQPSRRGNKQLKRAFFLSAFAALGDPASRAYYDKKIAQGKHHTQALLCLARRRADVLFAMLRDGTFYEPQPTAAR

SEQ ID NO: 78676 - protein, 314 aa, unidentified
MFVGIDVAKRQLEVAVRPSGEHWSVGTDSASVAGLVERLRALPVTLIVLEATGGYETPVASALAAAGLPVAVVNARQVRAFARSLGKLAKTDRIDAGVLAHFGEATKPEVRPLRDEEAQTLQGWLGRRRQVLEMVQAEEQRLRMATRAVRPQIQAHIEWLRAQLRDADGQLRTLIRSTPIWREKDDLLRTAPGVGPVLATTLLSELPELGRLTRQQVAALAGVAPLNRDSGEYRGRRCIWGGRARVRTVLYMATVAAVRCNPVIRAFYTRLCAAGKPRKVALTACMRKLLTILNAMMHRKAPWQPALSASRVLT

SEQ ID NO: 78677 - protein, 318 aa, unidentified
MKALRTHVAGVDVHKDMLAITIMIGAGDEDPRVEHLECSTMTDDLRAMGIVLRDKGVRDVAMESTGVYWKPVYNVWEPLGLKVIIGNATHIKNVPGRKTDVKDSEWIAQLHRFGLIRPSFVPEGVYQRLRLLSRHRTNLVEDLSRVKNRVEKVLQDGNIKWSSIVSETFGVAGVKILDLIADGVTNAQTLAASVTTKIKRKEDAEKALTNCLTTEHVFVIHELMVQYRDIETRILEVENGLVERMRPYAHLIDELDKIPGIDKILATGIIAEATADVSGFEDERKFAAWAGVASGNNESAGKKKDPNAGTATPTSENS

SEQ ID NO: 78678 - protein, 351 aa, unidentified
MKNDITVGMDMGDKKHHICILNAEGEVECRTTVTNTAAAIRKYFGKLDVCRVALEAGTHSAWVSRILEDMEFEVLVGNPRKLRMIWNSDEKCDERDAEMLARIARFDPGLLYPIHHKGAEVQNDLSIIKSRDMLVKSRAMLITHVRGVVKSTGERIGQCSTEAFHKRLCEDMPKALEPALEPIMKNIEDLTLRIRHYDKLIEKVAEEKYPEVAAVRQITGVGALTAMAFVLTVENVERFTKSRDVGSFVGLTPRRDQSGQTDKQLRITKAGDAYLRRLLVGCAQYIMGPFGPDCDLKRFGMRLAERGGKNAKRRAVVAVARKLAVKMHRLWKSGETYEPFYTETRKEKKVA

SEQ ID NO: 78679 - protein, 343 aa, unidentified
MQTITTIGLDIAKSVFQVHGVDAAGQVVIRRQLKRRYVLAFFQKLSPCLVGIEACASSHHWSRELKALGHTVRLMPPAYVKPYVKRQKNDSTDAEAICEAVARANMRFVETKTPEQQSCLMLHRTRHLFIRQQTAVINSIRAHLAELGIVAPVGRKGVMELLHVVADPSDKRVPEVARACLAALGIQLLSLKEQIVRFDRMIMAWHRSNEASKRLQYIPGVGPMLATALVASLSDPKAFRSGRNFSAWIGLVPKQHSSGGKDRLGSISKQGDRYLRSLFVAGALSVIRYAKIHGTKHRPWLTALLARKPTKVAAIALANKLARMAWAMMAKGERYKTPVALAA

SEQ ID NO: 78680 - protein, 331 aa, unidentified
MTLKNFVGIDVSKLTLDVFIHEKQVHKQFRNEENGFVLLIQWLEKQTGQSHDSMLICFEHTGLYSLLLANFLEEKQISFSMVPALEIKRSLGVARGKNDIVDSKRIAEYANRFRDKISLTKLPAKDIGKIHSLLTLRDRLSRHLGMYKLTKDETIRVINKNDLPELFSSYENIIPFIKLEISRIEVAIRNIINSNEELRTSFKLITTIKGIGLIVAAYLIVYTHNFTRFDNWRKFACYSGIAPFDFQSGTSVRGRTRVSSIANKQVKKMLHLAAICAMHTDTELREYYHRRQVEGKTKMSTINIIRNKLIARAFAVVRRGTPYVDIKRYVA

SEQ ID NO: 78681 - protein, 335 aa, unidentified
MHYLYYVGLDVSKETFDASLVAFEDANEMAHRKFANSRKGICSCLHWVEKRHGFLLDDVIFCAEDMGSYISEMAVCASDRTLNFNFSLISPLVIKYSMGIARGKTDRVDARRIAEYAITHYRKIALYLPAEKELCQLRTWLILRAHLAKQRVAKLVLLEKLDYKEKFADVSIQRSMLQEEIAYAETHMKTIEREMKELIAADSNICRNYKLLTSIKGVGPITAIVMLCSTLNFTKITDHRKFACYCGLAPFEHSSGTSVRGGCHTSSMANRDIKVQLNRSALIAIRCDPQLKAYYERKVAEGKHKFSVLNAVRAKIAARCFAVVRRGTPYVALQI

SEQ ID NO: 78682 - protein, 338 aa, unidentified
MNKFNHFVGIDISKKTFDAALIIGSDTTNIKPQVFKQNALGFAAFSQWLDYYSITKDEVLICMEHTGLYTYGLIDFLIAAGFNLWVEMPLRIKKSMGLQRGGDDKAAAIQIALYTYRYKDQVSLWKPEQAIVLQLRQFSAQRDRLKLALNQLMIPLQEIADCYHDAAIVKVQLKLQAPVIKAIEKSIASVETQIDTLIAAEPAIQATIARVSSIKGVGKQTAIHVFIYTKGFTTFSSGKQLASYCGVVPFTKTSGTSVRFKTQVSPFANKHLKKLLHLCAMAAIQHNDELKHYYNRKIAEGKNKMSVVNAVRNKLVQRIFAVVRDGRNYVENYQYQRA

SEQ ID NO: 78683 - protein, 366 aa, unidentified
MKKVYIGIDTHKETNTVALAFAGKEPPELYGKASTDLRVFEATLRRIMKKDGLGKEDIALCYEAGPTGFVLARRLIKLGFECIVVAPSKIPSPSGDRVKTDRRDARKLARLYRAGELTGIHIPSVEDEVIRDVCRGRTDAVNTMARTKKQLLSFLLRNGYRYKGKAHWTEAHMRYLRELVLADPAQKIILEEYLQRIDFAVKQVERIDDQMKKLLQTWSRKPLVEALMGFRGFKQTAAMVIVSEIGDFKRFKHPKQLMGYLGLTPSEDSSGGRRRQGSITKCGNGHARWMLVESAEHYRKPPKISKALSVRQEGLSREVRAISWHAQNRLSKRSYKLTMRRIHPNKIRVAIARELSSYIWDLAQIV

SEQ ID NO: 78684 - protein, 364 aa, unidentified
MKIIGCDFHPSFQQIAMVDTATGDTIERRLLHAGGEAQRFYESLTGEVVVGIETSGNTLWFERLLGKLGHELLIGDATAIRAASPRNQRCDPRDAKNILQLLLEKRFPTIWVPTMAERDLRQLLKHRHTLVQMRTRAKNQLQHIALNQGLQKKSKLWTKAGIEQLKSLELEPWTKRRRDDLLQILEQMDEHIRELSKAVEVEAQRWPKAVLLMSHPGVGPILGLATVVTLGDVSRFPRGKHVASYLGLIPREDSSGEHRRLGSITKQGNSFMRFLLVQAGMSAARGDAELGRVYKRLAQRKHHGVAKVAVARKLVLRLYWMLRTNKPYPEVVRMQGSSSHSVAEVMADRLSERPASRCSSHPAP

SEQ ID NO: 78685 - protein, 329 aa, unidentified
MMAQSEVVVVGIDVAKDKVDACIRSLSQRQTFSSTAEGQRALIRWLRKHRVGKAAMEASGGYEQDWAKALREARIEVRIVDPKRVRSFARSAGRLAKNDPIDAEMIAWFAETFTEAPGQAYDAARERLVKIVNARQGLLDLQTNLKNSGEHSVPDVVQKMQARLLKKIAVEVVKLETAIAAQVKATPHFAELAEIIESVPGLGKITSAGLIATMPELGQVNDNIVAALLGVAPYDDDSGQRRGNRHIKGGRRRARNLFYMPCMGAATRHNPVLKAFYDRLVAKGKEKKVALTACMRKLIVILNTMIARRQKWDANRYKVSDSARLPPSA

SEQ ID NO: 78686 - protein, 315 aa, unidentified
MRSTVAQSVGVDISKDTLEVAIHPAGESFRITNNPEGHRALIKRLKGFDIARIVFEATGAYHRLFQQALVEAGLPWVKVNPRQARRFAQATGKLAKTDRCDALMLARMGTALDLEPRVPASKTVEAMKELVNARDALVKDRVAALNRQAIAVSPLIKRQLVQRLRQINGQIEAIDKHLKMLRNADSDLCQRFDILTSIPGLGEVTANVLVVETPELGRLAHGQAASLVGLAPVPRDSGKTHGKRSIRGGRPRARRALYMPALNAIRCNPEFKAKYQAMIKAGKPTKVAIVAIMRKLLILANALIRGQRKWAPAAP

SEQ ID NO: 78687 - protein, 343 aa, unidentified
MKVTRVGLDIAKEVFEVHGVNDHGKAEVQRQLRRARVLEFFANLEPCLIGMETGSGAHCWARELQKLGHTVRLMAPRFVKPYRKNDKSDRNDAEAICEAVGRPNMRFVAVKSEEQQVVLSVHRMHAGLKSERDAMANRLRGLLAEFGIVLPKGAARLRSGLPALIAQERVPVLMNQALADGWTRLRELDAQVNQHERQIRALALQSEPARRLMEARGIGPMTATAAVATIGDAKLFKNGRAVTAWLGMVPRHSGTGGKIWMGSITGRGDTYLRTLFVQGARSVMNTTRGKQDPLSLWVERLRARRGDNITAVALAAKNARMVWAMLARGESYRSPQAAQGAAA

SEQ ID NO: 78688 - protein, 337 aa, unidentified
MERQYVGIDLHRRSSTIYRMNAEGEMLGCVRIPSQPLELAQAMAEAGDHPEVVLESAYGWYWAADLLQELGANVHLAHPLGNNWGHRRVKNDERDARDLAAMLRLGRLAEGWIAPPETRELRELVRYRFRLVGQRSSAKAQVHGVMAKNGILPALGDMWGKGGAAQLDALELPRAYATRLDSLRDLIAFLDNEIDIFDRTIHHQLRDDPGYNVIQTIDGIGKVLGAIFVAEIGDVTRFSSPKQLCSWAGLTPKHRESDTKVRRGPITKQGSPLVRWAAIEAISKYRGGEKLRADYLRIAEHAGRFKARVAVARKLLVLVYYGLRDGEIRCLESHEAA

SEQ ID NO: 78689 - protein, 355 aa, unidentified
MNKIKTNFEGQTIYVGMDVHKDSWNLGIHLNDIFLKNVHQKPNPQIMVDYLHKNFPGALYKAAYEAGKFGFWIQRQLTNLDVECLVVNPADIPKSQKDSLQKTDPRDARNISLRLQSGFLRGIHIPDEQQEADRVFFRHRKKIWKDLTRCKNRIKGLLAFTGIDIPEPYDNASWSHNFINWLKALDCKQSPRRRALDFQIRQMEFMRKELLSISNDIRKMMREQRYKTNYYLLRTIPGIGPLTAASILVEIGDIKRFNTFSHLNSFIGLLPMEHSSGQTENKMSLTVRKHRQLRSDLVESAWTAKRTDPAMALYFDQQIKRKDSKVVIIKIARKLLNRVRYVLLNQQPYEYGIVK

SEQ ID NO: 78690 - protein, 365 aa, unidentified
MGGAGMGEGTTVGLDVHARSVVACVIDEQSGELRIQRAPHRNEELVSWIRDLTSPAQVAYEAGPTGFGLARALEAAGIECCVAAPSLIPRSGASRSRKSDAGDAEQLARLLRAGELTPVRVPEPAEEAARDLVRAREDARADLMRARHRLSKLLLRHGLVYEAGRAWTQAHDAWLRRQRPGEAGARAAFDDYYGAVLGAVLRREALDERIAELAAEPRFAAVVGRLSCLRGVGTLTAFALCVEIGDWHRLRGATIGAYLGLVPSESQSGARHARGPITKAGNSHARRLLVEAAWHHRPPLRPSAPIARRRASQRPEVAARAEQAGLRLHHRWHQLERRRGLRSTIVATAVARELAGWCWSLAVME

SEQ ID NO: 78691 - protein, 352 aa, unidentified
MKMPPPAPSEEGAVIKYVCGIDIGSQSCAGCICRPDKSVVIKSITFANAREGWQIWEEKLNQLDAPAGQILIGMEATSRYGENLYHELEQRGYVLRLLHPGQTHHFHQQRALRAKTDRLDAMTIARTLLSGEARIGYVPSDQVATYRELVRLHTQLSDTAASYQNEIQALIVVLFPEFTQVFADPCLPTALSVLKAFPSAQALVEAGVDPLFQVLRAQKASHYGRPTAKKLVALANQSVSSGRARAGRSTSLRILCDQLEHTQANLARLNAEIEHLLNTDPGVKGLQQVPEFGPKTVAVLRAELGDVQRFSRTDEVIAYGGMDIEIKESGLWKGKAKLSKRGSGPARDASST

SEQ ID NO: 78692 - protein, 322 aa, unidentified
MSGSDVTVGIDVASEHVDVAFHGAEVPASLRQVSNDADGHSALADALVALRPGLVLMEATGGYEAALACALQAVGLRVAVVNPRMARDFARAMQRLAKTDRIDAATLAQLADVLLRRADCERFIRPLTEPEQQDLAALVTRRRQLVTMRLSERQRLRLARAVALPSIEATLEFLAKQLNDVEASMVEHVNRHHSQMAKVLQGVAGIGKVSAATLIAELPELGRMNRRQICALVGVAPYAKDSGSSHGRRRISGGRFEVRRSLYMSTLTAIRFNPVIRGFYERLVTAGKLKKVALVACMRKLITHLNAIARAYLRTHELPQTA

SEQ ID NO: 78693 - protein, 411 aa, unidentified
MENVFACCAGLDIHQKSVEACVRRLEPAGPLHQQTRHWGTMTRDLLAMADWMAAQGVTHVAMESTGVYWKPIYNILESRFTVLLVNARHLKQVPGRKSDVRDCQWIAQLLQHGLLKGSFIPPRAQRELRDLTRHRTQLVEEKTRTVNRVHKVLEDANIKLASVATDILGVSGRAMLEALMEGQEDPVKLADLAQRQMRGKIPELEKALEGHLTEHHRFLLRLLWKELAQQEELIAELDRKIEEHTRPFADEIERLDAVPGVDRRVAEVVLAEVGSDVKPFPTHSHVASWAGMCPGNEESAGKHLRRRITPGNRWLKRSLVQAAWAASHTKNTYLASQYRRLAGRRGRKRALVAVGHSILVIFYHMLKERTTYKNLGGDFFDRLEPERLTRYYVKRLEDLGHKVTLESGVPA

SEQ ID NO: 78694 - protein, 343 aa, unidentified
MDYFAGLDVSVKDTSVCVVDDTGKITREVRVASEPDALLAVLRNPTYRFKRIGLEAGPLSQWLFSALAEADLPVICVETRHMRAVLKAQINKTDRNDARGIAQMMRVGLYRPVHVKTLRSQRLRMLLTHRKLLQSKAIAIENDLRATLRNFGLKVGMVGTIKFEARVKELVENFPDLAALVEPLLVVRRVLREQISILHRRVLAAVRNDEVCHRLMTVPGVGPVVALTYRATVDVPARFRKSKSVGAVLGLTPAKDQSGERDRPGAISRCGDEMMRTTLYEAAQVMLLRSAKWSWLKAWAMKIARHRRMKKAIVALARRLAVIMHRIWTDGTEFRWTREAAAA

SEQ ID NO: 78695 - protein, 394 aa, unidentified
MKLVGIDIGKNSHHFCVMDKETGELNVTPSSFSNNKEGFDFLINSLKPYSKKSILLGMEDTGHYHVALLKFLLSNGYTVALINPKTTDLTRKMEGGITKNDKLDTITICVVLDTPERKKQYRITKVDRFDLYEQRQLTRHHHNLKEELNIYCNRLQKSIDLVFPEFNTLFSSKYGVVYMNLLKAFGSAEAIASTDIRTIRKCFEIKGRGGRISLTPEKLKECAKNSIGISSEVETIQIKDLVSQITLIKEQIAEIDKKIEEFSIKINSPILSIPGISHFSGTSILAELGDIGNYSKPSQIIKFAGVAPYHYESSQYNAQHTGITKKGSKYLRKTLYQIILTVINNNPVFKKYYLLKISQGKGHRCAQGHCIRKLLRIIYHLLETGQSFDPALLR

SEQ ID NO: 78696 - protein, 414 aa, unidentified
MELVYERCCALDVHKRQVTACVHVPDRQGKRTELRAEFQTMTPDLLAMRDWLKGLGVSCVAMEATGVYWKPVYHLLEDDFELLLVNAQHVKNVPGRKTDVGDAQWLCQLLEHGLLRASFVPPKPIRELRDLTRYRKSLVWERAREANRLQKLLEDANIKLSDVASDVLGASGRAMLAALCEGNNDPAALAELARGKLRAKLPALETALQGRFSSHHALLLSHLLSHIDYLDQSIDSLSAEIEERLDPFAQQRELLCTIPGVAERTAEVILAELGPDMGRFPSHRHAASWAAICPGNDESAGKRKTGKTRKGDRWLRTALVEAANSAAGRTKDTYLRAQYLRVKRRQGHKKAIVAVAHSILVAAYYILRDQVPYQELGGDFFIRRQDQERLTQRLVRQLERLGQRVTLEPALQGR

SEQ ID NO: 78697 - protein, 385 aa, unidentified
MQTPIDLNQSRIVLKQDNTLIAVIEMSLSSWLVAGIVPGVERQPLKKLAIDESALLKLLNRWREEAEKAGRKVERIAVAFEAGRDGFWLARWLRARGIEAHVIHASSVAVSREHRRAKTDRLDTELLKRAFLGWLRGERDHCKMVAIPTIEDEDAKRPNRERERLVGEQTRIINRMKATLSRLGIRGFNPKLKKAAERLKDLRTPEGEPIPPNTLAELRRDMERRRLVGDQIRQIEDARLERLERMPNEGPHAMVRLLARVIGVGIETADMLVQEVLSRTMRDRRAVARYAGLTGAPDESGAKRREKGLARSGNARVRRGMIQLAWRFLMFQKDSTLAQWFRARTENARGTRKTMIVALARKLLIALWRLVTTGEVPAGVVLRAA

SEQ ID NO: 78698 - protein, 361 aa, unidentified
MAQAKTWVAFDVHVSGVVAAMLDRDSGELRVRRLPGSSDEVAAFAGTLAGPVRATYEAGPTGFVLARKLRAVGVDCVVCAPGLIPRGATDRVKTDRRDAERLVRLLVAGELHRVAVPSVEEEALRDLVRAREDLRGDLMRARHRLAKLLLRHEVRFDGPQANWTQAHLGWLAGVRMGQPASQRALEDYRGAVHALMVPREQLEAEIARALPESPWAQTARRLMCMRGIDTLTAAGLCAEIGDFRRFQHPAQVMSYLGVTPSEHSSGERRRRGPITKSGSQHARRLLVEAAWHYRRAPRVAGSLARRQRDGEPEVIALSWKAQRRLHHVWARMEARNKRRTIIAVACARELAGFCWAVATTD

SEQ ID NO: 78699 - protein, 407 aa, unidentified
MITCGIDWAENHHDVALVDEAGQLVAKRHIGDDAEGYRQLLNMLAEAGDSPKNPIPVAVETSRGLLFACLRSTGRKVYSINPMAVARYRERYRVTRAKSDHADAMALANILRTDADVHRPLPADSELAQAISVLARAQQDAVWNRAQLNNQLRSHLKQYFPAALAAFQVRGIGLDSREARTVLAAAADPTAAARLTRAQLRSLLRKSGRQRNIDTWTERLRTIFTGDYLHQLPLVEQAMGHQTTALVRQLDAACRAADDLAGAAAEAFDQHPDAEILSSFPGIGPLTGARVLGEIGDDRSRFRDARALKAYAGAAPITVASGKSHAVHHRRVKNQRLAATGYVWIFGALPSPQVKEHYDRRRARGDRHTAAMRHVFNRLLGCLHHCLATGQKFDPTKAFPALAPATT

SEQ ID NO: 78700 - protein, 405 aa, unidentified
MGAAGKEAPSGFMPPMERLMTQPNDLSRSLAPFVQGRTLVAVIELSLSSWLVAGVVPGVERQPLKKLEPDEAGLLQLLQRWRNEAAKSGCTIDRVAVAYEAGRDGFWLARWLRGQGIDVHVIHSASVAVSREHRRAKTDRLDTAMLLRVFMGWLRGERGHCGMVSVPTIEEEDAKRPHRERENLVGERTRIINRMKAALVRLGIRGFKPELRRAPKKLDGLCTPEGLPIPPNTLEEIRRDLARLAMVREQIEVIEQARLVRIEQAPETGPNAMVRLLASIVGVGVETADMLVQEVLSRNLRDRRAVARYAGLTGSPDESGSKRREKGLAKAGNARVRRGLVQLAWRFLLFQKGSALAQWYRVRTGAQGVRKTVLIVALARKLLIALWRMVTTGEVPHGVVLRAVA

SEQ ID NO: 78701 - protein, 408 aa, unidentified
MEVIHEKCAGLDVHQQTVVACVRLAHGGTVHREVRSFGTATRELLALADWLTAAGCTHVAMESTGVYWKPVWHVLEGSFELVLANAMHIRNIPGRKSDVNDATWIADLLAHGLIRGSFVPPAPIQELRDLTRTRKQLVREIAQHTLRIQKVLEDANVKLTGVVSDILGASGRAILTALVAGETDPERLVALTTGRLKAPRAVLLNALHGRVTAHHRFLLQLHLTQIDALETAVREVEARVGDALAPFRTAVAHLITMPGISHTVARVLLAEIGTDMSRFPTAGHLLSWAGLCPRLHESAGKRLSTRVRPGAPWLKTTLVQAAWAAVRVKDSYLRAQFLRLKTRRGPKKAILAVAASMLTAAYHMLQRGVPYHDLGATHFDRRDKAKLTRRLIRRLHDLGLTVEVRPAA

SEQ ID NO: 78702 - protein, 415 aa, unidentified
MIPAVVERCAGIDVGKKTLAVCVMTGAANEEPQAELRKFGTVRAELIRLREWLKSAGCTHVVMESTGCYWKPILNVLEDDPEFQLHIIVANPQQVKAITGHKTDPHDARWLAHLLRHGMIRPSFIPSRAIRDLRDLTRRRKQIIETCAEERNRIQRVLEDANVKIGDVLSDVFGLSGQLMLEALLEGKATHVEIAQLARSGARKKISELEAALEGHQMRNTHRVLISNALRHMAFLEREIDQLDSEIATLIREAGLEPQWKLLQTIPGIRETAAATMLAESGGDMKQFPAPSNFSSWSGVAPGNNESAGVKRRAPTLRGNPHMKAALVESGWSASRTKNSEFQCHYERLKQRIGHRRAIVAAAHSLALVVYQVLATAQPYQPRQPGFRPRELNRLRRHHSRRLRNLDKWLTADVV

SEQ ID NO: 78703 - protein, 314 aa, unidentified
MKDQAVFVGIDVSKDRLDVFVRPQEEFFFEPYTKQGISLLVERLAKAQPDLVLLEATGGLESRIVAAMGKAGLPVAVINPRQVRDFAKATGRLAKTDRIDSKAIAHFAEAIHPELRQLPDEEQREMSALMSRRSQITEMIVMEKNRMHTAASIVEGSLEAHLAWLRDEIKRVDAKLDDFIEKTPALRRRDEIVRSAPGVGPVISKELVSHLPELGALNRKEIAALVGVAPFNSDSGKQKGKRMVWGGRSKVRSTLYMGALVATRFNPAIRTFYQRLLEMGKLPKVALTACARKLLTILNAMVKNDTLWGEKQHA

SEQ ID NO: 78704 - protein, 412 aa, unidentified
MRLFAGDDWAEDHHDIEVMDEAGRVLAKKRLPEGAAGMAQMHGLIGQFVPEDDMDSAEVVIGIETDRGPWVAALIAAGYTVYPVNPLQASRYRERHHVSGAKSDAGDAHMLADMVRTDSHQLRGAAGDSPEAAGVKVLARTHKTLIWERTRAVQRLRHQLREYFPAAIEAFDDLDAPDTLELLGKAPEPGRAAKLTRAQVSAALKRARRRNIPDKATVILAALRSEQLGQPEALTAAYAATVRSLIAVITVLNEQVKELQGQVGEHFGRHPDAEVYLSQPGMGKILGARVLGEFGDAPRRYRDGKARRNYAATSPITRASGKKKVVAARFIHNDRLVDALNAQAFAALGASPGARAYYDELRAREIEHNDALRRLANRLVGILHGCLKTGTLYDEATAWGHRQNLPQSSIAA

SEQ ID NO: 78705 - protein, 377 aa, unidentified
MTETTQDQYSTLPTLYLAFELSNKKWKLGSSIGLGQNPRERTIDAGDLQALEEEVGRAKERFRLPDDARVVSCYEAGRDGFWLHRYLLTAGIENLVVDSASIEVSRRKRRAKTDRLDLDKLLRMLIRFDWGEEKVWSVVHVPSVEAEDRRHLHRELATLRAERTRHSNRIKGLLVGQGIRMSIKADFLERLEEVRLWDGTPVPSGLRARLEQEFSRLVFTQQQIKSLEARRRELIRRAEDECVEKVRQLLRLRGIGENSAWLLVMEFFSWRQFRNRRQVGGLSGLTPTPHQSGDEGQEQGISKSGNVPVRAMMIEIAWGWLRFQPDSQLSLWYQERFGQGSKRVRKIGIVALARKLLIALWRYLEYGEIPAGAELKA

SEQ ID NO: 78706 - protein, 439 aa, unidentified
MISQPRWFAGIDWASQKHQVCLLDAAGKILGERQFAHSGTGLAELCDWLVATSHGQPANIDVAIEVSHGPIVETLLERGFAVHALNPKQLDRFRDRFTVAGAKDDRRDAYVAADALRTDPQCFRKLALAEPLVVELRAWSRLTNELQHERTRLTNRMRDELWRYYPQALQLTDDFATDWFLALWQLVPTPDKARRLRESSLARLLKNHHVRRIDAATALRLLRQAPLVVAPGTTEAACAHIRSLVGRLALVNRQLRQAQVKLDALSSQLADTGDDAPGQSNEPRDAAILLSLPGVGRIVLATLLAEASEPLKARDYHALRALSGVAPVTRRSGKHTLVVRRLACQHRLRDAVHHWARTATQFDPTIRQRYDALRQRGHSHNRALRTVGDRLLAVACAMLRSATLYDPKHQRQSGEGLNPPSPLRTRAAIGSPACTAIPL

SEQ ID NO: 78707 - protein, 356 aa, unidentified
MLHLFNKSGESIMTNINVLGIDLAKNVFQLHGVDGQGKAVLKKRVERNKLSEFASNLSQCTVVMESCGGSNYWARVFHKSGHNVKLISPQFVKPFVKTNKNDANDAEAIVEAASRPSMRFVPIKQVEQQDIQSLHSVRSRLVRNRTALINEIRGLNLEYGIAIPMGAVKVKKHLRAVIDNQRNELTALSRELMEELYNELIEIEEKLKNMEKKIKSICKENDQCRRILSIPGIGELTATAIVAAVPNANEFENGRHMSAWLGLVPRQSSSGNKQVLLSISKRGDRYLRTLLIHGARAALSHYKNTNNKYGEWLTNKKAMLSFNKAAVALANKNARIIWAILKTGKEFDANQKWGVA

SEQ ID NO: 78708 - protein, 389 aa, unidentified
MYYVGIDISKYKHDCFILDSSSNVVVRDFIFSNDLDGFNSFLSILESFGSPENIKIGFEATGHYTSNLKRFLENTHYSFMESNPALISKFIHSQTLRKTKNDAIDSQSIARWLMTVDYKPYPSGFYHIYSLKSLTRLRDSFVRQRSLYMVKLTNVLDHTFPEFKPFFGNRFSKTALFILDKYPAPSKIMEIPDSDYDELRCISRGKFSFAKLIMLRDLAKNTVGESNDIFELEITSIINLYNICNSEISKMDEEITSLIYELHPHVLSVPGIGPITAAVITSEYRDVKRFSSPDKMLSFAGLEPGYYQSGTMEFQGKMVKRGSSQLRCTLMNCTLPLIRFSPVFATYYHKKRQEGKPHRVALSHVAKKLLRVIYKLEINDVDFDESKLR

SEQ ID NO: 78709 - protein, 309 aa, unidentified
MKQPKVYVGVDVAKASLEVACGQEQWRVSNDLAGTKALVKRLGQIAGTVQVICEASGGYERALIQALHRGRIAVSLVQASRVRQYARASGILAKTDSIDAQLLCRFGRAIEPEATTAPNPEQDKLRELESQRRHLTRLLVAHQNRSAQLTHPPLLRLSKSFRRHVQKQIDQIDRLIGQLIARSEELTAKARKLTAVAGVGPRTAALLLAQMPELGELNRREAAALAGLAPFNRDSGLVHGKRAIFGGRRAVRTGLYMAALVATRHNPILAAFYQRLRTAGKPPKLALTATMRKLLIVLNASLKPLPLAT

SEQ ID NO: 78710 - protein, 411 aa, unidentified
MAYFVGLDWASQEHAVCVVDAGGAIVARFAVAHSAAGMAELSTRLEKLAAPGELRVAIERPTGLIVDTLVERGFVVVPIHPNAVKAARPRYSAAQGKTDAGDAYLLADLLRTDGHRFRTLTPLSDETKALRALVRMRDDLVGQRVALASQLRCLLEQFWPGAMVVFTDVDSPIALDFLDRYPTPQSATALGQKRMAAFLARHSYSGRRSAAELLERLRGAALGTAGELEADAKGECVRALVAVLRPLVTQIATLTSAVEHAVTAHPDGKIVTSLFRSGRVCAAQILAELGDDRTRFESADHLAAEAGVVPITRESGKHRAVAFRWACNQRLRAGLTTLADITRHHQPWAKAIYTRARARGCEHPHAVRILARAWCRVIWRCWQDRVAYDPTKHGAARNLATTLRAHDQEAA

SEQ ID NO: 78711 - protein, 386 aa, unidentified
MTKKITNPEILAIRAAAEVDPACGRVWVGLDVGLKSTSVCVLDQDGKVVHHCSMKTDPTEIGRYLAKNFASNVAVVGMETGAMSAHLAGSLRRQGYQVAVMDALQVHRVLSLKRNKTDTNDARGIAEITRTGRDYLTEVYVKSAACFEVRAQLIMRHRLVQQRLANENMIRGLLRVYGGRVEPGAKSSATYRDRVVEQLLVIQDREGINLRPRIFPILDLCERLQADAVRIETELEALAAANPVCRRFMAVPGVGAITALSFFTAIEEPSRFRRADDVAAYLGLTPRVYQSGDSLTHGKISKMGNRLTRTHMVNAATVLLSATKSFSSLKDWGVRLAKKVGFNKAKVAVARKLAVILFGMWRDGTHFQFKAETVEPHRQMMQAAHA

SEQ ID NO: 78712 - protein, 419 aa, unidentified
MNKIETKKQRIVNDKTLIVAIDIGKATDTGYCRCPSGKDIKPFEFTNNSEGFRKLWDRICWEKTSNHLEEVVVGFESTGAYGEPLVHYLRQKPVKLVQVNPMHTKRMKELQGNSPGKTDRKDPKIIADIIGLGHALSVVIPEGAAAELRRLTLARERSIQRRTALYNQLQDLVFIVFPEFLQVMKDVKTQSARYLLRHYPTPQDMAACGSEALAVILKRVSRGKLGKAHAQMLYDAAAQSVGLQEGRMGILLEMEEILSGLEACNCFIEKLEEEMLPYLGQIPYSDLLLSVKGIGVITVAGLIGEVGDFRQFHTLREVMKLAGLNLFEISSGKHRGNRHISKRGRPLLRKLLYFAAINTIRKGGVMHACYQRYLERGMPKTKALIAIARKLLRILFALVRDHSQYIENYFPKEALNLAA

SEQ ID NO: 78713 - protein, 345 aa, unidentified
MEPMYYIGLDVHKRKISYCVKDSSGQVCAEGSLPATRFDLDRWMKALPQPWSAAMEATMFTGWIYDHLKPHAAALKVAHPLMLRAIAAAKKKNDRIDANKICDCLRCDFPPECYMASTAIRERRRTLRYRNLLVRQMVQMKNKTSMLLMEAGVSYNKQRLHKAGYFRELLATNPNIDEGLVPLLRLCRETVVRLQRTESALVRSLERDSLLMDRVERLMTIPAVGPITALTWALEVGDVQRFSSIKKAISYCGLCGAEKSSANTVQRTPLSKQRNKHLQTTLIEAAKMAPRISPELAMLYDKEKQKGNANRATLAVARKLVAYLMAVDRGQRNFQVVETSNCIAA

SEQ ID NO: 78714 - protein, 425 aa, unidentified
MNYKQNEKINQVKESTLVVGIDIGSTTQYARAFDWRGIELGKVFTFSNSREGFEAFKAWMRHLQDKYRKSDVIVGIEPTGHYWFDLGAYLEDEGILLVMVNPYAVKQTKELDDNSQSKNDRKDPKVIAKLVTEGRYSAPYTPDGVYADLRIMVANRKRLIREMTQIKNRFARWFAIYFPEYTDVFGDYEAQSSMLLLKKVCTPEAIVELGAEKINQIWRDAKLRAVGMKRATTLCETAKRSIGLKKGSSAARYEMKLLLEDYEYKKAQLDAVMEEIEKLCRKIPESEQMLAIKGIGVITVAGFLAEVGDVRRFESPRQIQKLAGLSLRENSSGKHKGQTTISKRGRSNLRAVLFNAAIPLIATNPEFKSLHEYYTTRANNPLKKKQSVIAISCKLIRVFYAILANGVTYDAQKMLSDIHRQPQAA

SEQ ID NO: 78715 - protein, 403 aa, unidentified
MNMNAVGIDVSKGKSMVAIMRPFGETVSPPFEIKHTASDIHSLVELINSVEGESRIVMEHTGRYYEVLAHQLSEANLFVSAINPKLIKDFDNDSLRKVKSDKADAVKIARYALDKWHNLKQYSVMDELRNQLKTMNRQFGFYIKHKTAMKNNLIGILDQTYPGVNTYFDSPARSDGSQKWVDFASTYWHVDCVRKMSLNAFTCHYQNWCKRKKYNFSQSKAEEIYGKAKELVPVLPKDDLTKLIIRQAVDQLNSASTTVESLRTLMNETASKLPEYPIVMDMKGVGKSLGPQLMAEIGDVSRFTHKGAITAFAGVDPGVNESGSYEQKSVPTSKRGSGTLRKTLFQVMDALIKTKPQDDPVYLFMDKKRSQGKPYYVYMTAGANKFLRIYYGRVKEYLSSLPK

SEQ ID NO: 78716 - protein, 384 aa, unidentified
MRTHGTDRVNATDVVLAVSLELAAAKWTVALHDGRRESPAIHTVAQPQAAARLQAVLTLIATQRQAWSLPDDVRVVVSYEAGQDAFWICRALQGRGIECHVVDPASIPVERHRRRAKTDRLDVRKLVINLRAWLRGERDRMHVVHVPSPQDEASRHLMRERGELQKEVLQHRDRMRKLLATLGCWEDVNSRKFATRLARREVRCHDGTPLPDELHQRLLRECERLAVAEQQFAALEKTYRDQLPEPARERIDRLTHLSGIGPVSGSRLALELFWREFANRRQVGACTGLVPQPYDSGESQVDQGISKQGNRRVRALLIETAWTWIRYQPDSALTRWFNQRTQGTGPNRRARRIAIVAVARRLVIALWRYLKDGVIPEGAQLKIR

SEQ ID NO: 78717 - protein, 355 aa, unidentified
MNGAKYIGLDVHQATISVAVLDSAGKLVMEAILESKAETILQFIHGLRGSLHVTFEEGTCAAWLHDLLKPHVAQVLVCDPRKNALIKAGNKSDRIDARKLADLLYLNKLNPVYHGETGIRALKEAARSYLALTRDTTRVMNRLKALYRSWAIPCAGQRVYAPRYRSEWLAKISQAGVRRRAEIYYQQLDALRSLREQVRRDLLVEGRKHSAMKLLRQIPSIGPIRAVLLIALMQTPHRFRTKRQLWAYCGLALKTSTSGEYRIVEGQLKRSKKFLAIRGLNQNHNHDLKNIFKGAATRVAAVPGPFQEFYAGLVARGMKPTMARLTLARKIAAITLIVWKKGVRFDAEYLKQQAA

SEQ ID NO: 78718 - protein, 351 aa, unidentified
MKYYTSATEYNCGIDLHSKQMYICVMDREGSILLHVNIKGNDFDYFLKRAAPYLHDLTVVCECCFNWYWLADACCEAGIEFVLAHALYLKHIHGGKNKNDKIDSAKLAHLLRANLIPPSYVYPSQRRPMRALLRQRMSYVWERASILGHLNMNQQAEGLAPAPKRGHDRDVWEERILAQYADPLLRLAVECDMELVRSYDKRIACIDLKLEQLAKRHLGRDYALLKTVPGIGRVLALTILFEMDTVDRFATVKDFISYSRLVKGSVASAGKVKGLTGGKMGNAYLRWAFGEAAVIAKRNHPLLKPFSEMLVSKHGKFKGNAILANKLGRAVYHMLKKGTAFDAELVVGSSI

SEQ ID NO: 78719 - protein, 370 aa, unidentified
MGEYSEAFVAFDTSKTKHAVAIAEGERGGEVRFVGDVASSPARVERLTRKLAGRYDKLHFCYEAGPTGYGLYRQIRELGHDCTVVAPSLIPKKRGERIKTNRRDAVTLARLLRAGELTAVWVPDATHEAVRDLVRARGAAAQDLRRKRQQLLSFLLRHGRIYGGRQHWTLAHRRWLAGQSFTHPAQQIVFEDAIQAIEEALARLRRLEQQLIAIVPSWSMAPVVAAYQAMRGASFLVAVTVAAELGDLRRFDNPRQLMAFLGLVPRERSTGDTVRRAGLTLAGNRHARRVLVEAAWSYRYPARVSETLRARLEGLPKPVRDIAWKAQIRLCARYRRLSAGGKKLPVVIAAVAREMAAFLWAIAGQVALAA

SEQ ID NO: 78720 - protein, 445 aa, unidentified
MSERTTAREAPCIRMTQDGAAVRATAKKVMKSWNEITHYAGFDWARDHHDVVIVDGQGQIVAEFRFPHSLEGWNQFGSRIQNYPAVAVAIETSQGAAVDQLLQRGCTVYPVNPHSARSYRERKAPSGNKTDHLDAWSLADALRIDGQQWKTLQPVDPLTQQIQLLCRDEIGLIEQRTALVNQLQQALSEYYPAALAAFDDWTRPSCWDFVLQFPTPEKLAAAGPRRWEKFLHTQKLWRPETAAQRMETFQNARQFCGSAAVTAAKTLLAVSLAKMLNALQDQLDEYRRQIQALFGQHPESALFGSLPGAGQKLAPRLLGEVGGDPKRFEDTANLQCVAGTAPVSFQSGQIHKVRIRFQCNKVLRHTVHLWAACCLPVCPWAEIYYKQKRQEGKSHACALRCLGQRLLKILWRMLQTRRPYDADLHTKNQQAHGSWVLKLMPKPSS

SEQ ID NO: 78721 - protein, 402 aa, unidentified
MNAVGIDVSKGKSMVAIMRPFGEIVSAPFEIKHTASGINSLVELINSVEGESRIVMEHTGRYYEVLAHQLSEANLFVSAINPKLIKDFDNDSLRKVKSDKADAVKIARYALDKWQNLKQYNVMDELRNQLKTMNRQFGFYIKHKTAMKNNLIGILDQTYPGVNTYFDSPARSDGSQKWVDFASTYWHVDCVRKMSLNAFIDHYQNWCKRKKYNFSQSKAEEIYGKAKELVPVLSKDAITKLIIKQAVDQLNSASTTVESLRTLMNETASKLPEYPVVMAMKGVGTSLGPQLMAEIGDVSRFTHKSAITAFAGVDPGVNESGSYEQKSVPTSKRGSSDLRKTLFQVMDVLIKTHPQDDPVYQFLDKKRAQGKPYYVYMTAGANKFLRIYYGRVKEYLSSLPES

SEQ ID NO: 78722 - protein, 407 aa, unidentified
MDVLHECCCGLDVHKKSITACIITPKGKEIKTFGTMTRNLIELVDWIKNSRCTHVAMESTGDYWKPIYNLLEVEDLQPLLVNAQHIKAVPGRKTDVKDAEWITRLLRHGLVQGSFVPDRDQRELREIVRYRRSIIEERAREVNRIQKVLEGGNIKLASVASNILGVSARNMLEAILQGEKDTEVLADFAQKKLKAKKDDLKLALEGRLGEHQVLMIEKQLGHIDYLDDLIKELDEEIEKRMLPFVEDLELLDSIPGVGRRIAQQIIAEVGTDMSRFPTPGHLCSWAGMTPGHDESAGKKKSAKTRKGNKKLRSALTEAAKAASRQKNTYLSAQYHRIAARRGKNRAAIAVGHTILSLVHILLTRKQAYVDLGFDYLEQRKKEIIVKQSIKKLESLGLTVTIREQTAS

SEQ ID NO: 78723 - protein, 364 aa, unidentified
MHSISNTELSSLEETRCQFNGSKADIKLGIDVHQEFYVVVMQEGGSNPKPPQRFAKGAFLYWAAKLKQKSGAEIYAVYEACGFGFSLQRQLSALAIQCYVVCPQKLDEANKRVKTDGLDAKALCLKLDRFVQGNRCALALVRVPTEEEEQKRAIHRQREQLVGARKRLEAQGRSLMVNHGFEPVQNWWKPRPFAALDVPQWMRELLSNSQPILVALQQKIAAQSVQLQCAAAPNQPCGLGKMTSVVLDREIGDWNRFHNRRQIASYTGLCPGEYSSGNTRLQRCVTKHGNPRLRAALVELAWRMVRFQPNYKAVRKWRAILAKGALATGAARKKAIVAVARQLAVDLWRVRTGRCKPQALGLVI

SEQ ID NO: 78724 - protein, 400 aa, unidentified
MLSIGIDVSKGKSTVCGMKPGGEIVYAPFEVQHTREGMLELVSLLRSSGEEVRAVLESTGSYHCPVVAALLENGIFVSVVNSLRMKRFCSQSIRKVKTDRIDAMQIALYGLAYWQELQPTKLPEDTYRELQLLARQYYQMTSLLIKAKVDFNAICDQVLPGMQELMSDHAGRHKLSDFVLRYRHTTHILEMGETRFRKDYCKWAEKKGYRNCERMAALIFATAQNGIPVLPNAPSTQIVITEAIRVLHTVEASRDAILTQMQALAKTLPEYSLVREMPCIGDTLAPRLIAEIGDVRRFHSKRALIAYAGIDAPPYQSGKFCANNRHISKRGNRYLRKTGYEVMQSYVMHKPANDPIFTFIEKKRGEGKSGKLAMVAGLNKFLRVYYGKVTELYRSLPAIE

SEQ ID NO: 78725 - protein, 355 aa, unidentified
MCGLKHQKEKRSMDYFAGLDVSVKETSVCVVDDAGKIVRETRVASEPEALLQVLTSTIYRFKRVGLEAGPLSQWLYSVLAEAGLPVICVETRHMRAVLKAQINKTDRNDGRGIAQMMRVGLYRPVHVKTLGSQKLRVLLTHRKLLQSKAIAIENDLRATLRNFGLKVGVIGTVKFETRIRELVANLPDLAALVEPLLIVRQVVREQLGILHRRVLAIVRDDDVCRRLMTIPGVGPVVALTYRVTVDVPARFRNSKAVGAVFGLTPAKYQSGENERTGAISRCGDEMMRMMLYEAAQSMLVRSTKWSWLKAWAMKIARHRGMKKAIVALARRLAVIMHRMWVDGTEFRWSREVAAA

SEQ ID NO: 78726 - protein, 456 aa, unidentified
MAKRKLKRTKPGVVNALEQINPNAAGIDIGAEEVWVAVPPDRDEESVRSFSTFTADLYRLAEWLKACGVDIVAMEATGVYWIPLFEILEARGFRVYLVNARHLKNVSGRKSDILDCQWIQQLLTYGLLNPSFRPPEEIVAIRSLVRHREMLVQYRSAHIQHMQKALTQMNLRLTNVLSDITGVTGLKIIRAIIAGEHNPQVLAGFREPGCKKSAEQIAKSLEGFYKREHLFALRQALELYDFYDRQLQACDAELEAMYQEFDPPEDPGTPPPAPHGGKRRKNQAYFDLAPALYRMAGGVDLISIDGLDALTVQKVLSEIGTDMSKWPTVKHFASWLRLCPNNKITGGKVKQRGVQPTKNRASIALRVAAASLKHSDSALGAYYRRMCARNGAPSAITATAHKLARIIYYMLKERKPYHDFGADYYEQQHRTRVLRNLSRQAAKLGYRLEAATPVPV

SEQ ID NO: 78727 - protein, 436 aa, unidentified
MRGCRCSMIMGFTKPIEHFNLQRKKVIIMNTLYVGIDVSSKSNVVYLMLPNGDKHSNFSVANSHEGSTQLVKRILSALTSHSLDTVLIGLEATSIYGYNLVYFLREDATLAPFNRKIHVLNPKQVKKFHDAYNDLPKNDYVDSFVIADCLRFGRINKEVYMGDYRYKALQNLTRARFFAVQNLVKEKQRFMNVLFKKYSTMTQEKVFSDTFSTTALAVYDEFESAEALANMDLHELTDFIIEKGKNRFPDPDAVAKAIQKAARSSYRLPKTVNDSVNQVLSISITSMKALESQIKEFDKAIKAQMELLPNVLISIPGIGPVYSAGIMAEIGDINRFNSQAALAKYAGLAWKQHQSGGFESEVTRLIPSGNRFLKYYLCEAAFSLVRCDKEYSDFYHLKYKEVNRCQHKRALALTARKFVRLVFRLLKDNRLYCPAK

SEQ ID NO: 78728 - protein, 379 aa, unidentified
MDFSTVARLPAGEKPATLFVALELSKATWLVALHSPAADKISLHRLAGGDTQGLLTLIERKRDQAQTALARPVHVISCYEAGYDGFWLHRLLCASGIDNRVLDAASILVDRRSRRAKTDRLDAAALLRTLMALERGEPRVCRVVRVPSPEHEDTRRRSRERARLVNERTQHTSRIKGLLMTQGIRDFAPTRRDWRERLDRLRTADGHALLPCLKAEIARECRRLWQVIDMIAEVEAEQHQVAAETTTGASQLSRLRGIGLTIASVLGNEVFFRNFQNRREIAGYLGLASSPWNSGSVSRDQGIQRSGNPRGRQTAIELAWLWLRHQPESGLARWFHERVGTSKGRIRRTMIVALARKLMIALWRYVTQGLMPEGAVIKA

SEQ ID NO: 78729 - protein, 335 aa, unidentified
MAADWKGEPMKEQQFVGIDIGLRDLAMSSWPSQQRLQVANDDCGRARMSEWLTAMSPQFVVLEASGGLEATLAAEIHAAGLRVAVVNPRQAREFARSLGRLAKTDRVDAQVLAQFGQSAAQSGRLRETRVADAAETELKELLARRRQLIAELVAETNRKPRAGKLVRKSIVQNIKWLKRLVEQVNNQLQDAVKASSLWQTRVNLLMTVPGVGPQVAMVLTAELPELGQLNRCQIAALAGVAPHAHDSGQFRGQRRIWGGRASVRCALYMAALVGSRRNQILRACYQRLLSKGKARKQALVACMRKLLVILNAMVKHDRAWQLPQQQFSPCPPNHA

SEQ ID NO: 78730 - protein, 391 aa, unidentified
MSMYFIGIDISKYKHDCCIISAANQKVVSKVIIKNNKAGFNELLTIIHSLANPADIRIGFESTAHYALNLELFLENSLLTFMEVNPVLISEYKKSKTLRRTKTDSVDCESIARWLMTVEYKPHSKGFYHAYSLKSLTRLRDKLIRQRSFYLVKITNVLDHTFPEFKPFFNERLSKTALYLLENYGSAEKMARMNSASYEKLRSVSRGKFSPQQFLRLKELAVNTVGVNNSIFDVELNSLLSLYKSLVKEIDTIKKEINQLIEEVHPHYMSVPEIGPLSAAVIYSEYGDISNFTNPGQMLAFAGIEPGINESGTESHGGKMVKRGSSQLRYTLINCCLPLIRFDMTFATYYAKKRGEGKPHRVAITHVAKKLIRVIYALESQDIDFNAQELR

SEQ ID NO: 78731 - protein, 362 aa, unidentified
MNTLARVTSAAQIEVAGGVDTHQDTHTAAVVDHAGRMLGDRTFPTTEAGYRQLLAWLGGFGTLRVVGVEGTGAYGAGLARYLMAQGQAIVEVDRPDRKTRRAAGKSDPIDAESAARAALNRVRTGLPKQRDGMVEALRNLRVARRSAVSQRADCMRRIKTLIITAPKELRERLRDLSNTQLLRLCTGFRPNLCLVGEPEQAAKVALRALGHRHAALSEEIAELEALIAPLVEQINPALLALNGVGPDSAGQLLITAGQNTERLHSEGAFAMLCGVAPIPASSGKTNRHRLNRGGDRQANAALYRVVLSRMRWDPRTREYVARRTTEGLSKKEIIRCLQRLIAREIYYVLRQPAATLVSAHAR

SEQ ID NO: 78732 - protein, 354 aa, unidentified
MKCKHTNNKAQAPKDLYAAVDLHGDNGYYCLIDSQDQAVYDKRLPNDLTSVLKSLEPFRARLAKGIAVESTFNWYWLVDGLQENGYAVQLVNPAKLESYGGMKNTNDRSDAYWLAHLQRLNLLPTGYIYPKEQRGVRDLLRRRMLLVQQRTTHLLSFQSLYERQTGKAISSNRIKTLAPAQVKELLEQPAATLMGQANLRMIEALTGEIATLEKAAEQAVKLSPDYQVVLTVPGIGRILGMTIMLETGPIERFASASHYTSYCCCVKAEATSNGRKKGENNRKCGNRYLAWAFIEAANYAIRFCEEMKRWYQRKLVRCGGKRALAIKAVAAKLCKVVYYLLKEQKPFEMKRVFG

SEQ ID NO: 78733 - protein, 325 aa, unidentified
MAKRITVCAGIDTGKRKLDVAIDGSCEQLQVENTAEGHKVLLEWLQRHKVKRIGIEASGGYEQPVVAALRRKRFVVVVFQPAQVRAYAKFHLQRAKNDKIDAALIAACTAAVKQIYPAPDPRLSPFAEQLTMIDQIGEDIMKLKNRIETCRNERIRAVWKEDIARLAKRERTELKALVAAIRQCPDLAERLELIHSVGGAGLPTAVAILVRMPEIGQLTREQAAALAGLAPYDDDSGDQVGARHIDGGRERLRRALYLAALPASFRWNPQLIALYQRLRAAGKEHKRALIACARKLLIFVNTVVARGTPWQGEPPAARTANPSTA

SEQ ID NO: 78734 - protein, 420 aa, unidentified
MKAKKKAKLDLIDEDTLIVGIDIGKRKHHARFINLRGYELGKVFSFTNNRDGMEKAIAEIEKAKKQNNLAKAVIGLEPSGHYWKASAHYLSSQGYKLALVNPYHIKKTKEIDDNCQTKNDRKDPILIAKLVRDGDFFNPNLSSGIYADIRRMYRLRLKAKKSLVRQKTALKILLDEYFPEYEDFFCDILGAASEYILRNYFLPREITKENILALAGKIKKVSRDKIKIDRILKLAEASKCSIGITTGLEAAILEKTYTLDEIKDLKQKLAYMDRRLKYYLDQTQYSKYLLSIPGVGIVTAAGFLGEVGDISKYNSAKEIIKLAGLNLVEISSGQKKGSKKLSKRGNSILRCLLYQCAVVAIAKNSQIKRYFSYQTKTKNKMKMLVAVQCKLARIMFALLKYKKYYDPEVVAKNTFEQAVA

SEQ ID NO: 78735 - protein, 299 aa, unidentified
MEYFVGLDVSLRSCALCVVDGRGKACLERELACEVDDIADCLEAFPHPIERIGFEAGALSRHLFFGLQNKGFDIVCMEARQVSAALSAMRNKTDKTDAKGIAQILRTGWFSPVLMKSREAHGLRALLSTRKALLKKTMDLANEVRGLLKIFGVRLPRTVKHGSFDGLVRPMIEMDEVLAHAIIPLLDARAVLFQHYLELDRRVKRAASQDEVCMRMMTVPGVGPIAALTFKAAVDDPSRFKRSRTVAAHFGLTPRRYQSGEHDNPGLISKAGDRDVRATLYAAANALLMRTMAGSQIKS

SEQ ID NO: 78736 - protein, 386 aa, unidentified
MSMYFVGIDISKYKHDCCIISAADQQIVSKFTVKNDKDGFEHLLTTLNSLSNPEDIKIGFESTAHYALNLELFLENAHHSFMEVNPVLIKEYKKSTTLRRTKTDSVDCESIARWLMTVEYKPHSKGFYHSYSLKSLTRLRDRLIRQRSFYLVKITNVLDHTFPEFKPFFNERLSKTAIYLLENYGSAEKMAHMNSASYDKLRCASRGKFSIQQFLRLKELAANTVGVNNSIFDIELNSLLTLYNSLCKEIKTLEAEITKLIEEVHPHYMSIPGIGPISAAVIYAEYGDISNFSNPGQMLAFAGIEPGINDSGTESHGGRMVKHGSSQLRYVLLNACLPLIRFDITKGSTYDTHSHSISTKNLIKISLENTFPDSIKPEIKLSLIHI

SEQ ID NO: 78737 - protein, 401 aa, unidentified
MKIAGIDVHKKVLMVVIVDGSAPVEKPTRRRFATMPSQLHQLLIWLQGQGVEEAVMESTAQYWRSVWLELEPHMRLHLAQAFSNRAPRGRKHDFKDAERLVRRQIANELILSFVPNGEQRIWRSMTRMKLQLTRDRVRLQNQMECLLEEMRIKLSIVVSNLLGASGLRILQALAQGETDPKKLAELGDERLQCTEEQLVDALTGRVQPMHREMLSLQLQRLQLIDQQMAQLNGMIAQAMKAHQDAVIRLAEVPGLGVDSAQQIIAEVGAQASTFPSAAELTSWVGTCPGKEESAEQNRSSRSAKGNKYLRRVLNQAAHAAVMKKGSYFQGVCSGVCCRDWAISPPSGPLLIVFAAWFGRSCMRACDSSNETAKLIPGPKSNVRKCSYAHFASSDTRSPSHP

SEQ ID NO: 78738 - protein, 408 aa, unidentified
MNPLYVGIDVSSKSNVAYLMLPDGSKHSNFSVPNSHDGSAQLVKHILSAVSSHSLDTVIIGLEATSVYGDNLVYFLREDAALVPYNRRIHVLNPKQVKKFKGAYNDLPKNDYVDSYVIADCLRFGRINKEVYLGDYRYKALQNLTRARFFAVQNLVKEKQRFINVLFKKYSTMTQEKVFSNTFSTTALAVYDEYDSAEALASMDLQELTDFIVEKGKNRFPDPDAVAKAIQKAARSSYRLPKTVNDSVNQVLSISITSIKALDAQIKEFDKAIKAQMELLPNVLTSIPGIGPVYSAGIIAEIGDINRFSSQAQLGKYAGLAWTQNQSGNFEAENTRLIQSGNRFFKYYLCESALSLVKCDTEYRNFYHSKYKEVNRHQHKRALALTARKFVRLVFRLLKDNRLYRAAE

SEQ ID NO: 78739 - protein, 405 aa, unidentified
MRKFNPAQHRIETASALGPVDEAVRQAGAVDRHAAYVGLDVHKETIAVAVAEPGRAAPIYRGEIANKPKSVAKLLAKLSEDYAGGLLLFCYEAGPCGYVLYRQILASGHHCQVVAPSRIPKAPGERIKNDRRDALKLARLLRGGDLTAVWVPDQEQERMRDLSRARDDMKGQERKARQQLNAFLLRHGYHWPRDKSRWTPAHESWLAGLKMEHPWQQVVLEEYIAAERAAGERVAQLNDQLMRALPEWSLAPVVDSLIALRGVDKLAAIVLLAELGDISRFDSPRQLMAFLGLVPSEHSSGGRRRQGGITLTGNAHARRMLVESAWSYRFPARQTKHLKGKARHASKEAKQIAWKAQTRLCGRYRTLTRTGKSTKLVCVAIARELAGFLWDIVRQEMPRLAVQEG

SEQ ID NO: 78740 - protein, 349 aa, unidentified
MTHMAETAQRVTAGVDTHRDQHMVAVLNERGAELGVRPFPTTLAGHRSLLAWLRRFGAVERVGVEGTGTYGAGLTRFLHAAGVTVVEVNRPNRQLRRSHGKSDPVDAVAAARAAQSGAAAGEPKTRNGAVEAIRALRVARRSARRSRTTALGQMRALLVSGPDDLRETLRGSTVSKLVRTAARFRPADPTTVAGATRFALRELARRVQSLEAESKRLDDLLEPLVSSTAPELLASYGVGTDTAGALLVSAGDNPERLRSEAAFAHLCGAAPIDASSGLTSRKRLNRGGDRSANHALWRIVMVRMVFDARTRAYVARRTAEGRSKREIIRSLKRYVARELYRCLPRPQPA

SEQ ID NO: 78741 - protein, 387 aa, unidentified
MSQTVAAVMPAPVDHERTLVLAIEVSNKSWVLAAQVPGLPQTKAKRTVDPEAQALLAAIAGYRGRAAATGRSIERVIAVYEAGWSGFWLARWLMRHGVEVYVVQPSSVPVDRRTRRVKSDGIDSELLLRTLLAWLRGEPRVCSMVPVPDEADEDARRCVRERSELISERVGLTNRIGAVLATLGVSDYNPLLQNRGRRLAELRTALGEPLPANAHAKIKRLLARLELVLTQIAELERERDAVVETEASDRAGKMIQQLTALRGIGVQSATVLVREAFVRRFANGKALGSYAGLACSPYSSGGIDREQGIGKAGNRRVRTVMVELAWLWTRYQPGAAQVCWFRERVGSTGRRVRKIMVVALARKLLIALWRFVVDGVWPEGAVLKPAA

SEQ ID NO: 78742 - protein, 346 aa, unidentified
MTYSTTVGVDLAKNVIQISVVSGRGKELSNRSLTRTKFAEFLGKQKPSLVAFESCASAHYWARAAKRHGHEARIIPAKAVMPFRQGHKTDSNDALAVAEAARRPNIKEAPMKTAEQQGLQAIQRSRQLLIGECTALSNHLRGILLEFGVAIPQGFASLLRALPEILEDGDNELPDLYRPTLHRMHQRLLELREDIESMTKEVDILVKQHPVCKRLTAIEGIGPIGALSLYAVMGSGKAFTKSREFSAYLGLTPRQYSSGGKTNIVGISKKVGNRRLRSILIQGARAYVYRMKEPRSLKDRWLKDLIERAGPNRAAVALANKNVRTAWAMVTQGTEYQRRLQLEMAA

SEQ ID NO: 78743 - protein, 341 aa, unidentified
MKNLFIGIDFSKEKVDVAIIFADGLTETAARVFNEFKTTVSGYKQLVKWVEQNSYGIDTSLWLFCGENTGGYSNGLCKFLYGRGYDMWLENAKSIKDASGLRRLKSDRADASMIAEYAMRNHDKAVMYKPLNESLEQLRELFLFRQTLVRYRCSFQVRREEKRLTMDKSPVKTMISQIGRHMVATLEKEIEKVNKRIADLIKSDDELTEVFTIVTSVPGIGTQNAVCLMVYTDNFRRFNYDSRKIACYYGIAPFGKDSGTSVHSDPHVHYMANRQIKAMLTQAALAAVNYNPVIARYYKRLVERGKKKQVALNNVKNKLVHLVSAMVRNRQLFSPEYKISA

SEQ ID NO: 78744 - protein, 283 aa, unidentified
MNNNTKKGSVTVLGVDLAKQSFQLHGVDNAGQVVIKKKLNRTQLSAFVANLPVCLIGIESCGGAHHWTRLFTEMGHTVRMMAPQFVKPYVKSNKNDSADAEAICEAVQRPNMRFIPAKSIEQQDIQSLHRIRSQLVARRTAQANQIRGLLMEYGIVIPQGISYIRKSLPDILEDGENRLSVLFREQLSGLYEEMVHLDERIEALELSLKTISAQNEDCKRLLTIPGVGLMTATALIAAVGDVNVFKSGRELAAWLGLVPRQHSTGGKPTLLGISKRGDSYLRT

SEQ ID NO: 78745 - protein, 370 aa, unidentified
MQKFTNQCIGIDISKASFTACLCKRQLSGPESTSDVVEFENNKRGFNQFVKWSRKLTDNSIPLVYAMEATGIYYEGLAYHLSRLNQNVSVILPNKVKYFSKSLNIKTKTDIVDARIIAKMGVERSLALWQPPEPIFKQLRGLTRLYSDLKKERTTFGNRLAACQSGEDPLAFVVNSNKKIIKEIELQLAKCEKEIKTLIYSEEWLATKVEKLLSIKGVGLITIAIILAETQGFKLIRNGKQLVSYAGFDVVQRESGTSIKGKTRISKKGNSRIRAALYFPALVSSRFNKDFKNIYERINAGKSSKMVGVTALQRKILLLIYSLWKKDQSFIEDYPGTTTDQAPIAASFSKNESPNIKVGRSDDLPIQVLT

SEQ ID NO: 78746 - protein, 356 aa, unidentified
MNKYIGLDIDCKKTVGCVIEAGRGDRYVTINSDIGSMSRFLRSEKRNGYRVEVVFEISGQAGFIYDSLIDYVDAIKVANPSKMTWIYRTAKKNDRIDARKMAVLLSIGEIPEVYMPSKEVRQWREMLLHRKKIVCKVVQVKNRIRATLKSQGYSKAAYKGGWWKKANKLWMRRVCEASIGVSNLWHMHICNLLDELELFETQLKRVTGYLDCYLDRQPGGKLLMSIPGVGPRTSEAVLAYTDDVERFGNYKQYCSYFGLAPKLDESGNCRRIGHISKRGPSVVRWVLCESSWKVIRKSKGLREFYERVMAGQKGRKKIAIIAVARKLLSIMRAMMLTGELFNEQLVNRVDELLKTA

SEQ ID NO: 78747 - protein, 362 aa, unidentified
MQSTPLIAFDQHAATTVAAVLLPGQRTAALHTLTSDCSTILRFVKRLQHEVGPVRCCYEAGPCGFELQRAMTAEEIRCEIIAPALIPRRAGDRIKTDRRDAGQLAVLYRAGALTAIHVPTDQEEAVRDLLRCREDIRADLLRARHRLSKFLLRHGRRFTATKSAWSLRHHAWLRAQTWPLPALTQTHEAYLRAVDEAVARLRAVEAQLQALVTLEPLRTRVQRLRCFRGMDDLTALTIAAELGDARRFPSARGLMAYVGLIPSEHSSGTKRARGAITKTGNAHVRRVLVEAAWHYRHHPFIGKQLRRRQLEAPEPARIHAWRAQQRLYRRYHRLAARGKPKQHVVTAIARELTGFVWATLTQ

SEQ ID NO: 78748 - protein, 362 aa, unidentified
MRIIGCDLHARQQTLAMLDTTTGEVVEVTLKHEGDNVREFYSLLPRPVRVGIEATGSMQWFLNLMEELGIECQVGHPAQIRASAPRKQKNDRRDAELILKMLVEGRFPAIWLPSKELQDLRSLLRHRHQWVRMRTRIQNALQSIALANGLRRGTALWSHDGQSRIASLPLAPHTAYRRSELQAMYEKFEAEIEKLNQRVEEQACKSPGARRLMTHPGVGPITALATEVFLGDPARFADSKALASYVGMIPREYSSGGRQRLGGLSKQGNPLLRFLWGEAGAHAARKDPELQRFYRRKLVQKGLGKASVAVARKLGIRLWIMLRDQIEYNEFCRRGQKQQKSSDACAGMPETPNGAKSHRPVD

SEQ ID NO: 78749 - protein, 387 aa, unidentified
MYFVGIDISKFKHDCAIVDEFGDVITPSWSFQNDREGFSLLKELLDALDGEKKIGLEATGHYGQNLKLFLENNDFSFMEFNPLLINRFVHSKSLRKTKTDSIDALMIAQYLMTVEYKPYPPSFYTLEKLKSLTRFRDSLIRQRSRQLVELTNILDKVFPEFKPFFKGRFSATALYILSHYASPEKISNMNSKSYEPLRRLSRGRFSMVDFVELKTLARNTVGSTSDYLLQEMEITIDIYNQLQSKVEEIELQIHDCVLALAPPILTIPGIGAASAAVILSEFGDLSKFNNPSKLLSFAGMEPGYFQSGTSESTGKMVKHGSSHLRYAMMNCAQTVINNEPTFAAYYAKKRAEGKEHRVALTHVAKKLLRVIYTLQTKELSYNPDLVR

SEQ ID NO: 78750 - protein, 359 aa, unidentified
MEQKRFVGIDLGKRTYEIKFIASNGSVTGTNGKTCPSGRKELYKKLLSTDRIAIEVCSLGMVMAKEIIQQVGAEVVLLNPSQIALIYRSVKKNDKEDALKLARLVQKFTNEELPKIELPTEHEENLRQILTELRQLKNDRTKEINRVHAIFVECGITEIKKSNLATHENRIECIKILKGIFLSQAERSLKKLELIEDQILEVEELLDKEIDGDKNIATLITVPGVGKQLASSFVAFLGDGSRYPNVSSIGAATGLVPRLDMSSTSLRLGHITKTGNSNLRSLLILAAWSHVRAKNGGALKDKYLYMTKVQSKSKKIAIVAIARKLAELMYSLLKNNTKYEKRAPVPVVKLATEALAIAS

SEQ ID NO: 78751 - protein, 370 aa, unidentified
MLDTTTFVGLDVHARSIKAVSLDVMTGEVRAATFGYDAGAVAEWVRSVDPGARCVYESGVTGFDLQKRLSGLGVDCVVGAVSKMIKPSADRRRKNDRNDAEFLARMLSVGNVVEVWVPDDECEAARDLTRALEDARDDLSRSKQRLSKFLLRHGLVFDERTPTGRRKGNWTRAHWSWIESIRFAEGADEEVLAYYVDAVRRAAEEKARLEGLVEAEARKPRWRRRVDSLRCLKGVDTASAADLVFEAGEFSRFRNARSFAAWVGLTPSEHSSGESDRRGAITKAGNKHLRKTLVEAAWHYLTCSGRPKDLAKGQAPDRGARRHAAKGVRRLVERREALLARGVHGNKANVATARELACWVWAVGLMAEEA

SEQ ID NO: 78752 - protein, 431 aa, unidentified
MNKLLKLPETNHSSCLPVFVDISKDYLDYTIGWESGQVPTPAHRIEYRVDAVQQWINELITEYQLRGGDQLEFICEPTGGLQHKLMLVAQRNAARVHYVDTERMYNARMITYGNSEKTDEKDPGAMRNLYLIGRHRPAIPRDVLHQTVRSISQEYEDLSQQAVRARNKIHGLLGYVFVDYKKSAGFTFSRSGQALAKEFSFCPQFIVQAGYEEFTRRLKVHVPRMRWSTLQQIWEMAQRSVAITDTDFPDPRLEYMVTLYEQWMRLEARKSELKERLQEYAQLYQEQGLLPEHLPPTVSPWMVVRVIAETGSLEGFTHIRQLWAYLGLKLARRQSGKYKGHIKITKKGSSLARKLLFQICLPLVKKDGCLHSAYKRQNPKGKRGGKGIRAMTSVMRKFVKIIFAMHQSGEPFQMNRLSRCESQFNRKLAHQ

SEQ ID NO: 78753 - protein, 343 aa, unidentified
MKIYALGIDLGKTVFHLVGLDSGGQVVVRKRCSRTQLLAFTANLQVQLIGMEACSGAHFLGRALRAQGHEVRLMPAQYVKPYVQTNKSDYIDAEAIAEAVQRPRMRFVPIKTEEQLDLQALHRVRERWVMRRTAVVNQIRSLLLERGLTLPKGRSHLDEHLPRILEDAELNLSGSFRVLLAQLKLELEQLAGRIEQMDTVIQKTAKENEACQRLTEIPGVGPVTATALIGAVGNASAFGKGRALSAWMGIVPGEHSSGGKQKLLGISKRGNKYLRRLFVQGARSVLQQRHKQAPGLRDWLAQLLGRTHQNVVVVALANKLVRMAWAVLCKNERYRAPVLALTI

SEQ ID NO: 78754 - protein, 394 aa, unidentified
MCQHYQTEASMIKHNILFIGLDTHKTFTEVAYIEDQRGAKSTHLGKILSNKAAFKKLARQLQSKYPDATLHFVYEAGPCGYWIYRLLTSLNHCCYVIAPSLIPKKPGEKIKTDKRDALKLAKLLKSEDLTPIYVPEPEDEAVRDLSRARETGMKDLKDAKYQLKALLLRNNINSKIKDNWSLQYLRWLAELVLPHPCQQIVLQESVSTITERLKRLKRLDNELTHQVKNWRFYPVVKAIQALRGVRLLVATGVIAELGDLSRFDHPRKLMSYLGLVPSEHSSGDKRHLGAITKCGNSRARRLLVEGAHSYKHNANISKEMQLRQEGLSKEIIDMAWQAQLRLCRRYNRLMHKGKHRNVVVTAIAREMIAYIWAISREVVLPKIDVKLRISRVPA

SEQ ID NO: 78755 - protein, 447 aa, unidentified
MEILYERCAGLDVHKKNVKACFSSPGNDGHRQKETRTYLTMTGNLLELRDWLKEQGCTHIALEATGVYWKPIYNLLEGDFEMLVVNAHHIKAVPGRKTDVKDAEWIADLLAHGLLSASFIPSAPQRELRELTRYRTSLVEERAREVNRLQKTLEDTNLKLGDVVSDVMGKAAQLILHAVVEGESDPLRLASLAAGRVHASQQQLEQALTGKVTAHHRFMLGQHLLLIKNLDEAIRRVTEELARRFTPPDPPTEEQDQSQRSSAPAPQSPEPAPPSAQSAPLSWQEAVELIDQVTGISERVAQGLLAEIGVDMDQFPSAKHLASWVGICPGNHESAGKRLSGKTRKGNPYARRLLIQAAHAAAHSKNTYLAAQYRRIAARRGPKRAAVAVGHSILVIVYHLLRDRGTYQDLGGNFFDEHDRQMVQKHLVRRLERLGYQVDLHPRSEAG

SEQ ID NO: 78756 - protein, 343 aa, unidentified
MDYYAGIDVSLKESSICVVDGTGKVVREVKVASEPEVLIGYFDELELPISRIGLEAGPLSQWLHAGLVAGGRDAVLLETRHVKAALSAMTVKTDRKDARGIAQLLRMGWYRPVHAKSVPCKDTRALLIGRKLLQGKLLDVELSIRGILRGYGLKVGEVSRGRFEARIRELTAGHVTLETVIGAMLAARMALWNEFTRLHREMLKIARADEICRRLMSTPGVGALVALTYRSAVDDPSRFVKSSTIGAYFGLTPKKYQSGETDRDGVISKVGDAMVRTALFEAAHIMLTHATRFSSLKRWALEVARRRGMKRAKVALARKLGVVLHRMWVDATEFRWSKTAAAA

SEQ ID NO: 78757 - protein, 315 aa, unidentified
MLNNSTFFIGLDLGDKHSYVAILDPEGELIEESRLPTTKASFQRKFSTLQPCRIAMEVGTHSRWASHLLTELGYDVLVANASKLRAIYHNPRKGDRADAETLARLARLDPELLSPIHHRSPQAQADLAVLRSRDAIVRCRTLLINHTRDIVTLAPARSAGEASGSRLPSCSADSFARKVAPDIPEPLRPALAPIIDTIASLTQQIQSYDQTNEELCSERYPETSLLRAISGVGPLTALAFILTLENPDRFRRSREVGPAIGLVPRRDQSGDQDPQLRTLAPALQVQVSPKPAMPTCAACWLDPHNTSWDLSRSTL

SEQ ID NO: 78758 - protein, 328 aa, unidentified
MNISKTVVGVDIAKRVFQLHWVEKETGEIVSLQLKREKFLEHFANRAPCLIGMEACGGSQHWARELVALGHEVKLLPGKMVKPFGGGNKSDVHDAKAIWTAVQQPGMKTVAIKSEAQQAVLALHRMRSQLVKFRTAQINGLRGLLSEYGEIMPVGKAGIRKAIAQALQRLSDRLPAVVIDTLREQWARIGQLDEQVGEIERRLKQWHKDDTASRRIAEIPGVGLLTATAAVATIGEASAFKSGREFAAWIGLVPRQSGTGGRIRLLGISKRGDTYLRTLLIHGARSVLTNSKEPPEWATHLAKRRPQNVAVVALANKMARTDLGFARP

SEQ ID NO: 78759 - protein, 458 aa, unidentified
MKNIYLGADVSKGYSDFMFLDAKKRRIEEDFQLDDTFDGHQKLYQILAALCDQHPNAQIYAAVESTGGYENNWFDALVKLQSSLPLKTARLNPCGVHNNSKAGLERNITDRISAENVAKYLIEHPENVTYQQQDPLASLRKQWSFVKMLLKQKTQLLNQLESNLYAANPEILAYCKNGVPNWVFSLLARFPTATKLAKAKKSSLASIPYVTEQKAKALIQSAKKSVASATDPITAQIIKATVKQIRQLTKAIEAQEKILTETCSIPEVQLLKTFPGISDISAIGLMLEIGAVERFATAKKLASFFGLHPRYKQSGDGSWGFHMSKIGRVVPRQILYMVAMVAIQCNPLITEIYLKHTEKGMKQKAALGLCMHKICRILYGMLKHNMAFDANIDRNNRKKSRKGNTTKIRKDKRRRYQSFDAKAPISGRHNKKRKERKQSQSDNIAQNGIIEASAPASA

SEQ ID NO: 78760 - protein, 396 aa, unidentified
MTTVGIDIGGQTNVVARCRDGESRADREVLRMTQDRAGFTALDAWLARQPEPVTLVTMESSGHYWMSLASHLRRHDVPVAVVNPVAAKYFAKSRLSRTKSDPADARSLAEMAMRDAPSTRDPLQGAELRQAARFAMTLVDEQARVTQRLVRLVEIGFPELGDLFSDPLGRLGREILRVAPTAGAASRRRTTTLANANAGTGRRRLGATRAAQLHAAAADSIAVPELEAEVAFEVDLLLDQYELLEGQIEAADRRVAGLLDGELARRLQTIPGVGPSITAALISEIGDIGRFDDVDQLFAYAGVHPAERSSGTKGANPETSWHMSKAGNSHLRAAAYRMALVGISHNPVIAAHYQRKRDAGKSKMNALGHCMRKALSLVWGVWRNGVDFDPDWETKA

SEQ ID NO: 78761 - protein, 519 aa, unidentified
MHQTKYRGIITEAGLLTTPPWEPAFRLAKPLRKSVSPFGGDLCFGWLGSPRLYLYKPLGCVSAFWKWIPARKDKTMHYQKVLQMLQSIPYLSVGLDVGADFTWMSIMLPNGTLTGKPFKILHSDPHSRDLGVAKIKEAQETYSLESRCFLESTGIYHIPLLCFLRDKGFDCSVINPIITKNSTNMNIRKLHNDKFDSKKAAKVGLDASLKTSIVPDDAVIDLRNLVRDYYYFKDLQSAVVLKLHAELKVSFPAYLNVFSKITTQTSLKLLEAYPLAADMLAAPKDELVESIRQTARFGEKYAVSKYEAICAAAKDAAVFGRALPSNALRIRLYIKTYREYQEHLGSILKELHKAVEKLEGTPVYDRILLLQSLRGVGFLSSVVLIAEMGSFDLFPSPKKLYAYFGLDPAVKQSGKFNADKVHMSKRGSSLARRILHMVALNNLKVDKGTKTPVNPVIHSYYADKCKNKKKNVAVGAVMHKICNIIFAMLRDNKPFEMITPQEHCEQYLAAHSGKARNAA

SEQ ID NO: 78762 - protein, 412 aa, unidentified
MEIIYSCCCGLDVHAKTVVACLIKHGTKEVRTFSTMTGDLLRLSDWLVGAGCRIAAIESTGVYWKPVFNILEGNVEVLLVNARHYKGIPGRKTDVKDCEWLADLLRHGLLKASFIPPLEIREVRELTRYRQQLVKELATIANRVQKLIESANIKLGQVATDVMGVSGRMMLRALAEGETDAEKLSEFARRRLRSKKPELKRALEGRLTKSQRWVLGELLRGYEEAEAAIKRVEQQIDEEVSESADPFVRQAIKLLETIPGVGERVAETIVSEIGVKMSCFPSDRHLSSWAGMCPGHNESGGKRLTGKTTKGSIYLREALVQAAWAASHTKQTYLAAQYHRLAKRLGKKKALVAVGHSLLVIVYHVLAQKVSYKELGGDYFDQENVERQRQRLIHRLEAMGLKVTIEEVQNAA

SEQ ID NO: 78763 - protein, 470 aa, unidentified
MSNQTTKMTGRMKYTQRKGKGLPKQLESINVHAAGIDIGAEMHFAAVPPREGEDEAVRSFGCFTADLHALADWFEECGVETVAMESTGVYWMPVYRVLESRGFEVLLVNARHIKYVPGRKTDVVDCQWIQTLHAYGLLRGSFVPSKNIDQLRAYWRQRKMLVESCSREVQHMQKALTQMNLHLPVVLSDVTGVTGMKIIRAMVQGERDPRTLARFRHGGVKKSEEEIVKALTGHYSDEHLFCLRQALELYDTFQKSIADCDAELQKHMARFERKEPQAPLDEEGHKKRKIKKRANEPAFDLRAEVHRIYGVDLTRIDGIEAMTAQTILSECGPDLSQFPTARHFASWLGLCPNNQITGGKVQKRHSRSVKNRAATALRMAAQSLHRSQSYLGAQYRRKRTKLGAPKAITAMAHKLAKLIYAMIRHGQAYVDYGQQKEEQHHIERTKRHLIRQAKKIGYELLDIETGELVS

SEQ ID NO: 78764 - protein, 313 aa, unidentified
MPVSLSKPIVGVDVAKNELVIYQSDGDLLEEIANNKTSIKQWLKALSGTVAIAIEATNIYHLDFADLAYEAGCTIYMVGGYELKHYREGVKIRAKTDALDAKLLARYLKNEAEELRPWTPPSPLYRQLLSLFRRRAALVQARVGLVQSWSNEPLLKAAFAEQVKSMQQLETLIEKTINDQLKEAGLLGQLKRCLKVEGIGFLTGARLITAFQRGDFRNADAFIAFLGMDLRVAKSGQKDARRSLTKRGDPEARRLLHNAAMSASRTKAWKGYYEEQRTRGFSTTQALVMLARKLARVVFALLKGQSEYQPKAS

SEQ ID NO: 78765 - protein, 376 aa, unidentified
MENDSTVYVGLDVHKESITVAYAVGMGDVELLGKTGTMKADIDRLCKRLQSKARHIHVVYEAGPCGYGLYRELVHKGFDCMVCAPSLIPKKPGERVKTDRRDALKLVRSLRAGDLSAVHVPDVDDEAFRDLARAWAAAKADHRQARQRLKSFLLAHGVRYTGNANWGPAHRRWVSTFAFPNHWQQLAFDECRRTIEDRLAQCDRLEAALREAVVHWRFYPAVLGLQTMRGVKFITAVGMLSELGDLSRFEHPRQLMAWLGVTPSEHSSGDRRRQGSITKNGNSYARKLLVEAAWSYRYPARVSPDIQRRHEGIPKPIIDRAWDAQVRLCRRYRKLAARGKNVNIAVVAVARELAGFIWDISRLAMSLAVPSHPQAS

SEQ ID NO: 78766 - protein, 348 aa, unidentified
MNYVGIDWAYGRAAWCARSQTGTIAGEGMIPADESGLARLVLELGTEVEACVEMMSGAVWVRDQLQAAGWQVKVAHARKVRDVAPLACKTDKVDAQVLAELCRRDLVPELWVPSIEDRALRERLRRRMHLVKTRTSARNWIFGLLTQFGLRISHSRLRKPDAMELLERRGVPEVWRASITELLELAEEMDRRIDPIDRELGPLARSDQRARLLATMPGIGPLLGLTFAAEIGEVSRFPSPGKLVGYAGLAPRVSQSGERSATGALSKAGSRTLRWAAVEAAHQAWRPSSPWHAHYLRVSARHGKNPAKSAVARKLLIAAWHMLSRNEPFKPHRPAAARTLPRRTPAAF

SEQ ID NO: 78767 - protein, 332 aa, unidentified
MEDAMFYLGIDVAKAKLDCVLLNPENQKRKSKTVENSSDGIGLLLKTLHGWGIEPGAMHGVMEPTSTYHERVALALVDVGCTVSLINPAHLRRYAQSVGARSKTDAADCALLARYGAAEKPKAWEPPSASARVLRALLARRDAVAEDLQREHNRTEKLSTTEVPDSVRQSLSEVIAFLEKQLETLQHEIERHIDDDPDLRGKRELLLSIPGVGDRVSQHMTALLASHRFETAEQLAAYLGLVPVEWQSGSSIKGRPHLSKAGPAHLRKLLYLPAVVAVRHNPHVRALYLRLLDRGKPKMAAIGAAMRKLAHLCFGVVHTGKPYNPSFNSKTA

SEQ ID NO: 78768 - protein, 344 aa, unidentified
MEYYAGIDVSLEQSSVCVVDASGKIVREAKVASDPEALSAWFRNLGLPLARVGLEAGPLSQWLHAGLTAASFTVVLLETRHVKAALSAMTVKTDRKDARGIAQLLRMGWYRPVHCKSPSSQDVRTLLAGRKLLLCKVIDVELGIRGLLRGFGLKMGPVSIGRFAARVRELAAGQPTLEQVTEAMLRARDVLRTEVATLHRQVLAIVRADEVCRRLMTVPGVGALTALTFKSAIDDPTRFTSSKAVGAHFGLTPKKYQSGETDVTGAISKVGDAMARGALYEAAQVMLTRVMRFFALKRWALQVAQRRGMKRAKVALARKLATVLHRMWMDGTEFRFGKEGAAAA

SEQ ID NO: 78769 - protein, 397 aa, unidentified
MNKIVHYVGLDVHKDSIAVAIAPQNSTEVRRYGIIGGTIGAVDNLLRKLSRPELELRFVYEAGPCGFVLCRHLRSKGIHCDLVCPSLIPKRASDRVKTDRRDADQLARLYRAGELTPIHVPDQEDEAIRDLIRARTAAVHDQRRARNRLKGFLLRLGFRYTGKTSWNDGHKRYLSGLLMPRPAQQIVFQEYIHAIDDAADRVERLTQAVEDALPGWKWEPVVRALMSLRGIQALSGMTVIAETGDLSRFENPRSLMHFFGLTPSEHTSGNKRVLGGITKCGNAHCRRVLTEAAWHYRLKPLVSEAMQKRQEHQGKEVRLIAWKAQQRLHKRFRQLVVRKKSVVAVTAIARELVGFLWAIACQVKPAQRPPAPEIIRTCRGKVYRLDPDKKMQKTKNS

SEQ ID NO: 78770 - protein, 383 aa, unidentified
MKYNTQNAKIESITEKTLIVGIDVGSETHYARAFDWRNYEYSKKPLEFSNNEAGFVTFKVWMEELAEKYGKDVVIPGMEPTGHYWFNLGAYLQDNGMKPVHVNPHHVKKSKELDDNNPNKNDRKDPKTIAALVNEGRFSYPYIPTGVYAEIRSLSNLRLQAQEEITRIKNRIARWFSIYFPEIKDVYKNPGAVSGLMILKVAPLPKDIVKLGVDGVNQIWRDAKLRAAGLKRAKTLVTAAEHSIGSQEACDSARIELKILLNDYEIYHQREEELMELIEEKLSEVPYIDKLLEIKGIGMKTVSGFVAEVGDIKRFDNPKQLQKLAGYAIVECSSGKHKGESHISYRGRKRLRYVLYEAAISLIARITEFKEIHRYYQTRERIH

SEQ ID NO: 78771 - protein, 390 aa, unidentified
MPLDHHSEEPTAIRTNLGAIFVSLELSCSTWLITSLSPGGGEKMSKHSVSAGDIAALLSRFSELKQKAFARMGQSFPIIVIQEAGLDGFWIHRVLQSEGIESYVVDAASIATSRRRRRAKTDRIDGEALVRALLAYKRGEPRVCAMVRAPTPEDEDRRRLCRERKTLTVERVQHVNRIKGLLFSQGVSGYEPLRRNRRQRLGELKTGDGRPLPPHLKSQIGRELDRLELLLGQIKAVEAERDALLTPATETEGMPGPQAMLIDLRGIGAEFAAVVWSEGLCRSFANRRQVAAYGGLAPTPWQSGSVAREQGVSKAGNPRLRTTMIQLAWLWLRHQPNSALAQWFKERVKRNGGRLRKTTIVALARKLLVALWKYVTAGVVVEGAVMKAVS

SEQ ID NO: 78772 - protein, 355 aa, unidentified
MLHSGIDKHKDNCFISTVNDQGIIVGEVRVKNTVADISAYFQSFGKEEHRAVVESTTGWYWLDDLLKTLGVELVLAHAKYLKAIAYAKVKTDKVDARTLAQLLRMNYIPIAHKIRPELREVRDLTRARLRLVWKRTSCYNSIHRLGEKFNCDHLIDPDENVLPEELPLLYKEQVTCLHHQIVLLTEQIKHLEHLLNERLIDNDVIQHLLWIPAFGRITAFSVYLEIDGIERFASEKQLFSYARVVPGANNSNHSRRHKSGNKDGNKYLKIAFTDAAVHAVRFYPEIRSFYQKMCRRSNEAIARTIVAKELARIVYYMLKNNTTYQGFKGQPIQRHKVVAWPRRTTFAPASLAAQL

SEQ ID NO: 78773 - protein, 343 aa, unidentified
MQTVTTIGFDIAKSVFQVHGVDAADQMVVRRQLKRRQVIAFFQQLPPCLVGIEACASSHYWSRELQALGHSVRLMPPAYVRPYVKRQKNDMADAEAICEAVTRANMRFVPTKTPEQQSGLMLHRTRHLFMRQQTSVINAIRAHLAEFGIVAPVGRGGVEELLRVVADPNDKRVPEVVRACLAALGSQLLSLKQQILDFDRMIMAWHRSNQTSKRLNCIPGVGPLLATALVASVADPKTFRSGRNFSAWIGLVPKQHSSGGRDKLGSISKQGDRYLRSLFVTGALAVIRYAKIHGAKHRPWLTALLARRPTKVAAIALANKLARMAWAMMATGARYNYPASLRV

SEQ ID NO: 78774 - protein, 455 aa, unidentified
MEGIYAGVDWASEKHDVLVADAAGEKLLAATFAHDERGLRSLCRALVRLRVQLVAVERPDGLMVERLLDAGLRVLALHPNQVAAARDRFRVSGGKSDGFDAFVLCELARTDHHRFRVLEPDSDATKAIRALTRGREDLVGARTALVNQLRAELERFWPGPLGLFSDLHSQISLAFLERYPSPADAHGLGEARVRAFLARERYSGRQKPAQLLAKLKAAPTGRVGERELAIRRQLVCGLVAMIKTLNAQITELERQIATAIREHPDGAVFTSLFKGAVITAAELLAEMGDCRGRYPTRDTLAGDAGQAAVAIESGKRKAACFRWGCNKRLRQAFHTLADSSRHHNPWAQDLYAQALARGHDHPRALRTVGRAWSRIVWRCWQDRVPYDPARHRALQRHVTVTIPTASGPVPDIAASQRMAGAAVTRRAARRAERPALDGKPTSAKPAARRTKRQRG

SEQ ID NO: 78775 - protein, 418 aa, unidentified
MNEDGDTRGAKRYVVLDIHKHYCVIAGVDREGRVLLQPVRVEHADLEGWLKKHLCSTDQVVIESTTNAWHVYDLLAPLVERVVVANPIRVKQIAQARVKTDIRDTLILARLLAANLVPDVWVPPPHVRQLRQLLSQRRQFVETHTQIVNRMHSVAHRHHLQHEAGKRFNEKTTLWQKDKTLSSLEQFQLQLEMENLTYIEKQIERISKEVRKMCHQKPWAESMTYLMQLPGFGVITAMTVLAAMGDVQRFASPKHLASYSGLTPGLEQSGTKNRGKGITKEGRRELRWALVEAAQRAVKSDPLWKTRFQEMQKRMHRNQAITAVAHRLLELVWYVLTRRQPYRHFSHERIAYKYLTWAWQMDEAARDGLTRQQFARYYLMRLGIGHELTRIALDPKHPRKLASETELLALRPELTHLE

SEQ ID NO: 78776 - protein, 337 aa, unidentified
MKRYLGVDLHRTQFVVCTRWENGEQEIRQWRIGELPKFVEQLQPEDQIAVEAMGTTARFYDAVVGRVQRVVVVNPHQFKVISESVKKTDRHDAAALALYLEKDLLPEVRMKPKQNRELMHLAETRDLLVKQRSALKGKINNLLAMQGIELKREALSSKIALERVLVLPVSGMVKLELRVLVEQIRSLSESIAKLDQQLEEEGQQLPGYENLTSIKGIGSLSATVLLTVIGKISDFADENKLAAYLGLVPRIANSNESERSGRITKQGNKLARTALVQCGLVAKRYSPYLQSFYERIKQRRGGGKAKIALARKLVKIVYDTLKNQWVFEDFPSFTLAA

SEQ ID NO: 78777 - protein, 318 aa, unidentified
MNTKTNQSINVGVDTGKFQLDIYIRPLDIFFTVPNDESGIKEAVKTIKKYKPERIVIEATGRLEMPFILACAKAELPFTIANPIHIKRFAGALGQRAKTDKLDAQLIAHYSEAIKPPLSKLKPDTMQAMSDLVSRRNQLLTMQTMEKNRLQSMPKSIAMTIKPVLTLFKSQIKKIEDKIVKLIESNPEYEAKNMILQSMTGIGKIASASIISNLPELGYINSKQASALIGVAPMNRDSGRYKGKRKIQGGRPQVRTVLYMAMMSAIQANPVFKATYQRLCAAGKPKKVAIIACIRKMIVILNSMLRDGVMWDATTVKN

SEQ ID NO: 78778 - protein, 415 aa, unidentified
MALKIVYKICCGIDVHKTFVVACIASTNDKGVTSYESHRFSTYTSGLKTLLQWLLDRNCKDVCMESTGKYWIPVYNILEKDCSIVLAHPKYVKAIRGKKTDKKDAKWIADLFKHDLVAGSFMPPADIRQLRDLMRYRFKLTCFKSSEKNRLQNCLTVSNIQLGNVVSDTFGKSAQAILDKILEDPADTSFDLEPLVFKSLKKKLPELRDAIDGYITPEQAGKLKVIKAHYENLEARKAELEELILALAAPYQQELAILQTAPGISSDFTAIGIISEIGTNMEAFPSAKHLCSWAGLTPTNNESAGKKKSVRVSKAGCYIKPLLVQCANAVVKSNKHPEIRNRYLRIKKRRGHKKAIIAIARMLLTALYHILKNGENYNAELYRKSDLPPVDREITVEQALMIARNQGYKIKSATA

SEQ ID NO: 78779 - protein, 427 aa, unidentified
MTEPSRDYVAFVGIDRSDSSIDLAVLDFKGNSHGHRRIASTPNAFRDWIILLREDFPEGQIALCIEQPCANLAAFFSQYDFLNLYLINPATFKHWREAFQPSRAKTDKSDSIGLAQLGFESHRKLTNWKPADAPTRKLRSLVEARRAFVDLRTKVNNQLVAALKNYYPQALELTGKYLHARLACRFLEKWPTLQALQSATPESIREFYHTNGSRRASVIEKRLALIADASPLTDDKAILEASSFHVAALVCQCNALRKSIEAYDKEIAALFEEHEDSKIFASLPGAGPNLGSRLITLFGTDRSRFRGAGSVQRFAGIAPVTKQSGNTRLVHRRYACPKFHRQTFLEWVGQTITRSLWARAYYEQQKAKGVSHYTALRALAYKWIRIIWRCWQDRVPYCEETYIKSLTERKSPLVSLINELALPGNKS

SEQ ID NO: 78780 - protein, 358 aa, unidentified
MKAQVKKIDFTGQNIYVGFDAHLKSWKVTIMAEDFVYKTFTQPPKPDILHKYLIEHFPGGTYHSAYEAGFCGYWIHYALTSFGIKSIVVNPADIPTTDKERVNKEDKRDSRKIARSLSSGNLVPIYIPSIKNQRDRSLLRTRAMLVKDSTRYKNRIKSFLCFYGICIDDAFKNSKSHWSNRFMEWLESLDMKDESGKESLSVLISECRNLRASILNITKQVRQLSQTETYRDKVALLKSVPGIGILTAMIILTELETINRFNNLDKMCGYIGLVPSTKSSGDKEKTGDMTPRGHSVLRTAIIESSWIAKSNDPSLMKSYISYCKRMDQNKAIIKIAKKLLSRIRYVLNNNKPYICSMA

SEQ ID NO: 78781 - protein, 351 aa, unidentified
MLLALLPSSGEGWKVLFLGDDWAEAHHDIELQDGDGKVLVRRRLPEGVAGIADLHALVGDQLGERDEPDQVLVGIETDRGPWVQALIAAGYQVWAINPVQAARYRERHTSSGAKSDPGDAHVLAEIVRLDRTHHRPVAGDTAATEHVKVAARAHQTMIWTRQRNTNMTRSMLREYYPAALAAFDDLASRDALAVLAAAPSPEQGRKLTAARVETLLRKAGRQRYLQSRAAEIVAVLRSEQLPARPGVVDAYATAVGALVAVTTEMVRQIAVLEEQVRAGFGRHPDVEIYLSQPGLGMVLGARVLAEFGDDPDRYLDSRARKNYSGMAPVTRASGTKRIVLARHARNQRLDE

SEQ ID NO: 78782 - protein, 313 aa, unidentified
MNQDSALVGIDVSKSTLDSFVSTTGQVEQFLNTHDDIQRLTKYLKAQTPALVVLEATGGFERLAAAELSASGLPVVIVNPRQVRDFAKATGQLAKTDALDARIIAEFAQAVKPAIRELADEHARELADLLVRRRQIIDMLVAEQSRLKQAVFKALQQDIKAHVVWLQKRLKNTDDDLHDAIKASPIWKANYDLLREVKGVGDVLALSLLAMLPELGKVNRKQVAALVGVAPYNCDSGIFKGRRRIWGGRAELRSVLYMATLSSKLHNPVIEQFYNHLLAAGKSKKVALVACMRKLLTILNAMIRDQKHFAEMA

SEQ ID NO: 78783 - protein, 354 aa, unidentified
MLKVPQKADFTGHRVYVGLDSHLKSWDLSIYLDDCFHKSMHQSPDPKQLEKYLKSNFPGAQYQAAYEAGFSGFWIQRDLTRLGIECIVVNAGDVPQTDKAQKNKNDRVDSRRIASYLQAGKLEAIYIPDEQMEAERRLVRFRKTNHQDLIRARMRIRSELHLQGIEIPEKYKGWSKGFIGWIRGLDINQESWKYMLDESLSRAEQLRAQQLSLNGALRRLIKKDRYREMGELLVTAPGIGMITAINLLTEIHPIVRFEKFDDLNSFVGLCPMEHSTGDNEKKGKITPRKQKSLREYLIEAAWVAIRTDPALLKCYTEYQKRMSKKRAIIRIARKLLNRIYVMMKYKRPYQKGYN

SEQ ID NO: 78784 - protein, 428 aa, unidentified
MLGVGLDWAEDRHDVALGLPGKGVIEQFRIDHGPDGMARLVARCLALEPDPAEVRVVLETRHGLLVEALLDAGFTVLPVNPDLVARRRGPAKKKDDAEDARICCLLALDQFVELRRLIPHGETGAELRAIARDDDRAARDERRLGNRLRADLLAVFPAAIDIADGDLAAAVFLHLIERWPSHAELAAAGRDDVEALARTHRHGWPDRFADRVTAALSTPRLAVRPELARAKAGSIRLAAAQLLLLRTQRRTWHRRMGELLLGAPRTGRAKQPKDPKQPKDPNPGNAFPGGEIYLSMPGLGDRLAARVAGEIGEHVEQFTTPNALQCYAGTAPVTRRSGRSEYVVARRLAYNRYLGNAVQQWAFCSLQQSAWARTFYDTKIAAGKNHHAALRALANRWLEILWHCLRLGVHYDETVHTTNRTHALKPAA

SEQ ID NO: 78785 - protein, 336 aa, unidentified
MRFIGVDLHTTQITVCYLKAEEDFEIRKYQLIEMEKFVNTLEAGDEIAVEATGNTRWFAEQVASTARRVVVVNPRQFEVVKNSCKKTDKNDALNLARFLKADLLPEVRAKGEAAERVQSLVNTRTKLVRVKTSLINKIHALYVSNGRKLKKTSLASDKGLEKVLLSEWSAVERIELEIIIEQIRSLKVSIKKLDKAIEAESGKLKGFESLVSMSGIGSLSAGILLSVIGNIKDFATADKLASYFGIVPRVSNSNETVKTGRITKRGNRTGRTTLVQCSLAAIKKNEYLKKYYDGVKARRGHGKAKIALARKYLTIIYNTLSNNWVFADFNNFELAE

SEQ ID NO: 78786 - protein, 371 aa, unidentified
MAQSTPLFVGLDVHKDSIAVAHAAGGSAEPPVFVGAIGPRQADIDQLLRRLQGKTSALTFAYEAGPCGYGLHRYLTGKGVACQVVAPSLIPKKPGDKVKTDGRDAVELARLLRSGDLTAVYVPSVEDEALRDLCRARDAARVTGKDAKLRLKAFLLRLGRHYVGRATWNDAHRRYLAKVVCPTPAQQIVFQESVRSVDEQVDRLQRLEGELLERAPAWRLYPVVQALQALRGVQFLTAITGVAELGDLTRFDNPRQLAAFVGLIPSEYSSGGSRRQGGITKAGNGRARRALIEAAWAYRHPAKVSAHIQTRIDHLPKPLQDLGWKAQVRLCKRFRRLTARGKHPNVAVTAIARELIAFMWAIAREVPVPAR

SEQ ID NO: 78787 - protein, 401 aa, unidentified
MSSCAFDKNRTRTLSVVATDGLTHVESAPLPVSLESAKTKRKEGTAAMKNQAIQYLALDVHQATVVASLRDESGKVVMQATIATEAKVILAFVKNAGPRVHVAFEEGTQAQWLHDLLIDHAERVIVCNVRGRSETTNKNDRIDADALSELLRLGALKPVFHGAPEILTLKELVRCYTALVEDSTRVMLRIKAIFRARAIPTPGVSVYRASQRTQWLAKLEGGARVRAASLLTQLDTLLELRPKAKAAMVDAARRQPGWKALRSIPFLGPVRTALILAIMRTPFRFRTKRNIWPYAGLAVVKRSSADQEFKNGKLQRSRKPPITRGLNRNHHPLLKSVFKGAATAAAAKPGPLRDYYQASLARGVKDELAKVTLARKIAAVVLRLWKKGELWDPKKLTMQAT

SEQ ID NO: 78788 - protein, 406 aa, unidentified
MLFVGDDWAEDHHDVEIQDETGRRLAKARLPEGISGISRLHGLVGRFLPDDGDAAQVKIGIETDRGPWVAALVTSGYQVYAINPLQSARARQGHGVSGAKSDAGDAHVLADLVRTHSHQLRTVAGDSEQATAVKVLTRMHQTLIWDRTRQVLRLRSSLREFFPAALEAYEDLAHSDVLELLTKAPEPDSAARLTRAQIIAALTRAHRRDREAKTTVIMGALRTAHLTQPPLIAAAYGATVRALAALITTANEQITALEGQVEAYFGQHPDAGIYLSQPGLGPVLGARVLAEFGDDSSRYAGARARRNYSGTSPITRASGKKKVVLARYVRNNRLTDALHQQAFSALSGSPGARAYYDTLRDRDIGYNAALRQLGNRLVGILHGCLKTHTPYDEATAWNHHAQHAAA

SEQ ID NO: 78789 - protein, 338 aa, unidentified
MKRYLGVDLHRNCFTVYTRREDGSGESREWSIRSLKAFAKTVTANDAVAVEATGNTRLFCEAFKGRGCRIVVVNPHQFQVISRSVKKTDEHDAKVLAEFLAKDMLPEVRMKDEAHARVASLAQTRDKLVKLRTTLKNKVNNLLAARGILIRKESLASAKGLAGVLAAPVSELEHLELEILVGEIRHLNESIKKLEGLLHGQGPKLPGWENLTSIKGIGDTGASILLSTIGKIEDFADEGKLAAYFGIVPRVSNSNETEHSGRITKRGSKLGRTTLVQCALIAARYSPYLQAYYRRIAAHRGTGKAIIALARKFLGIIYKTLKNNWVFEDFPNFVLAKT

SEQ ID NO: 78790 - protein, 485 aa, unidentified
MAKRRMSTFERLESGRLNRKQRRELERQVAAADPGLTIVHTNAGGIDVGNESHYVAVPSDRDPTPVREFGCWTAALNEMAEWFKSCRIDTVAMQATGVYWIALYDVLEQHGIRVVLANGRHTKNVPGRKTDVQECQWLMKLHTYGLLRDSFRLAQEMESVRTIWRLRDRHVKEAGRAVQHMQKALTKMNIQLANVLSDLNGVSGQEIIAAILQGERDPWKLADLKDYRVRASREEVARSLEGNWREDVLFELEQAVDSYHFSHRQMQECDRKLEGYLASLPARMLDIPAQPEGSLAATPKKKTKKAKKPSGNQPHLDLKTELKRICGVDLTSIDGIDVMTALTIVSEIGTDVSRFQDETHFASWLGLTPAKDISGGKTIGRGKRKVKNRVAVALRTAATTLLKSDSYLGARYRSLRRKLPSFAAAVKAMGRYLAVLIYRLLTKGEAWVDRGATQFERRHTEQELASLNFKARAKGFKLIPITEAS

SEQ ID NO: 78791 - protein, 349 aa, unidentified
MVRLGIDAHKRSHTIVAADEQGRQVGQVTVNATPAGHLAALVWAGRWPQRRWAIEDCRHLSRRLERDLLAAGERVVRVPPKLMAIARRSARTPGKSDPIDALAVARAALREADLPVARLEGVERQVRLLVDHREDLVAERTRIQQRLGWHLHELEPGWEIPAGALDRGVWLDRVAQRLAAHQGVVAELATELVERCRELTVRANALERQLERLVRPLAPSLLALAGCGPLTAAKLVAETAGVGRFRSRAAFAMQTGTAPVPVWSGNRERHRLNRGGNRQLNAALHRIAVTQLRLGGAGRAYLQRRLAAGDTKTEAIRALRRRLSDEVDRRLHADEGQQHRQPACLLPAA

SEQ ID NO: 78792 - protein, 455 aa, unidentified
MTPCKVTGARRRRVLEVTNPDAAGIDVGADAHWVCVPEERDAERVRRFGTCTADLEAIADWLKACGVTTVAMESTGVYWVPLYELLEGRGLKVLLVDARQVARAPGRPKTDPKDCQWIQRLHSYGLLSAAFRPQDQVVVLRAYLRQRDMLVTYAGQHIQHMQKALEQMNVKLTEVVSDITGVTGMSIIKAILRGDRDPHELAKLRDPRCKESEATIARALLGNWRQEHLFALQQAVALYQFYHQQISACDQAIEAQLRTFADKSGGEQLPYRPRRRKRAANEPRFDARARLHCLCGVDLTAIEGIDETTALVLLSEIGMDMSRWPSLKHFASWLGLCPQHKISGGKILNRRVRRGASRAKRALRLGARSLHHSKSALGAFFRRIKARHGTPMAITAAAHKLARFVYSLLKHGTAYVAQQMTDYEAKYRERKLQAITRQAQTLKFQLVPVTVGAAG

SEQ ID NO: 78793 - protein, 414 aa, unidentified
MEQVHDRVAGLDVHRDVVAACVRVAGPRGGVATEKERFQTTTVALERLGGWLADRQVSLAAMEATGVYWKPVYYALESRFEVWLCNAHHVKNVPGRKTDMSDAEWLADVAAHGMIRPSFVPPPPIRELRELTRYRKTQTDARTAEIQRLEKVLQDAGVKLTSVASKVLTQSGRLMVQALIDGQRDPAELANLAKGKLRPKIPELTEALAGHFGAHHAVAARRILGHVDFLNATIAALTEQIDARTEPFQAAKQLLSSVPGFDRLVIDTVIAETGADMSRFPSPGHLAKWAGVCPGNHESAGKRRRVGITPGNSWLRRALIEAARAAARTRGSYFGAQYRQIAKRRGPNKAAVAVAHSLSDLIWHQLTTGECFHDLGDDYFQRRRDPERETRRLVAQLEQLGFHVALTPSRDPAA

SEQ ID NO: 78794 - protein, 387 aa, unidentified
MPQPNDLSRSLVALDQDSTIIAVVEMSQSSWLVGGVVPGIERQPRKKQEPSPERLLALLHRWRDESVRAGRTITRIAVAFEAGRDGFWLARWLEARGVEAHVIHPSSVAVSREHRRAKTDRLDTELLRRGFLGWLRGERGHCSMARVPTIAEEDAKRPNRERECLVKERTRLVNRIKGTLARLGIRNFKPTLRQATERLATVHTPEGTPVPPNALAEVQRDLARLRFVVGQIKQIEEARRQRLEEEPECGRHAMVRLLARVVGIGIETADMLVNEVLSRPMRDRRAVARYAGLTGAPDESGAKRREQGLAKAGNARVRRGMIQLAWRFLRFQKNSALAQWYQARTADRRGATRKTMIVALARKLLIALWRFGTIGEPMDGVTLRPAR

SEQ ID NO: 78795 - protein, 349 aa, unidentified
MSMLAEVVDVVIGVDTHKNTHTAAVVVAATGAVVEDLTVEADPDGYAELVAMADRHSGLRAWSVEGTGGYGAGLTRLLVERGESVIELDRPNRPARRNGAKSDPLDAVRAGREALAREHLAQPRAAGQRAALAVRLAARRSAVDASTVAQRQLLSLIVAAPETIRTKFRGTSTVVAITAAARLRLSPTWDLETRTYAEVIRHLARRSLAMQTEASAHEKEILAIIKSWRPDLLDQLGVGPIVAATILCAWSHPGRCRNDAAFASLAGAAPIPASSGLTTRHRLNRCGDRQLNRALHTIVLSRLRYDPATQAYAERRTTEGKTPREIKRCLKRYIARDLYKLLENPPSTT

SEQ ID NO: 78796 - protein, 382 aa, unidentified
MTTESAVSRMRYVGLDVHAETITAAVAEADGAVHELGTIANAPAALRKLLRKLGPAEGLQVCYEAGPTGYVVYWQLVELGVACEVIAPSLIPTKAGDRVKTDRRDALKLARCYRAGELTPVFVPDPATEGLRDVVRAREAAKQDLLRARHRLGKLLLRHGRQRPAGMRAWTQQHERWLGTQHFALETVQLVYDEYRAAVRLLLDRVARLEQAMRTGVATLRREQQALVTGLTALRGVRDVTAITVVSELTTLVRFPGARPLMAYAGLVPREHSSGRGQWRGAITKTGNAHLRRVLVEAAWGYRHRPVTTGRLRLRQQGQPAAVLAVAERAQQRLCTRYRAMAARGKAPLFIATTIARELLGYVWAIGQVVERTAPGTEAGRA

SEQ ID NO: 78797 - protein, 412 aa, unidentified
MTVMIGCDPHKGSHTSVAVDGTEQSLAEIRVRSGPAQLERLLGWAARFPDRCWAVENATGLGYLLAQQLVAAGERVIDVQPKLAARVRLLDTQAVNKNDPHDARSVAIAALRSPAPVEVRAEDHSAVAKLWSKRQRDLGRNRNKVACRLHSVLCDLVAGGVPDEITVGKAAKLLASVHPDSAVAAARVELAGDLIDDLRRLDDQVKESKRRLAAVVKAARTSTTRVFGVGPVVAATTIGITGDVNRFPNRDHFASFNGTAPIDVSSGGKKVYRLSRRGSRHLNHAIHMAAVTQIRHRHSEGRAYYDRKVAEGKGHKEALRCLKRRISDALYACMVEDAKRDGRWIEKGPGGQPGNDSDSSATGSHPETPALRTSHSRTQRHLTTPRQATTRTSRNRKTKKQPTTRKTTRRVS

SEQ ID NO: 78798 - protein, 315 aa, unidentified
MHRVTHFVGIDIAKHSLEVAFRPTGQHLKLAYDTAGLQQLLRTLPEPETCLVVVEATGGYQRRVVTELLTAGHLVAVANPRQVHDFARAHNILAKTDSIDARIIARFGEEVELRLVSKRSGKHEELAQLVARRRQLVDHRASEKNHRETISSKTVKKSVQHVIDVLTKEIARLDKQLLALVESDDDWNQTAEIVSSVPGVGPVVSATLVADLPELGDLNRQEISALVGLAPFNRDSGRSSGKRSIWGGRKNVRKALYMAARTACRCNPVIKAFAHRLRKRGKPYKVMITACMRKLLVILNRMVHTQTPWTPAGVD

SEQ ID NO: 78799 - protein, 343 aa, unidentified
MSEYDGKQFVGIDLHRQRSVIVRQYDTGEQLSAVRIVNDPVALGLQIEQAGPNPGVVLEATYGWYWAVDALHAAGADVHLAHPLGVKGFRYRRVKNDVRDAGDLADLLRMHRLPEAWIAPPATRELRERVRYRAKLVALRSGLKAQVHAVLAKAGVLIPVSDLFGVTGRQKLARVPLGDAYARRVISLLELIGDLDAHEARFTARIATELHNDRGYTAIQALPGIGPTLAAVFVAEIGDVHRFTDPAHLCSWAGLTPKHRESDAVVRRGHITKQGSKLVRWAAVEAIQRHPAGTKISTDRKRIEARRGRNIAKIAAARKLLTLVYYGLRDGEIRALAHQKAVA

SEQ ID NO: 78800 - protein, 422 aa, unidentified
MQIVHPICCGIDVHKSFLVATIIKTEGLTPIYFKKRFSTFNNDILRLKQWLIANDCYDVCMESTGKYWVPVSNLLEDKIRVVIASPKWVAAVKGNKDDAKDSKWIGNLFRLGIVPGSFIPPKPIRILREYTRYRYKLTSCKSSEKNRYQNCFTVCNVALDSVVSDMFGVSASLITDYLIQTDNFDPEYVKSLLKRSLRAKAEIVVESIEGYQMTAAQKERMLMVRSHLDYVCKSITELDEKLDKLVADYESQIALLQTVPGIDRQSAITIISEIGVDMSKFDGSKRFCCWAGLTPSNNQSAGKKKSVRITRAGVYIKPALVQVAHAAVKSKDFPYYRNKYERISKRRGKKRAIIAIARMILTAVYNMLKTGEVWNPSDLCKIDMPQVLSEQQKLKAVKNAFKLLIAQGLIDPALVPKDMTVA

SEQ ID NO: 78801 - protein, 417 aa, unidentified
MTETWFAGVDWGSRTHHVCLMDPDGKVRGERAFPHSGKGLAAMAEWLLGRSRAALAEQIGIAIEVPHGPVVESLLERGFAVHAINPKQLDRFRDRFSTAGAKDDRRDARVLASALRTDPQCLRRRQAPDAGTAELREMSRARKQLVAHKNRLENQIRDLLWRYYPQFLAAVGNDISAPFPIALWRLAPTPDEARRLCKDTLAALLKKHRIRRLTADQLLDQLRAEPIAASPAAMEAAAGHAEILRPLLDTVCSQLADADRRLERMTRELEAEVCREDDGKTPKPSDAAILRSLPGIGTVGLATLLCEADESIERRDCKALRCLSGVAPVTVQSGNKLIVIRRLAANERLRDAAHHWGEVAIQHDPISRAKYDAMRAQGKTHGRAIRQVVDRLLGVACAMLRNRTLFDPNKRCRTQAA

SEQ ID NO: 78802 - protein, 414 aa, unidentified
MITRNTNTIYVGVDTHKGIHVAVAINQMNQQIGTLTIKNKPSEFEGFLKYFKNIDKNSNLVFGLEDTGDNGRNLARYLIDNGQIVKEVNAASAAIFRSQANYKKNDEFDARCVALAMLMQWETLKDVHIEDQHWTLKQLVSQRDSFVESKTKVRHKLHEVLKHSYPSYDRFFSDIFGKGALHFWDTYPSPKHLENVSVEELAIELRKGSRNSLSTRKAKQIKELIESDGHMPQRSQDNSDFVIRSNIKMIRVYNEVMKEIEDKIKITMKELGYKLETMPGIDTVLASKIVSEIGDIDRFRSPDKLAKFAGIAPYEHSSGGKSNFHKSKQGNRTLHKAFYNLAVQQVQVSKKGDGRNPVFREYYLKKQSEGKTKGQALVCVMRRLVSIIFGMMRTKTEYRHPVPKTAKAELKIAA

SEQ ID NO: 78803 - protein, 503 aa, unidentified
MKKSSPELVNNFAAAHNLGGEQVATPEPRLGCPHPARVRQRSPTPVAAPGPSAERTLPQEGSYIRSHPFRVPEPLGIAANMKTDWTEQTYFAALDWAKAHHDVVVVDRFGGIAAGFQFPHTAEGWKEFDQQMQPFGKCPMAIETSSGPAVDQLLQQDYPVYPINPKAAQRYRERKYPSGTKTDRHDAWSMADALRTDGHGWVQLIAQDEATTTLRLICRDENVLIEQRTALVNQLQAALAEYYPLALESFDDWTRPFAWAFLRSFPTPQALTKAGKRRWEKFLHLQKLWRPGTASIRLEAWQKGQQLNASAAVASAKALLALSLVNVLQSLQKQLDEYRQRIRAAFEQHPDHDIFGSLPGAKDKLAPRLLGEMGSQRQAFPDAQSLSCRAGTSPVSFQSGQLRKARIRWACNDFLRHTVHLWADLSRRTCLWAQIYYAAKRENGHSHASALRCLGKRWLKVLWRMWQDRTTYDESIHLKSLQEHGSFVAKMLTPPPTQSGSSL

SEQ ID NO: 78804 - protein, 385 aa, unidentified
MRNVGLDLGARHIAWCEVVDGRVTRRGSVRRLDELEPMLGTATATARVAFEASREAWHVHDVMVGWEKEPVLLDTTRIRRIGVGQHGRKNDSIDAEAIAMAMDAGRVPVAHVLSPERRILRAKLSVRGELVEMRARQVTLLRGLARAAGVLISSSSTDSFLQKLQEAPLNEATRALMAPLVATLAVAQKQLAQVDAQIAQVARADPIIRLCATAPGVAVIVAATFVSVIDEAKRFRNAHAVSAYLGLVPGESTTGGKQRLGSITKHGNAHARTMLVQSAWLILRTGDSDDPLARWATDLAKTRGKKIAAVALARKLAGVLWAMWRDGTVYDPGFQARESAKGIHKDAQSQQLRAQAMARVAKKIQRRERTPSRASRAKTSRVAAM

SEQ ID NO: 78805 - protein, 389 aa, unidentified
MKIFVGIDIAKLNHFAAAISSDGEILLEPFKFTNDADGFQLLVSKLESFDKNSIIIGLESTAHYGDNLVRYLVAEFYQVCVLNPIKTCQMRKNNVRKTKTDKVDTFVIAKTLMMQDDLRFITFFDLDMMDLKALGRFRQKTIKQRTRLKIQLTTYVDQVFPEIQYFFKSGLHQNAVYALLKEAPSPKEIASMHMTHLANLLKVNSHGHFTKEQAKELRVLAQKSVGANDSAISIQITQTIQQIELLDSQLEKIEAEMTDIMKFNDSVIMTIPGIGYINGGMILGEIGDIHRFSNPNKLLAFAGLDPSVYQSGNFQAKTTRMSKRGSRVLRYALVNAAWNVVRNNATFKAYYDAKRAEGRSHYNALGHCAGKLVRVIWKLLTDEVEFNLE

SEQ ID NO: 78806 - protein, 343 aa, unidentified
MQTITTIGLDIAKSVFQVHGVDAGGQVIIRRQLKRRQVVAFFQKLPPCLIGIEACASSHHWSRELQALGHTVRLMPPAYVKPYVKRQKNDMADAEAICEAVTRANMRFVPTKTPEQQSGLMLHRTRHMFIRQQTAVINSIRAHLAEFGIVAPVGRKGVTELLRIVADPNDKRMPEVARACLAALGTQLLALKEQILEFDRMILAWHRSNQTSKRLHYIPGVGPMLATALVASVADPRTFRSGRNFSAWIGLVPKQHSSGGKERLGGISKQGDRYLRSLFVAGALAVIRYAKIHGTGHRPWLTALLGRRPTKVAAIALANKIARMAWAMMAKGERYKQPAALAR

SEQ ID NO: 78807 - protein, 402 aa, unidentified
MNAVGIDVSKGKSMVAIMRPFGEIVSAPFEIKHTASGINSLVELINSVEGESRIVMEHTGRYYEVLAHQLSEANLFVSAINPKLIKDFDNDSLRKVKSDKADAVKIARYALDKWQNLKQYNVMDELRNQLKTMNRQFGFYIKHKTAMKNNLIGILDQTYPGVNTYFDSPARSDGSQKWVDFASTYWHVDCVRKMSLNAFIDHYQNWCKRKKYNFSQSKAEEIYGKAKELVPVLSKDAITKLIIKQAVDQLNSASTTVESLRTLMNETASKLPEYPVVMAMKGVGTSLGSQLMAEIGDVSRFTHKSAITAFAGVDPGVNESGSYEQKSVPTSKRGSSDLRKTLFQVMDVLIKTHPQDDPVYQFLDKKRAQGKPYYVYMTAGANKFLRIYYGRVKEYLSSLPES

SEQ ID NO: 78808 - protein, 348 aa, unidentified
MTSMTDTGPVVFGGVDTHRDTIHVAVVDALGRHLGDQEFATTRAGYRAAIRFLRRHGRIDTVGVEGTSSYGAGISAALRTAAITVAEVDRTDKTARYHHGKTDPIDAYAAARTTCAGRATTIPKTRDGNVEAIRALRVARTSAIKTRTQTINQIRALLVTAPTTLRETLPTTTAALIRACTDLPPLTTRADPTTATRHALRSLAHRYQHLTTEIRDLDKHLHTLLTHHAPHLLAIHGVGPDTAAQLLITAGDNPHRLHTEAAFAHLCGTAPIPASSGQTQHHRLNRGGDRQANRALWTITLTRLATDPRTKTYRDRRQAQGHTTKDTIRRLKRYIAREIYKALTIDKP

SEQ ID NO: 78809 - protein, 346 aa, unidentified
MMIIGCDYHPSWQQICWVDTLTGETGEKKLEHASGEAEKFYRGLPAPALIGMESTGNCQWFVEMAAAAGHDLWIGDAAKIRACEVRAQKHDRRDATLILKLLLEGRFPRIWTPSSQEKDLRQLLIHRYKLVRIRAQVKTELQHLAMNQGVMKKRKLWSKAGEKVLRELPLKPWASRRREDLFRVREMLSAQIDLLDQAVVEVAEKNEKARLLMTQPGVGPITSMAFVLTMGDVSRFQRGKQVASYLGLIPREYSSGGHQRFGSISKQGNWFMRMLLVEAAQNAVRCDPGFRNEYLHRCHNKAKGVAKVAAARKLAIRLYWMLRTNTGYPGVVRVESSSRVPLVSAS

SEQ ID NO: 78810 - protein, 345 aa, unidentified
MVTTIGIDPHKATHTAVAIDEDETVLGEITLPADRDQTKKLMDWASGLNGDGRLWAVESAGGLGYLLSQQLIAGGEQVVDVPAVLASRVRVLSSGKSDKNDPNDARSIAIAALRQPALAVVQREDHAQVLRMLAKRHLELTSLRTQAVCRLHAVLMVLKPGGMRRRLSAKAASRMLQGMRTLDAVGEQRRLVARAHLGDIRRLDRDIKANKTLIRHAVTVSETTVTDIYGVGPIVAAFLIGYTGDPARFATSDRYAAYNGTAPIEVSSGGKKRHRLSLRGNRRLNHAIHMAAVTQIRFDTPGRVYYNKKQAEGKTKKEALRALKRHISDAVYRRLITDQQQTTTS

SEQ ID NO: 78811 - protein, 422 aa, unidentified
MKKRIYRRMPVNDFQPQTISHADLGGKLVFAIDVAKVDMVAALAGANGHVLHTICWKAPDQNPTVLSILRSFRTTGITVEAVMEPSGTYGDVLRHQLEKDGFPVFMVSGKRTHDAMEIFDGVPSLHDAKAAAIIARLHVDGLSTRLADEVPERRQLKAALALMDLYQERYLQLAHRLESWLARHWPELPTLLELTSSSLMALLARVGGPADVAAAPEQATKLLLGISHKLIADDKVAAVIASASTSVGIPMVGLERDALMAIAADAYRAHRAFTTAKTKVDQLAATTPAATLAPVVGHTTAAAIFAEVGDARSFHCTRSFLKAMGLNLKEKSSGTVHGQIKITKRGPSRVRQLLWLAIFRWIQKDPIANAWYQRKKQRDGGRASRAAVALMRKLAKGLYHVGRGGTFDSSKLFDTRRLQVTT

SEQ ID NO: 78812 - protein, 322 aa, unidentified
MSQPGSLCVDIDVSKAILDIAASSAIEQFSVGNDSDGFDAIIAELRMYAIALVLMKATGGLETAIVCALQAEGFELAVVNPRQARDFARAMGYLAKTDSIDARVLSQMAEVLNRHPERERFIRALPDTECQVLTAMVVRRRQLITMLVAERNRLHPAHPLNRKSINIIIKALEDELARLDADMNSHIHSHFKELAKRLSSIKGVGTMTAAALLAEVPEQGNLSRREISVLLGMVPVNRDSGTMRGRRTIFGGRAGVRTALYMAALVATRFNPVIKVFYMRLLAAGKPKKVALVTCIRKLLTILNAMLRKNEEWNESYHHVAP

SEQ ID NO: 78813 - protein, 367 aa, unidentified
MSKAETGRLCVGVDLHKTQFTICALNEDGEYLLEKQYPTKEEGYSEFAREMHRFEEQGCSIELAVETTGNARFLKNRMESEFFAVKVVNTNRFKVITMSTKKTDANDAATLAYYLMKDMLPEAHLCSQTSEEIRRLLKTRSVLVQSMVKIKNQIHGMMLGYGIETKAAQLQSKRKRQELINDLEDHNFSAYTAPSLKVMLKILDDLSAEIKGIEKLLEEMVASNEDVALLMTVPGIGINTATVIAAYTAELERFDGNYKKFASYVGIIPSVHNSNETTHYGRITKHGPQELRTAFVQAALGMIRLTNVSSEWRIIKEYQRRKGDKGSGRAIIALARKITRIVFVMLSKREGFNPALMRCEQEIQQTA

SEQ ID NO: 78814 - protein, 428 aa, unidentified
MQKPKAKRMQSWQEITHYAGFDWAKNHHVVVVLDGQGQIVADFEFEHSLEGWQSFTDKTSIWPNLALAIETSQGAVVDQLLQGQGAVYPVNPVAAKSYRERKAPSGTKTDHLDAWALAAALRADGQGWKVLQPLDPLTQQLRLLCRDEVRLIEQRTALVNQLQQALLEYYSTALSAFDDWTQDFAWDFIVEFPTPEALTRAGKRRWEKFLHTHKLWRPETAAKRLELFAKAGLFKASEPIVRAKSQLALSLCKVLRTLGQQLDFYRQQIEALFEEHPDHDLFGSLPGAKKVLAPRLLAAIGSDPTRHGSLQALQCLAGTAPVSYQSGQLNKVHVRWCCDKFLRHTLHLWADSFRRVTAWGQTYYQNKRDQGMSHACALRCLGQRLLKILFRMISDKKPYDADFHARNQQKHGSWVLKLVNQPSASAGE

SEQ ID NO: 78815 - protein, 382 aa, unidentified
MDIIHTCCAGLDVHKRTVVACVRRIGPDGAVSREVRTFSTMTAELLALSDWLEAHGVSHVAMESTGVYWKPIFNLLEGTFEVILVNAHHLKQVPGRKTDVKDAEWIAQLLQYGLLSPSFIPPPEIRELRDLTRQRTEMVRDRAAVANRIQKVLEDANIKLSSVASDVLGVSGRAMIRALIDGQDDPAQLADLARRRLRGKIPELKLALHGRVTDHHRFLLQALLDQIELLEGLIARFDAQIEQAMAPFTAAADRLRGIPGVGEQAAEVIVAELGPDMTPFPTAGHLSSWAGMCPGNNESAGKRRTGKTTKGSQWLRTTLVQVAWAASHTKETIFSACYHRWAKRLGRKKALVAVAHKILVVIYHLLKDRTDYQEHWSPAKVA

SEQ ID NO: 78816 - protein, 418 aa, unidentified
MNVKARRTKKQVNVENQAINLLSKEELNKKIEVVEKELRSYTWRELETNGKFAKNDKLSFITDDMLIVGCDIGSENHYIRAIDVRGRELSRGAFEFSNTSEGFENAKAWVLALAAKHDKKQIVMGLEPTGHYWFALAAWMISNGISVVQVNPYAVKQSKEIEDNSQLKDDRKEPKLIANLVKDGNYGMPYLPEKVYADMRRLSMFRDQLTEDRIRNINRLHRELKIYFPEYMDAFGKIDGAFTLEVLKVSAIPSDITALGAEGIKNIWHNEKLRGRGYSRANEIVSYAEKSVGLTDGTDAGHEAVKWYAEQILKLVACSSGKHKGQTKISHRGRKRLRYWLFQAAKSAVSHADEFKQLHEYYTTRTNNPLKKMQSLVVIACKILRVIYTILKTGTTYDPQKLLEDIKRPTVSHAPMAA

SEQ ID NO: 78817 - protein, 342 aa, unidentified
MYYIGLDVHKKTISYCVKDASGQVHQEGKMGATRRELDSWIKTLPQPRTVAMEATIFTGWIYDHLLPHAQQVKVAHPLMLRAIAAAKKKNDQIDASKIADCLRCDFLPECHMASTQIRDRRRTLRYRHLLVRQMVQMKNRISGLLMETGVSYNKQRLHKVGYFRELLSTNEDVHESIRPLLRVSRDTIVRLQKTEYALVSSLQRDPLLTDRIKRLRTVPGVGPITALTWALEIGDVTRFRSIRQAISYCGLCGEEKSSADKVMRTPLSKQRNKHIQRVLVEAAKLAPRQDHDLALVYETEKQKGNANRATLAVARKMVAYLLAVDRGQRDFVPAEDYQRAVA

SEQ ID NO: 78818 - protein, 375 aa, unidentified
MEHHSEAFVALDTAKLRNAVAIADAGRNGEIRYLGEIDNTEAETRKLVAKLASKHARLTFCYEAGPTGYGLYRLIKSIGHDCIVVAPSLIPYKPGDRVKTNRRDAVNLVKLLRAGELTAVWVPDARHEAMRDLVRARDAAVKDYRIKRQNVSSLLLRLGRHYPGKKTWGRTHINWITGLKLEHREQRIAFEEMLLAVRQVRERIERLEQAMREAVADWTLAPVIEAVQAMRGIDMVGAIAFLAELGDLSRFDNPRQLMAYLGLTPSERSTGESVKRGGITKAGNTRARRLLIEAAWSYRFPPRVSKDMQTRIGAAPRTAREIAWKAQMRLCGRFRTLTRKGKRPTIVVTAIARELSAFIWAINREVVGSHATANQ

SEQ ID NO: 78819 - protein, 398 aa, unidentified
MEAIVQRSAGLDVHKKVIVVTILVEQSDRAVKEETREYGTTYKACEGLANWLLSNRIQLSVMESTGIYWKNIYAALEKAGLRVSVVNARHVKQVPGRKTDVKDSQWLARLARYGLVKNSFIPPKDLRELRIIARYRTKLVGTLAGEKNRLHKTLDDAGVRLGNVVSDISGVTATEIIAGLIEGQPISDLLACTRGALKKKKDELQAELEGELSARHLFLLQKLQAHIAYLHNELKELDEYLFTAMQPYQKQWEILQTIPGIDAVGAALLIIEIGVDMQQFGSREQFCSWAGMCPGNNESAGKKKSGKTPKGSKQLRYILCEAANAAAKTNCQFQHKYKSIMIRRGHKKAIVAVGHKMLRVIFSRLKEGEVYHDPKVNYEELVVKKNASRWIRMLKKYQ

SEQ ID NO: 78820 - protein, 417 aa, unidentified
MQMELSDFTAVIGIDWGDKKHDVCVQAMGSDKRQFSIIPHQVNKIDEWAQSMYMRHGGQMAVALELAKGPIVSALQKYNFFVIYPINPTTLAKYRQAFNPSGAKDDPTDAELALDLLLKHPGHFEALNPQSVEMRTLMTLVEQRRRLMNDRVRITNRLRNALKQYYPQALDWFDRIDTPLFGAFIRQWPSLSQAKRARRATLAKFFHKHKLYRKPVQERRIQAIKSALPLTSDMAVIVPYRLQTLTLVNQLEVTLQSIALYDDEIAALAPRHPDYSLFSCLPGAGAHLAPRLLVAFGEQRERFTSAAEVQKYAGIAPVTERSGQKNWIHWRWQCSTFLRQTFVEWAAQTINKSYWAGLYYYQQRAKGCSYQAAVRSLAFKWIRILYRCWITRTPYDEAKYLKALKERGSPLLSAESA

SEQ ID NO: 78821 - protein, 340 aa, unidentified
MAEQYVGIDLHRRRLVVVRMTGEGQVLETVRIDNDPVALSLELAKAGPDPEVVLEATYGWYWAADLLQACGATVHLAHPLGVKMFGYQRVKTDARDSTNLAELLRMGRLPEAWLAPPQVRELRELVRYRAKLVALRSGLKAQVHAVLAKQGVRVPMSDLFGVAGSRLLEQLRLERAYALRVASLRRLLAAYDQEIAMLGREVGQALAGDVGYLAIQAIPGVGPVLAAIFVAEIGDVDRFASAPRLCSWAGLTPRHRESDTTVRRGPITKQGPRLVRWAAVEATQRLPGASKQAADFHRIADRRGTGIGRVAAARKLLTLVYYGLRDGQVRCLAPTSKKAG

SEQ ID NO: 78822 - protein, 344 aa, unidentified
MTYYAALDVSLRSVAVCIIDDQGQFHFEAKIPSEIEDIVACLEAFDGDIELIGFEAGMLTQYLHYGLTGAGYPVMCLEANQVSDALKAMRNKTDKNDARGIAQLLRTGWYRPVHVKSVESHQVRAMLSSRRVILKKCIDLENELRGLLRIFGTKLPPHLSHGTFEEVVKERIEADPTFKEALLPMLELRGLLYQAYVKLDTQVRRMAREDAVCQRLMTVPGVGPVTALTFKAGVDDPTRFKNSRTVAAHFGLTPKRQQSGETDYDGRISRKGDTDVRCALYIAAHALITRQKEASSLKAWGVKLMKTKGHRKATVAVARKLAVILHRMWIDGSDFQRHSEKRAA

SEQ ID NO: 78823 - protein, 429 aa, unidentified
MPFEGFYEAASAARPGEGREFLKGGMTMLFGGIDWSDRFLDFHLRTADGQVLTEGRVEPTVDGLAELFATIEAHGRPEEIAIAAETSHGAWVQPLLDRGYVLYPVNPKTVERFREALSAAGHKSDKIDRKILAMFLVTFHQENTPLRPDAPEIISLRIACQDRVRLVEERTAKLNELQAILKCYYPAFLGLFGGVNSQIALQFLERFPTQGQMQHLTQSRLESWLKRHHYPWSKRVDEMMQAIKQPALCVAEHLQQTKAPLICYLARTIQSLNTEIADRNKWITEHLNGLPEADWLRSLPGAGNVLAPALLACLGRDPQRFASTADARALMGTAPVTKASGTHRAVSFRRGCWKFARRTLQLFADKSRHQCDWAQAFYDKQRASGHNHHAALRALAHKWLKIILAMRRTGTRYNEQVFLDSQRRYAAQT

SEQ ID NO: 78824 - protein, 349 aa, unidentified
MFHAGLDLSRKRIDVCLIDSEGEVVGEFAVPADADGLRGLVRRVGPVRVRAVIESMSGARFVHDALEQLGWEVLIADAQKVKGLAPLACKTDRIDARVLAVLSFRDLIPAIWLPDPRVRAEREQARFRMHLVKHRSMLKQRIHSVLINWGKPCPVSDLFGVEGRRLLDELQVPEPWRGSIDASLILIDDLEVQIAKISAELKLTGVEHPYTPLLMTAPGIGWVLGHTIGAEIGEIERFASPKKLVGYTGLCPRVYQSGDKDRRGALTKAGPKYLRWAMLEATMHACRHPVYRDRYQATKKRLGRQRGAKVAQVDCARRLTEAVWHMLTNNQPFAPQAPAAGGAAFRLAA

SEQ ID NO: 78825 - protein, 376 aa, unidentified
MRAVFGIDVSKASSEVAILVNGEKVHGYTMSNDALGFARLLGDLRTVHKPEIIFEATGVYSRRLQAFLDEHGYAYTRLNPLEAKKQLDSLRVRKTDQIDAEKLAQSQFVLNRKPTYVQEEVYQNLRALSRFYQNLTEDIVRAKNRLHKVLQVTFPELENILSTPSGEQYWNLVTAFPCKDFVLDLSAEKLIALANQSYCAVKKTSPILEEVRYYAKELLRLSEQRQAVLDEMVELAQPLPEYDILLSIPGIAETTATSIIGELGDIRRFQSANQINAFIGIDLRHYESGNFLAKEHITKRGNPYARKILFKCIHNIASASHTNPCHIADFYEKRKRQSQTTSTKPHTIASIHRLIRTMYYLIMHNKLYDYASTQNQ

SEQ ID NO: 78826 - protein, 311 aa, unidentified
MANIICGVDVSLKTLDGRISGSGLELSVRRDPEGIAKLAAFCTEHGVELVVMEATGGYEKLPFGLLWAAGVPCAIANARSVRRLAEAMGVLEKTDRIDAKVIADYAGAKGLVAQAPESQVQERLRALVTRLRQLTQLKVAQSNQRRLVQEADVVAVFDEMLALIARQSKALETQIADLLGADPLWRALDAAFREIKGVAGRTVARLMAEMPEIGTMSNKAVAKLAGLAPIAKDSGKRQGKRPIRGGRANVRSILVVVAGVVARHDPDLAAFHQRLTQAGKPKMAIRVAVARKLLVRLNAKARDARNAMITA

SEQ ID NO: 78827 - protein, 400 aa, unidentified
MTAVWAGIDSGKRAHHCVVIDSTGRLLLSRRVVNDESALLELIAAVLAVAGGDPAVWATDLNAGGAGLLIALLSERGQQLLYIPGRIVHHAAATYRGDGKTDAKDARIIADQARMRTDLQPVRGADQISTDLRLLTARRTDLVYDRVRTINRLRATLLEFFPALEAAFDYSKKAPLILLSGYQTPEGIRRIGATRLAAWLKKRGCRGSTSVAAKALTAANAQHTVLRTEAIGAQLVAQLAQQIAVIDAAITQLDGQICERFDQHPDAPILLSMPGFGAVLAATFIANTGGDLRAFETVDRLASVAGLAPAPRDSGRISGNHHRPRRFNRRLLRTCYLAALSSLKNSPASRAFYDRKRAEGKNHKQALIALARRRITTLWAMLRDRTIYQEPPQPALAPAT

SEQ ID NO: 78828 - protein, 352 aa, unidentified
MTVTIVETRAPARAITGGVDTHAGAHVAAALDPVGGLLGVQEFPATPAGYAQLLGWLGGFGAVCLVGIEGTGSYGAGLARYITAAGVRVVEVDRADRQDRRRAGKSDPLDAVSAARAAQSGRAAGAPKGRDGAVEAIRALMVAQRTARSERTQTINQARALVVTGPDDLRIRFATHAPADLVAELASLRPRPGAVVGYATRIALRELGRRAQFLDRQLERLDEFIVPLVTARAPGLLALYGVGPDTAALLLITAGDHPGRMRSEAARAHLCATAPIPASSGKVTRHRLNPGGDRQANHALYRIVITRMSSHPPTRAYVARRTKEGLSKKEIIRCLKRYVAREVYPHLRGPAG

SEQ ID NO: 78829 - protein, 347 aa, unidentified
MNYIGTDIHISTMDFKVVNNFGKVKMAGKVSTSAPNFIDFVRSVPRPRQVIIEEGPLASWLLEICIQNEEQLIITDPKRNHWIGLSGEKEDKIDAEKLAQLARGGYIKEIHHPVGQRRRLRELILAYHDTNKSIVRVKNKIKAKFLQHGIQCPGKTVYLPQQRAEWRKKLPQESAMLVIIDSLWRQLDQIQDNLETILAEAILQAKRYPEIKLIDEIPGVGFIIAATIVAILETPHRFADKRKVWAYAGLGINKKSSANKTYSEKLSKAYNRILKCVVGEAAQAAINAGNNALQKTFCEMTAAKGIAPPRAKLTISRDIIATAWTMWKKGEHYNPKIATQIKTDVAA

SEQ ID NO: 78830 - protein, 391 aa, unidentified
MSMYFVGIDISKYKHDCCIINAADQSIVAKFTIQNDKDGFCQLLTSLQNLSTPKNIRIGFESTAHYALNLELFLEKASHSFMEINPVLICEYKKSTSLRRTKTDSIDCESIARWLMTVEYKPHSKGFYHTYSLKSLTRLRDRLVRQRSFYLVKITNVLDHTFPEFKPFFQEHFSKTALYLLENYGTAEKMAHMNSASYDNLRRISRGKFSPQKFLELKNLAANTVGVNNSIFDTELSCLLTLYKDVAEQVAVLEKQIKELIEEVHPHYMSIPGIGPISAAIIYAEYGDISNFSSPAQMLAFAGLEPGINDSGTESHKGRMVKRGSSQLRYVLMNCALPLIRFDMTFAAYYAKKRTEGKPHRIAMSHVVKKLVRVIFALERQNTDFKPQALR

SEQ ID NO: 78831 - protein, 335 aa, unidentified
MEIPVEIKMKTRKTNHENIINAGVDVSKDNLDALLEGWNHSRRFANTPAGRRKMRSVLAKAAPNDRMLRIAVEASGGYEQPLLEECWTKGIACTRLNARQVRDFAKSKGILEKTDDIDADAICQFATVLKPEIGMPARKSVRKLSALVRRRDQVVDANRVEKTRLQQARHCGSGAFILRSIRKQIGACEREIVQLEKEMHRVVASDEQLAAEFAALIAVKGFGPVTVWALLGEMPELDRMNGNEASKMAGVAPLAYDSGSKKGVRRIFGGRSLVRRILYCAAMSAAQHNPILKAVYDGLIAAGKKRKVALVAVMRKLVRLANLILSDNDFVLSEA

SEQ ID NO: 78832 - protein, 303 aa, unidentified
MLEVNTIGLDLAKNMFQAHGSDASGAVLFRKKLRRDHVLRFLAAQPACTVAMEACAGGHYWAREIAKLGHDVRLIAPGYVKPFVKRQKNDAADAEAICEAAQRPTMRFVAAKSEEQQAAAMVFRVRDLMVRQRTQTINAIRGHLAEFGLVAAHGLFHAARLVAAIEDEDNAVPEAARPILSLLVAQLRSLGEKVAVLDREIARRAREDAEARRFMTIPGIGPITATALAALAPSATTFKRGRDFAAWLGLTPLQRSSGGKQKLGETSRMGERTLRRLLIMGERRRSLGHAEGIDKGFLALSNA

SEQ ID NO: 78833 - protein, 322 aa, unidentified
MVLIGCDYHPSWQQVCWFDQATGETGDEKLVHASGDAEKFYRCFSSPVRVGIEATGNCQWFLELLNRLGHEVWVGDAAKIRASDSRQQKHDKRDARLLLQLLMEDRFPRIWTPTREQKDLRQLLIHRYKLVGLRARVKNELQHLAMNQGVTKKGKLWSKAGEKVLCELPLAPWASQRRKDLFRVREMLNEQIDLLPITSMAFVLTMGEVSRFQRGKQVASYLGLIPREYSSGGKQRLGSISKQGNRFLRMLLVEAAQAAVRYDPGFRNEYFHRCHKKAKGVAKVAAARKLAIRLYWMLRTNTGYPEVVRVESSSRVAVVGAS

SEQ ID NO: 78834 - protein, 345 aa, unidentified
MLYAGLDLSRKRLDVEVRDGDGAVVAVTAVSPDADGLRTLVERLEPFGRVRAAIESMNGARFVHDELELLGWQVEIADAQKTKGLAPLACKTDKIDAGVLAELCRLALVPAIWLPDPAVRGERERARFRLHLVRHRVALKNRIHATLIAFGKPCPVSDLFGVGGRRLLAQLALPEPWSHTVEASLRLVDQLDQQISECERDLRRRGADHPYVELLTTMPGVGWVLGYTIAAEIGTITRFSSPTKLCGYTGLCPRVYQSGSVDRRGPLAKNGPRYLRWALIEAAQHAARSVYYQPLYERTKTRLGRNRGSKIARVTVARKLAEASWHMLTRNQPFTPAGATSVLTA

SEQ ID NO: 78835 - protein, 424 aa, unidentified
MKVTYQTCCGVDVHKSFLVATIVKTTGGIEPSYQKKRFSTFNNSILEFKQWLINNNCHDVCMESTGKYWIPVFNLLEDQINVTIANPKWVKAVKGNKDDTKDSKWIGDLFRLGLVKGSYIPCKAIRILREYTRYRYKLVSCRSSEKNRYQNALTVCNVALDSVVSDIFGKSSTSIIDYLLEQSGTTINHEEIASKLLRRLKSKEDAVIESVEGYQMTDAQKYRMRLVRAHMDYITAEINDVDKMIENMISSNPDFENAVQFLCTIPGVKRDSAITIISEIGTDMSQFGGSKRLCCWAGLTPGSNESAGKKKSVRITRAGVYLKPALVQCAHAAVKSDKSPYYKKKYESLVKRRGKKRSIIAIARMILTAIYQMLSTGEQWNPSDLYKIDMPVALVEKQKAKAIKQAKKLLQREGLLPPDEPLAS

SEQ ID NO: 78836 - protein, 428 aa, unidentified
MSENSTTHPEPEFVAFVGIDWADQKHAWCSQRAGATQREHGEVEHTPEMVEAWVSQLAERFGPGPIAVAVEQVKGALVFMLSKYECIHLFPVPSTMSASLRKSLYPSGCKDDPRDAELLLDLLLQHRNKLRRLTPDNEVTRRIQNLVEERRTLVDEKTTQLNRLTGYLKVYFPQMLGWFEKLDTKLVCDLLERWPSLEELQKVPPAELRKFFRQRRGRHQELTEWRLEGIGQAMPAIRDRAVLEAKRAMVQVSAQLLRTLLEGIANLDSKIEEAASAHPDFFIFKSLPGAGAALAPRLLAAFGSQRDRYGSAEEVQKHSGIAPVMEKSGKKKWVHFRWACPKFLRQSFHEWAGHSISQSTWARAYYQRQRGRGKDHHAAVRALAFKWIRILFRCWQDRVAYNENKYLAALARRGSPLSAVLTVTAATL

SEQ ID NO: 78837 - protein, 358 aa, unidentified
MKKIVIGIDISKEKIDASAIDVRDCQQGVVRLDYQTFDNRPMGFRRMLVWARHLMNGATLQDVLFCCETTGGYDRGLCDYIYGKGLDIWREGALQIKRSMGVRKGKDDKADSLMIAEYAMRHMDKAVIYESPNETIRELKALFLYRHKLVQEKAEKQVRAAHLTDTAAKSRSMRFILHDARRSVKAIQKSIKECEKHILELIESDEEIQRNYGHIVSVKGLSIVNATAFIAYSNNFRGITTANKMASYYGVASFRDRSGSSVDKKACVKYYSCSLLRATITQAAEWTVKENGIYRDYYLRLKAEGKPYGVIINNVKNKLIHLVFSLVTNDTDYEQNHEFLRVKRKTEHRKSTQLENIN

SEQ ID NO: 78838 - protein, 409 aa, unidentified
MMKQNIIFGIDVSSKSSTVCVVIDRIKQGETFKITNDSFGYQDLLDRLNQYLITPLVVFEATGVYSLSLQAFLEDYHIKYLKLNPLKAKKLMDNNLRHNKTDKVDAYRLALIQFNAPQKLRAPQPKEYHELQNASRYYEELTQALIINKNQLHRNLQSTFPQIESILSTSSGRVYWTIVSLFPHAQYVLNHNENQVFQSLLAISGIGRQRAHYLTTRLYALARQAYPYDNESSITIRAIQRNIANLLSLSAERDNVINYMEKLAMQANARSLTIYESIPGIAKTTAVRLVAELGDLRRFDTSAQIDAFVGIDPGRYQSGEKDSHLGITKHGNHLARKILYRTITQMETVKATQPCHITDYYDKKKRSSNSPGYKKIAIASVHKLIRTMFALIKHDQLYDYNVATHNQRL

SEQ ID NO: 78839 - protein, 470 aa, unidentified
MKSTANNKNKQLNPDFSSEEIIAIGKRAYEAATAITWRQTEVGRTLTQNDKIALVDDKTLVIGADVGSEKHDIRAFDNRGREFSKKAFEFDNNEAGFAKAKAWILMIRDEQHMEKIMVGMEPTGHYWINLASWLMNEGITVVLVNPHHVKKSKELDDNLNRKTDRKDPKVIAGLVHGGRYSMPYLPEGVYADLRNLNNLRLMNTVEKTRCMNRLNRWLSIYFPEYSTVFKNISGAGSLLLLEQAALPGDIVKLGAEGVNKIWREAKLRGAGYEKALKIISAAEHSIGSTKGLDTARAEIQWILENLRTMIKWDKDLLERTESLAREIPCIENMLAIKGLGARTLVGIFAEIGDFTRFCGVKPIQKLAGLALVEDSSGKREGRTIISKRGRKRLRYHLYQAALVLISQNNEFREIYDYYQTRQANPLKKMQALMAVACKLLRVLYAMVTKGTRYDPEKLLSDIRRPKRKAA

SEQ ID NO: 78840 - protein, 461 aa, unidentified
MGKGSESGMTRGDRRRNARREVLRGLVPRDGAVVGIDLGEDKQALAVVDHDVRVVARRTVRVKAFRLGPALDWAVGQARAAGFGAVAVACEPTGARWLQVQRLCAERGLPLVCIQPLVSHVAREQQDLTGHKTDEADCVMIARLAFELHCYVPEELDQAWAELRHLGRRREQLVTAATASVLRVRDFLSVAWPVAAEACAQPFESVTWLAAVQVVTGREGSGPEELAAGGLAEFTAAVRGALPGWGGQRVSGRVCRAVFAVLASTEGVVTAHRRGLFRRIADELGDLQRTRAQLRAAGAGMAAVLAELGLSRLGDIPGLTAVGAAAILAETGDPRRYDSSSSLVKHAGLAPAGNASGAFEGQAHISRRGRPGLRLAVWRAVWPMLAHNPVLAAKHAGLTAPAPAGAGARPAGPGAVRAQRARARVACAASLLRWIYSMTVHGTSWDPAVAAGAASCPAQAA

SEQ ID NO: 78841 - protein, 356 aa, unidentified
MVKTSVASIDRFVKDFEGHPFNIGIDVHKRSYHVAMRRADGKAVTWVSPAEREGFVEQIHRLSIRVSAVAYEAGPTGFALARALRSAGIETLMAAPSRIPRAVTAGAKTDRLDCLRLADYAAKGLIRPIAVPTPQQEAQRSLERRRHDIVDSLRRCKQRIKGFLLFLGLPEPKETERWRRGAAEALLALPLDPHARLTLESHLRELTFYQSELSEVEEQLRQMARQHGHVLTCLQSIPGVGEVVATTFMLELFDPERFQRAEEVTSYLGLAPMVRHSGEKTPSGRLRPVGQTRLRSLLIEAAWMWRQYDPYARNLYNRFLGQMGIAQKAIATVARKLAVILWRLYVERRHYRPALA

SEQ ID NO: 78842 - protein, 384 aa, unidentified
MQTPNDLSQSRIVLKQDSTLIAVIEMSQSSWLVAGVVPGVERQPLKKLAVDESALLKLLNRWREEAEKAGRRIERITVAFEAGRDGFWLARWLRARGIEAHVIHASSVAVSREHRRAKTDRLDTELLKRALLGWLRSERDHCKMVAIPTTKDEDAKRPSRERQSLVGEQTRIVNRMKAALIRLGIRGFNPKLKKAAGRLEDLRTPEGEPIPPNTLAELHRDMQRRRLVSDQIRQIEEARLERMEQAPGDGPHAMVRLIARVIGVGIETADMLVHEVLSRKLRDRRAVARYAGLTGAPDESGSKRREKGLAKAGNARVRGGMIQLAWRFLLFQKDSALAQWYRTRTEGGRNRKTIIVALARKLLIALWRLVTTGEVPAGVVLRAA

SEQ ID NO: 78843 - protein, 408 aa, unidentified
MNPLFVGIDVSSRSNVVYLMNPDGSKYSSFSVQNNLGGAKLLSEKIVSALSSMQLSDVVIGLEATSIYGDSLVYALREDGSLGRFQRKIHILNPKQVKKFKEAYPDLPKNDWVDAFVIADHLRFGRIAKEVYLDDYRYHAPKTLTRARFDVIQNLTREKQRFANYLFLKCSGMAQDKDIPNTSATTIALMEHFESVDELANTDLNELTAFISETGHGRFADPAATAKAVRAAASGSYRLPKTVNDTVNQAMAISIASMRALEKQVKVLDKAIDQQFEIIPNTLTSIPGIGRIYSAGIIAELGDIHRFDSQASVAKFAGLVWHKNQSGDFEAEHSRMIKSGNRYLRYYLLEAANSVRRCDSEFRRYYDLKFKEVNKYQHKRALAFTARKLVRLIFRLLKDNRLYIPPEG

SEQ ID NO: 78844 - protein, 334 aa, unidentified
MENIALIGIDLGKNSFHIHCQDHRGKAVYRKKFTRPKLIEFLATCPATTIAMEACGGSRFMARKLAELGHFPKLISPQFVRPFVKSNKNDFVDAEAICEAASRPSMRFVQPRTESQQAMRALHRVRESLVQDKVKTTNQMHAFLLEFGISVPRGAAVISRLSTLLEDSSLPLYLSQLLLKLQQHYHYLVEQIKDLESQLKRKLDEDEVGQRLLSIPCVGTLTASTISTEIGDGKQYASSRDFAAATGLVPRQYSTGGRTTLLGISKRGNKKIRTLLVQCARVFIQKLEHQSGKLADWVRELLCRKSNFVVTCALANKLARIAWALTARQQTYEA

SEQ ID NO: 78845 - protein, 343 aa, unidentified
MQTITTIGLDIAKSVFQVHGVDAEGNVIFRRQLKRRYVLAFFEKLPRCLVGIEACASSHHWSREIQALGHTVRLMPPAYVKPYVKRHKNDATDAEAICEAVARPNMRFVATKTSEQQSCLTLHRTRHLFIRQQTSVINAIRAHLAEFGIVAPVGRHGVAQLLGIAADANDKRLPDVARACVAALGTQLQTLKAQILEFDRMITAWHRSNEASRRLDDIPGVGPVLATALVASIADPKVFRSGRDFSAWIGLVPKQNSSGGRDRLGNISKRGDRYLRSLFTTGALAVIRYAKIHGTRHRPWLTALLARRPTKVAAIALANKIARMAWAMMARGERYKEPAALAA

SEQ ID NO: 78846 - protein, 320 aa, unidentified
MTNGAVFIGVDVAKAHLDVAVRPIGEPWQVTNDAPGIARLVTRLDQLRPTLIVLEATGGYERAVAAALSAGGLPVAVVNPRHAAQGAPGDFAKATGKLAKTDTLDAHVLAHFAAAVQPTPRPLPDANTQMLAAILARRRQLVAMLTAEQNRLHTAPTAIRERIGAHIAWLEEDLKEIDTELAQAIADDPTWRERDALLRSVPGVGPVLATTLLAELPQLGTLTRHQVAALAGVAPLNRDSGTRRGIRTVWGGRARIRGALSMAALVATRYNPVIRAFSARLCAAGKPKKVALTACMRKLLTILNALLAHHTPWQSSASTT

SEQ ID NO: 78847 - protein, 468 aa, unidentified
MGHNRSRSRQSSGKKGKHLSLLKRINRNAAGIDCGSEAHYVAVPPERDAEPVRSFKTFTADLYRLADWLEACKVKTVAMESTGVYWIPIFEILEERGFEVVLVNSRHIKNVPGRKTDVLDCQWIQELHSVGLLRGSFRPAAEIASLRAYLRHREKLVQSAASHIQRMQKVLVQMNLLLHNVISDITGVTGMRILRDIVAGVTDPMALASHRDHRCRASVEQIAASLTGNYRAEHLFVLRQNLELFDTFQRQIQTCDGEIESLLRTLAAKRRRPKAPVPSPRCKPKFCDNEPRFDIRDPLYRLAGADLTQIDSIGPYTALKLIAEIGTDMTRWPTEKHFTSWLALAPKNKITGGRLISSRTQPSANRAATALRMSAMVVGRTSTALGAYYRRIAYRIGKPKAITATARKLAILVYRVLKGDLDYNDPGAQAYEEHHQARTLRNLRNRARQLGFGLVNVETGELLHGPVT

SEQ ID NO: 78848 - protein, 338 aa, unidentified
MVLIGVDPHKGSHTAVVVDRDEHEMARLTVRADRRQLQRLLSFAEPFGDRTWAIESAGGLGFLLAQQLVNAGEDVVDVPATLAARVRLLGSGRGSKNDPNDALSTAIAALRDPHLRTVIAEDHAMVLRMLADRHQDLTGLRTQAVCRLHALLAALTPGGVQKRLSANAAAALLRRVHPVTAVETERKNLALELVADIRRLDRAAAAVKARAKVAVAASGTGLTNIYGVGPIVAALIIGHAGDITRFPSAGHFASYNGTAPIEASSGPKVRHRLNPRGNRQLNHALHMIAISQSIHQTPGRDYYQRKMAEGKSVKEARRALKRRISDAVYRQLRNDRRA

SEQ ID NO: 78849 - protein, 420 aa, unidentified
MEIDHGEQHLIERVAAIDIGKAEMVCCVRVPGAGRARAQEVRTYSTMTPNVLEMTDWLTGLGVTRVVMEATSDYWKPVFYLLEEQVPETWLVNARDVKHLPGRPKTGRLDAVWLCKVAERQMLRPSFVPPPAVRRLRDVMRYRTDLVAVRTAEKQRVEKLLEDAGVKLSVVASDIFGVSGRAMMAALIAGERDPARLADMALGRMRARTGLLEKAFMARFSEHHAFLLATMLARVDTASEDIAAMDARVTAVLDEELHDAAARLTSIPGIGAVTAVAILAEIGTDMTRFPTAAHLCSWAKFTPLTSESAGRTKGRQSTGHGNRYLARTLGEVAVMAGRSHTFLGARYHRIARRRGKPRAIVAVGRSLLVIIWHLLSHPGTTFTDLGADYYETRINHQRTARTHIRALEGLGYQVTLAPAS

SEQ ID NO: 78850 - protein, 385 aa, unidentified
MGNHTFIPRDYDVFAGLEVDKRSISVTFTDQQGVLKSLRMPYRVEQLVNYVHKHFAEQRGAFAYEAGPTGYGWYAGLVAQEYRCLIASPSMIPQAPGQRVKTNRLDSRGLAESLRGGQLKSIHVPSAIYRELRHLTQLRDTFVSEVVAMKLRIKSLLLLEGIEFPPAPAGSQWSDAVKKTLRALPCSPTVRFKLDQLLDSLAFHEQQVLKTTKEIRRFCQRDPALAQCLQYLMTIPGIGWIVASQVLARIGDGRELNNVRQLAGFLGLVPTEHSTGDRTERGSITHTGDGRLRSKLSQAAWSAIRQDDELREFFRSICRTHPRPLASRVAIVAVARKLSGRIAVVLRQQRPYEVRAKVHSAPLTQEETVPQGTTRRLREPGEKTS

SEQ ID NO: 78851 - protein, 365 aa, unidentified
MNNETISSNGISPASLVNYVNRVLNLGLDVHYRQVTVAMQEDGGRIKAAGKMGHMDFLNWVQKKLQEGWQIYSCYEAGASGYWLHRELVKLGVKNLVVVPKAMGQGGKKQKTDKRDAGELCDCLDRYLRGQDKALSVVGVPTEEQEEKRALIRYHRQIMADRGRCEARGKGLLCAQGIEVHGRWWQGDAWLETLSDPRLKDWMKEQLIGWRNKILSTDEEQDGLRERIAALAPVILPKGVGAYSAAVLYYEMRGFERFTNRRQVGSMTGLCPGIHQSDGRGKEGSINRCGIGIVRWTLVEMVWRLIIWQPQYPPVRRLAAGLVKGKRAKKRLVIQAARRLAIDLWRLSTGQTTPEKLGLTMHSAK

SEQ ID NO: 78852 - protein, 397 aa, unidentified
MIAVGIDVSKSKSTVAILNGDGSIRAKPFDVHHVADELQALVDYIKKTSEPPTILMEPTSHYHYPLLKAFTEAELPVCLINPYQMKKYGDTELRKAKTDKRDSLRIAQYALEKSYSLIPYTPQDQKYEDLRFLSRQYSQRISTLTVAKVQLLSLLDETMPGITTILPLKSRDPDNCVLLRFIKRFKSFDVIRKMGKTRFLDSYQVLVKKTKDRFAGSKGLAIYELVLNSVTTRGENPLSAMTQDQCVDLVSTSQKAADEINLQMRIIAETMPEYKVLRSMAGVGDRLGPIILGEIGDIRRFHSGKALNAYAGNDAPPYQSGQFESRNRHISKRGNPALRKACFEVMQALKLTKPQDDPVYLFLLKKEQEGKPYNVAKMAAVNKFLRIYYARAMELYK

SEQ ID NO: 78853 - protein, 344 aa, unidentified
MSYYVGLDVALRSVSACVIDDQGEIVKEAKLDSEVEAIVAWLAPIRGEIDIVGLEAGTLTQYLTYGFQAADYPIVCMEARGVHAALSAMRNKTDKNDARGIAQILRTGWYRTVHVKSIESHHIRALLSSRKAVLNKCIDLENEVRGLFKVFGIKLPAPLKHGAFDGAVRETIEADPALSHALLPLLDARLVLYRTFLEMDRRARKMASEDAICRRLMTMPGVGAISALTFKAAVDDPKRFKRSRTVGAHFGLTPRRFQSGEMDNMGRISKAGDRDVRIVLYAAANALLTRTTGYSPIKAWGMRLMKTKGRKRALVAVSRKLAVILHRMWVDGKDFQWGTEGGQA

SEQ ID NO: 78854 - protein, 382 aa, unidentified
MDIVHDRCAGLDVHKKTVVACVRHINPDGSVASVVHTFGTMTADLLALADWLDAHGVREVAMESTGVYWKPIFHILEGRFDVMLVNAGRLKQVPGRKTDVKDAEWIAQLLQHGLLSPSFIPKPEIRELRDLTRQRTELVRDRAAVANRLQKTLEDANVKLGSVASDVLGASGRAMIRAIIDGQDDPEKLADLAKQRLRGKIPELRRALLGRVTDHHRFVLRLLTDQIDALERLIERLDERIDEAMRPFDEAAGRLQGIPGVGDRAAEVIVGEIGPDVESFPTAGHLCSWAGLCPGNDQSAGKRRSGKTTKGSPWLRSLLVQSAWSASHAKNTAFSICYRRWVPRLGKKKALIAVAHKILVVIWHLLKNGADYRERQLPAPAA

SEQ ID NO: 78855 - protein, 353 aa, unidentified
MLTIGVDAHKRIHMAVAVDAAGREVSRWRGANSVEGWGQVAAWAAALDSDVRWGVEGAWNYGRGLAQQLVAAGATVYEVNPRWTAQGRRRARRTDKNDRLDAQAVALLVWREATALPLVSADDETAVLDLLITEREAAIAEVTRLRNQAHQLLLQLDPGYTARLPRLRTTAGTRALETYTTADAHPLQQQRAAAVRRLAQRLRLALEQARDLARQIRALAAPRFAPLARICGIELLTAAALAGILGPGRRFATDAQLAAYAGVAPLEASSAERVRHRLNRGGNRRLNAILYRVALTQTRASPLAQAYLARRISEGKTRREAIRALKRHLIRVIWRAWQECQQPADGVPISVAA

SEQ ID NO: 78856 - protein, 338 aa, unidentified
MSQNTSISMKPKTAAFHVGIDVAKATLQVHCQGRQSEIKNAPTDIAKLCKQLKAIAGSHVVCEATGGYERAMVQALQEAQIPVSVLNPAHARAAAQAQGQRAKTDRIDAAMLTDYGDRFEPEPTPKVSQTQRQLVELTQWLKQLIDAQAVAKTQGEHDDNPFVAKQRCALLRHDQSQIKKVEAQLKALQEKDVELRQRVECPESIDGVGERTSLLTLAQMPELGRLNRHQTGALAGLAPWTRESGTMKGKRCIGAGRPDVRTVLYMAALSASRFNPVLSVFYKRLVAKGKPHKLALTAVMRKLVVYMNLSLKTLAAKSAPAEIPPKTDEKTDEKSCKN

SEQ ID NO: 78857 - protein, 380 aa, unidentified
MSTRVAGPRRVGKEIRLLAEEVAFVGVDVHKRSYTVSVWTERRGRVARWTQPADPQVLCRRLEGVRGQVAQVVYEAGPTGFGLVRYLWNEGFPAEVVAPSQVPKTAGGSDKSDGLDADDLAFFAGKGMLKGLYVPSPEEESDRQVERRRDQVREDLGRAKRRIKSFLLQYGVAEPAGLEHWSNAAVEELRRLPLGPELRSCLDSLLRDFDHTQEEFLTLDKETAELARGERHRRDVAAMRQVPGVGVVTALTHAVELPRPERFTRDEEVGSYLGLAPRTSRSGSTSKGGPIRKAGNRRLRRILVEAAWQWVRRDTRGKALYRHLLRCTGTAQKAIVGVARHLGILLWRLRVTGERYVPGPPPGDEAAPPPSGGRTEEPAC

SEQ ID NO: 78858 - protein, 362 aa, unidentified
MNYVGVDVHKKYSVLCALDETGRKLREGRVEGNASNGFAQFFAGLDGPSKAVVEASWNWGLVHDELEELEQVEEVVLAHPHKTRLIADAQIKTDRLDAHALSTLLRGNLVARAHVPRRETRARKNLLRQRLYWARLRTMLRNRMHVLLDRQRGLELPRCSDIFGVRGLGFLRRLQLPEPDATLLGEQLALHDLIAQQMKAQEKRIAAEFGSEPMHRRLLSVPGIGATLAAVIACEVDSIERFNSAEKLCAYAGVVPTTHSSGGKVAHGQLLPFCNKWLRWALVEASWVAIGCSPYFGTLYKQHRMRGKKANTAVLIVARRMCRIIWQLLHEKRDFEKRALSPNFTFPGCSVVRLTAVKASGP

SEQ ID NO: 78859 - protein, 310 aa, unidentified
MDVIIDKGCGLDVHKETVVACVMGEGIKKEIRTFSTMTEDLFRLKSWLSEKGITHVAMESTGPYWKPVFNVLEDSFEVILANARHIKNVPGRKTDVKDSEWICKLLRSGLLAASFVPPKAIRELRDLTRYRRKLTQAISSEKNRVQKVLEDANVKISSVVSDTFGVSASRMIEAILAGNLDTESISDLAVGKLKGKKEELKKALVGNFQEHHRFMIQASLDHIESLEKIIAGLDQEIDRKLKDYHKEYELLRTIPGVKEQGAASILAEIGADMDRFPSDGHLSAWAGMSPGNNESAGKKKAERRPTAIRI

SEQ ID NO: 78860 - protein, 299 aa, unidentified
MLQAHTLSVGMEGPTEAIAVASVAQEQGADVIALGTLGTRPGAIDPLIRPLQSQSTPRVCVDDAGPCGAGLSRSLTQTGAVGWVVAPSVRPTKAGDRVTTDRRDARPLARRMRSGDLTPVAVPAVHEAAIRDLRRAREATLRDLQAAQVRLTAFWRRQDSRSTGQAPWSPAPRRWRSAGGCPTPAPPMVWQEAVQTVTAPTARWPRREHARHAQVHPWRCAPVVEALQALRGVQCPVAVPPVAALGDLTRCETPRHLRHDLGRTPAESSRGARHHQGRMTPTGTTHARRALVAGAWASR

SEQ ID NO: 78861 - protein, 465 aa, unidentified
MKRHRRRQSPKPRVSSSILEHLNPHAAGIDCGSAEHFVAVPADRDPSPVRSFATFTGDLERLADWLTACRVTHVAMEATGVYWIPIFEILEARGFTVVLVNARHVKHVQGRKSDVSDCEWLRDLHILGLLRGSFRPSNDIVALRAYLRHRATLIESTGAIIQRMQKALIQMNVQLPLVVSDITGVTGLRILRDIVAGQRDPQHLAGHRDYRCHASEAEIVAALTGNYRAEHVFVLQQNLEIFDMYQRQLATCDAAIEAHLQRLTARVTAPTTALPPARRRQKPHDNEPRFDIRTPLHQLTGVDLSQIDGIGPYRALRLLSEIGTDMTRWATEKHFTSWLTLAPNNRISGGRLLSSQTQPSANRAAAILRLAAMNLGRTQTALGAFYRRLAFRVGKAKAITATARKLAILVYRTLKDRLVYADPGADAYDAQHRTHVVRRLRQRAQNLGFGLIDLSTGEVVEGAVS

SEQ ID NO: 78862 - protein, 337 aa, unidentified
MTQIVLIGLDVAKHVFQLHAVAADGRVVFRRQVRRPQLITLLMSIPSCRIAMEACGTAHYWGRQLEELGHEVLLIPPDYVRPFVKRQKNDAADAEAIAEAAQRPDMRFVRVKSEASQAASIVFRARDLVVRQKTQLLNAIRSHLAEFGYIFPQGAAASAKMQEVIENNDDLPPAAQGILRSLWQHLSSCEAQLVEFDKEIQKRARDDLDTRRLTSVPGIGPVTAAAITALAPDPATFRKGRDFAAWVGLTPLERSTGGKQRFGRISKMGERTLRRLLIMGASAVVSWVRRGKIHPSAWLASILHRKPPMLAIVALANKMARIAWAILKHGGSYMQPA

SEQ ID NO: 78863 - protein, 347 aa, unidentified
MLHAGLDLSRKKVDVCLLSETGEHLDQLAAPPDADSLRRLARRIEQVHHQPVCAVIESMTGARMVHDTLEAEGWAVEIADAQKVKGLAPLACKTDKIDSQVLATLSQRDLVPAIWLPDPRVREERELARFRLHLVKHRSMLKHRVHSSLVNFGRPCPVSDLFGVEGRKLLERLEVPEPWRGNITASVLLIDDLEGQIAEANRRLKQGHADHPYVPLLMSAPGIGWVLAFTIAAEIGEIERFSSPEKLTGYTGLCPRVVQSGDSDRRGPLSKHGPRYLRWALLEGTMHALKHPAYSERYQRNRKRLGRQRGAKVAQIDIARRLAHAIWHMLSRNQPFAPRGAAFRLAA

SEQ ID NO: 78864 - protein, 370 aa, unidentified
MNQSSTLYVGLDVHKDSIAVAYVAKDHDAEVIYLGTIGTRQCDIDQLVRKLQSKAPHLVFVYEAGPCGYWLYRYLTKKGQVCWVVAPSLIPKKAGDRVKTDRRDAVQLARLMRSGDLTPVYVPKVEDEAIRDLTRAREDALRDLKAAKCRLKAFLLRHDIRYTGRASWGPAHLRWLAEVVCPTPAQQIVFQAYVRAVTEHTERLQRLEQALHEQVKSWRVHPVVEALQALRGVQFTVAAITVAELGDLSRFDNPRQLMKFLGLIPSEYSSAEKRRQGSITKAGNTHARRALVEGAWAYRYPAKVSRHLQLRLETQPKAIQDISWKAQVRLCKRYRRLRARGNHANQVVVAIARELVGFMWAIAQQVTVTP

SEQ ID NO: 78865 - protein, 392 aa, unidentified
MCWRVRASASKIVSCPVGVARRQIAHLREALMGQRTSVGLDVHARSVVACAIDAETGEVFERRFGTDSAEVTGWLGRLPGPVRAAYEAGPTGYGLARDCASAGIDCVVAAPSKLLPKPGDRVKTDRRDAQHLAELVRADLVTPVRVPTEEEEAVRDLLRAREAATTDLMRARHRLSKLLLRHGIVYPGKQTWNKTHLAWLGRQRFGLTAARQAFDNDLAAVIEVGARRGDMDAWIEALAAESAFEPVVTALGCMRGVSLLTGFALAVEIGDWSRFTGASIGAFAGLVPSERSSGGLRWQGGITKTGNAHVRRLLIEAAWHHRPAYHPERSKALQDRWAKASPEQRRRGHEANRRLHRKWARFDTNQKRPNTANAAVARELAGFCWSLAMMTS

SEQ ID NO: 78866 - protein, 396 aa, unidentified
MKATDERVVIGMDPHKRSVTIEVMAADEEVLGGGRFGTDVAGFKSMLEYVTRWPDRVWAIEGCNGIGRHVALRLIAEGHEVVDVPPKLSARARVFATGQGRKTDATDAHSVALVGTRMAGLRPVVHDEQLAVLRLLVDRRASLGDDHTRMVSQLHQLLLELIPGGAKKDLSAAQAKALLAKVRPRDVVGKARRRVAAELIADLERVYARKKAADKELKELLAATGTTLMDLHGIGPSGAARLLVEVGDITRFPNREHFASWNGTAPIDASSGDQVRHRLSRAGNRQINRTLHIMATVQLRNDTQGRAYFDRRKHDGKTSMEAMRALKRRLSNIVYRTMLDDAVRASAASEVTGPGGQRGSDSDSSATGSQPQHRLFGSATPGPVTPQPRTPLPAVS

SEQ ID NO: 78867 - protein, 344 aa, unidentified
MPSIVGGLDIHRKQLTFDYLDLVTGEVKCGQVSPADRAHLRAWLARFENPAGVAFAVEACTGWRYVAEELQRAGMEAHLAEPADTAAARGRKRRAKTDRADARLQRELLAQGRLPECWIPPEHVLECRALLELYHDLRAEHTAWLQRVHAVLFHQGAPVFHDLSRTDAPAELAALAREHLSPAGQQQVMLYLRMLEVTAGELDVLRRQLIAAARQLRGARVLAESIYGVGPVTALARTCWLGGAGRFTSARKAVRFAGLDITVCSSDGKRSPGHLSRQGPPVLRWAVYEAGKTHARHVAPDHGYYAAVKDRKDGKRAALSEARKIIRLACHILSELGDDALATV

SEQ ID NO: 78868 - protein, 337 aa, unidentified
MNNIEACGVEVSARELVVARRGKQGVQLTRFANTAAGHRQLLRTLTRGGQRVRVVLEATGLYALDLALLLSAHQQVQLMVANPRAVRHFAQAMMQRSKNDQLDAVVLLEFAERMPFTPWVRPAENTLALWAIARRLQALTKLCTAEKNRAHAMGLSAAIPSTVRQDIARSLRFHQRAMKKLRQQALQCIAADAQLQQRYDLLRSVPGLGEISAVQTLAELLLLPADRDVRQWVAYAGLDPREYSSGTSVRKHTRISKVGNGHLRRALYMPALVASRVEPHMRGFYEHLLARGKSKRQALLAVARKLLHAIYGMFRSQRPYDGTRVYLLPSCLAEKPS

SEQ ID NO: 78869 - protein, 355 aa, unidentified
MLAELVDAVVGIDTHRDTHQVEIALPNGAPIALTTISNDSTGYAELLAWIVDHAPGPRLALSIEGTRSYGVGLARAATAAGLTVLECEQPNRKARRGKGKSDPIDAHLAVLAALRLDADRLPIPRTDGDREALRILLGARGELTAASTAQTNRLRALLLGGDDTDRTLARGTLTESRLAGLARRRPPREASREQAVRHAEIRRLALALRGAARALKANRVQLQTIVNDVVPGLTERRGIGPVSAAQAIVSFSHPGRCRNDAAFAALAGASPLPASSGRTVRHRLNRGGDRALNRALHTIAVTRMRSCPTTQAYVARRTAQGKNLKEIRRCLKRYIARQLYRTLTPAMTPAVEVSG

SEQ ID NO: 78870 - protein, 343 aa, unidentified
MQTITTIGLDIAKSVFQVHGVDATGQVVIRRQLKRRSVLAFFQKLPPCLVGIEACASSHHWSRELQALGHTVRLMPPAYVKPYVKRQKNDMADAEAICEAVARANMRFVPTKTPEQQSCLMLHRTRHLFIRQQTAVINSIRAHLAEFGIVAPVGRKGVTELLHIVADPSDKRVSEVARACLAALGGQLLSLKQQILEFDRMILAWHRSNQTSKRLHYIPGVGPMLATALVASVADPSTFRSARNFSAWIGLVPKQYSSGGKERLGSISKQGDRYLRSLFVAGALAVIRYAKIHGTKHRPWLTALLARKPTKVAAIALANKIARMAWAMMAKGERYKEPIALAR

SEQ ID NO: 78871 - protein, 392 aa, unidentified
MYIVGIDIGKNHHEASIVSPEGKQIGRSLRFATTHKGADSLMSFIFKNIGNSPCVFGMEATGHYWYPIYSFLKAKGYTIYVINPIQSDSLRKMYIRQTKNDSIDSFLIAEVIRFGQFGTTSMADENILAMRQLCRYRDSVISSRTEIKLRIGTIMEQIFPEYEKQFSSLWVSTSMGILEKYLTPENIKNAPIDELFEIIKDKSHNRLTRAKAISIKDAAADTFGIKIAQDAFSFQLKQLIDRMNFLDKQIEALDCQILEYYEKFDCYLHTIPGIGMIAAATILAEIGDINRFKSSSALVAFAGIDPTVRQSGEFSSTHNHMSKRGSPYLRHAIFLAATTCSFHNIPLNAYYKKKREQGKHHLTATGAVARKLTTIIYAVFRDGKPYEPKKFC

SEQ ID NO: 78872 - protein, 355 aa, unidentified
MNSEKYIGLDVHQATISVAVMDSRGKVVMESILETKAATLLEFLAGLRGTLSVTFEEGTWAAWLYDLLKPHVQKLVVCNPRKTALLKDGNKNDRIDARKLAELLRLNNLKPVYHGETGVRMLRELARSYLTLIKDLTRVMNRLKAMYRSWAIPCPGRDVYYTRHRAEWLAKIREAGVRRRAEHLYQQLDMLQHLRQQARRELLAESRKHSITAKLRQIPSLGPIRSALVVALIQTPHRFRTKRQLWAYSGLALETRTSGEHCYVQGQLRRSKKQVSIRGLNKDHNHDLKGLFKAAATRASVQPGPFQDFYQASLAKGIKPTMVRLTLARKIAAITLTLWKKGENFDAEKLKSQAA

SEQ ID NO: 78873 - protein, 357 aa, unidentified
MLKVREKVDFKGKMIDLGLDVHHRNWNVSVFLEGNFIKRFQQPAGVKVLAEFVKRNYPGANYRAAYEAGFCGFWISRQMKENGIECIVVNPGDVPKTSKARSVKTDDRDSRTIGEALSGGLLKPIYVPSHQQESDRSLVRYRLRIQRDITRCKVRIKSFLAYYGINIPQPFDNSHWSRPFIQWLKELSLPFSSAKEALNYMIDQLMLLRPQLLAVTRSLRAMYQRDDYFKSYELLTSVPGIGPITAVTLMTEIGDIKRFRNFYCFNSFIGFCPSEHSSGEKERRGSMTFRHHAALRELIIEGAWVAVRNDPALALAYEELKKKMGGKRAIVKIARKLLHRIFAVWRSGEKYQLGIVK

SEQ ID NO: 78874 - protein, 352 aa, unidentified
MQYVGIDWAYRRAAWCAKSESGEIRNEGVVPADEDGLAKLVLALGPGVVACVEMMSGAVWVRDRLQDAGWRVEVADARKVKAVAPLACKTDKVDARVLAELCRRDLVPALWVPSLSDRELRERLNRRAHLIRLRTAAKNRVFGALSQWGLRIPLRLLRSGDAMAMLEQRGLPPVWRRSVAEALAVVDILDARIAPLEAELRPLARADPRVQLLVTIPGVGEHLALMMAAEIGDVARFPTPRNLIGFAGLAPRVAQSGQSSRTGPLSKAGSRALRWAAIEAAQCAWRPTNPWNRLYLDVKQRTGKSNPAKSAVARKVLIAAWHVLARDEPFKPSRHERGNDPVTASSHFHLAA

SEQ ID NO: 78875 - protein, 409 aa, unidentified
MEVLYERCAGLDVHKQVIVACMRVQREGRAVHELRRFSTMTTGLLELSEWLSSQQCTHVAMEATGVYWKPVWHVLEGSFELILANAMHVRNVPGRKTDVNDATWIADLMAHGLIRGSFVPPTPVQEMRDLTRTRKQLVREVAQHIQRIQKTLEDANIKLDSALSDVLGTSGRAILEALVAGKTNPSELAALASSRVKASPEQLREALRGRVTDHHRFLLKLHLGQIDALEAAVRDVEARMGKALEPFRCQVELLQTIPGVKRTVAETIAAEVGFDMTRFPTAGHLVSWAGLCPRMDESAGKRRSTRTRPSAQWLKPMLVQAAWAAGRKKGTYAQAQFQRLRARRGGKKAAVAVAASLLTAVFHMLRDGTTYQDLGPMYFDTRNKTKVTRRLLRRLEDLGVRVTPVPFAN

SEQ ID NO: 78876 - protein, 340 aa, unidentified
MGEVTTIGLDLAKHVFQVHGVDADGATVLRKSLRRAQVLTFFSRLPPCLVGLEACATAHHWARELRALGHEVRLMPAQYVKAYVKRNKNDAADAEAICEAVQRPTMRFVAIKTAEQQAGVLLHRGRERLVRQRTGLVNALRAHLAEFGIIAPQGLRHVSKLIAIVRDDNDARLPGLARQVLMVLAGQIEQLEAAVAALERQLVAWHRVNPVSQRLATIPGIGPIIATAIAATVTEPGQFRSGREFAAWLGLVPRQNSTGGKTRLGGISKRGNQYLRRLLINGASANLLRSRATKADPWVIGLRRRRPSLVVAVALANKTARIAWAVMQRQQPYQRMAAAA

SEQ ID NO: 78877 - protein, 413 aa, unidentified
MEVLYRRCCGLDVHKSSITACALLREKGRVQTERRRFTTMTHDLQDLATWLRQLGVTHVAIESTGVYWKPVWNVLEGQFTIILANAQHIKNVPGRKTDANDSEWIGDLVQHGLLRSSYVPSEIIRDLRDLTRGRASLSQEASRIASRIQKVLEDANIKLSSVASNTLGKSGRAMLDAIVAGEIDPERLADMALGHLRAKTPQLRLALEGRVREHHRFLLKRLLHQLRFIEGEIDLLDQRLEEIGQQEPAIASAVLRWTTVPGVDRVSAWSLAAEIGIVMEQFPTAAHLASWSGLCPGNRESGGKHLSGKTRKGSPWLGRMACQCAWAAARTKNTYLSLQFRRLAAKRGKKRAIIAVAHSILIIAYCMQKNQCEYRDLGSDYFDRLNADGLKRYLVRRLEGLGHKVTIEASGGA

SEQ ID NO: 78878 - protein, 469 aa, unidentified
MQEKKYTRKQSNNKYKATTTPDCTPALHPNAAGIDIHSTTIFIAVPPGRDDKTVRKFSTFTSDLLEAIEWMKRCQVDTVVMESTGVYWIPLYQLLSDHSVQVYLVNARHVKNVPGRKTDVSDAQWLQYLHSVGLLRGSFRPPQAICALRSIARHKESLIKIGAVHIQHMQKSLDQMNLHLHHVIDDIVGVTGLAIIEAVLAGERDLSRLADLRDPRIKSSKSIIKKALKGDYRSEHLFVLRQSLYSWKQIQAQIAECDVEMESLTNQRQARSNHQPVALVPHPRKKISKNQPKGEWQNLLAQEFGVDLTAVPGIHTATVQTLYTELGSDWSPFPSSAQFSSWLNLCPDQGLSNEKIVHRHTKRAHKRLRVALRMAALSLHRDQSPLGDEYRRRRAQLGPTGAITALAHKLARILWHLVTYKKPYDSSVFIEATEKYKQRYKKNLIKRIESMGYSVLENPTVPALALGVP

SEQ ID NO: 78879 - protein, 356 aa, unidentified
MQNKSTKNLDFTGHNVYVGLDVHAKSWAVNIIVDEIVHRQFTQPPDATALYDYLVSHFPGANYYSAYECGFCEYHHHRKLLELGIQNIVINAADLPITNKERINKKDPVDSRRLSQALKNDQIHGIFVFSPEHEQLRSLFRMRWRAAKEHRRIKNRIRSFLHYYGITPPAELKPDYWPLAFIHWLEHLTLPSEPGTLSLKYLLNAYQNTREQLLEVTRELRKQIKASHNKTYLQLQTVPGVGPLTAMCLIAEIGDITRFKSCKQLTSYVGLVPRSHQSGEKDPSGSLTYRSNKYLRSSIVEAAWVAMRHDPALLKYYKERISKYKPQIAIIKIAHKLLNRIRYVWLNQDVYQQGIA

SEQ ID NO: 78880 - protein, 424 aa, unidentified
MSLEFVFCTRFYEISAVDITLHILRKECMIMILVGIDIGKNQHTFSIIDKNTGEILSNPSFFPNNREGFLFLIKKLNTYSKSDLLIGMEDTGHYHFALLKHLLDSRYTVALINPTTTDLTRKLQGGITKNDSLDSLTICDVIGSNQHNKPYRITKVNRFDLYEQKQLTRHHHNLKEELNTYKNRLQKCIDIVFPEFNSLFRSKYGIVYMNVLKTFSSAEKIANSDIRTIRKCFEYNKRGKRISLSAEQLKAAAKTSIGMPSVAEEIQIRHLVCQIEMIEEQLSEIDKKIEEFSLQNNSPILSIPGISHFSGTSILAELGDICNYTKAAQIIKFAGVAPYHYESSQFNAQHTAITKKGSRYLRKTLYQIIFPVIYHNKVFNVYYNKKLAEGKGHRCAQGHCVRKLLRIIYHLLSTGQIFDPALLR

SEQ ID NO: 78881 - protein, 406 aa, unidentified
MNAVGIDVSKGKSTVAVLRPFGEIVVSPIDVPHNPKELSELVTLLKTLDGDTKVVMEYTGNYYLPIALFLRNNGVFVSVVNPILVKDYSTKSLTVRKVKTDKKDALKLASFALDRWKELSPFSAQSEARLLLKSYNRQYNQYNKLKVSLKNNLISILDQTFPSANNLFTTPTRKADGHEKWVDFVLKYPHSECISKKSFPAFSKSYLSWCRKFGYNFSEIKAKSVYDSACNCSPSLSLTESTALLVSNAISQLNCINETLASLASEMNKIAATLPEYDTVMSFFGVGSVLGSQLIAEIGDVSRFSNKKALVGFAGLDASPFQSGNFNPQSRAISKRGSAALRKTLFQIMQVILQREPLNNSVFQFMDKKRAEGKHYFVYMTAAANKFLRIYYARVTEHLNSLKQSA

SEQ ID NO: 78882 - protein, 349 aa, unidentified
MTNANDRTGTAWAGLDVAKGTFDAAVHPAWIPGRPVPLPDLPKASFPRTGEGVARFVEWLDGTTPPAAGVRAVMEATGRYSVELAELLSAARPSLAPAIVDPKSACHFARSLRLRNKTDRSDAAALARFGAERCPEPWCPPTPEYGELQEMSRQRAFLVESLVTARNRLAETEAVPAVARVQKQVVTGLEKALARIEELMRKHVAKRPGLAGAVRRLDTIPGVAFVTATTVLGELGDLTRFPTSRSLSAFAGLSPRRFESGTSVHGRTRMCKQGSPRVRQILYMAAIAAVRRPNNRLARSCAAMVEAGKPRMLALGATMRKMLVIMRAMLANGTDYHDEPAPKRQGSVA

SEQ ID NO: 78883 - protein, 464 aa, unidentified
MKHNHRRSTRAARRAPSVLERVQTDVAGIDCGATEHYVSVPPDRDPTPVQSFRTFTADLERLADWLVACRVTSVAMEATGVYWIPVYDILEARGLEVLLVNARHVKHVPGRKSDVEDCEWLRELHSVGLLRGSFRPAGPILTLRTLVRHRDVLVQTAGTHVRRMQKALVEMNLQLPLVVSDIVGKTGLAILRALVAGEQDPQVLAQHRDPHCKATPEEIAAALTGHYRPEQLFVLQQNLELFDTCQTHLRACDAAIDAALQGLTARVEPPTTPLPRPRVTRRHGNEPRVDIRPALHRLTGVDLTQIDGIAPYSALKLIAEIGTDLSRWPTEHHFTAWLTLAPQNRVSGGRRLSSKTQPSANRAAAVLRMAAMGLVRGQTALGAFYRRLAVRVGKPKAITATARKLAILVYRTLAGTLIYKDPGAETYNARQRSRTLRRLRQRADMLGFTLVNRETGEILGATVS

SEQ ID NO: 78884 - protein, 457 aa, unidentified
MQQYYLGGDVSKGYSDFVILDSQKRRVEENFQLDDTIVGHSFLYDQLLIFFEEHPDAELCAAVESTGGYENNWYNTLRKFQSSLNIKTARLNPAGVCKNTEAGLKRVITDKISAQGVAEYLIAHSEKVMYQQQDYWASLRKQWSFIKMLTKQSTQLLNQLESLLYSANPEILKYCQDGVPAWVFKLLKKYPTAAKLGKARATSVARIPYISISRAEELVANAKTSVASATDTITGQLISAIVGQILQLKKIIKTQAKIMAAECTLQEVELLKTFTGIGDYSAIGLMLEIQAVARFSTAKKLAAFFGLHPVYKISGDGASGFRMSKKGRKEPRRILFMVAMSAINSNSLIRDLYQKHVENGMEKMTAIGLCMHKILRIVYGMLKNNTPFNPEIDLKNRERTSEQTQKERKDKSRRYQDFDATAPISGRQRKKRAERKLSQNAVSVECGIFAPAPQLSS

SEQ ID NO: 78885 - protein, 334 aa, unidentified
MENIALIGIDLGKNSFHIHCQDRRGKAVYRKKFTRPKLIEFLATCPATTIAMEACGGSHFMARKLEELGHSPKLISPQFVRPYVKSNKNDFVDAEAICEAASRPSMRFVQPRTESQQAMRALHRVRESLVQDKVKTTNQMHAFLLEFGISVPRGAAVISRLSTLLEDSSLPLYLSQLLLKLQQHYHYLVEQIKDLESQLKRKLDEDEVGQRLLSIPCVGTLTASTISTEIGDGKQYASSRDFAAATGLVPRQYSTGGRTTLLGISKRGNKKIRTLLVQCARVFIQKLEHQSGKLADWVRELLCRKSNFVVTCALANKLARIAWALTARQQTYEA

SEQ ID NO: 78886 - protein, 359 aa, unidentified
MFNNSTFFIGLDLGDKQSHIFVLDPKGEVIEESRLPTNPTSLQRKFASLPRSRVAMEVGAHSRWASQLLKDLGHEVLVANARKLRAIYSNPRKGDRADAETLARLARLDPNLLSPIHHRSPQAQADLAILRSRDALVRSRTLLINHVRSVAKSSGARLPSCSADSFSNKAAASIPQPLCPALLPLLETIASLTKQIHAYDRQITSLGETRYPETQPLRRIDGVGPITALAFVLTLEDPSRFQKSREVGPAIGLVPRTDQSGDRDPQLRITKTGNSYLRRLLVNSAQYMLGPFGPECELRTWGLMLAERGGKNAKKRAVVAVARKLAILLHRLWKNGEIYDPFYRSRSNAGQPVIASAAA

SEQ ID NO: 78887 - protein, 373 aa, unidentified
MSKVRFVGLDVHAETIAVAVAEPSGEVRALGMIPNRPESIRRLVKKLGPAEQLRVCYEAGPTGYVVYWQLTQLGARCEVVAPTLVPVKAGDRVKTDRRDAAKLARSPRAGDLTPVWVPDAAHEALRDLVRAREAAKKDQLRARHRLGKFLLRTGRRPPTAMKPWTQAHLTWVKSAVHFEHAAQEATLLDYTHEVDHVADRIERLERAIDDAVKTAPERLRAVIQALQALRGIALISAATIVTELGEISRFASARQLMGYSGAVPREDSSGERTRRGGITKTGNAHLRRVVVEAAWAYRYRPALGPTLRKRQAALDQDVTEIAWKAQHRLHARYRGLTARGKCKQHVVTAVGRELLGFIWAIGVAVEAKPSLAA

SEQ ID NO: 78888 - protein, 361 aa, unidentified
MTGTMTSAGLDVHARSIDAAAICVATGELTRRRFGAEPGSVIGWLKALPGPVHCCYEAGPTGFGLQRAAAAAGIRMDVVAPSKTPRAAGDRVKTDRKDAELLARLLIAGQLTAVRVPDARMEARRELFRCHEQARGDLQRARHRTSKMLLRHGRVWSEGGTWTQRHRAWLARQRFEHVESELAFADYLATVDAAAARKLALAERLSRLAQEEDLWPTISRLRAFRGIDTLTALGLHLELGGDWARFARPAQLSAWLGLIPSLHQSGESSAQGAITKTGSLYARRLLVESAWHYRRAPYLGPTLAARQEGVPEAVLQGSWRAQRRLHRVVGQLKARGKPANVATVAVARELAGFLWAAAVAD

SEQ ID NO: 78889 - protein, 480 aa, unidentified
MAHRHPAATTAAASLTLLPPGPMLPQEPLYLGIDVGKASHVAGFVSATLLARHERFEACPTLLFANSRAGFRTLAERLRTYAPLAHVAVLVDQYLQELDLPVYVMPVQRRPQGLLKTDRRDALILANHLYGQLALGVQSPDKTHLVRHLLPPSAAAAQLKGWMRHRYELVHECTRRKNKLTAICDELFPELVVVFHDPNRPAALAYRERFPTPQALATASWTALVASRVGTHPSTAQLQELQRLASETIGTHDTVRQRGLVLEQQQLIGELRLLQAHLAELDREIVQVVEQTREGTILLSIPEIGPIQAAAILAAVGNIRNFSRASELKAYFGWAPKREQSGTSRDAEQHAHSGTRTMKQMLFLIACSAVQRRDSEWHHLYERLLPRLCTYDERRQAYRGKTRVIVRIAGQMTEMIYAFLARDAALLDQASPGQEPPPPLLYDAETHRRHHQGAYRPLKNEPLPRPLLHLPAMPALPDRH

SEQ ID NO: 78890 - protein, 357 aa, unidentified
MLVIGCDYHPSVQHIAWIDRETGECGERQLRHRDGEAEKFYRDLQAKGVNVRVGIEATGHARWFECLLAELKFELWVGDPAQIKAARVRKQKNDRQDAEHILKLMMEDRFPRVWVPGAENRDLRQLLWHRHRLVQMRTRIMNQLQAVAMNEGVRGKKGLWSQSGRKQLESFQLAPWATRRRQDLLQLLDQLTPSIAELTTAIEQQAEQSPDAQRLMTHPGVGPITALAYVLIIGSPGRFGCGKQIGSYLGLIPCEDSSAGRQRLGHISKQGNTLLRFLLVEAAQAAVRGDADWRRQFLHLAMRREHKIAKVAMARKLAVRLYWMWRKGWDYQQLLQFGSQGRKLLFSHSVGTTDSTR

SEQ ID NO: 78891 - protein, 408 aa, unidentified
MELLHPRCAGLDVHKDTVVACRRVEGGGHLDQEVRTFGTTTRELGGLSDWLGEAGITHVVMEATGVYWRPVWHILEGHFELILANAQHVRNVPGRKSDASDAQWLAELLAHGLVRGSFVPPSQVQEVRELTRTRKQLVRTISQNTQRIQKTLEGANLKLSSVVTDTLGVTSRLILKALVKGETDPDVLADLAQGRLKNKRSELVEALRGYVTEHHRFLIGLHLRTIEALEKEIERIEKRLGKLLKPLAEQEARLMTIHGVSTTTAQVILGEIGWAMERFPTVAALISWAGLCPQMHESAGKKKRSRIRKGASWLKTVLVQAAWAAVKTKNSYLRAKYLRIKSRRDATKAIVAIASDILQASYFILRDGVEYKDLGPDYYEHQDKNRAVRRHVKRLQALGYDVVIAPVA

SEQ ID NO: 78892 - protein, 371 aa, unidentified
MKSDSTIKFIGLDVHSKTISVAIADEGRKGEVRHYGTIENTFEAIDKVIKSLTATGIELRFIYEAGPCGFALYRYLSGNGFTCIVTSPAMIPRPKNVRIKNDRRDALTLARLYRAGELTGIYVPEPEDEAIRDLGRARDDARMAERKAKQRLNSFLIRNNLIYPGKTKWNRTYFNWLGSVGMKYPAQKVALQEYIEAVNECTGRVARLREQIGLAVEEWRMAPMVKALQALRGVSLICATITVAELGDLSRFQNPKELMAYLGLVPSEHSSGESIRRGSITKTGNGHARRVLVEGAWTYKHHARVTYPLIKRQRELPKSICQISWKAQLRLCARYRKMVARKKPNNVVVIAIARELAAFMWAIAQEVRVAA

SEQ ID NO: 78893 - protein, 392 aa, unidentified
MRERITEMQMMIEGQSHFQPFGLSYWGFEDLNKGVGSMTASYEYHIGVDYHKSYSHLVVQDSSGKTLRSGRVKNDRQSLGGFLERYHENSHAVVEATRNWMVMYDWLDDICDDVVLAHPLKVKAIADAKIKTDKIDATVLAHLLRADLVPEAWAPSERSRDLRVALRERMFYVRLRTMTKNRIVTVFDRYPEQTAQLKKLGDLFGKAGRVQLAQVNVSEIDRIQIDRGLAFIGDIDMRIKQSEATIRAMTKANANVKLLKTIPGIGEFFARLIDAEIDDISRFRQPKKLAAYAGLVPSTYSSGGKTFHGKIIKQGNKWLRWAFVEAVTPAIASDPQLRAQYEHLKIKGVNKARVAIARKLLTIAFQILRDQRAYEPRGTATMEGASTISRLS

SEQ ID NO: 78894 - protein, 381 aa, unidentified
MQALSKMVAANDTEQQATLFVALELSQATWVVALHSPIADKISIHCIEGGDTDKLMALIEKKRVQAARRLGRTVQVVSCYEAGRDGFWLHRFLLGHGIDNRVLDSASILVDRRARRAKTDRLDAAALLRVLMALARGEEQVCRVVRVPSIAQEDERRLSRERERLLHERNSHIARIKGLLILHGVRDYRLIERDWKERLDAVRTAEGQALPARAKTEIERECRRLWLAKQMLAEVEREIEQMIAHDGAAAGKLIRVRGIGPTFASVLTHEVFYRSFDNRRQVGSYLGLVSIPWQSGGVRRDQGITRSGNARARRCAIELAWLWLRHQPGSALACWYRARVGTMTGRMRRIALVALARKLIVALWRYLQKGIVPEGAALKAA

SEQ ID NO: 78895 - protein, 372 aa, unidentified
MSQSSTLYVGMDVHKESIAVAYVAQAYGADVISLGTIGTRQCDIDKLIRQLQSKSKQLVFVYEAGPCGYWLYRYLTKKGYTCRVVAPSLIPKKAGDRVKTDRRDAMQLARLMRSGDLTPVYVPAVDDEAIRDLSRAREDTLRDLKAAKLRLKAFLLRHDIRYTGQANWSPAHLRWLSEVGCPTPAQQIVFQEYVQTVTEQTERLGRLELELHAQVQSWRLSPVVEALQALRGVQFTVAVTTVAELGDLTRFENPQQLTHYLGLTPSEYSSGARRQQGSITKTDNTHARRALIAGAGAYRYPAKVSRHLPLRLEKLPPALQAISWKAQVRLCKRSRQLLATGKNAHQVVVAIARELSAFMWAIAKQVPVPPAG

SEQ ID NO: 78896 - protein, 349 aa, unidentified
MTEQRRFYAGECVYVGVDVHKETYTVTCVCHKQIVKTATVQAEPAGLAARLLRWFPGATLYSAYEAGFSAFVLHRVLTTAGITNIVVNPASIAVAANDKVKTDRRDAKKLAIDLADGRLRGISIPTEAEELARLLPRTRAQIVEHRATIARQIKAKLHQFGLIAPSSRRMISHRYLREIAAWSLAPELRVSLTLLAEQWRFATRQLIEIRRLLQEQAAAQAELEKVYRSVPGIGAVVARTLATELGDMTRFANERALFSYTGLTPSAYSSGASVRRGHMSRQGSGRVRHLLIETAWRALPRDRVLQEIFDRIAATRGKKRAIVAIARRLTGRIRACFRQGTTYAVGTYA

SEQ ID NO: 78897 - protein, 370 aa, unidentified
MKSILYVGMDVHTTNYTLCCYRFGLEDVFAYAQVAPDYKNILGYLGKVKENNGEDCQFLCGYEAGCLGYTLYHQLTTHGVDCVILAPTSMPQMKRPAIKTDRRDAMKIAKCLANGDYSAVYIPSEEDNSVKEYIRMRDDAKGALKRIKQQLLSFCTRNGKMFTDGSSYWTLKHLAWLKKLDFGNKLLQEAYQEILASYYQATEKVDRYDRRIEEFAQMKSYNERVKKLSCLIGVGTITAMATIVETGDFRRFSTAQHYSAYLGLVPGEDSSGKHIQRTGITKAGNSHLRKLLIESAQCYGRGAVGAKSKALIKRQTGNAPQVIVYADKANERLRRRFYKISFRSKRNIAVVAVARELACFIWGMMTDHVA

SEQ ID NO: 78898 - protein, 489 aa, unidentified
MRSIGMDVHRSFAQVAILEGGKTTEIRIDLDHEAVVAFGQALRSDDEVVLEATGNTAAIVRLLTPFVARVVIANPLQVKAIAHARVKTDKVDAKILAQLHAAGFLPEVWAADDQTLNLRRLVSERAAAVRSIRRVKSRVQAVLHANLVAKYTGHLFGKGGRRWLASAPLPKAERDLLIRHLDELDWLGGKLAKLDQTLAGIALDDSRMRKLMSIAGINVAVATAVIAAIGDISRFSAPDRLASYFGLTPRIRQSGDRGAIHGRISKQGNTIGRTMLIEAAWSAASVPGPLRAFFLRIKDRKGHNVAAVATARKIAALIWQLLTKEAPYRWARPAFVAMKMRKLELRAGAPRAHGPAGPGHDYWIKEIRHREMELLQHDIQKSHHDVFNRHRPSSKPNKILERCRQPTVAPSRQGSASSAASAHALREGGKAVADLHANVDLPGCGQLQANSHRFRTPPSCRHERCSDRHRSRRQSSRLVCGSCRAIRCA

SEQ ID NO: 78899 - protein, 366 aa, unidentified
MRPSITAIGIPVGVDVHKRRCKVVEFAQGEIKVRKSIANTREEWLELLTELPPEAEIGLEVSTAGYYAMSVLEEAGWRERAHWVHTAGIDSNRRQKNDRLDAERWARKLAAHHLDPLPEAWFPPPEIRALRLRVRQRCWLALLRTQAKNHMQSLLQMHGLLLPGSDPFGAEGQAWLQQQKLPAPLSESIPQIQQMLKLLGKQLEISEKHLRAVEKQFPELALLRSIPGIGPLLAAVIWSEIGDIERFASAKALANNTGLVASYYDSGDVQVSGPITRQGSRWLRWALVTAANVAVQHRNPFADRYHRLRRKKKPNVAKAAIAHSLARCVYGVLKHRCPYREDRWGRKVGALEQEARGSQRSTKTVL

SEQ ID NO: 78900 - protein, 410 aa, unidentified
MDLYCGIDWAEGHHDIAIIDSAGELLAKRRITDDAAGYRDLMELLAEYGDTPQNPVPVAIETSQGLLVAALRAGTRKIYAVNPLSAARYRDRHGVSKKKSDPGDALVLANILRTDAHAHRPLPADTEQARAITVLARAQQDAVWARQQTANQLRSVLRQFYPALLQAGAVWQNGLTRPETRELLRIAPTPGTAARLSTARIEAALRRAGRSRGIAAQAQRIKTILRGDHARQPQAVEDAMGQQAAGLLLLLDAACQAIDQLSTAVEEAFLTHPDAQILLSFPGIGTQLGARILAEIGDDKTRFTDARSLKAYAGSAPITRASGKKKFVGRRFVKNDRLSTAGYMWALSALTGSPGARAHYKRRRAAGDWHAAAQRNLFNRLLGQLHHCLTTGTRFDEATAFTPPAANLAA

SEQ ID NO: 78901 - protein, 418 aa, unidentified
MGRSRSKVCGIDVHKKFLVVTVLSRSGEKRTEKIQNSMEHLLQLREWILAEQCEVVAFESTGEYWIPLYDVLQGSVETIVANSYHIKWIPGKKTDTIDSEWIAELALNDLITPSRILQKEKRDIRSLTRLREKLVNERTDHKNRVHKILDSACIRLAAFFSDLFGKSGLKILKYILSGVPPEEIVRKLPKRLLLHSDAILDTIRTQLSTQQLIQLQTSVTMIDLLNDQIKELEQTILNELRKDQRKLQILMSIPGIGVIGATTLLAEIGDVTDFSSPDKLTKWAGITPRVYQSADKLHTGSITKQGSKHLRWILVEIAHSCIRTKNTALRDFFDRIFSRSGYKKAIVALARKILKLVWHLLTNDEMYQEKNTLPKSSRLPNPREIGSISASAALELLVKAGYQIVEGTDLSQKGNPGT

SEQ ID NO: 78902 - protein, 318 aa, unidentified
MTVPACFVGIDVSKATLDVAVGPGGAAWSAPNEDAGIAALVARLRPLAPALIVLEATGGFETAAVAALAAAGLTVVIANPRQVRDFAKATGQLAKTDALDAQVLALFAERVRPEPRPLPDEAARGLDALLTRRRQLLEMRTAEQNRLAFAPAAVRRDISQHIRWLERRLRDVDRDLEQAIRTSPVWRLKEDLLRSVPGVGPVVSRTLLGELPELGTLTRKQIAALVGVAPRARDSGTMRGKRMVWGGRSPVRAVLYMSALVAARYNPVIRAFYRRLQAAGKAKKVALVACMRKLLIILNAMIRSNTHWRMPLGAGASA

SEQ ID NO: 78903 - protein, 355 aa, unidentified
MDSKKYIGMDVHKESISIAVRNAAGKIVMECVIETKASMILQFIDGLRGDLQVTFEEGTSAAWLYDLLKPHVTKLVVCDPRKNASMREGNQSDKIDARRLADLLRLNHLHAVYHGEHGLRSLKELVRSYLTVTKDLVRVMTRVKAIYRSWAIPCSGKQVYAPRHRAEWLGKITEPGVRRRAEFYYQQLDALRTVRQQVRRELLAEGKKHPAWKRLCQIPALGPIRAAVLLGVLQTPHRFRSKRQLWSYSGFGIETQSSADHRKVHGQLERVKKQSSIRGLNRNCNHDLKNLFKGAAIVAASKPGPLQEFYSALLSKGIRPEMARLTLARKIATIVLIVWKRGVCFDAQHLKPQTA

SEQ ID NO: 78904 - protein, 493 aa, unidentified
MTPALELVIPDSECLVLLVVDVAVVGVQRAKGEEMKIRIGIDIACRSPHHAAIADETGRLVSSRHRFRTVTTELEGFWTQVPDEASEVMVIMEPTRNAWVPLAAWFRRQGAKVVIVPAEQSADLRDYMSKHTKTDRLDAELLARLPVLHPEGLHLAEHLGPGDPLKRAVKIRAGLVHRRSTAMHRLDSLLEILGPGWTDTLGTRMTKTTFKFLTMYANPHQVKRLGAARLARWFQHHTRRAWGPERARDLIDAANETIALWGNDGLDYEALAADIAAEATIALEVSEQIALLDRRIRDLYAETDPDGIVLSAPGVGDILAAQILGRLGDPHRFTSLAAARSYSGLIPRQNSSGLTNQAGGPTKQGDACLRAALFQAADRARLVDPQLAARYQRLMCETGRHHNSAVCTIATVLLTRIVSCLRQGVRYELRDIDGRPISDAEGRAIVNERYQIPDDVRVARRTISNARSAKRRDERVKKGVAERSKTPPVPAPA

SEQ ID NO: 78905 - protein, 413 aa, unidentified
MKDIVYRRCCGLDVHKETIAACVRWIEDGGESRKESRVFGTTTQELERLAWWMEQHQVRQVAMESTGVYWRPVWNILEHRFEVKLANAQHIRNLPGKKTDRKDGEWIAKLLQHDLVPASFVPPTAIRELRDLSRTRVRLVQERVAVANRIQRILEDANIKLASVVTDVLGYSGRKMLEAIIEGQTDPTQLADMAKTSLRRKIPQLRLALDGHLNEHHRFWLRQMMDHLEFLEGKIFILEQEMDRRSRPYEDAIALWMTIPGIRRLLATTLVAEIGVNVDQFPSAAHLASWAGLCPGNNESGGKRKSGKTRKGNGWLRRALCEAAWGASHTKNTYLAAQFRRLAARRGVKRATMAVAHTILVIAYQMLKNHRAYQELGGDYFDRLRGDGLKRYYVKRLQQLGVNVNIEPANAAT

SEQ ID NO: 78906 - protein, 331 aa, unidentified
MDREYIGIDLHKSFFQACVLTATGQRRWEGRFARTPEGIARLMARGVGPQHALAVEASGPTWAFVDALTPTGARIYVVDPRKTTLKAGFAAKTDRLDARRLADARRRESVVSIYVPPPAIRELREVCRGRHQVVRLRTRLAQMIRALLLRCDAGAPPGTRLDAPRALAWLAAVQLPSEAQQTRRRLERLYREVPIAAQAADAEVRARAATDPIAVALEPLVGIGPIMALTIRAEIGDRARCASGPALACYAGLVPRVDRRADRVYHGRITRDGSPWRRWALVEVARHAIRPPDTRARWARRLALRKGLNKARVALARVLCDQVVTTWPMTP

SEQ ID NO: 78907 - protein, 384 aa, unidentified
MKRVSGLDVHKDSVFMCILQENGEKIEGKYGTMSPELNKLRETLLLNGVEEVCMESTGVYWIPVWNVLVDFFELKLVNPYFIKQLPGRKTDVKDAEWIATVLQKELIRGSYVPSGIIQEMRQYERGQADLRKRIVYLEQRIDMQLQRCNIRLSNYVTDIGGVSMRRVVKAIIQGETHPKVLSIFVHGRITNKHGQQTITDSLSGIINRVDVFMLKQYMDQLELLEKQEQECLESLSNISDQYFKNEMALLMTIPGVKKQSAMTILAELGADMKMFATASALVGWAGLRPRNEESAGKIKSRKILHGNKFLRIILVECAWAASRTKKGRLGDKYRQLASRMKAQKALIAITRKLLVIIWNVLSKKEAFDPNRGMSARTRIKTSLS

SEQ ID NO: 78908 - protein, 361 aa, unidentified
MRKVALDLGARKTAYCEVKNGVVVQRATVSSVGSLSSLLGPKEQPAVVAIEACREAWHVHDLLRSWGNEVVLVDTTRSRRLGIGQHGRKTDRIDAEVLALALERGGIPAAHVLSPHRRELRRWLGVRRALVESRANLVTTCRGLAREQGVVLPKCTVPIFARKARRSAGVALAVLEPLLKQLDAINPELAAAEAKLAELGETEPVVKLLMTAPGVGPIIAACFVSVIDDAKRFRSPHHVESYVGLVPNEDSSGGKRRLGAITKKGNPYLRSLLVEGAWGILNHGERHEPLRVWAEAVAERRSRKIAVTALARRLVGVLWAMWRDSKPYDPNILAAASSRGTRRLAQTLHAQARALEVQLQP

SEQ ID NO: 78909 - protein, 330 aa, unidentified
MKQYDHVFGVDVSKKTVDITHVINQQFTHRQFTNNEAGMEQLMQWLKELNPELDKTLFCMEATGLYCFTLTHFLAGHSIDTWIEHAAQIKKATALARGKNDKVDSQRIAVYATKNLDRLRLWKPVTATLEKIRHLASLRERLVDTKKRLETPINEFEEVGNLAMAKLLTKTIKTSLAAIDKDLKNIETKIIDVINEDDNLKLLYKLITSVVGIGFVTAINLIVHTNGFTVLKDTRKLACYCGVAPFEYSSGSSIRGRTKVHYMANKKLKCNLHMASLTAVKLDADLKAYYERKVGEGKSKLSVLNAVKNKLLARIIAVVNKQKLYVKKIA

SEQ ID NO: 78910 - protein, 359 aa, unidentified
MFNNSTFFIGLDLGDKQSHIFVLDPKGEVIEESRLPTNPTSLQRKFASFPRSRVAMEVGAHSRWASQLLKDLGHEVLVANARKLRAIYSNPRKGDRADAETLARLARLDPNLLSPIHHRSPQAQADLAILRSRDALVRSRTLLINHVRSVAKSSGARLPSCSADSFSNKAAASIPQPLCPALLPLLETIASLTKQIHAYDRQITSLGETRYPETQPLRRIDGVGPITALAFVLTLEDPSRFQKSREVGPAIGLVPRTDQSGDRDPQLRITKTGNSYLRRLLVNSAQYMLGPFGPECELRTWGLMLAERGGKNAKKRAVVAVARKLAILLHRLWKNGEIYDPFYRSRSNAGQPVIASAAA

SEQ ID NO: 78911 - protein, 341 aa, unidentified
MKPEMNVLGIDIAKHVFHAVGMDDRGNVVSRKRLSRHDLMPFLAKLPPVRIGIEACGGAHYWARRFREHGHEVKLMAPQFVKPYVKSNKNDSRDAEAIAEAVTRPTMRFVPIKDVDQQDIQALHRVRERLIGERTALVNAVHGLMHEYGIVMPKGVAKFRQAVVGKLESEKDKLTPLSQEMFWKLVEEFAALEAQLAYYQEKLEALAQTHPECQRLMTIPGIGPLTATALVAAVSDASAFKNGRQFAAWLGLVPRQYSTGGKERLLGISKRGDSYLRKLLIHGARATLRWVGRKTDRRSQWIRQLVERRGTNRTAVAVANKNARIVWALLTSHQAYELAKG

SEQ ID NO: 78912 - protein, 379 aa, unidentified
MKASKLHLGLDVHKDSMTLGIAPAGRQNEIRLYGTITNDLHALEKALSRIRKAHPGARLEVAYEAGPCGFGIARRLQQLHVPCLVAAPSLIPKQPGAPFKTDKRDARSLARLLRAGELTAVYVPEPTDEAIRDLCRARTDAVDDLRRCRLRLKSFLLRHGYRYQGKANWSAPHLRYLRELVLPHPAMKAILEEYLQGIDAAHQRVQRLEASMQTLLAGWRLKPAVQALMAFRGFQLVAAMITVSELGDIHRFAHPRQLMTYLGLVSTEHSSGPRQHLGRISRCGNGHARWLLVECAEHYLRPPKVSKELSARQEGQPSHVRALSWKAQHRLHQRFTRLLARRLQRNKAKVAVARELCGFVWALLRTQPCYRQPTGGAAS

SEQ ID NO: 78913 - protein, 349 aa, unidentified
MTTQRLSYVGQSVYVGVDVHKDTYAVTCVCNKQIVKTATVKADPAGLTASLSQWFPGARLYTAYEAGFSAFVLHRALTKAGIMNIVVNPASIAVAANDKVKTDRRDSKKLAIDLSDGRLQGIYVPTEDEELARLLPRTRAQIVEHRATIARQIKAKLHQFGLIAPASRRLISNRYLRELDAWPLPPDLRVSLTFLAEQWRFATRQLIEMRRLLREQAKAHPAIEQVYRSVPGIGEVVARTLATELGDMTRFANERALFSYTGLTPSEYSSGPSVRRGHISRQGSSRVRHLLIETAWRALPRDAVLKEIFDRIAATRGTKRAIVAIARRLTGRIRACFRQGTTYAVGTYA

SEQ ID NO: 78914 - protein, 389 aa, unidentified
MLCVGIDVAKRKHDCCIIDSDALKTVESFTFPNSREGFDMLLSKISELGIPKDKIRVGLEATGHYSSNLAHFISEHDLPLLTFNPLLTNRYKQGFSLRKTKTDKVDACAIAQMIVSGKGAQTYSSSLYHNEEMKSLSRYRSQTMQKCSKLKISVSRLVTILFPELEGLTSSIHLASIYALLKAYPGHEQIAHCSMKRLTHLLSDASQGRFDKSKALEIHQAACRSIGKVSFSASMELVHTITDIEVLKQHIVEIDEKLKEMVDQEESSIIDIPGIGYTLCASILGEVGDFKRFPDVDKLLAYAGMSPSKHDSGDYHSKHNKMEKRGSPYLRKTLYLAARLVAQNVPKFKEYLEKKLSEHKPYKIALSHVAKKLIRLIYRLGISGCPYLA

SEQ ID NO: 78915 - protein, 472 aa, unidentified
MPKNAGEKDVLLMSLTGLESQNIKEDVMTQGSSLSRGDKRRNERMARLRDLVPVSNAILGIDLADEKQAVVVTDHDSRVLARRRVRAKAWKLGPVLTWGREVAQQHGFADVTIGCEPTGHRWRVLDQLAAQQDMTLVCVQPLLVGRAREAEDYTRDKSDDKDAVLIARLVAQLRCYEPERADETWARLRHLGARRERLIAEATACVQQLRDLLECAWPASLTAAALPFDAKTWCAALAVVLDRCHGYPERLAGLGATRFEAAVRRELPRWGGQRARRAITAAMFTALSDPAGVTVQRRGGLERAGWVLTDWHSTKARLMQVETCMLDILDQLELTELVTSIPGVSAVGAAAILAETGNPTRFDSPRALAKHAGLCPRDNSSGTATGRSRISGRGRPRLRLAAWRAVWGALPSNPVMATRYRYLTTRADNPLSDGQARAAIAAALLRWLHVITTQRVSWDPAMAGTNELPTAA

SEQ ID NO: 78916 - protein, 413 aa, unidentified
MKKNSNSQTKSGQKTKPTKARGPVQRDSKEVMAELVAKLSERLDQKPAQAKATEGKPQSAPGPNGDRLTVGVDLGDQWSNYCILGLEGETLAEGQLRTTREDVAKFFRALAAARVVIEVGTHSAWVREVVVGCGHEVLVANPRLMEGTKRRKRKNDRIDAHKLARLGRVDPQSLFPIQHRSTEVRQDLVVLRARDALVSVRTELINTTRGLVKSMGARLPKCSSPSFPKKVEEALPAEVREALLPLVRLAEELSDCIKDYDERIEKLGREKYGHTELLRQVKGVGPLTSLAYVLTLENPDRFRKSRDVGPYLGLVPKQDDSGDSQPQLGISKAGDMMLRRLLVGSAHYILGPFGPDTDLRRYGLQLCERGGKNAKKRAAVAVARKLAVLLHRLWISGEVYEPLRQGAPKAEAA

SEQ ID NO: 78917 - protein, 445 aa, unidentified
MGKSRKKNLNEFNIINPNAAGIDISSKDHVVSVPEDRCKNNIRTFGAFTCDLEAIALWLVACKIDSVAMESTGVYWKQLFVVLQEHGIEAFLVNSRHVKNVTGKKTDEDDAHWIMGLHTCGLLTNSFQPEEQVRTLREVLRQRKSLNRTKTIAVNKMTKALNTMNIKLNIVLSDLTSVSAQKIISAINSGERRPKELIKLVHHKVKAPKEDIQKALNGVWREECLFELKQATDHYNFLQQQTVECDKKIETQLEEIVANKKEGEIPDIKEKAKKRTNRKNEINFNVRPYLKEIFEIDVCQIFGFSDEVALTLFAETGSGLSCFPTANRFASWVGLAPNNKISGGKLISSHLPKKKHAIKKALIQAANSLYRSDNALGDCYRRLKSRMGPKSAKCAMARKLAVIYYTMVTKKEEFNIELLNNHQKSYMEKRIKFLENQLTELKKVA

SEQ ID NO: 78918 - protein, 343 aa, unidentified
MDQITRIGMDTSKHIFQLHGVNAAEAPVLRKKLRRKEMMAFFEKLAPTAVAIEACGASHHWARRLQSLGHTVKLIPPQLVKPYVKRGKNDAADAEALCEAMSRPTMRFVPVKTVEQQAALMLVGVRDRLIRNRTQLANAIRGYAAEFGLTAAKGMCKIEPLLARIAADETLPELARELFALHGREYRQLQARLEEVDARLMTWHRTDECSRRLARIPGVGPIGASMLVMKTPAPQEFRSARHFAAWLGLTPKDHSTAGKVRPGVITRAGDEALRSVLVTGATAVIKQAQRGRVASPWLVDLLNRKPAKLAAVALANKIARVAWKLMVSGETYTTPQTVMVRAA

SEQ ID NO: 78919 - protein, 397 aa, unidentified
MYIVGIDIAKRKHEAAVIDGEGTVIIKPFSFTNNCSGYNRLLAMLTKAKLPLDEFSFAMEATGHYWLALFTRLQKEGFRVQVINPVQTNSIRSFYIRQAKTDPRDALLIAEVIRFGHFSESTLHPENIYELRELCRGRHAIVSMQADVKRKVVALLDQVFPEYETAFTNLFGDTSMAILQTCPTPKELSEMPLEELCHLIEVSSHKRFRMAKARELQELARNSFGFAMAGDVFSMMIRLYAKHLDFLKQQVREMDRKIAEIMDTLDTPITTITGIGPTLGAYILSEIGDISRFSSAAKLAAYAGIDPTMRQSGEYNGVRNRMSKRGSPYLRHAIWLAASSAVLHDPALKLYFQKKRDEGKPYMASVGHACRKMVSIIYAVMRDNKAYVPCIPSEISA

SEQ ID NO: 78920 - protein, 477 aa, unidentified
MTSQTRTSPMTSRLRTSITVEIVSPGPSRATIEARPERAADRAPAHGRTSLPPRGPVGCCRRGARRPRRLIGKCRAGAAAGNVSAEGEAIRSNDYRKDTTVKAPSTRPAAVLGLDVGKSSHWACLIDRDGEVLASAPVRNREAELDALFASAPAGTLVVVDQFRNIGSLAVRRARAAGLGVAHLPGLAASRAAGLFAGEAKTDERDAAVIARTALGVPDSLSGVPGRGEALEAARALSSQRDHVVACATRDKNRLRAVLLESCPALEAAVDLSDRRWLELLAGFGGAWGIARSGAEGPRAEAAGEAAAASTAPPPALVEAENRQVRFLAARISEALDEAGALEAETAALLEGDETYACLLTVPGIGPRTAAQLAVSVDIGRFPDHDHLASYCGIAPRVRSSGTSVRSVRASRRGDARLKSLLIFSCNSLVRSSGRYGEYYRACRARGMGHGRALKAVARKRLRAIYAVMRDRVPYRE

SEQ ID NO: 78921 - protein, 355 aa, unidentified
MVTIGVDAHKQQHMAVALDDAGRELGRWQGPNNADGWSGMLVWAEGLGEERVWGIEGAWNYGRGLSQHLVGAGERVYEVNPRWTAQERRKARKPDKSDPLDARAVAQYVLRKDAALPVVVAEDETVVLDLLVTEREGATAEATRLRNQIHQLLLQLDPEYKSHLPDLKSNAGLDALLAYTAPEGSSVVRQQRAASVRRLAERLKLATQQAEELAKQISSLAGERFSPLTRLTGVQLLTAGALAGILGPCTDRFATEAQFAAYAGVAPLEASSAGKVRHRLNRGGNRRLNSILYRIAVTQSRSSPEAKGYIQRRISEGKTAREALRALKRYIARAIWRLWRECYVGGSAVTETLAA

SEQ ID NO: 78922 - protein, 420 aa, unidentified
MTRQNVTDEVIHLRSAGVDLGKRFLVACTRTPSPQRAGSWLLETERFGTTTAEVRRLCVWLLERQVEVVVLEATSDYWRTVYYTLQPHLKLMLVNPAHLKGIRGRKTDPSDAAFLARAGGSGMVMASFVPGRKIRELRDLTRRRTELARAAGWEAQRLEKELEDTGMKLAAVLTNVVGATGRKILEALVAGERDPHLLADFAIGRARAKIPALVEALDGEFTDHHAFMVRHYLDEIDRWKQVIASFDERIAAMLADHQPDLDLLDTIPGIGRLAAEIIIAETGGDMAQFPSAHHLASWIGVCPGQNESAGVNRSGHIRPGNRNLKRLLGITAMVAIKNRDSYLGVFYRRLAARRGGRRAQVAVMHKLTIAIWHVLHDRVPYRDLGADHFAKRDPERAMRRMIKQANSLGLTIRFEPIGVT

SEQ ID NO: 78923 - protein, 309 aa, unidentified
MDVNYLGIDVSKEWIDAVCLPSHQSWHVESTPAELTGWAETLRGQISLAVVEATGGLEMPVVAALCEQGIAVAIVNPSQVKAYAKALNLRAKTDAISAQLIAEFAQAVKPRPCPLADEQQVALSELTGRRRQLIGNLVAERNRLGLARSRAVRKSLQDHIRWLEKQLTRVDQDISGMIKNSPLWRVRERLLDDIPGIGPTTARTMVAELPELGLLSNRKISALVGVAPYDDTSGKRPRRKKIAGGRPGVRIALYMAALSATRCNPPIRDFYRRLVQRGKPKKLALTACMRKLVIMANAIVRRQILLSQA

SEQ ID NO: 78924 - protein, 412 aa, unidentified
MTCCGWRLIPHQSEESLPSILELTMNVGADKSEPLTAIHTDLGAIFVSLELSRSSWLITSLSPGGGEKMSKHSVRGGDFAGLMERFAQLQEKARRRTGQSFRIIVVQEAGLDGFWIHRALHNEGIESHVVDAASIATSRRRRRAKTDKIDGETLVRALLAYKRGEPRVCAMVKVPTPGEEDRRHLCRERKALIAERVRHVNRIKGFLFSQGISGYQPLRRDRRQRLEELQTGDGRAFPQHLKALVNRELDRLELLLKQIKTVEAARDALLAVGQTAKPAPPAMLLDIRGIGPEFAAILWSEGLFRHFENRRQIAAYAGLAPTPWQSGAVDREQGVSKAGNPRLRTTLIQLAWLWLRNQPRSALSVWFHERVSRNGGRLRKTTIVALARKLLVALWKYVTAGVVIEGVTMKVA

SEQ ID NO: 78925 - protein, 346 aa, unidentified
MTIVETTRPITGGVDTHADVHVAAAVDANGGVLGVESFATTPAGYVQLHGWLVGFGPVDRVGVEGTGAYGAGLARHLRGQGLVVVEVDRPNRQARRKEGTSDRLDAIEAARAALSGRASGIAKSADGDVEAIRVLLVARRSARNVRIKYLNQIRHLAFTAPDGLRERLRDVHRDRLARTAAALRPGAGGDTVLCATKLAIATLGRRALALEADAARLDQELEALVRRCAPSLLDVYGVGINTAAILLVAAGDNPHRLKTEAAFAHLCGVAPVLASSGKVNRHRLNLGGNRQANHALWRIVFTRMSSDERTRKYVARRVAEGRSTREIMRVLKRYVARELYPHLVHA

SEQ ID NO: 78926 - protein, 394 aa, unidentified
MKLVGIDVGKNSHHFCVMDKETGEFNVAPSSFSNNKEGFDFLINSLKPYSKKSILIGMEDTGHYHVALLKFLLSNGYTVALINPKTTDLTRKMEGGITKNDKLDTITICDVLDTPERKKQYRITKVDRFDLYEQRQLTRHHHNLKEELNVYCNRLQKSIDLVFPEFNTLFGSKYGIVYMNLLKTFGSAEAIASTDIRTIRKCFEIKGRGNRISLTPEKLKECAKNSIGISSEVETIQIKHLVSQITLIKEQIAEIDKKIEEFSITNNSPILSIPGISHFSGTSILAELGDIGNYSKPSQIIKFAGVAPYHYESSQYNAQHTGITKKGSKYLRKTLYQIILTVINNNPVFKKYYRLKISQGKGHRCAQGHCIRKLLRIIYHLLETGQSFDPALLR

SEQ ID NO: 78927 - protein, 370 aa, unidentified
MKQRLLYVGLDVHKNTTDVAIANGRSNGKVRSYGKIDSTLDALNKLIKKLQDGDKELRFVYEAGPCGYQIYRYLDAKGIHCSVVAPSMIPQRSGNRIKTDRRDAINLARLFRAGELTSIYVPTPEDEAIRDLLRCRDDMKRFERKARQRLLSFLLRHGHQYSGKKNWTKGFYTWLATVRFSYSAQQVTLQEYIDVTNECSERIQRITQQIQVHVEEWNRAPFVKAYQALRGVSIIVATTVVAEIGDMNRFQSPKQLMAYLGLIPSEHSSGKTVRRGPITKTGNSHVRRVLIEAAWTYKMQARVSNILFKRQKGLPKSVCDISWKAQTRLCARYRRLYARGKSRQTVVTAIARELSAFIWAIDKEIQLAVL

SEQ ID NO: 78928 - protein, 402 aa, unidentified
MTASQLWAGVDVGKEHHWVAVVDDAGAVVLSRKFGNDEQPIRALVAEINKLAKQVFWTVDLTTVYAALLLTVLADTGKAVRYLAGRAVWQASVTYRGGEAKTDAKDARVIADQSRMRGADLPVLHPDDDLITELRILTAHRVDLVADRTRTINRLRHQLVAVCPALERAAQLTQDRGWVALLQRYQRPKAIRQSGVSRLTRVLADAGVRNAATIATAAVAAAKSQTVRLPGEEVAAGLVAELAEEVVALDDRIKATDADIEDRFRRHPAAEVITSLPGMGFRLGAEFLAAVGDPALIGSADQLAAWAGLAPVSRDSGKRTGRLHTPKRYSRRLRRVMYMSALTAIRCNPESRAYYQRKRDQGKRPIPATICLARRRTNVLYALIRDNRTWQPDSPPITQSAA

SEQ ID NO: 78929 - protein, 313 aa, unidentified
MYYIGIDMSKDNFHAAFSDEQVLVFKNSGSGIKEFTEALTKRDYGKHNTIIGTEATGVYHLLLSEMLRSEDWNIKVINPLVTHKVITSTLRRLKTDKHDAIAIRQSLMTGAGYTYTDTPEVLALKTLVQEREALVKIRSSIKQRIHVHKLKERASGLKIRGSFTQTLKIISYEIKELERQMVKYLPLIQKLLRTIPGVGVIAAGSLVAYIGDIKRFECAEKLVAYIGLDPRVHESGTSIKGKGFISKRGNRYLRHILFNAAFVARYRNSEMKKYYLKKKAEGKHHFSVLCAIERKLIHLIYAIWKRGTPFEVR

SEQ ID NO: 78930 - protein, 500 aa, unidentified
MKKTKITVPKSVYKNQNILIRSIFEKAASPRKVLCVVLDYAKEKHVALCCDGQGDILKKSFPVENNPAGVDFLCKEIQSTARRRKIKKETIFIGGEDEPSYVANFVAALSTKGYLVMRVNAREAKRQRENMLASTDNLDLLGIAKCLLGRRCSPASSAQKQKPVYREIRELSRQRRSYVRQKTACSNRIHTVADQLFPSFLNSSLSGITPFSKASLALMKDRFSSSQFSRRKQKSFSNTLRRLRVKQAPKTAYQLIELSKNTLPPVPERIAVLQNSLTSLIELYECLEKNALLLREQNAALLATTPYIMLTSIPGISFVLACGLAGELGDPIHLRPTGSLCAYAGIVPAVAQTGGPDAPAIHLSTRARCNHILKDYLVQGAQKIALCGPQEHKDRFAKREARGQHAAYAGARTLLRLGRNLITHETPYLNPAARCNGASKDEIESGCLETWNKLTEKWRVMPNWQTALTDESCPMGFWRRVVKELHDIQLPITAVRSREK

SEQ ID NO: 78931 - protein, 339 aa, unidentified
MPEKQYVGIDLHRRRSVVVRVDQQGNHLSTVRVANNPVEVMAAVSAAGPGPEVVLEATFGWYWLVDLLQANQCNVHLASPSQLNWGNRRVKNDERDALDLVRKLRLGELPEAWVAPPETRELRELVRYRAKAVRLRSGLKAQVHSVMGKEGILPGLNDMFGPGGQALLDAMEMAPNYTARVGSLRGLIEAYDREIEMLERQIHRQLRRDPGYNAIQAIPGVGRTIAAIMVAEIGDVTRFSSPQKLCSWAGLTPKHYESDTKVVRGRVTKQGSRLLRWAAIEAVSGNRGGTQLQVDYRRIAERRGKQKARTAVARRLLTLVFYGLRDGTIRSLQPTGEAA

SEQ ID NO: 78932 - protein, 323 aa, unidentified
MNKDIKYFGIDISHLVFDVTDSDGNYYQFKNNPSGFKKFVKLMEIDSHCVMEATGYYHYQLAYYLLESGVKVSVENPLAVKRFIQMKLSKIKTDKSDSRLICEYAKQVDMKLWQGNSKHQTESLQMTRLLSVYTKQSTMLKNKLHGEAVLGNPSKAVVSSLKRSLKQLQKEIKSLEDTLLILVKQTHQDLLTRLKSIPGIGPKTAIMLVVLTDGFERFTSGSELCSYAGLTPVIRKSGSSVNGRSRISKIGNQKLRNLLFMCSFNACKYNKACREIYERLVAKGKSKKLALIAVCNKLLKQAFAIAKSGLVYDQTYRSVLVTN

SEQ ID NO: 78933 - protein, 471 aa, unidentified
MATRQEVKTEAKPNRKQRREQQRRIWTDNPGLDVVHPDAAGIDIGNSEHYVAIAPGKSEAPVRKFSCFTHDLREVAQYLKAHGIRSVAMQSTGVYWIPLYDVLEEEGFEVYLVNARDTRNLPGRKSDVQESQWLLKLHTYGLLRNSFRPNSEIRVLRTYWRQRGEHIHTAGECVQRMQKSLTQMNLQLANVISDIMGVTGQKILRAILAGERDANKLAEMRHERIQASREEIAASLTGNWRPELLFALKQEIDRYDFCQRQIAECGQKIHQHLGTLPARAKEMGSAVEPSPQKRKRAGGNSPSFGLDQELVRITGVDFTRIDGINVMTAQTILSEVGLDMSKWETEAHFASWLGLCPNNSVTGGKVLRRGTRKIVNRAATAFRIAASTLRRSNSYLGAQFRRFRTRLGAPKAITAMAHKLAVLFYRMLHYGQEYVDRGQQFYQDKYRQQQIAFLNRQAAQLGMVVTPAVSV

SEQ ID NO: 78934 - protein, 408 aa, unidentified
MEVIYAHCAGLDVHKQTVVACVRIAQPSAAPLQEVRTFETTTSQLLQLSDWLESFGVKQVAMEATGVYWKPVWHVLEEYFELVLANAAHVKNVPGRKTDVNDAMWLADLLAHGLIRPSFVPPAPVQELRTLMRTRKQLVRERVAHVQRIEKTLEDANLKLGVVLSDIVGKSGRAVLQALINGQCQAEELVKHINHRVKATRQELLEALRGKVTAHHRFMLKLHLGQIDGLDQAIGAIEKEVGLCLEPFRQAAKLISTVPGINDISANAIICEIGLDMSRFETAGHLRSWACMCPRNDQSAGKRRSNRTRRGGNWLKTTLVQCAWSAVKVKGSYPQALFHRIRGRRGAKKAILAVAASMLTTIWHMLRDGTQYQDLGAAHFDHADQSKTANRLIRRLQQMGYVVTPCPD

SEQ ID NO: 78935 - protein, 423 aa, unidentified
MTKYLSTPTSGVLVAIDMSKHRQEVLIERPEGGRRRRMTVMATKDDYDRLVAELVSMARPIVVGFEATGNYHRTLAHKLLVAGFQLRLISSVALARTREALHNGWDKNDPKDAQVILHMLRIGATQVYVDPLEAGINDLQELSKTHEVISKAKTQTWHRILNHYLPLYFPEIAHFAGNSRSDWFLALIERFPTPTSITSLGREAFVEEAWSLVGRKVSKARLINDIFETACSSVALPIAEEAAAISMFRMIIGQGRSLIRERNRIEQIAQSLLADHQDYRLLCKIPGIGPINALAILAEAGDLRRFRHHRQFLKFCGLDLATSQSGTFRGRTKLSKYGNARLRRTFWMAAQVASRQRDNSFRDKLGRYMAGNANDPDRRRKAMTALTAKMARVAHAVIKTQTEYRPFVERPETRWKDPSLQVP

SEQ ID NO: 78936 - protein, 449 aa, unidentified
MTPPIIRFIGLDVHKRVVEACFVDPAGTIVLRRRRHRRGLERFIEKDLGPDDHVAMEATTNCWAVADMLRPHVAKVVVSNPMATKAIAQAKVKTDKVDAHVLAQLLRCDFLPTVWQPDEATRRLRELTGRRSALVGHRTAMRNRIHAVLAMRLILPPVKDLFSNAGIDWLRIVKIDDQGRALIDSDLRLLEHVQHEIDLIDQELARRGHASRAVKLLMTLPCVDVATAEALTAAWGDVSRFPDGDRAASYLGLVPSTKQSAARCYHGPITKRGNGHARWMLVEAAQHLDKNPGPLGCFFRRLLRKKNRNVAVVAVARKLAAIGWQLVMTDQPYRYAMPYSTEMKLARLRVKATGQRRRGGAPKGTKCTAKLPGGSRTIKSLEEVYHLENLPDSRALPPGELRMIREAGCREFVDLISHRRVVSRKPPKATKEEPAEPTPTPQPANRRNP

SEQ ID NO: 78937 - protein, 330 aa, unidentified
MCSLPVFVGLDYHDASVRVCVLDTDGRELANADRCNDWKAIAEFADRFGRPVRAAIESCCGAADLAEELVSCAGWSVDLAHPGYVQRMKQNPDKTDYQDAQLVADLERIGYLPRVWLAPQHIRELRHVVRYRLQLTEQRRATKLRVRALLREQRCRAPQGVNAWTKAWDHWLRHTAELSAEGRWVANQHLQELACLVTRIRQVEKRLERLTANDVEVQRLQQQVGIGPVTAWTIRAEIGHFDRFRTGKQLARFCGLSPRNASSGQRQADAGLIRAANPALRAVLIEAAHRLVNYDRYWQKFAQRLRAAGLRQCSDRRMGDSRMHPWFFPS

SEQ ID NO: 78938 - protein, 400 aa, unidentified
MLSIGIDVSKGKSTVCGMKPGGEIVYTPFEVQHTREGMSELVSLLRSSGEEVRAVLESTGSYHCPVVTALLENGIFVSVVNSLRMKRFCSQSIRKVKTDRIDAMQIALYGLAYWQELQPTKLPEDTYRELQLLARQYYQMTSLLIKAKVDFNAICDQVLPGMQELMSDHAGRHKLSDFVLRYCHTTHILEMGETRFRKDYCKWAEKKGYRNCERMAALIFATAQNGIPVLPNAPSTQIVITEAIRVLHTVEASRDAILTQMQALAKTLPEYSLVREMPCIGDTLAPRLIAEIGDVRRFHSKRALIAYAGIDAPPYQSGKFCANNRHISKRGNRYLRKTGYEVMQSYVMHKPANDPIFTFIEKKRGEGKSGKLAMVAGLNKFLRVYYGKVTELYRSLPAIE

SEQ ID NO: 78939 - protein, 344 aa, unidentified
MSREIKYIHKVVIAVLNGSGKPVMESIVETKASSLLQFIHGLRGELHVSWEDGAWAAWLYDLLQPQVTRVLVCDPRRNALLKEGNKSDKIDARKLADLLRSGLLRPVYHVEHGLGTLPELGRCYQTISQDLNRVMNRIKVLYRVWSIPCVGTQVYAPRYREEWLHKIEHAGVRRRAELLYQQLDGLHTLRRTLRPELLAESRKHKASKLLRQIPCIGPIRAARLIALMQTPHRFRSKRQLWTYSGLGIETRDSAQYRFVRGQLQRAKKPQQIRGLNQNHNHEMKAIFKGAATRASWGVGPLRDFYVALLAKGMKPEMAHLTLARKIAAIALTLWKRRNVSTPNN

SEQ ID NO: 78940 - protein, 420 aa, unidentified
MRPIKTKKRSFVNRNFLIVTADMGKDKHFGYWRCPDGTDVKPFAVPNSGAGFWEFWERISRAQKLHNLDGIIFGYESTGPYAEPLAHFMRARGAELVQVNPFHTKRFKEVTDNSPNKTDQKDPKVIADIIAMGRFLTVVIPEGPAAELRRLSQARERSTRRHTALANQIQCLLASIFPEFLQVMKGVTSASARYLLKHHLTPQDIVAYGLPDLVKTLRKVSRGKLKADRAQALYDGAKSSVGIAEGQASIVMEIQELLSFMEASERFTESLEQEMITHLAQVPYSNILLSLKGIGEVTAAGLIGEVGDFRKFRTMSEIMKLAGLDLFEVSSGRHKGQRHISKRGRPLMRKLLYFAALNTVKQGGAMHQWYRSACDRGMPKPKALVAVGRKILGILFALVRDHSEYVPNYSKVQCHLKEAA

SEQ ID NO: 78941 - protein, 321 aa, unidentified
MTAPVFVGIDVAKDKLDVAQRPEAESWSLANAEAGIQELVQRLRAIQPTLVLLEATGGLESPAVAGLLAARLPVVVINPRQVRDFAKATGQLAKTEAIDAGILAHFAAAVRPQVRPFPDEATRELDSLITRRRQLIEMLTAEKNRLLRTATQRVRRDIQKHIHWLERQLDDLEKDLDNFIQRSPAWREKEDLLRSIKGVGPVLAATLLAELPELGRLNRKEVAKLVGVAPLHRDSGQYKGQRQIWGGRASVRASLYMAALVATRYNPVIRELYLRLLAVGKPKKLALIACMRKRLVILNAIVRDGKVSTTLPPRLASQDSC

SEQ ID NO: 78942 - protein, 445 aa, unidentified
MLRIVYKRVAGLDVHKKTVVATRMRVTEDDRIEWETKTFGTTTPDLLELLDWLYEWDVAQVAMESTGDYWKPVFNVLEDTFEIWLVNAQHVKHVSGRKTDVKDSEWLAELMLHGLLKPSFIPPKPQRALREMTRYRTTLVQERTRIVNRVQKLLEGANIKLASVAADIMGASGRAMLAEIATGQTDAELMADLARGRMRNKIPELEKALTGIVQEHHRFVLAQQLDHIDYLDEKIEMISAEIGKQLESMSWPDEPSQPGVSESAEEGTGSADESELPLTWDAAVALLDTIPGIDRRIAEVILAEMGLDMSQFPTADHLVSWAGLAPGNHQSGGKRYSGRTTKGNKALSSIMVQAAWGASRSKDTFLKSRYHRLAARRGKKRAIVAVAHSMLVSVWHMLTYQQPYQELGSDYFDERKKESKVNYLVRRLEKLTGGAVSIELQPVAA

SEQ ID NO: 78943 - protein, 360 aa, unidentified
MQTKVNEKLFDGQSIYVGIDCHKKNWTVTILTEEFEHKTMSQNPDPEILAAYLRRNFPGADYHAVYEAGFNGFYSCRKLRELGIDCNVVHAADVPTGNKEKIQKLDPVDSRKLARSLRSKEFRPIHVPESSMEADRALVRQRFRVMKDVTRIKSRIRSLLFQFNINIPDRFTNSQTRSWSNIYINWLKELQVGHESLRQTLDNYIRIGELQRKELLLVNRQVRILSQTNAYKDNYNLLISLPGIGFLTAMTFLTQIGDIKRFKQLDDLCDYIGLVPMMKGSGSKLYTGKLINRGRKELKIMIIEAAWDAVRMDPALMAKFNELKMRMNKNKAIIRIARKLVSRMRHVLLSQEPYRLGITE

SEQ ID NO: 78944 - protein, 413 aa, unidentified
MTASCGIDWADDHHDVAVVDSDGRLLGKRRVTDDADGLGALLQLLADCGDTPQDPIPVAVETARGLLLSCLRATGRVMYSINPMAVSRYRERHRVARAKSDHADAVTLANILRTDAHEHRPLPDDSDLAQSITVLARAQQDAVWHRTRLSNQLRSHLRQYFPAALEAFQRPGVGLDSREARAVLAVAADPGTAAKLSLSKLAGLLRKSGRQRNIDPWAQRLRTTFGRPNLRQLPQIEQAMAAQTRALIMQLDAACRAADDLAEAAAEAFSRHADAKILNSFPGIGPLTGSRVLAELGDDRDRFADARGLKAYAGSAPITIASGKSEIVRHRRVKNQRLAAAGYGWVFGALRDPAVKAHYDRRRAAGDRHAAAMRNLFNRFLGCLHHCLQTGQTFKIEKAFPNVAMTLATVAAA

SEQ ID NO: 78945 - protein, 407 aa, unidentified
MASISADVTPPMEPFMRKPKQPQLQNDLSRSLTPFEPNHTLIAVIEMSQKSWLVAGVVPGVERQPLKKLAVDENALLKLLHRWQEEAEKAGHKISRIAVAFEVGRDGFWLARWLKAQGIEAHVIHAASIAVSREHRRAKTDRLDTELLKRAFLGWLRGERDHCKMVAIPTMAEEDAKRPNRERESLVGEQTRIVNRMKAALVRLGIRNFNPKLKKAADSLEDLRTPEGEPMPPNTLNELRRDMERRRLICEQIRRIEQDRLERLERAPRTEPNAMVLLLARMMGVGIETADMLVQEVLSRNLRDRRAVARYAGLTGSPEESGEKRREKGLARSGNARVRRGMIQLAWRFLIFQKESALAKWFRSRTENAPRTRKTMIVALARKLIIALWQFVRDGVVPEGVTLRPAQ

SEQ ID NO: 78946 - protein, 404 aa, unidentified
MEETFAGIDWASEEHALCVVDEGGRSLAGEMHAHDEAGIKELVARMRALGVVRVAIERPDGLLVDRLLEAGFTVLPIHPNKLKATRPRYEATGGKSDGFDAFVLAELARTDSHRYRALAPNSDETKALRALTRTREDLVGARVRLANELRAQLDAFWPGAAQVFADIDSPIALAFLERYPAPGDARGLGEKRLEGFLARNSYCGRRSAAELLERLRAAPAGRAGEMEAEARRGAVLGLVATLRPIVAQIRELTSQIAGAVRAHPDGKVFLPLFKDPKSVVTAARLVAEIGDDRSRYPSCDSLAADAGMAPVARESGKRKVAGFRWACDKRLRDAVSCLADSTRHTNPWARSVYLGARGRGLEHPHAIRVLGRAWLRVLWRCWQDGVAYDPAKHGNLRRLQPAGG

SEQ ID NO: 78947 - protein, 399 aa, unidentified
MAQPILWAGIDAGKAAHHCVAINADGQRVLSRRVVNDEAALIDLIRADKELAGGGSVRWAIDLNSGGAALLITLLLDDGQDLLYIPGRTVHHASGAYRGDGKTDTKDAAIIADQARMRKDLHQFRHRDKTAVDLRILCARRNDLASDRNRAINRLRAQLLEYFPALERAFDFAHRKGALILLTGYQTPDGLRRMGAARLERWLRDRHAYIADDIATRAIEAATAQRTTVIGQDVAASVVARLAQTVLDIGAELVDVDAVNEAEFQQHRHAGIIASMPGFGHLLGAELLAAANGDLTSFNPADRLAGIAGLAPVPRDSGRISGNLERPRRYDRRLLRVFYLAANNSIKTCPESRNYHDRKRSEGKRHSQAVLCLARRRLNVLWAMQRDNTSYQPGFRRAA

SEQ ID NO: 78948 - protein, 409 aa, unidentified
MEEVDEQELHVERLAALDLGKAVLEACVRVPHASKPGRRMQEVRTYPTTTAALLQMADWFRCWSVTRVVMESTGDYWKGVYYLLESEGFECWLVNARDVKNVPGRAKTDKLDVVWQAKVAERGMCRPSLVQPRPIRELRNLTRYRRSLTRDRTREMQRVEKLLEDAQIKLSSVVSRLFGVTGRLILDALVAGQRDPKVLAQLAKGRLRPRIGQLQEALRGFFTNHHGAILAMMLTNIDRLTAQITTLDTMIEQAIAPFTHQVQQLAQITGAGPTAAQEIIAEVGVDMGRFPSAAHLVSWAKFCPQTHESAGKRKNKGRAKGNPWLAATLGNIAAANARTGAGFLGARHRRIARRRGPQKAIVATGNAILVIVYHLLSDPAAQFRDLGADYCTTRIDTRDGQAVIEAQAA

SEQ ID NO: 78949 - protein, 452 aa, unidentified
MGAGEVRYVGFDLGGGCHEVAVCDGRGTQVGRFTMPRGRRGLEALWSEVKELTPAGAHVVYLVEAVQNFWQEVVHPLDAAGAEVCLLSPVKCSDMRKFYRRHTKTDAIDALATARVGVSDHELRRAWVGTPEQESLRRLCRLAWKLSQEARNHKRRLAMLLEMVLPGMGDVWKNRYCGSARLFYRRYLDPARARRLGRKRLGEMLRRRAWGKFSEEALGKLWAVIENAPELRYRYDDLMFEVQCELDGLEAIERRHEALTERIEELYHEVDASHRLESVPGLGGFLGAAITSAIGDVRRWRGVDQLVASSGLIPRKKASSGHEKMNQRLTKQGDPMLRSWLYVGAELVRHYDPELQAFYLRLTRRGLHHKGAICAVATKLLRRSYAVLRDGVDYRVLAEARIRDAEKPVRMSVHEVAQALLRDHADSASLEEGYAAQPGGASDTLAPADAEV

SEQ ID NO: 78950 - protein, 312 aa, unidentified
MIEQCFGGIDVSQDRLDVLLLPQGTGFSVANDEAGWSTLIGRLRGLPVAAIGLEPSGGYERGVLRALLAAGLSVRRINPNRLRQFARARGALAKNDRIDARLIAEYVATMPTHVVRHDPAAARIAEIVTMRRQLCDEHVAIENQAAQLEDAMLRRLAKRRLARIETDIRLLEKRLTETIAAEADLARRYARLTSMPGVGPVLAFTLIALLPELGRMSRKQIAALVGLAPYDFDSGKLRGHRSIYGGRMPVRNVLYMAALSACRYNPALRTFHKRLAAAGKKPKVILVAVMRKMITTLNAMLRDGAGWQPQAA

SEQ ID NO: 78951 - protein, 414 aa, unidentified
MSNPLLVGVDVHRQTNTVCLMDRQGQEAGPRFTVDNNSPGTEAFIQRVAQQVLAGHFDAVKIAAEATGWYWFHFLQTLDQDPLLNQWPLELYPFNPRLTANFKKTYVDLDHSDPIDAFVAADRLRLGRDLPAPFHYEGRYFPLRLLTRYRYHLVHNLAREKAYCLACLYLKASEYTRKDKKPFSNLFGAASRAVLQEFASIEEIAAIPFDELVEFIDAKGKRRFPNPTDNARKLHLVAHDSYHLPEALQQPINLILGLTLRHITFLEGQEKRLNTALAQRMEAIPHSLDTIPGFGPVLSGGIISEIGGIERFDYNQAKVAKFAGFKWRKHQSADFQADETRLTRTGNRYLRYYFCEAANAVRRCDAGYAAYYQRKYEEVCKHQHKRAIVLTARKLVRLVVRLLTTNQPYQPRRC

SEQ ID NO: 78952 - protein, 319 aa, unidentified
MSKISQARIIGIDVSRDWLDIHCLPEGKRARLPNKTEGHEQVAQLALELGALVCFEATGGQEWRLWSALDVCGIATRQLPPAQIKAFAASRGTRAKTDRIDAELIARFMMFRPDAGRVLPHEKLRLLRALASKRGQLVETRKRLLAQIKAHGKLGSADMFDAMNAELKDLLDRQIAGLEVRIEQTLASDDELARTADILRSVPGIGPVASTMLIAEMPELGQLSGEQAAALAGLAPIAHDSGAMRGKRAIGGGRRLLRHVMFQAALVASHHIRLLKTFADRLRAAGKPHKVVITAVARKLVTIANALCKSRLKWSNQAA

SEQ ID NO: 78953 - protein, 387 aa, unidentified
MIFIGIDIAKSTHFASAVNSDGEVLINPFKFTNDNQGFNLFINTFKDFDLSNCLVGLESTGIYGDNLTTFLFEKGFKIGRINPIQTDSLRSSNIRKTKNDKIDTFLIAQCLMLGHYTLITEKDIQLIKLKTICRFKFDVKKSQSKSKVQLVTCLDIAFPELANFFNNNLHIKSSYALLSKYPTARIIANTRIDALTNLLYSASKGHFKQDKAIALKELAKNSIAMDNPAIGIQIKMLIEQIQMLEKQIDLLDIEITNIMESLNSPISSIPGIGNWLGSIIISEIGDITRFSTSTKLLAFAGLDPSVRQSGNFNATNTKISKRGSKYLRYAINRAAQLIIWNDDTFYQYYTTKLAQGKSYLNVIGHVSHKLTRVIFKLLTTNTTFKNS

SEQ ID NO: 78954 - protein, 353 aa, unidentified
MEQFIGCDAHKKFSVFVAVNEKGQAGEALRVAHDRQLYREFLARLPAHSAIAVEASGSYSWLVDEMERSGHHPRLCNPLEAKRRMGLTNKTDKLDARGLAILLRNGTLPEVWIPPAEVRDQRELLRLRIFLVRLRTRVKNRIHGTLARHNVQVPGADLFGVAARLELVARLPELPVHSREAVEQELTTLDFLETQIESAERRLESIMKVSVEADLLKTLPCVGKILSMVLMLEIGRIDRFPTAAHLASYAGLVPRVRSSGGRTHMGQICGNVNRNLKWAFVETGNLIVINQRRFAGTHVVRLYQRIKRAKNHQKAVVAIARHLAEAAWWVLTKQEVYREPPGPRQQALSSTHG

SEQ ID NO: 78955 - protein, 458 aa, unidentified
MARNRSTDKIIRGMALVHPNAAAIDIGATMHMAAVSADRTPEPVRSFGTFTADLHRLVDWFTECGVETVVMESTGVYWIPIFELLDASGFAVFLVNARDAKHVPGRKTDVSDAQWLQRLHSYGLLSASFRPKGRIAELRSYVRQRERLLEYAASHIQHMQKALTEMNLQIHHVVADITGATGMRIIRSILAGERDPAVLAAMRDSRCRADAGTIEKALGGNYRAEHLFALEQALALYDTYQEKASACDARIEAVLKELSIDRDRCTTPLPPPGRRMPNTANALDFDVRAALFELLGKDVTRINGLGPYLTLKLIAECGDDLSTWPSAKHFTSWLCLAPRNKISGGKVLSSRTRRSGNKATSLLRLAAISVGRTDTALGAFYRRLSARIGKAKAVTATARKIAVLFYNAVRYGIEYVDPGASAYETRYRERVIDNLHRRAKAFGFALQPLEPTPDNAVS

SEQ ID NO: 78956 - protein, 348 aa, unidentified
METIGLDLHKRESQLAIQAEDGTITERRIVTSQQRFTAVLGHRPRARILLEASTESEWVACHLEALGHEVIVADPNYAPMYATRSRRVKTDKRDARTLMDACRQGTYRRAHRLSAPRRHLRAELAVRDALVRTRTRYVALAKALVRRDGLRVPSSTAERVGDRVQALALPAPLAAELAPLLTLLPSLNATIAAADHQLSALEQTDPIVALLMTAPGVGAVTASALVATLDDITRFPSAHQCEAYLGLVPGERSSGEQRRIGPITKAGNRRTRWLLVEAAWRILRAKDPESAALRAWTLRIAARRGKPIAVVALARRLAGIVYAMWRDGVPYDGRKIRAPHHARGAQAG

SEQ ID NO: 78957 - protein, 346 aa, unidentified
MGEVSTIGVDIAKSVFQVHGVDTDGTVVIRKRVSRAKVLEYFADLPPCLVGMEACATAHQWARELKKLGHEARLMPPTYVKAYVKRGKNDAADAAAICEAVTRPSMRFVPIKSVEQQSGLMLHRTRDLLIRQRTQLINALRAHLAELGLVTAKGHEGLHQLVTVVAERVDERLPGNARFACQAIVAQLHAAKIQINGLDQRIIQVHRANADSKRLDAIPGFGVILSTAVVATMTDPKAFKTGREFAAWIGLVPRQNSTGGKERLGSISKQGDRYLRRLFVLGAISIVGTSRTRPDKYPWVTELLGRRPAKVVAVALANKMARTAWAVLASGETYRTPTHAAIAATA

SEQ ID NO: 78958 - protein, 422 aa, unidentified
MKEAGVRIVGFDCAEDDHSAVLLSEEGEFESHTKMVNQRDEIEGGLSQLLLAIPEEHELVVVVESKRSHGRLVTDVATGLGIRVWQVNTVALNHFRDLEGQPRKDDEWDAYLAARMLFNRSRGCREITETTNEEKGLSRLTRSHARLKDDRLQQVLRLRAALLELAPEMLHRSWSGPKAGSKALAYLLQRWPGFGGMEKAQLRSIEKILHRCRYGSRAGEVAKLLRDMARRISIEGEERSAITLELGFLLEQVKVCDVALKKLSTEISNRVEEHPIGVKLLEMPGIGAIIGGVLLSELFPVARTTTEAKSATYSGVTPLSRKTGKTPDNPRLARGNNKHVLNALYQSGVSAIKCSAVDKAYYQKKLRDYSGHPKPHVAAFLALARQRHKVIFKLMTTEARYDKETLIARHLERMEEARKAGA

SEQ ID NO: 78959 - protein, 353 aa, unidentified
MKRDKYIGMDVHQATTVVAVLDTNGKVIWETIVPTQAGPIIELLESLSGPLHVTLEETTQAEWLYEIVRVYVAEVVVCDPRRNRLLSEGSKADKVDARRLAELLRVGMLRSVYHGNEGTRKLKQLARGYQTLLSDMQRTMTRIKAMYRSRGIHTPGRGVYQAKQREQWLSRLTDPGIQQRTAWLYEQLDQLGSLRRQAKRAMLAESRKHRAVTLLRTIPQLGPIRSALLVAILDTPHRFRTRRQLWSYSGLAVVTDMSSEYEIKEGRVVRSRKPIATRGLNRNCNRVLKDVFIGAATGGGQREPYRQYLQGLQDRGMRKEMARLTLARKISSIALTIWKKGEAFDPKKLNWAT

SEQ ID NO: 78960 - protein, 354 aa, unidentified
MIIIGADYHPAFQQIALVDSETGEWNELRLEHREGAEKFYRDLAAQGMKVGVGMEASGHARWFERLLAELHFESWIGDAAEIRSKRVRKQKTDRQDAQLLLRLLLEDRFPRVWVPSWENRDLRQLLWHRHRMVQTRTRLMNQLQAVGAQRRTPPQERVVAGSGTEATRVVPVSSVGEPATAGSAGVAGWLNPTIAELSAAIEGEVESCPEAQRLRTHPGVGSLTALAFVLIVGEAERFQCGKQIASYLGLVPSEESSGDRRRLGHITKQGNSLLRFLLVEAAQVTVRSDPEWRSKFFHLALRRGRKIAKVAMARRLAVRLYWMWRKGWDYEEMKKFGSHAGQPGHRHGVQQNTE

SEQ ID NO: 78961 - protein, 360 aa, unidentified
MQTQRTELNFEGQNFFVGIDVHLKSWTVSIYSEILSHKTFTQPANAATLYNYLNRNFPGGTYHSVYEAGFSGFKAHYNLKAMGIDNIIVNPADVPTTQKEHLMKDDPTDSRKLARSLRGGELRPIYVPDPSTVEDRSLVRMRSTLVKDLSRIKHRIKSFLYFYGIAYPQEFEKSGTHWSKRFMKWLNQEVVTEYESGTQAFKILLQEAQQQRAHLLEVTRQVRLLAHSEKYSKNTALLLTIPGIGLITAIIFLTEIETIKRFEDTDHFAGFVGLVPNRHSSGEKNSDGEMTFRGQDALKSVLIESSWLAARLDPALMMSYHSYIKRMEPNQAITRIARKVLNRIYYVLKNERKYVTGVVK

SEQ ID NO: 78962 - protein, 290 aa, unidentified
MKLTVIGMDIAKHVFQLHAVNANTGEIERIKLKRSQVTDFLAQRERSLIAIEACGSAHHWARELQKLGHEVKLISVRSVRPFVLRNKTDAADARAIWTAVQQPEARFVAIKSEQQQTILALHRIRAQLMKFRIMQTNALRGLLYEFGEVLPEGYREFAEKISGALAKIANRLPAILIDSLREQWARVQATDKEIAVLERRLKVALCDNQECQKIAEIPGVGLLTATAAVAAIGDAKTFRSGREFAAWLGLVPKQTGTGGHVRQLGISKRGDTYLRTLLIHGARSVIIKGA

SEQ ID NO: 78963 - protein, 368 aa, unidentified
MQNNTIWVGLDVHAKMISVAVLSVGAKEPETSEIPNRVDKIERLVRGLGERGVVHVCYEAGPCGFALYRQLRALGVDCDVIAPSLIPRKPGERIKTDRRDAIKLARYYRAGELTPIVVPGPAQEADRDLVRAREDTRRDRTAARHRLGKFLLRHGLHFGAGKSGWTKGHWEWIRRQSFEQASAQFTFEHYVAEVERLDVTLVRLEKEIDKLARTERFASRVDRLTCLHGIRTLTAMVLLAELGDLRRFEHPRQLMAYVGLVPSENSSGEDKKRGSITKTGNTHVRRVLVESSWAYRHGRTSLSPRVRVQLQEQPAEVTAIATKATQRLGRRYARMIARGKPAPVACTAVARELCGFIWALGREPEVKN

SEQ ID NO: 78964 - protein, 415 aa, unidentified
MEKLLERCAALDVHKRQVTACAHVPNRRGERAELRAEFETMTPDLLALRDWLKGLGVTHVAMEATGVYWKPVYYLLEDDFELLLVNASHVKNVPGRKTDVADAQWLCELLEHGLLRASFVPPKPIRELRDLTRYRKSLVWERQREANRLQKLLEDANIKLASVATRVLGASGRAMLAELCEGRNDPEALAELARGKLRRKLPELRRALTGRFSSHHALLVSQLLSHIDYLDEAIDALSNEIEQRLRPFEHKLELLTTIPGVAQRTAEVILAELGPDMQRFPDHRHLASWAAICPGNEESAGKRKTGKTRKGDSWLRTALIEAANSAAGRTRDTYLNAQYVRIKRRHGHSKAIVAVAHSILVSAYYILRDGKPYEDLGGDYFLTRETQERLTQRLVSQLERLGQRVTLEPLAQPAR

SEQ ID NO: 78965 - protein, 450 aa, unidentified
MKRQNKKKTRLQSVTEPPQVRMDAAGIDISPEEIYVAVDARVGEPAVRCFGTVTRELNRIADWLQSCGVRTVAMESTGVYWIPLYQILEQRGLTVFLVNARHYQNVPGRKTDVGDAAWLQYLHAVGLVQGSFRPAGEICALRTILRHRSGLVQAASQPIQHRQKSLDQMNVQIHGVLSDITGASGLAIIEAILGGERDGHKLAELRDSRVRASEEEIVKALEGDYRPEHLFTLRQSLASYRHYQQLIDECDRQLRQQVEALEIQIERQGPAPAAHKKMRTAEDEEFRQKYYRILGVDLTAVPSIKVGTVKVIVAEVGAELKQFRSAAAFASWLILCPNNVITGGKVKSSRTREGSTRLGEALRMAAESLCRDKSYLGQFYRRMKARLGGESAITAVAHKLARIIYTLVTKGEAYDDGHFARIEKQNQSKQRQRLFKQARLLGYNLVPAKA

SEQ ID NO: 78966 - protein, 348 aa, unidentified
MEKSRYWIGVDLHSRVIQVCVLDRAGETCHQARVRGAGLREGLELVEELARRFPQSQVAVEAVGCNRWFVAACREAGLCVTVVHAARLELKRSGRKTDRRDAYELARRLRLGDLDRNATSYHPTDEEYGLRQLLRRRHKFVQTRTNFVTQVRGMLRAHRIEQPGEIPRPKNLALLRAIRLQDENEAVALEALTDAVEALEASIRKLDKQLVRACRSHAGAAMLQTLPYVGPVTGLTLAAELGDVQRFRNSKAVASYAGLVPRVCESADRSFHGRLVPHGNRELRFVLGEWAVQLLARHPEVKLWAEPRLRRSPRNKVRIALARRLLIGVWHTLRTGEMFSMERCLASA

SEQ ID NO: 78967 - protein, 320 aa, unidentified
MRNAVGLDISKTTFDATAIIGGIEKSAKFDNDSKGFEQFKGWLTELGCTDAHICMEATGNYYEGIADYIGSLYKVSVVNPLKISKYAESRFTRTKTDKQDAKLIAEYCQTAKAQDLVIRKPVINEGYKLKRLSALYAQLTADSTAQKNRLEAAKDTFVVKICQSNIKHLQRQIKAVKKELEKLTKQPALKAQTDRLATIPAIGRLTAVMLLNYLSGTDFQTSNKFAAFAGLTPQIKDSGTSVRGKPSLTKYGNRRLRALLFMPAMVAYRIKAFPAFIARLEAKNKPKKVILAAIMRKLAVIAYHVHKKGENYDPTRYKAA

SEQ ID NO: 78968 - protein, 324 aa, unidentified
MADNMLGIDVAKGKFDVVLVRADGKRQWRTFANTAEGFGALLGWLGKQQALPVHACLEATGTYGLALATFLHQAGQQVSVVNPACIKAFADSELKRTKTDKVDAGLIARFCRAMQPALWQPPAPEVAQLQGLVRRLESLQQMAVQERNRLAAPGLAEPVRESVARTLAMLQEEMKRLRGQLDDHVDGHAALKQQRELLTSINGIGRTTANLLLGELSGCDFQKAREVAAYAGLVPQERQSGSSVRGKARLSKKGNRRLRKALYWPAIVAIRHNPVLAAFARRLREAGKPKMVVIAAVMRTLLHLAFGVLKHQRPFDPNWIACHT

SEQ ID NO: 78969 - protein, 430 aa, unidentified
MKQYELLHSLFVGIDVSMKENVVHAMPFSPEDHPGHAHLRFSAPNTPAGSVGIVEKVSDFLKLYPDVIQVVIALEATSVYSFHLATFLSVAHFNGHIPAIVYSVNPKEIHAYKKTFTDVGKDDYVDAMVIADYARSNKIRSRPWKGPELLGLRVLTRLRFRIAKLMGIVKNSTGNSIYLECSGLMTGENPFCNVWTTTCQELLTTFQGPDEILSLSDEELLNFITEKGHGRFSHPLDVVEKVKKAARNSYRLDKRVYEPLTSGLSVSFFIIHSLEAAIKKLDKSIETMAKSFSSDSYQILLSIDGVGPVIAGGLLAEIGDIKRFKTDDALAKYIGLTWRGKQSGQSESPVKHLSKAGDVYLRYYVLLATGQIINYSAKYREAYERIRSRKTLFPYRAALNLVARKIVRLIFTLLDKHQLYSDNKVMVTLE

SEQ ID NO: 78970 - protein, 342 aa, unidentified
MKSITTIGIDLAKNSFSVYGVNDKGKPVLQRTLSRAGVVHFFAHLPSCLVGMEACASSEYWARVIESLGHEVRRIHPRYVKAYLLGAKNDANDAAAICEAVQRPNMRFVPHKSPEQTDIQCVHRIRQGFVRSRTALVNQVRGLLGEYGIIMRQGISAVRIQLPGLIADETNELSPVMRQNLTSLYELLCFLDERILAQERLLKSIVRENEACKRLLKVPGIGLLTATILLSVAGVASNFRNGREFAAYLGLVPRQNSTGGKTKLLGISKRGDSYTRTLLIHGARAVLYSLITGRTPQARQNIWLTELVARRGKNRASVALANKTARIAWSMLAQGTEYKLAA

SEQ ID NO: 78971 - protein, 320 aa, unidentified
MSSIVAFDVAKAELVGARMRKNGTVAERYTVVNTSEAINQFLDTLPKKKITIGSEATAEYHLHLARACLARGVPFKLINPLVTKQFTRATIRKRKTDRDDAEIIGKCLLQGAGRELTPHDLMPATRILRTACDLSQMARTMHLKHKRFVEHFPETTAVQAALAEAEDALRRAARLLHSHGTGLVSHTERALAQSIVGIGGELAPVIVSEIGDPTRFKGGKQLVAYAGLDPKVKQSGKSLARNTAITKRGSPYLRRALFIAASVAQRYDPELKAYYEKKRAEGKHYSPATIANARHLAHRVLAVLKRGTPYVKRELSTAST

SEQ ID NO: 78972 - protein, 359 aa, unidentified
MLGVLNANRFEEAPVSESYEGRQFVGIDLHRRRSVLVRKTETGETLETVRISNDPQYLRQVMARAGEAPEVVLEAAYGWYWAADTLAELGAQVHLAHPLGVKMFSYRRVKNDERDAGDLADLLRMGRLPEAWIAPPQTRELRGWVRHRAKLVALRSSVKSQVHAVLAGAGVQVRMSDLFGPGGLRLVAAAGLSVESRARVDSALRLIRNLDFEIELFGKLVTNRLRTHPGYRAIQQIPGVGPLLAAVFVAEIGDITRFPGPAQLASWAGLTPKHHESDTTVHRGRITKQGSRLVRWAAVEAVQRVGAHTHTGAVRERVAARRGRNIGAVAAARKLLELVYYGLRDGHIRRLTPPPPSPA

SEQ ID NO: 78973 - protein, 426 aa, unidentified
MYRSIKTRQTKFVNNKAFVGRAIIGAVDISKDTLMVYVRAPSGEEIKPFKVSNNYEGLMLFWTNLKLYQRRYCLEKIIIGYESTSEYGQPLKNFMMDKTVKLVQVNPMHTKRVKELTDNSPASTDKKDPEVIADIIQLGHYLSVITPTGPAAELRSLSHTRDNQMRERTRLLNRLEVLVFKVFPEFVQIIKDLSSKTAGYLLKQYPRPEDIRQISLEQLVREVKGVSRGQIKEEKLRRLKAAAEVSLGAKEGRAGVLLEISQILSRLEQLEGFIRDVERKMKEELFRIPYAKKLLSIKGVGVIILGGIIGEVGDFRDYRKQSEVVKLAGLNIYEVSSGRYLGRRHISRRGRWLLKKLLYFASLNVVRQGGIMHQYYQELLNRGKPKVMSLIIIARKLLRTMFAMVRDGTEYQKRNNSNLEKVKVPA

SEQ ID NO: 78974 - protein, 422 aa, unidentified
MSQKPEIQYAAFLAIDWADQKHVWSLQDANSSTCERGEVDHMPEAVEAWVAQITQRFAGRPIAVAVEQSRGALVFMLSKYEQLHIFPVPPAMTANLRKAFYSSGAKTDPADADLLLDLLQRHREKLRRLSPDTEATRLIQNLVEERRKLVDEKTAQSNRLEAHLKIYFPQIPRWFDDVGSPLVCALLERWATLEALQKARPETLRSFFRKHHSRKEELIESRIKAIGEAMPALKDRAVVEAKAAVVKVSVQMIQVLQEGIEGLNRQIQEAAEAHPDFFIFDSLPGAGAVMAPRLLAAFGSQRERYQNAAEVQTFAGIAPVTESSGKSRWVHFRFACSKFLRQSFHEWAALSIPRSQWARAYYELQCRRGKKHHAAVRALAFKWIRIIYRCWKERVAYDENVYLAALAKHNSPLVAATKAVAL

SEQ ID NO: 78975 - protein, 367 aa, unidentified
METTKFYVGLDVHKDSIAIAYAQSASREAPPRFLGTTRHSLISLTKALANLGSPSELNLCYEAGPCGYGLVRALRQRGYACEVIAPSRVARHPADRVKTDRRDALLLARLHRAGELTAIRIPEPEDEAIRDLVRTRADMVGEQRRARQRLRSFLLRQGHAYTGRRWGPKHELFLSKIQFEDPAHHIVFTEYRLAVRFATERVARIEDALRQQAAAWRWLPVVKALMTLRGISFLAAVTVVAELGDLRRFPQPRELMGYLGLVPSEYSSGNTQRRGGLTKTGNTHARRILIEAAWNYRFPARIGESLQPRLEGQPQSIIDLAWKAQLRLCPRFRRLRAKGLHQNKVCAAIARELSGFIWDIARQVRPA

SEQ ID NO: 78976 - protein, 338 aa, unidentified
MKLYGAIDLHSNNNVTVLIDEQDQVVYHKRLPNELGLITEQLSGYRDRLQGIVVESTYNWYWLVDGLMEHGHRVHLANTAAIQQYEGLKYTDDTSDARWLAHIMRLGVLPQGYIYPKEQRAVRDLLRKRSQMVRQRTTNLLSIQNLITRNTGSSLNGTRIKTLEAQQVDDLLANPDLTLAVKANLALMNCADEQIDRLERTISERVKLRAEFCFLKTVPGIGQILALTIMLETGDIRRFPAVGDFASYCRCVGSQKISNGKKKGQGNTRNGNKYLAWAFIEAANFAIRYCSRIKSFYHRKKAKSHGVLALKAVAHKLCRACYYIMKDQVPFDITKAFA

SEQ ID NO: 78977 - protein, 325 aa, unidentified
MQGKEASEQETRNCTAGIDVSKNRLDAHILPSSDSLSVANTSSGIRQLKRWLLKQKVDLIAVEATGKWHRELCRSLRASGLAVAVIDPYRVRNYAKAERILAKTDRLDAKVLAMFAATMKPDCRAPTPEVIEDMQELVTARANAVEEETSLQNQLGSAKTHFLKRQLARRVAQLKAHIKDIEQACLKQIKSDDVLARRFAILTSIPGFGTVVAITLIAFLNELGSLTNKQIGALAGVVPVPDDSGERKGYRVVWAGRGIIRRMLYLAALFASRHNRDMKLFRQHLSAEGKAPKVCLIAIARKLVVLANTLITENRQWQPAAPQNA

SEQ ID NO: 78978 - protein, 426 aa, unidentified
MRAIGLDVHLDFCEVAIAEGGKVRSAGRVETKLEPLELFAQSLGPDDRVALEVTGNAWQIARIVEPHVARVVVVSPSDTGIRQARAKTDRLDARTLAKLLASGELDAVWMPDRATWVMRRRLARRGQLVWARSRAKNEIHAVLMRCLVGRAPFADLFGVKGRRWLAGLELPVEERETVDAGMRQIEFLDAEIAAVERLIAREALASAEIRRLMTVPGVNVIVAASFLAAIGDIGRFEHPRKLVGYLGLDPRVRQSGTGPASHGRISKQGSVRARHALVESCWSAVRQPGPLHAFYQRVRARRGHSVAIVASARKLACLFWVLLTREEDYAYAQPSLTRKKLRLLELAAGAKRYGPAGAGVWHANEAVRGAEREVARQAEIAYRRTVRDYHATQATNKGAGATPGRASQGRQSGKQRGRASVPDPAL

SEQ ID NO: 78979 - protein, 286 aa, unidentified
MFPVGIDVSKNTLDLCMLYDGIKGRIKTRNIQNNRHSVENILRWLRLQHCSPEDVHVVMEATGVYHEQLATELHDAGFRVSLANPHRSREFARGMGIMTKTDKVDAYMLACYAFLKKPHRWEPPAPEIRYLGALLRRRDVLLGDALREENRLEKYLSTDTPADIISSCRRMAQLLREEISNIERQIKAHIKASPALRRDYTLLTSIKSVGPQLGMHMLIVLRSHNFVSAEQAAAFLGVVPIEKRSGTSVRRRPRMSKIGPPQLRAKLYMSALCGKIYNKRMALLNK

SEQ ID NO: 78980 - protein, 337 aa, unidentified
MSKITLIGIDTAKNVFHLVGIGERGNYAYRKKVSRRQLLPALVRLEPCEVVLEACAVSHHWARQIAQIGHRVRLISPQHVKPFRRGQKNDYRDAEAIISAALSPGIHFVGVKSIGQQAEQALHRVRSRLLSHRNAAASELRGLLGEYGLAFSKGIKPLRAGAVRFADSDEAQALGLVELVWDVLEELDQLQHRLDEYTHRIEQRVRNDAISQRLRDELLGVGPLSASALRVKVADVRDFVNGRNFAAYLGMAPGHRGTGGKVKIGKIRRGHDRYLRQLLIHGARAVVQHLGDKQDPQSCWLRGVLERRGFNIAVVAQAHKNARQAWAILAKEQALQS

SEQ ID NO: 78981 - protein, 331 aa, unidentified
MNYYAGIDVSLEASCICVVDANGKVVREGKVSSEPAAMIAWLSEVGVTLTRIGLEAGPLSQWLYAAMRQAGLAVELLETRHVRNAFKIMPVKTDRKDARGIAELMRLGWFRPVHCKSMEAQETRAMLTARKLVQKELQETESSLRGILRGFGLKVGKTTPVGFEGRIRELVTGHPSLEVIASALLSVRAVLRRQFNEFEKRLRTIARTDTRARLLMTTPGVGVIVALTFASAIDDPSRFKSSKAVGAYFGMTPTRYQSGETDYSGRISRNGDGSVRAVLYEAGHLILTRPLKGCTALKSWAMRIAKRAGTKKAAVALARKLAVIMHRSISQ

SEQ ID NO: 78982 - protein, 411 aa, unidentified
MENVFPCCAGLDVHKESVEACVRRIEPNGRVHSETHHWGTMTGDLMAMADWMTAQGVTHVAMESTGVFWKPIYNILEGRFTMLLVNARHLKQVPGRKSDVRDCQWIAQLLQYGLLKASFIPPRSQRELRDLTRHRTQLVEEKARAANRIHKVLQDTNIKLSSVATDVLGASGRAMLEALITGEEDPVKLADLAQRKLRGKIPQLEKALEGHLTEHHRFMLKLLWKQLAQQEELIAELDSRIEEQTRPFAAEIDRLDAVPGVDRRVAEVVLAEVGPDMKAFPTHENLASWAGMCPGNEESAGKRVRKRITPGNRWLKRTLAQATWAASHSKNSYLASQYRRLAGRRGKKRALIAVGHSILVIFYHMLKTGTSYTDLGGDFFDRLEPQRLTRYYVKRLESLGHKVTLESCAAA

SEQ ID NO: 78983 - protein, 418 aa, unidentified
MIDQADFAAYIGLDWGDRQHAVHLRIPGQRSSESFQLEQKPEALHEWIAQLRDRFHKGRVAVAIEQRKGAVIHALMMYDFLILYPINPKALARYREAFQTSGAKDDPTDAALLLDFLSKHSDKLRPWIPDSELTRKLQALSEQRRKLINQRVALANRITSLLKQYFPQALDWIGDVASIQACDFLESWPTLEAVQHLQEAKLQTFYRRHNCRKASVISKRLQQIVLARPLTTDSAIIEPYSLVVEASALQLRNLIRAIQKLDKLIAALFCQHPEHDLFDSFPGAGPVCGPRLLTVFGTDRARWASPVDLLCHSGIAPVTERSGNSCWVHRRLACPKFVKQTFHEFADQSIRYSKWARAYYDLLRARGKSHHASLRALAYKWIRIIFRCWKDRKPYNEEIYIQSLRRRGSPVAEKFKSV

SEQ ID NO: 78984 - protein, 361 aa, unidentified
MQSTTIIAFDQHAATTVAAVLQSGQRTPALHTLTSDNPTILRFIQRLQRQGAVRCCYEAGPCGFELQRALRQHGIPCDVIAPALIPRRPGDRIKTDRRDARHLAVLYRAGALTSIHIPTEQEEAARDLLRCREDIRADLLRARHRLSKFLLRHGRRFTATKKAWSKRHDAWLRAQAWTLPALDQTHRTYLRAVDETLARLRDVEADLQALLDLEPLRPRVQRLRCFRGIDDLTALTIAAELGDPRRFATAPSTMAFVGLVPSEHSSGTKRAQGGITKTGNAHLRRVLVEAAWHYRHHPFVGHTLRTRQRGAPADTIARAWTAQQRLHRRYRRLVARGKPKQHVVTAVARELTGFLWAALTQ

SEQ ID NO: 78985 - protein, 309 aa, unidentified
MEVFVGIDVSKDRLDVCVLPSGETFAVSSDGEGLALLADRLLVLHPASVAMEATGGFEVVAAGVLASAGLPVVVVNPAQVRSFAHALGRRAKTDPIDAYVIARFAEATRPQLRPLADAEQRLLSDLTVRRRQILQMLTAERQRLSRTSEPRLKKSLKRLIMALEKELGEVDGEIDQAVRASPVWRRKEALMQSVPGVGRITARNLLADMPELGTLDRRQAAALAGLAPFTRQSGKWRGKSFIGGGRTHVRCALFMAALSAARYNPALKLFHQRLIQAGKPKMVALIAVARKLLIILNAVISDQTPWQSA

SEQ ID NO: 78986 - protein, 380 aa, unidentified
MTMEQEFASPASNTETVYAAIELSKKNWVISVAHPGQPKPSIYRLPGGDFDALVARLRKVAGSIARIVICYEAGYDGFWLARRLTRSGIECRVLDPASLQVNRRARRVKTVRIDALMLLRAVIAIDRGDHHVCAVVRVPDVEEEDARRSHRERQRLVHERTAHINRIKGLLFGQGIRGIEPKLRATRIDFASLVTAEGRALPERLLHELEREYSRLALVEEQIRCVEKERDVADAQDPAIEQKRQMLRLLPGVGGTTAAIMAREIFSRQFSSRSHLGSYLGLTPSAYDSGTTTKCQGISKAGNSWARRILIEIAWIWQHKHPASPLTKWFRVRTQGQSARMRRIMLVAMARKLAITLWRYVETGLVPEGLVMPTKAAATG

SEQ ID NO: 78987 - protein, 343 aa, unidentified
MKDASTIGLDLAKNVFQVHGVDGSGETVIRRQLRRGQVLPFFKRLPPCLVGIEACATSHYWAREITALGHEVRMMPARYVKPYVKRNKTDMADAEAICEAVTRPTMRFVPIKTPTQQSILMLHRTRELFVRQRTMLVNALRAHLAEFGIVAGVGRNGLEKLLEVIADERDERVPPEVRSCLLALRAQLVLTKQQILEADRRILAWHRSSELSRRLDEIPGVGPLIATALVASIPDPKAFRSGRDLSAWIGLVPKQNSTGGKERLGHISKAGNRYLRKLLVVGALSVIRRAKQTGTTRRPWLVALMARRSTKVAAIALANKIARIAWVIMTRETRYKEPLPQAA

SEQ ID NO: 78988 - protein, 411 aa, unidentified
MRFVGLDVHRDFCEVAVMERGVVRLGGRVTASRVELELFAASLGREDQVVLEATGNAVEIARIIEPHVGRVVLANPKAVKAATQTAKTDRLDARLLVRLLASGFLPEVWTPDEQTRVLRRRISRRTQLVRQRTREKNQVHAVLIRNLKDRAPVTDVFGVEGRRWLADQELPSDERETVEACLRGIDHLDQEVAVIDRALAELTLASAPLRRLLTLPGTNAVTACALLGAIGDIARFPTPGHLVSYLGLDPRVRQSGSEPARHGRISKQGPGDARHVLVEAAWHAARTNGPLRAFHQRVALRRGGNIATVAVARKLVVIAWHMLSKEEDYAYARASLVREKIRRLELLTGAEQRKGKRGGVRVFAKRHQHDLEKELARQAEAAYRRLVQDWQSTQKGAGAAPGRASCEPSSG

SEQ ID NO: 78989 - protein, 352 aa, unidentified
MAKVEFDDLMSVGIDIGKDTFHIVGFDHDGQRVLRKQIKRLALVTTFEKLPRCIVGMEACLSAHFVSRTLRKMGFEPRIIPAIYVKPFNKGQKNDYNDAEAIAEVALRPNLNAVSEKSQDQLDLQALHRVRSRLVSRRTATINQIRAFLIEQGITVRKGLRALKNSFETILEERKEEISPRMRKILIGLYGDWMWMDDRIDTVSKEIEEISRTEENCVNVMTVPGIGPMISTAMVAAIGEGEAFDRGRDFAAWVGLVPRQYSTGGRTILGRITKRGSRYLRMLFVQAAKVILMRPHRWPDFSFGAWLTRASERMHRNKLAIALANKLARMAWSILRHKTAFDAPRDEIMAGV

SEQ ID NO: 78990 - protein, 292 aa, unidentified
MSDSKFIGLDVHKTSISAAVVDESGKLVMQAVFMTNAAAVLGFVRGLRGTLRVTLEEGTHAAWLHSVLKPQVAEVVVCNPRKNALLKSGNKNDRIDARKLADLLRTNLLTRVYHDDSQTLTLKELGRTYRALTDDTTRVMRRLKALYRSQAIDTGGKKLYTRRRREQWLEQLKQVGQRYRAERMFEQFDSLQAMRRQIRCDLIQEARQHAATATLSSVPFVGPIRSALLIARVQTPFRFRTKRQFWAYCGLALETRSSADHQVIAGELRRKTKPVFIRGLNLNHNHDLKNLF

SEQ ID NO: 78991 - protein, 345 aa, unidentified
MQPMYYIGLDVHKRKISYCVKDGSGRIHAEGSISATRLELDHWMRSLPQPWSAAMEATMFTGWIYDHLQPHAAVLKVAHPLMLRAIAVAKKKNDRIDASKICDCLRCDFLPESYMASTAIRERRRTLRYRNLLVRQMVQMKIKSSALLMEAGVSYNKQRLHKAGYFRELLATNPDIDEGLCSLLRLCRETVVRLGKNESALVRSLERDSLLVERIERLMTIPAVGPITALTWALEVGDVQRFSSIKKAISYCGLCGAEKSSGNTVQRTPLSKQRNKHLQTTLIEAAKMAPRNSPELAMLYDKEKQKGNANRATLAVARKLVAYLMAVDRGQRNFQRAERSSSIAA

SEQ ID NO: 78992 - protein, 402 aa, unidentified
MNAVGIDVSKGKSMVAIMRPFGEIVSAPFEIKHTASDIHSLVELINSVEGESRIVMEHTGRYYEVLAHQLSEANLFVSAINPKLIKDFDNDSLRKVKSDKADSVKIARYALDKWQNLKQYNVMDELRNQLKTMNRQFGFYMKHKTAMKNNLISILDQTYPGVNTYFDSPARSDGSQKWVDFASTYWHVDCVRKMSLNAFIDHYQNWCKRKKYNFSQSKAEEIYGKAKELVPVLPKDAITKLIIKQAVDQLNSASTTVESLRTLMNETASKLPEYPVVMAMKGVGTSLGPQLMAEIGDVSRFTHKSAITAFAGVDPGVNESGSYEQKSVPTSKRGSSDLRKTLFQVMDVLIKTHPQDDPVYQFLDKKRAQGKPYYVYMTAGANKFLRIYYGRVKEYLSSLPES

SEQ ID NO: 78993 - protein, 407 aa, unidentified
MVDTTAIDLFLGLDLGKEFHHAHGRTGDGRTVHDKRLPNTEPKLLELFTKLVAKFGTVLVIVDQVANIGALPLTVARAAGCRVAYLPGLSMRRAADLHPGEAKTDARDAFVIAETARTMPHTLRAVDRDDEVLAELTMLTGYDNDLAGEVNRTTNRLRGLLSQIHPSLERVLGPRLAYPYVQALLARHGSPARLKRLGRARCEALLRAHGSRKAHHLTTEIFDALAEQTLVVPGTEASALIVPGLAAQLAAAHAQRQATEQEIAALLEALPLFHLLTSLPGMGVRTTAAVIVAIGDGTGFPTAGHLASYAGLAPATKSSGTSIRGEHAPHRGNRLLKRALFQAAFAAIGCKADPSSRIYYDRQRARGRTHTQAILRLARQRVNVIHAMIRTGALYEPRTPNGVGLAA

SEQ ID NO: 78994 - protein, 348 aa, unidentified
MLADQVDYVVGVDPHRDSHALAIVHVLSGAVVFETTIAASSQGYAEVLQLVDAHAPGRRAFAVEGSGSFGAGLTRFLTSRGERVLEVSRLRRERRSGGKTDALDAVRAARSVLGQERPATPRAGGERQALQALVAAREGAVNAKCAGLAQIRDLLITTPEPLRSEMRPLTQAPLLRRLAATRPEGRRDPELRGSMLALRSVARRVLQLQAEERELGRQIEALTRKLAPQLLDQPGVGPHAAAQLVLSWSHHGRIRSEAAFARLAGAAPIPASSGQTVRHRLDRSGDRKLNRALHMILITRKRAHPPTIAYIERRMHEGKTRREANRCLKRYLARSLYRLLEHGPPIAT

SEQ ID NO: 78995 - protein, 375 aa, unidentified
MKKNSSGCKSPKASIKATKSTNVTAGMDLGDKTSRYCMLDENGEVLREASVGTTKEAIAQVFATMKPCRVAIEVGTHSPWVSRLLKSFGHEVIVANARQVQLISKSSRKNDRMDAQMLARLVRVDPRLLRPIQHRSEQAQEHLRVIRVRAALVEARTMLVNAARGLTKATGERLPSCDADQMGVERVESLPAGLQNSLRPLLEEVESLTEKIQALDQQVEQIARTDYPETSLLRQVSGVGSLIALTFVLTVEDRERFQKSRDVGCYVGLRPRQSDSGESEPQLRITKEGDPYLRRLLVQGAHCIMGRRGPDTDLKRWGLKLSARGGKNAKKRAVVAVARKLAILLHRLWVTGEVYEPLRNNQAEPPVKETGKAAA

SEQ ID NO: 78996 - protein, 412 aa, unidentified
MQVVYARCAGLDVHQKTVSACASVCEPSGKKRRQIRVFGSFTGDLLVLADWLREQGVTHVAMEATGVYWRPVWAVLEGQFEQLLANPQHMKAVPGRKTDAKDCKWIADLLQHGLLKGSFVPPTPIQDLRDLTRYRVELRQSQSRVANRIQKLLEQANLKLGSVASNALGVSGRQMLEAIVAGQDTPEQLAQLARGKLNNKIPQLVQALQGRVRDHPRFLLAEFIEEWDWFEQRIVRLEAEIDKQINPFEQALALWQTMPGVERVTACSLVAQIGVNMNQFPTAQQLASWAAICPGNHESAGKRKSGKTRDGNKWVRRTLCQAAWAVSRKKNCYLSSQFKRIATRRGPKRALMAVAHTMLVIGYPMLKTGQGYRELGGNYLEQINKDQLQRHFVKRLEKLGFKVTVEPSLEAA

SEQ ID NO: 78997 - protein, 346 aa, unidentified
MNYIGWDLHQQYSQVAVMTKEGKVIDEFKVSHNPGVFSHPIMLRLFRQPAKVAVEACNGWYWVVDRLEEIGAEVHLAHPLKTKLIAEARVKTDKIDAKVLANLLRTNFLPESYLAPHEVRELREIHRHRAALVKLKTSVKNRVHSILSKHGIFFHLSDIFGIKGRQTLEKVMNQLKPVYAEELHRYLGLIDYLNKEIEKVERQIKSLAKKDKTIELLKTVPGIGEYSAFLIQSEIGDINRFSHPKKLISYAGLNPGADISGKHHYDKHITKQGNVWLRWILIQDAHQAAKSDERLKRIYQRISHRKGKNTAKVAVARELLFSIYWVLKKKAPYCPKSVTPGLAMIP

SEQ ID NO: 78998 - protein, 328 aa, unidentified
MKNLFIGIDISKDVFDYCALDQKNKVIFRGQNSNTEGGIKNFRQRIKRYRSYAPWICMEHTGYYGYLLAYEFSRFGFDFSMVNPLDLKLSLGMVRGKNDAVDAYRIASYALSNKHKLKVYKLPAKELRELKLLMKTRERLSKALVQLKNGVKGMRIAAQTINIEALIKKNDLLIKKIETQIKAIDKKMLELIKSSPKLYETYKQITSVIGVGPVTATKTIIESGNFKKITKGRKFCCHAGLAPFEYKSGSSVKEKTKTSPLCNKSLKGVLHKAACSAIQHDPQLKKYYKRKRDEGKHKLSVVNAVANKLVMRIFAVAKRDTPYVKLAA

SEQ ID NO: 78999 - protein, 419 aa, unidentified
MSFKILKNNCCGLDVHKTWIYACIGITDSNRRTEYKQARFSSFSKGLNELCSWLAKYNCNDVCMESTGKYWIPVFNILEKNNIWVTLSHPKYTKPQKGNKTDRKDAKWICDLYMCEMVKPSFIPPADIRELRDLVRYRFKLTCMITGEKNRAQNCLTVSNLKLDDVFSDVFGKSSRSITEQILQHPGETFDVAPFVDGRCKTPIEEIQAAVDGAISTEQAVKLRQCLNHIDELEKHQAEIEREIFRLSDKYESILSLIRTVPGFDKNPMTAIQVLSEIGGDMSVFPTAKNLVSWAGCCPRNDQSNHKIKSTRISRAGSYFKPVLVQVANALIKSKKNPEFATRYRRIKARRGHKKAIIAICRMLLTAIWHILTDLKPYTPEGFLESRPVNKEKVLTTSQALNLLKQRGYTIKDDAVPVT

SEQ ID NO: 79000 - protein, 406 aa, unidentified
MRSDTITAVGIDVSKGKSVVAIRRPGGKVVKPPFLVNHNAEDFRKLILLMHKVGGNIRIIMEHTGMYWRPIAIALQQAGFFVSVTNAILIHRFSDNSLRNVKTDKADALKIANYGLTFWSELREYSVEDETRQMLKTQSRLYERTSGVSVALRNGLISLLDQTFPDINKLLQPTYRNIRGHFKWVDFVKHFWHRDCVAGMSSNAFMAAYKRWCEKSGYRYSSVDAEKIRQYAKGTVATFPKSESTKVLIVQAVDSLNAVYDSLQILRDEMYRLASCLPEFHVVMAMQGAGEITGPMLMAEIGDVRRFTSKNALVAFAGVDAPPYQSGAFESKSRHVSKRGSPHLRRTLFQITTVVLRRADPQNAVYSFMDKKRSEGKHFYVYMVAGAAKFLRIYYARVKECLNNAD

SEQ ID NO: 79001 - protein, 336 aa, unidentified
MKYSGIDLHSNNSVVTVTDEEDRVMAEKRLPNDLATILGFLLPWRDELVGVVVESTYNWYWLVDGLQEAGYRVHLAHCSAIKKYEGLKHSGDEADARHLAHLLRLGILPTGTILPREQRALRDLGRKRMQLVRSRTQHILAVENITARERGARISSEQVKRLSVETIDQMPVPEDVALAVKANVAVIHTLSVQIDLLEKRLQKAVPRTEYDLVTTIPGIGRILATTILLETGPIDRFASPGNFASYARCVDSQHTSNGKKKGKGNTKNGNKYLSWAFIEAAHFAMRYCVEAKRFYERKKSRTNNVVAIKALAHKLARACFHILKERKPFDVTRCFA

SEQ ID NO: 79002 - protein, 413 aa, unidentified
MDVLHPRCCGLDVHKSSISACILLREAGRVQKHQRRFGAMSQELQELAEWLRQFGVSQVAMESSGVYWKPVWNILEGQFAVVLANAQHIKNVPGRKTDQKDAEWIAQLLQYGLLRASYIPCEIIRDLRDLTRMRTSLSQEASRISSRIQKVLEDANIKLASVATNVLGKSGRAMLEDIISGEDNPEHLASLALGHLRVKIPQLRLALEGKIRSHHRFLLGRLLDQIQFVEHEIALLDERLEDIGRQRPDLAQAVARWDTIPGIDRVAAWALLAEIGDNMAQFPTAEHLASWAALCPGNHESAGKRLRGTTRQGSPWLCRMACQCAWAAARTKNTYLSSQFRRLAARRGKKRAIIAVAHTIIVIGYHLQKNQSNYEDLGGNYFDRIHSDGLKRYLVKRLQQLGHKVTLEPMEAA

SEQ ID NO: 79003 - protein, 402 aa, unidentified
MRYHVGVDVGKHRHHVSIRDLSQDDYCKAFSFMNDRDGFIELIAVLEKLSPERSDFLIGVEACSYALNLSYFLMAMGFTLVEVNPFRAGQFRKAQGKKAKTDKIDARTIAAILPLGDHKSLSIPDPILDNLKELTRFRVDLVDEKSIMIIHLREALSTLFPEYEKVFRQLDSAGSLALLAAYPGPEHIIGAGEEAVGRTLSLASPRRMSIGMARRIIEAAKCTVGVVQRQPSLGVKISVLAKRIAGLQSTIRDLDRQITSLFNSLPCKPRGFPVGRAPSLATIISEIGDIHRYPTLKKFLSHLGWCPQSFQTGNYRLKHPKMSHAGNKYIRRLIWMLSIFAVQFVPRYREYFQRRVSEGKAKMHIIVAVGRKLLSALYAMLKSGMAYDPNWEENSRPALARH

SEQ ID NO: 79004 - protein, 341 aa, unidentified
MSQTANTAIAVIGIDIGKNSFHVVGHDARGAIVLRQKWSRGQVEARLANIPPCLIGMEACVGAHHLSRKLASLGHDARLMPAKYVRPYSKGQKNDFNDAEAIAEAVQRPTMKFVATKTAEQLDLQALHRVRERLVSQRTGIINQIRAFMLERGIAVRQGIGFLRTELPTILATRTDALSPRMLRVIEELAGDWRRLDQRIDGLSGEIEALARQDQACSRLMTVPGIGPIISSAMVAAIGTGDVFSKGRDFGAWLGLVPSRSRPETARSSANLEARQSLPARSIRAGGMVVLVRIKNWERYGLKSWIEAARGGCTTTCWRSRSPTSLPASPGRCWLKGAPSS

SEQ ID NO: 79005 - protein, 351 aa, unidentified
MSKVYIGIDLAAKCCWGATRNRRGELTSLERFATSEENLISYVRAQGGEATVLLEECDMAGWAQRVLIPHAEKVAVCEPKANLWIHRDSVKTDKIDAKKLAQIALLGNYKEVYHTSDARIYELQAAVKAYDRLVEKAKAQKNQIKARLRGEGIITEGTRVFGKRGRREAMALIGSPLLREMVAADYEILDFLLRKQAEAKGRFVRLGKEIGIIRAWQAIPGVGPVTASRFCAYVKCPHRFAKKGKLSKYSRLGVTVTETGGKAIRRQRLDPAGNGALKDVSRKAFSSALRTRGDNLIKRAYARALSSTGSEIHARLTVQRKILAIMWAMWRHGTAYDDNYDLKNGACEARL

SEQ ID NO: 79006 - protein, 402 aa, unidentified
MNAVGIDVSKGKSTVAVLRPFGEVVASPFDVAHTGSNLRALADFIKKLLGEKKVVMEATGNYYEPIARYLHEQNIFVSVVNPVLISDFGGNTLRKPKTDKKDSLKIASYALSYWIDLKKYVPQEDLRKSLKLLNRQYQQASKLKAMMNNNLISLLDLIFPGVNKLLTSPSRESDGHEKWVDFVLAFPHCDMISKLTIKFFSRKYKKWCNSNSYHFTEAACKKIYEYSKECISSVSSKESTAFAVIQAARMLNSATENCHVIQLEMNRVAAQLPEYNTVMSMYGVGKAMGPQLMAEIGDSRRFHSRKAITAYFGYDSENNDSGQKVSISNSMTKKGASALRRTLFIIMQVLLQNKPIDNLVYDFLIKKQSEGKHYYSYMNAAANKFLRIYYAKVKEILTVAET

SEQ ID NO: 79007 - protein, 367 aa, unidentified
MKKHNTAQKSSCGMKRANGQRTIGLDIGDRNSRYCVVDEHGEVTEEGSVATTRKGLDRVLGAATRCRLAMEVGTHSPWVSRHLARLGFEVIVANARRVRLITESSRKDDKLDAKTLARLARIDPELLSPIRHRGEQAQADLMMIRARAVLVETRTALINAARGLTKSYGERLPSCGTYQMGRDQAESLSPAIRAALDPLLAEVETVTERIREYDRQLEELCKTRYPEVNLLKQVHGVGTLIALTFVLTVEDPHRFRKSRAVGCYVGLRPKRRQSGQSRPELGISKEGDAYLRTLLVQGAHHVLGPFGKDSDLRRWGLKLAGQGGKNAKKRAVVAVARKLAVLLHKLWISRETYEPLRLANRSQNVAA

SEQ ID NO: 79008 - protein, 389 aa, unidentified
MNPTQGMDFTPGAGFMAASLELSKGSWKIALHDGKRDKPAIHTVSSEQAAKRLNDAAAVIEATKRKWGIPEHTRTVVSYEAGQDGFWIHRALSALGYEVLIVDPASIPVERQARRAKTDRLDAIKLVNCLLAWLRGERDRMHVIRVPDAEAEAQRHLARDRGELQKEIGQHRDRIRKLLRTVGCWDSVEGKFAKRLEQGEVRCQDGQPLPALMQARLERECARMALAETQLAALETSMIEALPKAVSGRIERLTLLKAIGRVGAFRLVLELYWRNFDNRRQVGSCVGLAPQPYDSGESRVDQGISKQGNRRVRALLIEMAWFWLRYQPNSALSKWFAQRTGGAGQNKRGKRIAIVAVARRLAIALWRYLKDGVIPEGAEFKVVAAPKAA

SEQ ID NO: 79009 - protein, 446 aa, unidentified
MPAKKKRALATPPHIAHPNAAGIDVGSDAHVVAVPGDRDPEPVRTFGVFTADLRRLADWLRQCGVTSVVLESTGVYWMPLCDFLEGQGFEVLVIDPRSLARNLKKKTDVSDAAWLQELHAFGMLKSCFRPPQEVRSLRALWRHRDHLVTEAAKLLQMMQKALVQMNVYLHLVVADIAGVTGMRILRAIAQGQHDAQTLAGMRDPNCKKSREEIAKALEGTWDAAHLFELKQLLKAWDFYQNQLHVCDKEYAKAAGKMPDQTQGRPLPEPEKRPQTHRNSPTAFDSHALIFKMTGVRLTEVDGLGASTVLTVLSETGPDLAAKFATEKHFAAWTTLAPRKYQSGKRTKFPAQTASRVAKAFRLAARALLNSKSVLGNFLRRLRARLGIGTAIRATACKLAKLFYRLITKGEAYRRESTAAEEEKQRERQLRALERKARELGMQVMPV

SEQ ID NO: 79010 - protein, 400 aa, unidentified
MTDHSARIWVGIDAGKAHHWATALDGDGKVVLSRKVVNDETEILELIATVCEAADEVSWAVDISGRASTLLLTLLIGHGQSVVYIPGRTVNRMSAAYRGEGKTDAKDALVIADTARLRRDFATLSLPDEQVATLQLLTAHRADLIADRVRLINRMRDTLVGISPALERAFDYSASKGAVTMLTEYQTPAALRRLGANRLAAWLRRRSVRKAEDIADRAVEAARSQATVLPGENRAARQVGAIARQLLDVDEQIKETEREIREVFRTDERAAVIESMPGMGPILGAELVAIVGDLSGYADARRLASHAGLVPVPRDSGRRTGNFQRPKRYNRRLRHIFYLSAQTAMMRPGLSREYYLRKRAEGQTHVQAVLALARRRVGVLWAMLRDGRPYDSGPPMAQVA

SEQ ID NO: 79011 - protein, 358 aa, unidentified
MNSKAFIPRDYDVFAGLDVDKRSISVTFTNHQGFIRSLRVPYSAEHLVNHVRKHFPDQKVAFAYEAGPTGYGLYDGIVAQDYPCLIASPSMIPKAPGQRVKTNRLDSRGISENLRGGQLKSIHVPAVLYRELRHLTQLRDTFVSAMVAMKQRIKSLLLMEGLEFPPAPAGSQWSFMVKAKLRKLPCSSMVRFELDQLLDSLEFNEKQIVKTTQQIRRLCQNDAELSQCIKYVMSVSGIGQIVASQLLARIGDWRELRNVRQLGAFLGLVPTENSTGERTDRGSITHSGDPRLRSKLIQAAWSAIRKDGELREFFRAVCQSHARPVASRVAIVAVARKLTVLISVVLMEQRPYVVRKKV

SEQ ID NO: 79012 - protein, 356 aa, unidentified
MSEITRVGVDLAKSVIQVHAVDAAGKMVTNRQLSRDKFLPWCLQLPAGCLVAMEACAGAHHWARKLTALGVSAKIIAAHLVTPYRLQGKGGKNDANDAAAVCEAASRPNMRFVPIKTTVQQGLLCVHRLREGLKEERTACINRIRGMLTEFGLVVSKSPDKLREKLADMLEDASNDLSGMARLVIQEAYDQWKDVDERIDWCDERIKAHVKDDVQAKAAKELVGIGPVTASAMVATVGDFNQFKNGAQFGAWLGLTPKQNSSGGKSCLGGVTKRGDMYLRTLLIQGAKSAVMTAHKRDDPISKWLCQLREKSGWQKAAVAMANKNARILWAMMTKGCHFDPRHVSVKPTGQATMMV

SEQ ID NO: 79013 - protein, 308 aa, unidentified
MKTWIGIDVSKATLAVCLLPQQQLLACSNDPLGHAQLLGHLQGLDIGNVLLEATGGYERLVMGALAGAGLMVTRINPRRARAFATALGKTAKTDPIDAALLARMAELVQRPVLAPEPDRDELRALVQRREQLVQQRDDERRRLHQTTSPLVREDLLEHIGQLRLRINAASRSIVQARQRLDHALADRLVAIAGIGEVTAASLLAYLPELGKLDRRQIAALVGLAPYNVDSGQHSGKRRIRGGRSPIRRVLYMACWSVIRTQADFKARYERRRQKGKCAKVAITACMRVLLIRLNAMARDNTEWKYLAA

SEQ ID NO: 79014 - protein, 368 aa, unidentified
MIPEVRPCSTPSALPHQPDIPRERRSPALLPDAAAAAVEQIPSDEAAVLAFLGRFPEPARLRVCYEAGPTGYELARLLHRQGVACQVIAPSLTPRAVGDKVKTDRRDCRRLARLHRAGELVAIRIPTPREEAVRDLCRARADLVDDRSRARRRLQSFPAAPRSRLSRRGLLDRQARALAGRPTLRRPPAAGHLQPLPGGGSQPRAQVTAIEADLAEAATKPPLVDAVARLAAYRGVGQLGALSLAAEVGDWRRFAHAGAFMAFTGLVPCERSSGDSVWRGHITRTGSKHLRFQLVESAWSYHHRPLIAGALRERQQHVSADTLARSWAAQLRLCRRFRQLERRKHITGVAVVAVARELAGFLWAELQA

SEQ ID NO: 79015 - protein, 400 aa, unidentified
MNEFKPEASRIDTVAASLELPGQECYSAYVGLDVHKETIAVAVAEPGRQEPHSEGEIANRPKSIEKLVRRLSERFGGGVLQFVYEAGPCGYGLHRQLVGTGHACEVVAPSRIPKAPAERIKTDRRDALKLARLARNGDLTPVWVPGSEQEAMRDLTRARGDMKAQERKARQQLNAFVLRHGHAWPAGKRRWTEAHYTWLESLKFTHDWQQVVLQEYVDAVRAAARRVADLRAQMERALAQWSLAPVVEALVALRGIDTLAAMVLLAELGDISRFDSPRQLMAFLGLVPSEHSSGGRRRQGGITLTGNGHARRMLVESAWSYRFPARQTKHLKRKAAPASEAAKRIAWQAQKRLCGRYRDLIQAGKNSKLVCVAIARELAGFIWAIVREEMPRVHGTSNTG

SEQ ID NO: 79016 - protein, 337 aa, unidentified
MKVTLIGIDLAKSIFQVCGVNQACKAVFNRAVKRDQLLGFLARYPGVVITMEACSGSNYLGRTLQQHGYPVRLIPPMHVKPFVKGNKNDRNDAFAICEAANRPQMVFVQPRSVEQTDLILAHRVRERLIGQRTTLINQLRGLLQEYGIVLAQGKEKLRQQLPQILEDAQNPLSMAARACFAQMLQEWADLDHSIGVHDRCITQQCRQTPACQRLTGIKGVAQITATALVAYAGNGAQFRSARHFAANLGLVPREHSSGGKQKLGGITKRGNRYVRRLLVQGAWSIIRHLQRATDRLSVWARQLMERRGKHVTALALANKLARISWAMLYKQQEYKAV

SEQ ID NO: 79017 - protein, 339 aa, unidentified
MGFYSGLDLHSNNCVIGVMDETGRRLRKKRVPNELPAVEGVLAPYREELLAVVVESTYNWYWLVDGLQEGDYPVRLAHPAGNKPYSGLKHTDDGDDAYFLADLARVNCLSEGYIYPRQTRGVRDLLRQRGRLVQERTSHVLSIKNVIVREGGQALTRSQVEGLSDEAIAQLVRDSYGQVGIKALGKVLGVINEQIRHLEKTVLAQAKPDPVYQRLQTIYGVGPVLGMTIRLESGEMSRFPTVGDYTSYCRGTGSQRLTNGKPKGENNKRNGNAYLAWAFLEAAHFAVVNYPLAQRFFERKRAASNRILASKALASKLSKAAFYVMRDQINFDPERLFRS

SEQ ID NO: 79018 - protein, 370 aa, unidentified
MKKNNTGRQIGKQGRKSSPRGLTIGLDLGDRRSRYCVLDECGEVVEEGSVATTKKGLGEAFGGRKRNRIGLEVGTHSPWVSRLLNGLGHEVIVANARQVKLISQSTRKDDKLDAQMLARLARLDPQLLRPIRHRSERAQLDLTHIRVRAALVEARTSLVNAARGLAKALGERLEKCDTDNLDMERLAGLPEAVQQALRPLLEEVESLTEKIQGCDEGIEQIARTEYPETGLLRQVKGVGTLIALTMVLTVEDAERFQKSRDVGCYVGLRPKRSESGESQPQLGISKEGDVYLRKLLVQGAHYILGGRGPDTDLKRWGQKLSARGGTNAKKRAIVAVARKLAILLHRLWVTGEVYEPLRNSRPPAAKQKVA

SEQ ID NO: 79019 - protein, 343 aa, unidentified
MDYGAIDLHVRHTLIRFVNQEGTVLLDRRVTTTVEELQHVFGGRPRARILIESGTDSEWVAQAIEACGHEVIVADPTYALMYGHRDPRIKTDRRDVAALAEACRLGIYRRAHRVSAAQRERRRALRVREQLVRTRTQLINLVRAQLRQEGYRLPAGCSTTVVRRCQALPLPPGLRAALEPVLTVLTTIGDELRACTETLAAVAAQDPIVQRLQTAPGVGVITALTYRAVVDDVARFADARGVAAYLGLVPREDSSGTRQRKGTITKAGPPGLRTLLVQASWVVWRQRRGGGALHAWVHQLAARRGRRIAVVALARRLGRILFAMWRDATDFGVAPTEPGATVA

SEQ ID NO: 79020 - protein, 384 aa, unidentified
MDQTTSTLSANTLHCALELSKKSWLLAIQFRDREQPSLYPIEGGNTDKLMAKLAAARDCWAKVNGALPAITLCYEVGHDAFWLARFLKARGIECLVIDPGSLQVNRRARRVKTDRVDVKMLLRTLIAWCRGERHVWSLVRIPSVDEEDLRRSHRERSRLVRERTAHINRIKGLLFAQGVRGINIKSQYKTLAVDQLVTGDGHRLPPRLVCEVAREIQRLAMVQEQIAKIERERDTAPTPCEATERKRRLLLRLKSIGPAISALLSREVYYRQFANRRQVGSFLGLTPSPYSSGEEERCQGISRAGSGHVRAIMIEAAWLWIRHQPRSALTRWFLERTAGQSTRTRKTMIVAVARKLAIALWRYVEHGLVPQGAILNPPTTGNAR

SEQ ID NO: 79021 - protein, 342 aa, unidentified
MNYYAGIDVSLECSSVAVVDASGKIVREGKVASEPAALIEWFAALGLRLERVGLEAGPQSQWLYAAMKQAGLAVELLETRHVRSAFKTMAVKTDRKDARGIAELMRVGWFRPVHCKSIAAQEVRVMLTARSLVQSKLQDVEASLRGMLRGFGLKVGRTTPNRFAERVRQLVCGHPNLEVIAQSLLAVHEVLLRELKGFEKRVRGVARSDARARLLTTIPSVGAIVSLAYASAIDDPTRFKSSKRVGAHFGMTPRRYQSGEIDHSGRISKIGDQGVRTALYQAAHIMLTKPVKGSALKSWAMQLAKRIGMQKAKVALARKLAVVMHRMLVDGKPFNSAAGAAA

SEQ ID NO: 79022 - protein, 332 aa, unidentified
MAYDFVIGVDVGRYFHHACVLDPQGRQVLSKRINQHEGALRKLFGQFLADNASVLVIVDQPNNIGRLTVAVAQDMGADVRYLPGLAMRQLSRIHVGNSKTDVRDAYVIAHAGLNLPDALRSVDRVEEVFIQLKVLNGIDEDLARAYTRLINQMRSALVGTYPAFEHVLRGQMIHRKWILHLRAKYGGPTKIRRIGRTRLAAFARSHKARNPEPVIDAMLAAIHAQTVSNAGAEYAELGVAMSAKDALAKLEHRKQIEAQVLKLIKDIPQTEILLSMPGIGPRSAAQILMTVGDMSDFPDAAHLASYAGLSPRTNQSGTSIMSNSPNRAGNKN

SEQ ID NO: 79023 - protein, 334 aa, unidentified
MSLVSTVGIDLAKNVFSVHGVDARGEVMIRRTVSRAKLSELVAQLPPCLIGMEACSGAHDWARRFVVFGHVVKLMAPKFVTPYRMSGKNDSNDAEAICEAVRRPNMRFVPIKSIEQQTDLSLHRVRQGFVEERTAMLNRIRGLLAEFGHILPLRAVEVRRRVPELLERLPTRVAGCVRDLLDHAMRLEAKAVEYEREIRVHARTNALAQRAQTRQGIGPITASALVATVGNAHDFKNGRQFAAWLGLVPRQYSTGGKTRLGHITKRGDAYLRSLLVMGARAVLQSAARLNDPFSRWALAVQQRRGYHRACIAIAAKNARVAWALLAKDAATATA

SEQ ID NO: 79024 - protein, 430 aa, unidentified
MKSNTQNAKIEAITEKTLVLGIDVGSEMHYARAFDYRGIEYSKKPFKFSNTEAGFVTFKEWILDLKERHEKDKVVPGMEPTGHYWFNLGKFLQDNEMKPVLVNPHHVKKSKELDDNNPTKNDRKDPKVIAGLVREGRYMIPYLPEGVYADLRTASNIRFQLQAELTRIQNRISRWFNIYFPEYKTVYGKPDAKSGMLILKAAPLPEDILTLGIDGVNQIWRDAKLRAVGKARAKTLIEAAEHSVGSKEGAVSARMEIRMLLEDYESRNIRLQEVMTLIEGLVKQIPMAEKLLEIKGVGIKTVSGFLAEVGDISRFNNPKELQKLAGLALVENSLGKHKGETTISRRGRKRLRYLLFEVAMSLVSKNQEFRELHNYYTTRRLNPLKKMQSLMAIAAKLIRVFYAMLTKGVDYDPKKMVSDIKRPAVYLQAA

SEQ ID NO: 79025 - protein, 334 aa, unidentified
MIHVGVDLHQRFCYMTALDSRGRQRNAQAVPNEAAALQAYFRQFRKPVQVAVEACSFWPAFRAAVGQQVEVRLVHSLRVKAIAAAKLKNDRVDSATLAHLLRCDLLPQAWMADEETRGLRQQVRLRATLVRQRTRLKNQVHAILHQQGLRHRFTDLFGRAGRQWLQQAPLPAVAQKAVSTYVELIDHFNLQIEQQDRAVQQFTRSEERAKWLMTIPGIGAYSAMMLLAEIGTIKRFANKRALSNYAGLVPWVRESADKRRSGGITRVGSPWLRWIMVEAAQTAVRTSPAVAGYFQRLSRRKHRNVAIVAVARKLLVAVWALLQHGECFEEGNFK

SEQ ID NO: 79026 - protein, 375 aa, unidentified
MPRYFGLDLHKRYVHGCEWLMDQQKGRHFRFPNTKEGWTSFLRQVDGECWVALEVTGNAFEAHDLLLPHVGQVLLANPVELKRLGSGRHTDRVDAERLAKMLALGTLPTVWVPPQAIRGIRRLVQYRDRLVRHRRRCLTQAKAVLRRHGLDGPRRTDPLRHLPPEEVEQLPEVDRILLLSALRQRRSVEAELQAIEAELVRRVAREPAVQLLSVTGIGLVAAATLWAYIGDPTRFRTAKQVTRYAGLDASVHQSGEDHRHGRISRNGCSLLRAVLVEAAHSVARHDSGPLGTFYRRKQRQIGPHKAVVALARKLLVVAWRMLLTGEVYRATRPALLEQKRRQLGRWLQATSNWQAVLRELWPRDGARRRRRTCAA

SEQ ID NO: 79027 - protein, 329 aa, unidentified
MKSEVHVGIDVSKFTLDVFILEVRSHRRFKNDSNDFPAILQWIEKCTKYQSAFICFEHTGVYSMALAAFLESQHIVFAMVSPLEIKRSMGIVRGKNDVVDSKRIAEYASRFRDKIVVTKLPAKDITRLHFLLTLRDKTARALAGYIAAVNEVQRGIGHEELPELFASYDTIITALKSEIKKIEAAIKYIISTNPDLKTSFKLITSLKGVSLIVGTYMIVYTCNFTKFATWRKFACYCGIAPFGHQSGVSVKGPAQVSPIANKQLKRLLHLAAVSAASHDPELREYYIRRQSEGKSKMSTLNIIRNKIVARAFAIVKRGTPYVNIRQYAA

SEQ ID NO: 79028 - protein, 347 aa, unidentified
MTVTIVEAGRTVVGGVDTHLDVHVAAALDPIGGVLGVESFGATPRGYRAMLEWMSAFGTLSKVGVEGTGAYGAGLGRFLRHAGVEVVEVDRPNRQVRRAQGKSDPADAVEAARAVLSGRCTGTPKSKDGNVEAIRALLVAKRSAREGRLRAVHQMRHLSYTAPDQLRCRLKGLSTKKFIAEAATLRPRVGGDPVVYATKVSLASLGRRALALEEETAAIDELLDDLVTATAPQMLELFGVGLDTAATLLVTAGDNPDRLRSEAAWAHLCGVAPIEASSGKVTRHRLNRGGDRHANQALWRIVMTRISSDPRTREYMERRTKEGRSKREVIRILKRYVAREVFKHLPR

SEQ ID NO: 79029 - protein, 346 aa, unidentified
MKNPNIVGVDLAKKVIQVCLVKRDKVISNTEMAPQEFRCFLAKTKSCTIVFEACATSNYWKQVCLSEGHDARLISARLVSQIRQNQKTDKNDALAIVQASQLTGVRFIQGKQFSQQELQSISRMRELAIKQKVATSNQIGALLLEFNIRVSNRNGGLNGVVQATLEDVVNNFSSEFRAALYETWQGYLSLVARIEKYDTHLNVSVEKIPACKKLMALEGVAIINAVNLYTSLACSEESVLSSAKDASASLGLTPIQYSSGGRIKLGGIGKRVKNALLRSNLISGAMAVVKQVSQREPKTAKEKWLKALIERRGNKCAAVALANKTVRTAFAMLRDGTEYHAQAITD

SEQ ID NO: 79030 - protein, 677 aa, unidentified
MGEYSEVFVAFDVGKKKHAVAIAEGGRTGEVRFVGEVENSPAAIERTIKRLGKKYDRLHVCFEAGPTGYGLCRQVRDLGYDCMVVAPALIPKRPGEHVKTNRRDAVTLARLHRAGELIGVWVPDVVHEAVRDLVRAREAAADDLRRKRQQLLSFLLSHRRIYASGGHWTLAHRRWLAHQSFDHTAQQIVFQEKIDAIEDAAQRLRRLDEQLKVIVPTWSMARVVEAYQAMRGASFLVAVIFAAEIGDVRRFDTPPQLMAFLGLVPGECSTGDTVRRSSLTLAGNRRARRALVEAAWTYRYPARVSEGLRVRLEGLPKAVRDIAWKEQVRLCARYRRLSAAGKKPPVPEDQLLLGLEEAEQIEAAGEEEAERADAATRKERTAKRRANRGALPAHLPRIDMVVDIENHACPCCRNGLHRIGEDVSERLDIVPAQLRVIVVRRPKYACRACEDVVVQAPALARLIEGGLPTEATVAQVLVSKCADHLPLYRQAQIYARQGINLDRSTLADWVGRAARHLRPVHERLLEKLKASPKLFADETTAPVLDPGRGKTKTGQLWAYARDDRPWNGSDPPASPMSMRRTERRSDRSLIWRALPESCRSTAMVAIGCSPTRVAQRSPSAGRTCAGASTNSPQPVRRRSRARRSGASQSSIASRTTSAASRQTHVLPCARKGADRSG

SEQ ID NO: 79031 - protein, 333 aa, unidentified
MLKQAIAGVDVSAAKFDVSALLASKKREVASFDNDPTGHKRFCSWLTRGKRKARVVVEATGIYSLDLSLALHRHPDIEVMVANPRALKNFAGASMQRSKTDPMDAASTLEYAVRMPFVPWVPPAETVLEIRVIARRISALTVERSREKNRRHAFEATNTTSKFVLNDIDVNIRHLTRRIDGLVNEALKIIGKAPKLKILLDLVVSVKGIAETSAVQILPELLVLPADMTARQWVAHAGLDPREYQSGTSVSRPPRISKVGNKNLRRALYMPALVAIRHEEAVKAYYQRLLDRGKKPLLAIVAVMRKLLHAIFGMFKSGLAFDGEKFSRTPKGA

SEQ ID NO: 79032 - protein, 392 aa, unidentified
MIYVGIDVAKDKHDCFITNSDGEVLFKPFTIPNNRDGFETLFQRILSVSDDLNKVKVGLEATGHYSYNLLGFLLDKGCHTFVINPLHTNLYRKSLSLRKTKTDKVDSRTIATMMMSDMNLKSYSNTSYHNEELKSLTRYRFDKVKERAKLKTSVSRLVCILFPELEKLVPTLHLPSVYALLSEFPGANAVASAHLTRLSNLLSENSKGRYGKDTAVIFREAARNSIGSVMPAKSLELKHTIKLIQELTSEIDEIETAIKRIMDEEIQSPILSIPGISYRMGAMIIAEIGDFNRFDSADKILAYAGMSPSTYQSGQMDNCYAHMEKRGSRYLRYALYNATKYVCHWDESFGAYLEKKRSEGKHYNVALSHAAKKLVRLIFAMEKSGQAYVPAA

SEQ ID NO: 79033 - protein, 392 aa, unidentified
MDAEKTLVVIGMDPHKRTVTIEVMTSHEQVVGGGRFTTDTDGYARLLGYARQWPQRLWAVEGCAGIGKHVASRLVADGEEVVDVPAKMSARVRVFATGQGRKTDATDAHSIALVGVRMGGLRPVVDDEQLEVLRMCVDRRASLGAEHTRKVCQLHKLLLELIPGGAKRSLSAAQAKELLKKVRPTTPAGKVRKAHAVELVEDLAKIYARTKAADKELKSLVKATGTGLIDLHGIGPSGAARLLVEVADITRFPDRNHFASWTGTAPVDASSGDHTHHRLSRKGNRQINRVLHIMAVVQLRHATEGRAYYDRKVAAGKTPMEAMRCLKRRLSDLVYKAMLDDLAGHTTTGPGGQLGDDSDSSATGSQPDAGSSDKPLPGPATTKPRTTLPAAS

SEQ ID NO: 79034 - protein, 342 aa, unidentified
MEQYIGLDVSLKETHICVVDGAGAVLARGREATQPELLAKAIEALAPAVRVVVLESGGQSSWLQRELSALGVPAVIVDARRAKAALSCRLNKTDANDAEGLAQLARTGWYREVAAKRPESRLARAVLLARRQLAKQRRDLENQVRALLRGFGLSVGRVARGRFEERVWELVRRQPLLEGAIEPLLLVRRCLEEKLKQLDARIAAAVRGSPVCARLMTVPGVGPMTALAFVTAIDEPGRFARSASVGAYLGLTPRRHQSGEADWSGRISKHGDGLARHLLYEAANSLIARVRKWSAPKAWATRLVKKLGPKKARVALARKLAVILHRIWLDGTTFRWSKEVAA

SEQ ID NO: 79035 - protein, 322 aa, unidentified
MSVTVLGIDIAKQKLDAALLVDGKTKHKACQNSAEGFETLMVWLEKQGIQKVHACLEATGNYGEDLAIYLHEAGHIVSIVNPARIKGFGQSELIRTKTDKIDAALIGRFCLAMKPGPWIPPTPAIRSLRALVRRVDSLIDMRSQEKNRISTAHESVIFLIKEHIAYLNQEIEKIRQQIADLIGQDPNLKRKHDLLDSIPGIGKATIPHILAELDDLEKFDHVRQLVAFIGLAPKETLSGSSIKGKPRLCKIGHARLRKALYMPALVSIQCNPVMIAFYNRLKDKGKNGKVIVCAIMRKLVHVIFGVLKSGEKYDPNYKPAFA

SEQ ID NO: 79036 - protein, 309 aa, unidentified
MEIVVGIDVSKERLDVAILPQGEVFAVGNDHAGIDELVERLKGIGVDAIGLEATGGYEMLAVAGLSAAGLTVLVINPAQVRAYAHAIGRRAKTDPIDAAVIAAFVLATKPEIRPLRDAETQALSELVARRRQIVQMVVAEENRLRMALAKQAQKSIKRLLKALRRELESLDADLDSHIRKSPVWRVREALLTSVPGVGATTARTLLAELPELGSLDRREIASLAGLAPWTRQSGKWKGKSFIGGGRGKVRAVLFMAALVASRYNPDLKAFRDRLVAAGKPKIVAIVATMRKLLTILNAIIRDGRPWQTA

SEQ ID NO: 79037 - protein, 309 aa, unidentified
MEIVVGIDVSKERLDVAILPQEEVFAVGNDHAGIDELAERLKGIGVDAIALEATGGFEMLAVAGLPAAGLTVLVVNPAQVRAYAHAIGRRAKTDPIDAAVIAAFVLATKPEIRPLRDAETQALSELVARRRQIVQMIVAEENRLRMALAKQAQKSIKRLLKALRRELESLDADLDSHIRKSPVWRVREALLTSVPGVGATTARTLLAELPELGSLDRRQIASLAGLAPWTRQSGKWKGKSFIGGGRGKVRAVLFMAALVASRYNPHLKAFRDRLVAAGKPKIVATVATMRKLLTILNAIIRDGRPWQNA

SEQ ID NO: 79038 - protein, 326 aa, unidentified
MQGKEASEQETKAKSNVGIDVSKDWLDGHALPSGEALRVPNSKDGIRKLKRWLARFEIALIVIEATGKWHRPLRRSLDAAAIPVAVIDPFRVRMFAKAQGILAKTDRLDARVLASFAVVMTPPRRPPAPESLEELKELVVARASAVDARTALKNQLSAATTTFLKRQLKRRIERSDRDIAAIEREILNRIKADEDLHRRYAILTSIPAFGDIVAANLVASLAELGSCSPKQIGMLAGLAPIANDSGNHQGLRVIWGGRASVRRILYLAALSAARCNPDMKAFYLRRIADGKPVKVALIAVARKLAVLANALVSQDRLWLPHAPKHA

SEQ ID NO: 79039 - protein, 417 aa, unidentified
MGSMKKCCCGVDVHKSFIIAVIAKFDNDEVRFTKHARFSTFTKGLREFKEWLARNNCYEICMESTGKYYIPVYRIVSDEKFHVDVVHPKYVRAPKGKKNDKRDAKRIADMYMRDHIAEYSIIPPAEILAIRDVARYRRKTINTMTAEKNRMSNCLTVSCVKLDEVLSDVYGKTGRAIIGQIIEQGTCSFDPEPFIDKRVKAPVEAFRQALDGDVTPATLAKMKIIQERLNSLDKQKAELESTMESLSQDFSRQIELLVSAPGIDTASAMTIISEIGVDMNTFGSVKKFLSWIGLVPQNDESAGKKKSTRIGKGNQWLKPVIVQCANAAKNSKNHPEIRDKYLALKKRRGYGKAIVAIAKRIMTAVYYMLLRDEKYNPKVCVDRAPKRGKIQLQSLINHYSSKGYTIVSDDGEVLASA

SEQ ID NO: 79040 - protein, 445 aa, unidentified
MLRTIYRRVAGLDVHKKTVVATRMQVTEEDQVGWETKTFGTTTLDLLELLDWLCEWELTHVAMESTGDYWKPVFNILEDSFEIWLVNAQHVKHVSGRKTDVKDSEWLAELMLHGLLKPSFIPPKPQRALREMTRYRTKLQQEQARVVNRVQKLLEGANIKLSSVATDIMGVSGRAMLAEIAAGQTDAKLMADLARGRMRNKIPELEKALTGIVQDHHRFVLAQQLDHIDFLNEKIEVISAEIGKHLERMSWPDEPSEPGASENAEEGIQVADESGLPLTWNAAVELLDTIPGVDRRVAEVILAEMGLDMSQFPTADHLASWAGLAPGNYQSGGKRYSGRTTKGNKSLSSIMVQAAWSASRTKDTFLKSRFHRLAARRGKKRAIVAVAHSMLVSVWYMLTNQQPYRELGGDYFDERKKEAKVSYLVRRLEKLTGGSITIALQPTAA

SEQ ID NO: 79041 - protein, 501 aa, unidentified
MNINHFPQEKLATFHAMNQSAIGIDVHSNLIVGVYQSSRFNSTRASIDGDTWNGDSTKKGLEDFAKWCKERKPEVLLMESTGVYWQSLYESLENEGFSNKDIVVVNARDVKNRRGNKTDLSDAIHLAEIARNGDYRASFVPKKEVRQLRCLWRSYHTLKNTRKRLLNVLHKQLYQVGCRASSVFSDIRGKIATQVIELLIGGKSGDELKEAIASVIKRSRGRLKATPDMVYEALRADMDSKVWYSIRQHLEHIKFIDKQLEAAFANLTIQSAPYEKTIQLLQTIPGIKYLTALGIVCELGDDLSAFKSVRKFSKWIGHAPGNNESAGKRYSGRTTPGNKYLKILLVECAAGIGLMKKGFLHEIHQRFKERIGTKRANVALAHKLCRIIYSILKNRTPYQERYKPILKEHRLGKAIKAVDGLRNMGLSCDDIEVTDTETGNSTIIYGANKYRRKLMKNKWYTEGKQSEMCFSHLLNSIRPVSAGNRLRLTLNLLRYLCYLTY

SEQ ID NO: 79042 - protein, 409 aa, unidentified
MEQVFERICGLDVHKATIAACVRVPDAKGQRGQYVQTFGTTTADLLALRDWLESHGVTHVAMESTGVYWKPVYYVLEERVTCLLVNATHVKKVPGRKTDVQDCAWLAQLLEHGLLRGSFVPPAPIRELRDLTRYRKSLIQERAREANRVHKMLEDAGIKLATVARDVLGMSGRAMLEALVRGTRDPAVLAELARGRMRAKLPALRQALAGHFGPHHAFLTTQILAHLDHLEEAVATLSVRIEAVLAPYADAVQRLDTIPGVNQRTAEVLIAEIGVDMTRFPSDRHLASWAGLCPGNHESAGKHRTGKTRKGNIWLRAALVEAALGATRTKNSAVAARYRRILRHRGHKKAIVAVAHHLLITAYHVLASQTTYQELGADYYDRGHTERVARRAVQTLQQQGYRVTLERVA

SEQ ID NO: 79043 - protein, 351 aa, unidentified
MLLIGVDYHPSFQTIAFFMEETGEYGEQELNHSDGQAEKFYRDLQQRGICVRVGMEATGYSRWFERLLAELGFELWIGDPAGIKSKRVKKQKTDRKDAQLLLRLMREDNFPQIWVPSPENRDLRQLLWHRHRLVQMRTRIMNQLQALAMNEGYRWKKKLFSELGRAQLEKLSLAPWASRRRQELLELLDGMNPTIEELTRAAEQEARKRPEVLRLMTHPGVGPLTALAYVLIIGTPARFHCGKQIGTYVGMVPSEDSSAGKQRLGHISKQGNSLLRFLLVEAAQAAARINPEWRRRYIHLAMRRHRSIAKVAMGRRLAVRLYWMWRNGSAYSLSLEFGSYVGQPATGHGVQ

SEQ ID NO: 79044 - protein, 318 aa, unidentified
MTHTTQTTALYVGIDVSQNTLTIALYPTDEVWTIDNTSQHHTALVQHLAQLPVQRVLLESSGGYEKAVVSALQQAGLPVVVVPAQRARYFAKSMRGDLKTDRADARMLAYFACCYPVQPVAPCSPVQAELKALWARREQLVQQVEREKKRLQTGMSEAVRASLERMIAVLKEEIAQIEARVAELIASDADLSQKAALLQTAVGVGRVVAYGLVAELPELGQVSHRAIAALAGLAPVRCESGAWVGRARVRGGRPRVRRLLYQAAVVAATHDGRWRAVYEALVGRGKAKKVALCAVARQLLVVLNAMVRDGRAYERVQE

SEQ ID NO: 79045 - protein, 357 aa, unidentified
MNNLMNYIVKNKEIFIGLEDSKKTWKVCVRSEKVTIHEASMPADYEVLRNYFNNKFPECRIHVMYEAGFRGFELHDKLKSDGYDCIVTPPHTVTQEKTQRQKNDRIDCRRLAKNLESGDYHVCHVPDRKLREDRQISRLHEQLQRDITRECNRIRRILEFHGLDHQFQSGTWYRTHYKKAYERISKMDISSSLKFDFNIMFNELFYLWELQKQVRKEIIILAKSEAYKEDVDLLKSAPGIGILTAIRLVLEWGDLDRFHRKAEFSSFLGLIPSEYSSGETERKGHITKQGNRLVRSWLTECSWRALKYDPVLFEKFNAVVRSSGSRKKAIVAVARKLANRLRFVLIHKTPYTIGLVH

SEQ ID NO: 79046 - protein, 390 aa, unidentified
MRRIGLDLGVRHIAYCEVAQGKVVDRVTVKSLSELASRLGPDTEPAVVAFEACREGWFVHDTLKEWGHDPRMLDTTRVRQMGVGQHRRKNDPIDAEAIAMALDGGRIAEAHVLSPARRALRAQLSVRGALVETRAQYVTTIRGLARAAGVLLPTCDTASFVRKLDALEWDEATRSLVAPLVALLRTIEQELVGVEHTLAGLADQEPVLKLCATVPGVGLIVAATFVSVLDEAKRFKNAHAVGAYLGLVPSESTTGGPDKRKLGSITKQGNSMARTMLIQAAWTIFRSRDKSDPLKRWVEQVAGRRHKRVAVVALARKLAGVLWAMWRDGTVYDPRDHAEQSARGVRASAREQLGRAQALDRAAKKLARPATRAPVVSPKPRPKSSQRVAM

SEQ ID NO: 79047 - protein, 452 aa, unidentified
MEEKEITMEVVNPKAAGVDIGSRSHWVAIGQGSNDYREFGVFNEDLYQIVEFFRENGIKTVAMESTSTYWQSLYAVLISENIPVILCNGKFTKNIKGKKTDIQDCQWIQKLHSMGLLTGSFLPDEETEQLRTFCRHRAGLLDSAASASKKMQKYLRLLNFRLDVVVNDICGLTGLSIIKSICQGQTDAAKLASLRHGNCHKSEQEIAKALHSNGRKDYLFALNQELEMYELFQSKIVQCDHEIEKMLSQIIDNADNKKQHHIESKLHKKINKNTPKNIDLNLKSYQYFEGIDLMAIEGMSYSTVLAIMSEVVLEGIKKFPTAKHFSSWLRISPNNKISGGKILSSKVPRGSNRLKTMLRNAANAIGNLKDSTPLRDFFQRINFRKGRVSAISATARKLAVIIWNMIVKGIPYHNPKEYLFLDQKRKLGLVKRIQKQITKFELKPTDFGFVTD

SEQ ID NO: 79048 - protein, 419 aa, unidentified
MQSQAPAAFAAFVGLDWADAKHEVCLQAAGTAQREFLSLEYSPEEINAWVQTLRTRFNGQPVAVCLELTKGPIVSALRTYDFLVLFPVNPLTVAKYREAFTPSRAKDDPTDAELQVEILLKHRDKLTPLRPQSPTMRALAQLVEHRRRLVGDKVRLTNRLTSALKNYFPQVLHWFPEKDTAIFCDFLSRWPTLKAAQLARRTTLEGFFRAHHVRSTDLIATRIEAIKSARALTTDDGVIAPNVLLVHALVAQLRVTLQAIADFDQAIAQRAQDHPDFPLFDALPGAGAVFAPRLLVAFGEQRERFTSADELQKYAGIAPVTERSGKKSWVHWRLQCPKFLRQTFVEWAAESTRHSFWAQVYYQQQREKGKAHQAAVRALAFKWIRILSRCWQNRTPYDESIYLQALNRRSAPLLHNLAK

SEQ ID NO: 79049 - protein, 374 aa, unidentified
MDEQVFGSERLFPTKKPTQHFIAEVPRRSSKVGMTIGIDLGDVWSHYCTLNEDGEVVDRGRFRTSPSGVEKWFTDLPQVRIAMEAGTHSIWISEQLEELGHEVIVANVRELRAISHSDRKSDQVDAEKLARYARLDPKILRPIAHRTVAQQEALTLIRARNLIVRLRTAAVNAVRGLAKPCGYRLPASSTLCFAKRCVAVLPPGLAQALGPVLEQIAEMTKKIKHYDRLIKRLTETEYPETQALIQVYGVGQLTALTYVLTLGSKERFQRSRDVGCYLGLRPKRSQSGDRDPQLGITKAGNIYLRTLLVECANHVLGPHGRDSTLRQWGLHLASRGGKQSRNRAIVAVARKLAVLLHRIWITQEPYIPFYKVAA

SEQ ID NO: 79050 - protein, 355 aa, unidentified
MTSTKCIGMDVHKQSISIAVMSSVGKVVMECVIETKASTILQFIDGLRGDLRVTFEEGTWAAWLYDLLKSHVTEVVVCNPRKAALLKDGSKGDRIDAHKLAELLYMNKIKSVYHGEHGLRTLKELARSYLTITKDLTRVMNRLKALYRSWAIPCTGSEVYAPRYRAEWLGKISEAGVRRRAEHYYQQLDVLRILRQEVRRDLLVEAKKHKAWKLLRLIPGIGPIRAALLIALMQTPHRFRTKRQLWKYSGLGLETHDSAQYDVAEGRLQRSKKPATVRGLNKDHNHDLKDIFKGAATRVSGSHGPLRDFYENLLAKGRKPTMACLTLARKIAAITLIVWKKEVRFDANYLKPQAA

SEQ ID NO: 79051 - protein, 336 aa, unidentified
MLYVGLDAHWRQSSFCVLDGQGRKVLSRTVQGRWSKVLEEVGRVGRPFAICFEASTGYGYLYDGLRKITRRVVVAHPGQLRLIFRSKRKNDRADAEKLAKLLYLDAVPPIHAPSSEVRSWRRMIGHRQKLIGDRARVKNNIRAMLRSQGVSAPRGLWSRRGEEWLETAELSAELDMVQRDVLLERLRAIRAMIERVERELNRVASRHPGVELLKTIPGVGNRTAEAVVAWVDDPWRFRRVSRIGSYFGVVPSQDASGPVNRLGHITREGPSVVRGLLAEAAWQAIRRSDQVRSFYERVRRGDDERRKIALVATVHYLLRVMLTMLQTGEVWRDETS

SEQ ID NO: 79052 - protein, 391 aa, unidentified
MIYVGIDVAKDKHDCFITNSDGEALFKSFTIPNNRKGFETLFQKVQSVSDDLTKVKVGLEATGHYSYNLLGFLLDKGLPTYVINPLHTNLYRKSLSLRKTKTDKVDAHTIASMIMSDVDLKSYSDTSYHNEELKSLTRYRFDKVKERAKLKSSVSRLVCILFPELEKLVPQLHIASVYALLSEFPSAHAVASAHLTRLTHLLSESSKGRYGKDMAIIFREAARNSIGSNMPAKSLELKHTIKLIRELTSEIDEIETEIKSIMDEINSPILTIPGISYRMGAMIIAEIGDFNRFNSADKILAYAGMSPSTYQSGQLDNCYSHMEKRGSRYLRYALYNATKYVCHWDPTFAEYLAKKRAEGKHYNVAISHAVKKLVRVIYAMEKSGQVYNKAS

SEQ ID NO: 79053 - protein, 346 aa, unidentified
MTDYFAGLDVSLNETSICILDQDGTILREGKVTTEPAAIDTFLRAAGVSFKRVGLEAGTLSAWLCHNLLDTGWPVICMETRHAKAALQAQTMKTDRNDARGLAHIMRTGWFRAVHVKSVESQKLRVLLNNRRCLLDKRIDIELQIRGTLKVFGLKTGKVATGNFEQRIRELVEADAQLLFCVEPLLEVRRHLREQFRILDSAIRAVVKEDPVCRRLMTIPGVGALTALAFKTSIDRPERFAHSRDVGVALGLTPRKYASGEVDYDGRITKCGDVVARSHLYEAAKVLISRVTRWSSLKVWGLRIAKRSSMKNACVAVSRKLAVIMHRMWIDGSEFQWGSQKEDATA

SEQ ID NO: 79054 - protein, 434 aa, unidentified
MAAGIDVGSTAHFVAVPEGCDENNVREFSSFTTDLYALADWLMQCKIETIAMESTGVFWNQLFELLESKGFDVKLVDARNVKNVSGRKTDVLDCQWLQQLHTYGLLNGAFRPEELVCSLRVYIRQKSMLTKEASTHIQHMQKALSQMNLQLHNVIRDITGDTGMKIIRDILAGQRDPKILAQHRDPRCKNPIEIIEKSLCGNYKEEHIFSLKQAVELYDFYCNKMSACDVEIEKILSKFEQKKEISEDHLKNHDLKKQANSKNALLFNVQAHLERITGIDLTEIPGINTIIALTIISEIGIDMSRWRNSKHFASWLGLCPGNKVSGGKRLGGAASKKTSNRAAAALRIAANSLYRSTSSLGAFLRRLKSRLGPMKAITATAHKIAVIIYNMLKNGVGYIETGADYYEQQYKDRTIKNLKNRAKSLGFELIAVAT

SEQ ID NO: 79055 - protein, 375 aa, unidentified
MKNNNLSVSGIGESQASIEQKNSRLLKLGLDMHYRQVTVAIQEEDGRIKAVGKMGHEAFVSWLEKKRKEGWEIYSCYEAGASGYWLHRLLVEMGVKNLVVVPKAMDQAGQKQKTDRRDAGELCDALDRYLRGNGKALSAVAVPTVEQEEQRALIRYHRQIMADRSRYEARGKGLLCAQGIEVQGKWWQAKGWKELPHDPRLKDWMKEQLEGWRGKLLGAEQQQQKLRCRIEALAPAMLPKGVGAYSAVVLEYEMKGLGRFKNARAVSSYTGLCPGIHSSDGRGKEGSINRCGNAVVRWNLVEMVWRLLKWQPDYEPVRQLAAGLVRSKRAKKRLVVKAARQLAIDLWRLRTGQTTPQKLSLVMQCNPMKSERASR

SEQ ID NO: 79056 - protein, 449 aa, unidentified
MGNGSGVSRGDRNRNARLERLRAWVPVTNAIVGIDLAGSRQMVVVTDHDSKVIARRTFRCRAWDLGSALDWAAGRAAAKGWAGVTVSCEPTGHRWRVLGQLAADRSMPFVCVQPMVTSWSRRTEDLTCDKTDEKDAVLIARLTAQLRCYVPEPVDETWGRLRHLGTRREQLITEEGSQIQQMRDLLECVWPAALDTARQRFRSGTWVAALPVIAGRDGGDFARTRRLGAARSGQAVRREITHRGGQKPCLRIVRGLFTALADPAGVIAHRPGALERVQFLLEDWRHTQDRLAGTEQRMTAVLDQLGLTGLVTSMTGLSAIGAAAILAETGDPRRFATGRAVVKHAGLAPREKLSGAFTGRTRLTGQGRPGLRLAAWRAVWGAQRANPVYAARYQYLTSREQNKLTPTQAQTVIAAAILRQLHAVITTGQAWDPVTATHGTRWESTPKAA

SEQ ID NO: 79057 - protein, 436 aa, unidentified
MASHCQFYNYKFQEVILLSFKILKFKCCGLDVHKTWIYACIGITDSNNRTEYKQARFSSFTKGLNELCDWLAKYNCTDVCMESTGKYWIPVFNILEQHNLWVTLSHPKYTKPMKGNKTDRKDAKWICDLYMCGMVKPSFIPPADIRELRDLVRYRYKLTCMITGEKNRAQNCLTVSNLKLDDVFSDVFGKSSRSITEQILQHPGEKFDVAPFVHGRCKTPIEEIQAAVDGAISREQAVKLRQCLDHIDELNKHISELEQEILRLSDKYEAALNLIRTVPGFDKNPMTAVQILSEIGGDMSVFPTAKHLVSWAGCCPRNDQSNQKIKSTRISRAGSYFKPVLVQVANALIKSKKHLEFTNRYKRIKARRGHKKAIIAICRMILTAIWHILSDLEPYTPEGFLESRPVKEEKVLSTSQALNFFKQRGYIIKDEPLSVS

SEQ ID NO: 79058 - protein, 320 aa, unidentified
MTSRGAEKMQNDTIGVDVSKDHLDVHRLYDGASRRFANDKRGHKALIKWLAETPVSRGVFEPTGAYHRAFERALGAAGVPFVKVNPRQARRFAEATGKLAKTDRLDAAMLARMGAMLELEARPARNETLLELKELYMAREALMKDRTAAKNRGKVLMLSLLKRQNAQRLEQIERQIMTIEAAIFQIVEADVGLADRLAILTSIPGVSNITAFALLIEMPELGVLEAGQAASLVGLAPIARQSGRWTGRAFIRGGRASARRALYMPALVATRFNPDLKAKYRQLVEAGKPAKVALIAIMRKLIVLANALLKANRKWAPKSA

SEQ ID NO: 79059 - protein, 343 aa, unidentified
MNQYIGLDVSLKDTAISIREDGKRIWRGKCPSDPKLLAEMIRKHAPYARRVVFETGPLSTWFYHVLTSEGVPAICIEARHAQKVLNETLNKTDANDADGLAQLAEAGFYKAVRVKSFDAMMTRSLVAAREQLLYISTQLGNQIRGLMKTFGLIIPKAKGRVFDGDVRKLLDGNNELAKIILPLLDAWHDIRKRAADLGRQLLIVARQSEATKLLMTIPGIGAVTAVSYVTAIENPENFRTSRSVGAWLGLTTRRYQSGEVDYDAHISRRGDNRLRGLLYEAATVLLTRTSARAESSLKSWGLKLRERLGFKRAAVAVARKLAVIMHSMLRTGEVFNASAGAAV

SEQ ID NO: 79060 - protein, 418 aa, unidentified
MTFTKSQKIKTINEKTLIVTLDIGKNIHYGYFRTPKNQDIKPFRIYNTGQSFKHFWKKLNSFRHQHGLDEVVVGFESTGPYAEPITNFLRKKPVSLVQVNPMHTKRIKELTGNSPNKTDKKDPRVIADIICLGHALTLVVPEGAAAQLRRLTHARERAIKRRTAMGNQLQHLVFVIFPELGDIIKPATKTGMYLIKNHPDPVSIVNLGFKKLQDIVRKVGRGRYSIDRVEKLHKAAKNSVGITEGKESILLETSHLVSNIENENRYIQSLEEQMTLYLDQIPYSHSILSLKGIGKITVAGLVGEVGDFRKFKTISEITKLAGLDLFEVSSGNHRGLHRISKRGRALMRKLLFFAALNAVKSHGIMHAKYHTMLDNGTPKMKALVAVSRKLLRIIFALARDNTEYDEQYVGKHEYKLAA

SEQ ID NO: 79061 - protein, 350 aa, unidentified
MTLYVALDVSLEKTAVCVMDTEGTPIIERAVPSEAFAIAELLTALPERPERIGLEAGPLSEWLVRGLADAGFTAMLMETRQVRAALSAMTVKTDRNDARGMAHLLRTGWFRPVHVKSMDAREQRVLLSARTTLVRRLRDIENSVRGLLRGFGFRFPRVLRVRWAQNVRDALAGNPTLLAIIDPLLAAGAALRDQLAILEKRVRDAARQDPVCHRLMTMPGVGAVVALTFRAAVDRPERFSSSKAIGPCFSLTPRRYQSGETDRTGTISRAGDPSVRVALFEAAHVMMTRVATWSKLKAWAVAVAKRRGAKRAKVALARKIGVILHSMWIDGADFRFTDKSEAGNRTTAAI

SEQ ID NO: 79062 - protein, 351 aa, unidentified
MIIKEDAMGQFVGLDVSLHETAVCAVDADDGHVIWRGSCGSTPEAIAATVGEHAPTVVRLGLETGTLSPWLARGLEALGLPVVCLDARQAKAVLSLRINKSDANDAHGLAELVRSGWYRQIQVKSQAAYQLQALVGARAQLVKIKVDLMNQMRGLLRTFGLVVGKGGGGKFDERVRELIAEDGALRTPIEALLCSWRQVCEQIGVLDRRLVAVAKRSATIRRLMTVPGIGVVAATAYAAMIDDPSRFARSASVGAYVGLTPRRHQTGELDYTGRISKRGDPLVRSYLYEAAGVVLHRMRRPSWLKSWGRKLVNRLGFKKTAVAVARKLAVILHRIWIDGSRFAWSREQATV

SEQ ID NO: 79063 - protein, 370 aa, unidentified
MTKLQLTPRRGQGGTGQPPAAGDPVTIAIDVARTKWVYVCRWHGAEQRRLSTPGELRHVQALVQEYVARGCSVCVVYEACGFGYEIAWWVEAQPGARVLVVAPSTVEKAPGAGVKTDGLDAGGLAWKAERDLLKGIAVPSRALHQQRQLSRTYEQVLRNRRREQARVRLLLQAHGYTDAPARVAGWPALAAWVEQQQAPWPAPLQQCVAELLSQRAAAEASAARLKRALTQLGRSPAYAPLVAALAAQPGVGRFTAIRLVLELGDMPRFATAGALVNYLGLTPREYSSGAVVRRGHVRKCGPGQVRAWVLQCAWAAVRSGGDAPLSEAFTRLAPRVGRKRAIVAVARRLALRLRARWLAHAAALATAAVA

SEQ ID NO: 79064 - protein, 398 aa, unidentified
MNAVGIDVSKGKSKVAIIRQFGEVVAKPFDIEHFPDQLAELANYIHSLDGESRVVIEHTGKYSDPIADFLCEAGIFVCMVNAKLIHDYGGDTIRRVKTDKVDALKIAGYCLDKWAKLSRYEPIPDHRKMLKTYNRQLSEYTKIKSMLKNNLISLLDQTFPGINNLFTSAAREKDGHEKWIDFVLKFPHCHCVASLSRQNFEIKYEKWCRKNGYNFCPHKSDQVYSAALNCLPTLPNNDFSKTLIVQTADQLNHLCEIVAAVKIEMNKIASALPEYETVLAMHGVGKTLAPQLIAEIGDIRRYPKRSSLARFAGIEPPENQSGTYNQHSRRISKQGSPHLRKTLFQVMCCVLQNSNLDEPTFQFIDRKRSEGKPYKVYMIAGANKFLRVYYARVNECFA

SEQ ID NO: 79065 - protein, 347 aa, unidentified
MKIIGCDFHPSYQQIAMLDTETGEVLEFRLEHEKGEARRFYEGLQGPVRVGMEAVGNSQWFEQMLAALGHELWIGDAGEIRRLEVRRQKTDRRDAQHILDLLLDGRFPRLWVPGVEIRDVRQLLRHRQKLVEWRTQVKNQLQHLALNQGVQRKRKLWSQEGRAVLEQLPLQGWTARRRAELLGMLDRLEEQVRELDAAVRAEAERRPEVRLLMTHPGVGPVVGLAYALTIGPVGRFSRGKKVASYLGLIPREHSSGGRQRLGAISKQGNTMMRTLLVEAAQNAARFDEPLRRDYRQLAARKHKALAKVMVARKLAVRLYWMLREQRPYVPPSVARMQGGSSHSVVEG

SEQ ID NO: 79066 - protein, 353 aa, unidentified
MTYTGIDYHKRYSVACTLDEKGRRLLERRIEHNAPEAFAAYFAELGEPSEVVIEACWNWGTLYDLLEQVPGVTHVVLSHPAKNRIIADAQIKNDRVDAHALATLLRGDFVARVHVPNREVRQRRNTVRQRLWAAKVRTMVRNRIHTVLDRHPGLDRPVYKDAFCQRGVSWMRTAELPAPDRELLTEDLELHTLLERQMAGLERRIEADSATSDDARRLRTLPGVGKVLGPVIALEIDGIRRFRTSDRLCAYAGLVPTTRSSGGKTSHGRMLPFCNHWLKWAFIEAAWVAVGCSDYFGGFYRQHRARGKCANEAITITARRLAKIAWQMLTAQRDYRRVPTQPDPLSPAALATD

SEQ ID NO: 79067 - protein, 311 aa, unidentified
MAKEDLTIEQLVEKGFGIDVHKEMMMVTIMGKGIKKQTREFKTFTEDLELCRQWIEEQGITQGAMESTGVYWKPVFNILTESLQIKLVNARHIKNVPGRKTDVKDSEWICKLLLSGLLNGSFVPPELTRETRDIYRYKVKMTQAGASEKNRIQRILEDANIKLSSVVSDMSGATAIKLIDGIIAGRTDINELVEENYHGKLSASKVDLKKAMTGRLTEHHKYMLLEIKDHIKYLEEKIKHLEQKLEEKLSAYQTEIQLLDTIPGVDTEAAIGIISEIGTDMSVFANEQKFASWAGMCPGNNESAGKKKVHA

SEQ ID NO: 79068 - protein, 325 aa, unidentified
MQGKELSEHVPSEETYIGIDVCKSHLDVHIHPCDETWRVSNDRCGIAAFLRRLAALPVAVRLVVVEATGKWHRAVHRRLHEAGYDVAVVNPYRSRKLADAMGHLAKTDAIDARTLALFGQALRPRITPPPPKTVAALRELVAARRATVAEASALGNRLMTAEHGLVARQLRARIAMLKRHIQAMAISISNAIEADPAMASLFNILTSIPGVGSVAATTMIAELTELGACSRTQVAALLGVAPMNWDSGAMRGRRIIKGGRAPLRAVLYMAAIAAVRCNPEIKAFYERLKDRGKKPKLALTAVMRKLVILANTLVRENRPWLPDAP

SEQ ID NO: 79069 - protein, 355 aa, unidentified
MTITKYIGMDVHKESISIAVMNAAGKFVMECVIETKASMLLQFIDGLRGDVHVTFEEGTWAAWLYDLLKPHVSEVLVCNPRKNALLKDGSKSDQIDARKLAELLRGNHLKPVYHGEQGLRTLKELARSYLIISKDVTRVMNRLKALYRSWGIACAGTQVYAPRHRSEWLGRISEAGVRRRAEHCYQQLDALRLLHQQVRRDLLLESKKHQAWRLLGLIPGIGPIRAALLIALIQTPHRFRTKRQLWTYSGLGLETHDSAQYRVVEGQLQRSKKPVTLRGLNQDHNHDLKDIFKGAATRVSSSSGPFHDFYEHLLAQGRKPTMAHLTLARKIAAITLIVWKKEVRFDASYLKSQAT

SEQ ID NO: 79070 - protein, 551 aa, unidentified
MRKISMSTRAELLEAVGERYRCADRRSKGRVLDEFVAVTGFHRKHAMRLLRGAQAQAPHGPRPDRRIYDEAVRTALVVLWEASDRLCSKRLRPLIPILLEAMERHDHVDIAAEVKQKLVRMSAATIDRALQDVKAAATTRRRRGAPSSALKKSIPIRTFKDWEDPAPGHLEADLVSHSGPVAKGSFAWTFTLTDIATGWTECAPLLVREQTVLVAVLDELRKLMPFVLLGFDTDNDSVFINQTVHDYCTASNITFTRCRPYPCGDFRQFANTPPGFDDLLKWTGQWQVERIAYEATGIYHRAFEQALASLPLVQINPLRARRFAQATGTLAKTDRIDAGVLARMAATLQPDVRPVKSPELAGLAELMNARGGLVRDRTALKNREKNLLLPLLKRQAKARLEQIARHIEAIDKQAQALITADLALARKREIIASIKGLGPITAAQLIATMPELGSLENKQAAALAGLAPITRQSGQWASKAHIHAGRANVRRSLYMPALVAARFNPDIKAKYSHLISIGKPAKVAITAVMRKLIVMANALLKADRLWKESMA

SEQ ID NO: 79071 - protein, 332 aa, unidentified
MEDPIIACDVSKGKSHIQGFIGLSNPVGNPFVVRHLKSDLKLIKELAKSLEKQAHKKPKFVFEFTGIYHECIAKYIRTLGLDLYAISPLESAKVRKSQIRVTKTDSKDCLNIATVYYTRCIRKFESDNNDIKSLSRRKRDIREEKVHQRGVYHRYLDLVWPCFDEYFDADSKVCDIIISTYKHPYVIKRRSVNMVAEILLNNGHFSKNRAFDIACKIKEYASNCVSGVDEKSDYVNALISSYGKIKSLTNEMEEINLELDNLLRKSPVYQLLKTVPGIGANLLIQMSAEIGDYTRFKTSKQFVAYIGLDPSILQSGTNDGSIIQSQEKAMAF

SEQ ID NO: 79072 - protein, 410 aa, unidentified
MRIIALDVHRSFAQTAILENGKLRDAGKIDLEYSRLLRFARKLKPDDEIVIEATGNTSAIVRVLLPFVGRVVIANPILVRAIAWAKVKTDKIDAAVLAKLHASGFLPEVWMPDEETEARRRVVAERTQLVSQMTRLKNRIQSVLHANLIPPYKGVLFSQRGRAWLEAQPLAEDQRRVIVRHAGELDRLGAELAEVDKSLAQTALEEPRVKRLMTITGVNSTVAMSVLAAIGDIHRFSSPEKLVSYFGLNPRVRQSGDKPAYHGRITKQGRAHARSMLVEAAWVISSAPGPLRAFFIRIRDKRGKHVAAVATARKLAVIIWHILSKDEDYTWNRPALLQWKLRKLELKAGHPSRRGGRQKGSAAAYSNKSVRDSERETIANAEDEYRRFVATWKQQSPKGRSGATKEVRRS

SEQ ID NO: 79073 - protein, 336 aa, unidentified
MKKTFVGIDVSKKWIDVCVTLDGKTAVHQQFDNNRKGFNQMLKWIKTFNKQEGQWLVCMEHTGIYAQPLWYFLTEKNINYCVVAGSLITSGLEIRRGKNDKIDAADIARFTMRYQDELKPHRLPAQVLQRLKMLFAYRQRLVKAKVLMQVPAGEAKQFAAKESKEVRTDSSSLVQIIEARIKRVEKLMLELINSDEQTAKCYQLIVSVPGFGIVTACYLLIITQCFTTLTKSRKLSNFGGTAPHPHKSGTSIKGKTRVSPVADKQLKALLSRGASSLIQYNEGTKNYVSRMLAKGKNENLVKNNVKNKMLHMVCAVVKRGTPYIENYISPYQQNVA

SEQ ID NO: 79074 - protein, 360 aa, unidentified
MPSVKRDPRLRRAVIGVDTHKHVHVAVALDDIGGRLDARSFAADQDGYRQLLDRAAGFGAKRLVFGIEGTGSYGAGLASAVRRRGLGAVEVLRTDRRDRRLRGKSDTIDAENAARAVLNNTATAVPKTNDGTVEMLRQIKVAKDVAVKARTSAMITLKAVLVTADPELREQLQPLTKTALIHRRAGLRPGTVDSVTSATKHTLRAIARRWQHLDEEIKAHEALPGELTTRLVPQPVDAFGIGADTASEMLIVAGDNIDRVRSEPARARLCGVAPIPASSDMAHRHRLNRGGHRQANAALYRAVIVRMRLHQPTITYVARRTTEGKTKPEIIRCLKHLLAREIWALLRPLRSTATNVAQAA

SEQ ID NO: 79075 - protein, 403 aa, unidentified
MTVRPLVWVGIDVGKTSHHACAVDETGKVLWNQKVSNEQRAIEQLIARAHKGADEARWAIDLTSPMALMLITVLLGAEQSVVYVPGHVVNTMTGAFRGEGKTDAKDARVIAETARMRSDLSEVAMPDELVVELAQLTGYRTDVMADWVRGVNRLRSLLGSIFPGLEAAFDYSNRTPLILVAHLCTPAEIRAAGIKGVTAYLGDNGGWPTAIAKTAATAVAAAKQQPLALPGEAGTAALVKRLARKLLDLDHEIKDIDKTITERFRDHPYAHIIESLPGFGPGLGAEFVVVTGGDLASFATAGRLASYAGLVPVPRDSGRISGNLHRPKRYNRRLRRVFYMAALSSIRGDGPSRQFYDRKRGERLIHSQALLALARRLVDVLWALLRDGREFTPDKPTPATAVA

SEQ ID NO: 79076 - protein, 329 aa, unidentified
MDNSLYFVGADIALKKFDAAIRLDGNRYKHKVFANTPEGFTAFHAWLQGFGSHFHILMEATNVYHEELAQYLYEQGHTVSIVNPRCIHAYAKSQNLRSKTDKIDATLIARYAAKEVPPAWQPPREPLRVLLLTLRQLERLKTVEQQQRDLLGTVKEPGCVESIKRLHAFLQGEIKRMGKEVKAIIAADERMQHNAKLLHTIPGIGERTVPWLLAYLHDGKRFANGKAAATCAGLTPMLHQSGTSDGKAHISKIGPSEIRKVLYMPAVVYSFGICRDGPYKSFADSMLANGKAKKSVITALMRKLLTIAQAVLQYRCPFDLQRYEKATKK

SEQ ID NO: 79077 - protein, 414 aa, unidentified
MEVLYPRCAGLDVHKKTVVACVMLTDDQGKCQKETRTFGTMTTDLLALSDWLQEHGVTHVAIESTGEYWKPVFNLLEGSFEVLLVNPQHVKAVPGRKTDVSDAEWLADLLRHGLLQASFIPPVPQRELRDLTRFRSTFIRERATLVNRLQKVLEGANIKLAAVASNVMGVSGRAILAAIVEGHSDPETLADLAQGRLREKREQLVKALQGRVKAHHRFILAELLCQIDSLEETIARFDQIIEEYCTPFEEAVALLDTIPGVGREVAEVIVAEIGTDMSRFPTAAHLASWAGVAPGNNESGGKRRSAQTRKGNKQLGVALNQAAHAAARTKNTYLAAQYHRLARRRGKKKAIMAVAHSILVIAYHLIQRKEPYRDLGADYFDQRHPEALAHHLVKRLEALGYIVSLEQQAIAVPS

SEQ ID NO: 79078 - protein, 323 aa, unidentified
MTNIPKSYVGVDISKDYLDICILPNQDEFRIKNNAAGFKQLFVKLSSHDVEQVVCEATGGYENAMIKALRNAKYSIWQVEPGRIKAFIKSKGIRAKTDKIDAMMIAQFAQQNKCPHDKPILSDHQDQLRCLAERRYHFTKMIKAEKTRLQQQFEFVQKSLKNHIQYMENEVDEIDKQMMNIITKNNDLNKKAAIMQSIPGIGNMTASTLLATMPELGVMTNKQAGSLIGVAPITFHSGKKKEVAYTRGGRGLPRHALYMPALNACRFNDVFKSFYNRLREAGKPAKVAIIAVMRKIIETINAMLKNETKWNPIPLKTIAINEH

SEQ ID NO: 79079 - protein, 462 aa, unidentified
MARRNAKRRAPSARKAAGSLPITNPNAAAIDVHSGNHVVCVPADRATPNVRTFGANSCDLLQIAAWLKQCGITTVAIESTGIYWIPIFELLEAQGFEVCLIEPGQASRCGARPKSDVLDAQWLQRLHSHGLLIGSFRPPDVVIALRAYLRQRLMLISLASMHIQHMQKALEQMNVKLTEVVSTITGLTGMRIITAILDGERDPARLAAFRDARCKNDEAVIARALQGTWRDEHLFELRQAYELYRTYQMKVTECDAQIEQSLAKLPDRSAGAKLQPKVKKCHRKPNTLRFEATEPVFRAMGVDLTAIDGIEDHTALVILGEIGVDVSKFPTEKHFASWLGLCPNHQESNGKRKSRRVRKGKNRVAIALRLAARSLQRSHLALGAYFRRMNSRLGFKGAVTATAHKLARYVYAMLKHGQAYVSQSLEQYEAATQERIERTLRKKARALGYDLVPRQPLSPAVP

SEQ ID NO: 79080 - protein, 391 aa, unidentified
MIYIGIDVAKDKHDCFITNSDSEVLFKAFTILNNLDGFNDLYQKIESVMDDVTKVKVGLEATGHYSYNLLGYLIDKGLPTYVINPLHTNLYRKSLSLRQTKTDKVDARTIASMLMSDVNLKSYSDISYHNEELKSLTRYRFDKVKERAKLKSSVSRLVCILFPELEKLVPTLHMASVYALLSEFPSAKHVATAHLTRLTNLLSEASKGRYGKDTAITFRDSARASIGSNMPAKSLELKHTIKLIQELDSEIDEIENEIKIIMDEINSPILSIPGINYRMGAMIIAEIGDFNRFDSPDKILAYAGFSPSTYQSGQLDGAYAHMEKRGSRYLRYALYNAAKYVCHWDPTFAAYLAKKRAEGKHYNVAISHAVKKLVRVIYHLEKTKQQYIKAA

SEQ ID NO: 79081 - protein, 387 aa, unidentified
MYYVGIDIAKLNHFASVVSSDGEVLVKPFKFTNDNDGFCTLLSARASYDRSSLIIGLESTAHYADNLVEFLVFKRYHVCVINPIQASTMRKNNIRKTKTDKVDTLVIARTLIAQPHRFFSQEDIDLMHLKNLGRFRQKNIKERTRLKIQLTAYVDRVFPELQYFFKSGLHQKTIYALLKEAPTPELVASMHLTHLAHLLEVSSHGHFNKEQAKELRILAQKSVGSSDRALSLQVTQSVEQIELLDRQITDVESEMTEIMLGLDSVIMTIPGIGYINGGMILGEIGDIHRFSKPCQLLAFAGLDPSVYQSGNFNASHTKMSKRGSRILLYALINAAHNVVKNNNTFKAYYDAKMAEGRNHYNALGHCAGKLVRILFKMLTDDVAFNLE

SEQ ID NO: 79082 - protein, 424 aa, unidentified
MKKRSYRSVSVKVVDTKQLCQELAGKRVVVGTDVAKEKFMAVLMTEDQQVGSTVRWNHPKETPLLIGLLVELKNSGAEIEVVMESTGSYGVAFQYALRKVGIPIYQMGAKRVHDAAEVYDGVPSKHDPKDAAIIAKLHLDGLSKPWPAPSDEQRELGAAVAIMRVFQEQASIQVSRLEGLLAMYWPELPRELELGSAAMSRLILKFGTPAEVSKREDEARKMMRRMCCPAEWEKKIERVIESAKTSLGVPPVAGELEALQTLVMDMNRAQRSYRQRRKVVQEMGQQNEAARNMSKILGKTTAAVVVSEVGDPRDYLSASAYMKAAGLNLKERSSGEHKGKLKITKRGSGLARQYEYFTVLRLIFRDEVVKAWYLRKVERDGGVKMKAIVAIMRKVHRALWYVARGALFDSRKLFDVRRLGLVAS

SEQ ID NO: 79083 - protein, 389 aa, unidentified
MKIYVGIDIAKLNHFAAAISSDGEIIIEPFKFTNDADGFQLLVSKLESFDKNSLIIGLESTAHYGDNLVRYLVTELYQVCVLNPIKTCQMRKNNVRKTKTDKVDTYVIAKTLMMQDNLRFVSFFDLDMMDLKALGRFRQKTIKQRTRLKIQLTTYVDQVFPEIQYFFKSGLHQHAVYALLKEAPSPKEIASMHMTHLANLLKVNSHGHFTKEQAKELRVLAQKSVGANDSAISIQITQTIQQIELLDSQLEKIEAEMTDIMKFNDSVIMTIPGIGYINGGMILGEIGDIHRFSNPNKLLAFAGLDPTVYQSGNFQAKTTRMSKRGSRVLRYALVNAAWNVVRNNATFKAYYDAKRAEGRSHYNALGHCAGKLVRVIWKMLTDEVEFNLE

SEQ ID NO: 79084 - protein, 389 aa, unidentified
MLLVGIDISKYKHDCCIINSDGVVIREPFSFKNNADGFALFLYTLNSLPDSEDIKIGFESTAHYALNLKLFLEKAHYAFIEFNPVLLAKFNKSQSLKITKTDAIDCYSIARWLGKVEFKPHTSGFYHTYSFKSLTRLRETLVKQRSFYLIKITNVLDVIFPEFKPFFNNRLGATALYLLENYGSSEKISRMNSASYDYLRKLSCGKFSIQKFIKLKELATNTVGESNEMFLMQLNSLLSLYRQCVSKIESIEFQITKLINNINPHYMTIPGIGPLSAAGIYAEFGDLSKFNLPAQMLSFTGIEPGYYQSSTSEHGGHMVKRGSSHLRYTLMNLCIPLIQYNYVFAAYYDKKRSEGKPHRVACSHLVKKLIRVIYHLEMNDIDFDSSKLC

SEQ ID NO: 79085 - protein, 347 aa, unidentified
MLADELDYVIGVDPHRDEHALAVVDVRNGGVVFEATAVADGEGYACVLRLADQHAPGRRVFAVEGSGSFGAGLTRFLVGHEERVLEVGRLRRERQSGKSDALDAIRAARSVLGQTRPARPRAGGEREALRALSAAREGAVTARRAGLCQLRGLLVSAPEPLRAELRSLTRAQLLRRLAAVRPEGRQNPELRGTLLALRALARRVKALTVEERELAREIETLTRKLAPQLLEQPGVGPLAAAQLLISWSHRGRITSEAAFARLAGCAPIPASSGQTVRYRLDRSGDRRLNRALHMILVTRRRTHAPTIAYIERRIHEGKSRREAIRCLKRYLARNLYRLLENGSPLPT

SEQ ID NO: 79086 - protein, 344 aa, unidentified
MKKIKRVGVDLAKNVFQLHGADHQGEAVWKRRLTRSKWINTLVDTIEPGCEVGMEACSGAHHWARELQSRGYTVKLIAPQFVKPYVKSNKNDAKDAEAICEAISRPNMRYVQVKSVPQQDIQATHRIRSELMSHRKAKANQIRGLVAEYGLVAPQQYTRLRTAIPVWLEDAENGLTDLFRRLLQGLWEDLTTLEKRIVELNKEIEQFAKNDPMAQRLQQLRGVGPLIATAMVATIGNGMQFKRGRQMAASLGLTPRQYSSGGKERLLGISKRGDAYLRSLLIHGARSVIIHAKHKDDRLSCWVTALAARRHINVAAVALANKTARMAWVIMTKEVDYDPALAAG

SEQ ID NO: 79087 - protein, 365 aa, unidentified
MTTRQRSTSSSMNPSVRGEVVLGVDTHGEVHVAAVLSPLGKVLGTESFPATAAGYRRLLAWAGKLGTVRRAGVEGTGTFGAGLARYLLAQQVEVYEVNRPDRSARRLLGKSDPLDAQAAARAVLSGRARARAKSGDGPVHSARIFKLAKDSAVKARTQAINQLKAVLVIADPALRERLTSLGNAELFRTCARLGPPDDEGEEDAVAQATQMTLSMLAQRIEQLTAQINELNQRLIRLVERHAPQLLVPVGIGPDSAATLLITMGDNPERLNTEASFAALCGVSPIEYSSGRRSTRRLNYGGDRQANAALHRIVFTRLRHDPRTQAYFERRTQEGKTRREIIRCLKRYAAREVFNLVRPVSSTPAL

SEQ ID NO: 79088 - protein, 438 aa, unidentified
MTELNGSANNVVSIGIDAAVVAAHQVAIRGEGVVMDFRVPPTLAGMTMLTERLKPFAGSLVVAEPTGGSWLPLSVAVTDAGCRIGFVANRDSARLRKAISGANKTDLIDAAMLAQCERVLGVVEAPPVGFGQIGLRRALRRRHGAVVAAHRAECRLWALAAWAFPDVWRACGGHHVAQPVLRRWAHLGALSRAQVGSIADIVAAHSRDQQPDRRAQRIRDAAGGWLRYWAGRLDVDALAWEVAELGDDIDAADAAIARATAHASALWREYWPDDVLCSIPGIGPICAGSTRAWWGSGSHLASAKAAAAFVGLNPSNWESGLSASPSRPMTKQGPAELRLAYYQAANVARRHDPELADFYRRLMVARKHNHIKANCAVARKLACRAWAVLQTGEAYQLRDLDGNEVDQRAATAIAATLAVPDDVRRRSRAHTQRGRLSS

SEQ ID NO: 79089 - protein, 340 aa, unidentified
MSEITTIGLDLAKHVFQVHGIDAQGTTVLRKRLRRGQVLAFFSRIPRCVVGLEACATSHYWARELGALGHEVRLMPAQYVKAYIKRNKHDAADAEAICEAVQRPTMRFVPIKTAEQQAAQLLHRGREQLVRQRTMLVNALRAHLAEFGMVAAQGLRNIGELIAIVGDDGDTRLPDVARQVLQVLANQIRQIEAAVAALERQLFAWHKNNAISQRLASIPGIGPIIATAIATTVADPMVFRSGREFAAWLGLVPRQNSTGGKTRLGGITKRGNRYLRRLLINGASANLLRSKATKADPWVIGLRRRRPPLVVAVALANKTARIAWAVMLRQREYQPRAVAA

SEQ ID NO: 79090 - protein, 368 aa, unidentified
MVEPITAFVGLDAHAESTAIGVAELGRAPARFVGTVGAKFTELRKVLVKLGEPSTLMIVYEAGPCGYALARELLRAGYRCEVVAPSKIPRRAGERVKTDRRDALMLASLARAGELTFVRVPDERDEAMRDLSRARIDAVRARHKARQQLKALLLRQGRRYSGKSSWTAAHERYLATVSFAHRAQDIAFVEYRQAVSESQARVLRLDQALTQELECWRMRPLVQALMTLRGVDQLVASTLVAELGDLKRFAHPREFMAYLGLVPSERTSGERRRLGPITKTGNSHARRVLVEAAWNYRFPPRLTPALQKRQEQQPADIRAIAWRAQVRLSHRYRRLKARGVQHNKICVAIARELSGFLWSIGQHVAVAP

SEQ ID NO: 79091 - protein, 372 aa, unidentified
MKQNIIHIGLDVDDTQYHGAAFNKETGEVIEFKSRPTLKGLLQQLDRMERHFKGHKIKLCYEASYVGYCLQRDLISNGVHCDIVSPSSIPSPRGKAIKTDRIDAGYLAQFYANNLLTIVQPPDEEQEQDRDLLRSRQKVMQQRNQLRKHLQSVLRRSGLHYKAETGNKSHWTKHHYCWLERTIDGLSGSLKVNLELLLRQLKSLNEVLTGYGQQIEVLANSPRYQSAVQSLTCYKGIKNVFALTMITEIGDIKRFSHPRKLVSWIGMDIREYSSGGKYNRFGITKHGNRYIRTAFVEANQRGYRTAKIGQDLKSRRKHIAPELVNIADRCLRRLNKKGNRLLMAGKHPNKVKVACAREMVGFVWESLNQAAA

SEQ ID NO: 79092 - protein, 462 aa, unidentified
MAMRKRDEDEVFPNAAGIDVGGSSHWVAVPRQADDEPVREFGAMTDDLNAMADWLLSCGVDTVALESTGVYWIPVYEVLEQRGLVVWLVDARQMKYVPGRKSDVLDCQWLQKLMSLGLLRAAWRPGDEVCVVRAVVRQREVLLTEQASWVLRMQKALVQMNLQLAEVLTDVMGMTGQAIVRAIVAGERDPRVLARHRNGRVKASEADIERALTGNWREEHLFVLGQALAMVDSLAQRVLECDAKIEALLVPLGRHELELDGPGKRRGKNAPQFDARTALARWAGVDLTRINGLAVTTVMTILSEIGPDLSRFANVKHFCSWLGLCPGTKVSGGKVLSARTRRSTNRVRQALKLAAMSLSRNDSALGAFYRRLCSRMDKPRANTAVAHKLARMVYFMLTRGEAFVDQGQQHYEEQQRQRSIDALRRRATALGFQITPSPANPLKHGVIPIVSQETKNDIRPTH

SEQ ID NO: 79093 - protein, 411 aa, unidentified
MLFVGDDWAEAHHDIEIVDETGRRLARRRLPEGITGIGGLHAMVADHLGDDDEPEDVLVGIETDRGPWVAALVAAGYTVYAINPLQVARYRERHSTSGSKSDPGDAHVLAEIVRLDRDHHRRIAGDSDIAEETKLLARTHQSLIWSRQRQTNQLRSMLREFYPAALLAFGDDLAGRDSLAVLAIAATPDRGKTLTRSKAENALRRAGRQRNITARAEQIRTALGTEQLQARPGLVNAYGASVTALVAVISELARQVAVLEIEVSECFGRHPDVEIYLSQPGLGPVLGARVLAEFGDDPTRYADARSRKNYSGMSPITKASGTRRVVLARYARNHRLGDALNLQAFAALGASPGARAYYDHHRARGATHQQALRALGNRLVGILHGCLHRHVTYNEQTAWGHRADTPTTAAA

SEQ ID NO: 79094 - protein, 338 aa, unidentified
MQTYAGIDLHSSNNFIGVINDKDKILYGKRHANRLDDVLKALDPFKDSLKGVVVESTFNWYWLVDGLQEHGYRLHLANPSAIQQYEGLKHTDDPWDSFWLAHMYRLGILPEGYIYPKEHRAVRDLLRRRLLFVRHSTAHILSLQSMISRNLGFKMSNNEIKKLKPADIESLFDCSNLVFMANNSLAAIEFLKKITKGIEKKVKSQVKLRKEFEMLLTIPGIGNILGLTINLEVGDIGRFPKVGDYSSYCRCVGSKRLSNGKKKGENNKKNGNKYLAWAYVEAAQFARRYCVKAQSFYQSKEAKTKPVVAIKALSNKLSKASYYIMRDQVAFDEEKLFG

SEQ ID NO: 79095 - protein, 337 aa, unidentified
MKVTTISIDLAKAVFQVCGTNQAGAEVFNRQVRRNKLLETVMQFPDAEVVMEACSGSNYWGRLFIKHGLTVKLIPPQHVKPFVRGNKNDRNDAFAISEASRRPNLTFTQPRSVAATDMAVLHRIRDRRQGSLTRLTNQIRGLLNEYGIVIPQGIEHLRRRIPLILEDADNELSQLMRSELHSLFDEWCMMESLIKQHDRAIEQFARADEQTTLLMTARGIGSITATALMSVMGSPANYKNGRHFASSLGLTPSEHSSGGKQKLGRITKRGNRYVRKLLVQCAMSHVRHLEGRTDNLSLWLKRLKERRGVQVAAIALANKLARISWAMLHKQQEFKLN

SEQ ID NO: 79096 - protein, 343 aa, unidentified
MTLIGCDLHARMQQVAVLDTGTGEIQEHQFPHHGDAVERFYAALPPPVTVAVESTGYSLWFHTLIRQLGHTLIVGDAAKIRAMVVRKTKTDRRDALHLLELLRHDRLPTIWVPDPATRDRRALLAHRMRLVRIRTTVKNGLHAIALSHRLVEGSKRLTKPRLAVLQGLSLAPYTARRRDESLELLHWLDEHIRQLDDQVAEAAAGDPAARRLLTHPGVGPVTALATIVVLGPVGRFPGSKEVASYVGLAPALHASADTHHLGQITKQGNPFLRLVLVQAASIAIRYDEDLHRLYMTLHRRRGHAKAKVAVARKLLIRLFIMLRDGIDYDEFRRRGRAAQPMPT

SEQ ID NO: 79097 - protein, 454 aa, unidentified
MRWKKANTKADIDSAFPLLRPNAAGLDVGSREHYVAVPAGRDTRPVRSFGCTTSELKQMAEWLKACGVDTVAIEATGVYWVPIYEVLEDAGIEAFLFDGRQTRHVSGRKTDVLDCQWSQKLHSHGLLTRAFRPDKEIATLRAYWRQRGGIVECCARQIHLMHKALEEMNIQLHKAVTDITGVTGMRILRAIVAGERDVHALAALRRGRIKATTEKIARALEGTYRQEHMFALAQALEAYDFFQRQLADCSQALERHLAQMRSGSDTPPQTPPPKQRKNQPNFDLRNELARIAGVDVCLIEGIDAMTAQTLISECGTDMTAFPTEKKFASWLGICPNNRKTGGRIRSRRSRRVKNRAATALRMAAQTLHKSDSALGSYFRRMKARLGAGKATTATAHKLARLYYRLIKHGEAYLTRSQAEYEALQRQRTLTSLQRRARHLGLQLLDASTGELLGA

SEQ ID NO: 79098 - protein, 409 aa, unidentified
MFFVGIDIAKKTHQAAITSDDGKLIGKAFKFSNTIDGFNLFLEKLGAVSTELSQFEIGMEATGHYWLNLYTWLADKNFKLHVINPLQSDALRNLYIRKTKTDSVDSKIIADVIRIGQYSETQLADDKIISLRDLSRQRFYLVDMVSDLKRKIIAMMDRVFPEYQDFFSNMFGKTSVQVMKECTSPEQILEIPTEKLTEMLKKASRGRFKESKAKELKELASNSFAAMFSSDMISLLIRQMLEQIDLLEKQIFDIEQIIAAQFAEFNTKLATIPGVGTTLGATILSEIGDINRFEKPKQLIAFAGMDPSVKQSGNFVGTESHMSKRGSPFLRRAIWLASVVAVSHDPLFKYLFQQKMASGKNYSQAMGYICHKLLNTIFAILKTGEKYKPIYPPDIDVSKLANEAINSQK

SEQ ID NO: 79099 - protein, 361 aa, unidentified
MKRQRTSIGLDVHARSVVGCGLDGDTGEVFQRRLCPDHREVLEWIGSLPAPVAVTYEAGPTGFGLARALGAAGIDCVVAAPSKLQRPAGDRVKTDARDAAHLARLLHLGQVVAVTIPSVAQEAARDVVRAREDCRGDLMTVRHRISKLLLRQGIVYSGGQAWTGKHELWLRGQHFDAPGLQLAFDAAFDAMVACVHRRDRLDAAITAMAADSEFTPVVQRLSCLRGVSTLTAFGLAVEIGDWHRLSGRSIGAYLGLVPCEYSSGATRVLGGVTKTGNGHARRLLVEAAWHHRAPYRPSRDLRGRWTAAGPAARARGHTANHRLHTRWAGFDKRKKRPVVANAAIARELAGWCWSLAVLDDV

SEQ ID NO: 79100 - protein, 372 aa, unidentified
MLDEKAKIIFKAYSFANTLDAAEALLVKLEPYKDSLEIGMEATGHYWLSLYSFLAEHKFIVHVLNPIQTDGWRKGIEIRKRKTDVIDSVLIADLIRYGNFLETSLADEDILSLRNLSRFRVYLVNSVSDLKRKAIAVLDQIFPEYASVFSNVFGQTSKELLKSLSLPSDYENLSATKIEEVLSNITQKKKASKTISTLSDKASRSFGISFCKDSFAFQLKLIIEQICFIEEQIASVELEIDQLMSKLGTNIKTIPGVGSVIGAVILGEIGDIERFDNPSKLVAYAGLDASVSQSGEYEASSGKLSKRGSPYLRKALYMAAQRAEFCDPVFHAYYEKKRNEGKHHLVATNAVARKLCHTIYAILKKDVPYEVQ

SEQ ID NO: 79101 - protein, 350 aa, unidentified
MAAISKDIIANIGIDLGKNTLHICAMNDKGMIVMRERLTRAALPKRLANIPPCLIGMEACAGAHHIGRQLVTLGHDVRLMPAKYVKPFLKGHKNDYRDAEAIAEAVQRPTMRFVPLKSDEQLDLQALHRVRSRLVGQRTAVINQIRAFLLEHGVAVRQGPGALRQALPSIIARRTDVLSPRIIHLIEDLIDDWRRFDQRVADMTREVEELAKQDENCKGLMAVPGIGPMTASAMVAAIGDGAAFTKGRDFAAWLGLVPKQISTGDRTILGGISRRGNRYLRTLFIQGARSVLQRSDGWEKKSFGRWLIAASKRLHKNVLAVALANKLARIAWTVVYHARGYDAAFTPKAA

SEQ ID NO: 79102 - protein, 404 aa, unidentified
MFCGIDVGKGEHHAVGLDATGKRLHDKALPNDEAKLRAVFDRLATHGPLLIVVDQPNTIGALPVTVARACGHAVAYLPGLAMRRIADLYPGQAKTDARDAFIIADAARAMPHALRRVDVGDEALTELGVLVGFDDDLAGEATRTINRIRGLLTSIHPALECVLGPRAAHPAVLEILSRCGGPLGIQAAGRRKLIAIAVKHAPRMGARLVDEILAALPQQTVTVPGAKSAEIVLPKLADSLKTVLLQRQMIAADIERMLDDHPLAKGLTSMPGVGVRTGARILLEVGDGSGFASAGHLAAYAGIAPVTHRSGSSIKGEHPARSGNHKLKRAFFLSAFAALHDPASRTYYDRNAPRARNTTPHSSAWPDAAATSSTQCSSTRLHIDHHTMPPHDHRIGLRRNQSSV

SEQ ID NO: 79103 - protein, 452 aa, unidentified
MKSRPPEKAKKATDHSTRGHWNEMNRKQRREMMRKIQSQDLSLEVVHPDAAGIDIGNEFHYVAVPPTRDNQPVQRFGCTTVELKAMAHWLKQCRIHTVAMQSTGVYWIAVFDILEQAGFEVYLVNARDTKNLPGRKSDVQESQWLMKLHTYGLLRNSFLPSQEIRTMRTYWRQRSDLVQAAASHIQRMQKVLTQMNIQLANVLSDISGVTGQAIIRAILAGQRDPHKLAELRDPRVRASEEQIARYLEGNWQEDLLFVLKQEQQGYEFCQEQMAACDRQLEQYLQQRADRSQGTSLPKEMRKGRLLKKKGNKPQFALRAELFRMTGTDLTQIDGLDVMTAMTILSEAGWDMSKWADENHFVSWLRLCPDNRISGNKIIGKGRLPTNNRASIALRMAASTLRMSNTYLGAQFRRFRTKRGSPIAIKAMAAKLSRLVYRMLRYGMKYVDQGAAF

SEQ ID NO: 79104 - protein, 314 aa, unidentified
MAKSVESILIGIDVSKAELVIARNDTKQVETIKNTAAAIKRWLTSVPAGSRIALEATGVYHRLLTQLAHEAGHPLFLLDGYKLSHYRDGVGTRAKTDQADARLILRYLTRERDELKPWIPPHDAFYRIQSLMRRRAALVQTRVALNQSLRDIPQLKQVAKQLDQNIRRVEQLIVQRLKQALAEVGWYGDAQRCDAIEGIGELTSMALANTFHRGRFRSSDAFIAYLGMDVKVRDSGTQKGRRKLTKKGDPELRRLLYNAAMAARKTTAWKGLYNTYLAQGLKPTQALVKLARKLARIAFALMQHQTAYQPKTSG

SEQ ID NO: 79105 - protein, 412 aa, unidentified
MLEKNSWEIVPLEYDVFIGMDVDKKSIAITSFNHDGHIDSLKMSSKPDVVINYAKKKYSNKRIVFAYEAGPTGFGLHDKLTEAGYKCIVTNPASVPMVANSKVKTNRVDSVKLATTLRGGELKSIRVPTDNYRQLRHLVRLYDVTTKNRTACKQQIKALLLLEGIPYPNTTRYDHWSNNTINRLELLECNDAVRFKLDLMIEKIRFNREQHLKINRKLRSFCKADNEIADSLKYLTSIPGIGKTIAVHLIARIGDWRNLKNVRELGGFIGLTPCENSTGDKINRGNITRMGDKRLRNMLIEGAWTAVFKDPELGEFYQRICSRHPKDRASRKAVVAVARKMTTRIYRVLIDRREYVKKDINDKSGKIEFNKKRRLNAPKDASTLRRTIKNTGKSPVTYGFVAEIETSGHLLP

SEQ ID NO: 79106 - protein, 311 aa, unidentified
MTDDTIGVDISKATLDIHRLSDGKIMSFSNCPAGFRALAKFCAQTAVIRVVYEATGAYHSGLERALGVHLPLVKVNPLQARRFAQAQGMRAKTDAVDAKMLAVMGDAFALEPDEPATKIQHDLRELRAFRSGLIKDRTRIMSRLKTQTLSITCRQSKARLAHVDKQIAEIDAEVDRLINSNDRLAHSMKILRSIPGIGAVCASTILIEMPEIGSMDRKQVACLTGVAPMTRQSGQWRGKSFIQGGRKVVRNALYMPALVAMRHNPDLKAKYQAMIKAGKPPKVAITVLMRKLIELANALIKANRNWVKKEA

SEQ ID NO: 79107 - protein, 400 aa, unidentified
MNPVVGLDVAKGESQVQAFLDQSKPYGKSFSMKHTKEELDQFLDFLKEVEEVAGQMPMVILESTGHYHSPVIQYLEDQGILYILLNPIISYQAKKSSLRKVKTDAIDAYQLCVLYYKEDLEPHKIRGIQLLELRNLSRQQEIVTNMYVEAKLQFHTILDQVFPEYRKVFGDLYSKVSLLMLKEYPTSEAVLIAGESELAESVIEFCSSRSGQWAWEKAKKIMDSASRNPFQKSVYESHVINLRMYIELLFHYQGHLSDLEDRIVALANELEEYKIIQSIPGIGEKIAATIISEIGEIDRFNHPKKLVAFAGVDPSVHSSGKFTATINRITKRGSSRLRHSLYLAVLCGIRSSRNKKLKAFFDKKKSEGKPAKVAIVACMNKLLHWVYALLKRKEAFLDLS

SEQ ID NO: 79108 - protein, 351 aa, unidentified
MMIIGVDYHPSFQQIAFVVEETGECGEQELNHSDGQAEKFYRDLQQRGICVRVGMEATGYSRWFERLLAELGFQLWIGDPAEIKAKRVKKQKNDRNDARLLRRLMLENNFPQIWVPSPENRDLRQLLWHRHRLVQMRTRIMNQLQALAMNEGYRWKKKLFSEQGRAQLEKLTLAPWASRRRQELLELLDRMNPTIEELTAAVEREARKRPEVLRLMTHPGVGPLTALAYVLIIGTPSRFPRGKQIGTYVGMIPSEDSSAGKQRLGHISKQGSSLLRFLLVQAAQAAARIHPDWRRRYIHLAMRRHNSIAKVAMGRRLAIRLYWMWRNGCEYSQSLEFGSHAGQLVTGHGVH

SEQ ID NO: 79109 - protein, 372 aa, unidentified
MNKIVKYVGLDVHKDSITIAIADEGRDGNVRVYGKISNDLGQIDNVMRKLISQNAELHCVYEAGPCGYPIYRHLTSKGIDCVVVAPALIPKKTGDRVKNDRRDATHLATLHRSGELTPVYVPDQADEALRDLVRARKDIQISLRKVKQQINAFLLRQGINYPGKSKWSKAHLNWLADLKMPHPAQHIALTEYLDAMGDHEARVKRIEKAIEQCCQTSRLLPVIEALQALRGISLLSAVTVVAELGDLSRFDTPAQLMAYLGLIPSEHSSGGTIKKGPITKTGNTHARRTLIESAQAYRMPARKSKAIRKRQEGLPDDVLDIAWNAQLRLCHRYRRLIAKGKNHNVVITAIARELAGFIWAIARAVPIVAAER

SEQ ID NO: 79110 - protein, 371 aa, unidentified
MKSIIYIGMDVHKKTYSLCALLKETGEIIGETKIPADVSLIIKFIENAKKSVDSDDVQIKTGYEAGCLGYSLYWQLAAKGIECDILAPSTMHRSAKNKVVKNDRRDAKNIAANLANGTYKSVYVPTDEDVEIKEYIRMMHDFKIELKKVKQHINAFLLRFGHQYPGKSKWIPAHIKWLKELELSDMYREILDEYLSQLEILSEKIERFKYRLEELSQKETYNEKIGQLRCIKGIDTTAAMTIHAETSDFDRFPTANAFASYCGLTPGEDSSGDSYHRLGITKQGNSMIRTTLVEAAQVLVRGTIGKKGKKVKSKQKDQDVKVIDYADKAVVRLQKKYHRMIFRGVKRNIAITAVARELACFVWGIETGHIS

SEQ ID NO: 79111 - protein, 307 aa, unidentified
MFVGIDVAKDRLDVHVRPAGESFVVARDGEGIEDLAKRLNAVTPTLVVLEATGGFETVVAAGLAAAGLPVAVVNPRQIRDFARATARLAKTDTLDAAVIAHFAEAVNPPVRLLADPQQRLLGELMARRRQLIDMMVAEGNRRRLLTARRALKSIDRVLAVLKAQLEEIDHDIDIAVRGTPAWREAEDLLISVPGIGHKIARTLLAEMPELGRLDRRQIAALTGVAPFNRDSGSLRGRRTITGGRAVVRSALYMSILVSIRRKLPLAQTYHRLRASGKPAKVAIVACMRKLVTILNAILRDKKPWATA

SEQ ID NO: 79112 - protein, 332 aa, unidentified
MVAGTTWFVSKTGIKKMNNNSTCSAGIDVAKAKLDIALYPGGEHLVVTYTTEGLKELDSFLRLHKVARVGFEASGGYEWHLLAHLRKGTIAAARFQPVQIKAFARSRLQRAKTDKLDALLIAAFTASVPDMPALPDQKLDGLADHLTYIEQLEDRIVTLKTMLETTRDARIRRLQTADIKSLKARHKAELQRLKAVIAGNDGLVRKFNLLVSVRGIGERTALALLVRLPEIGSLSREEAAALAGVAPYDNQSGTRSRTKRVGGGRQRLRKSLFMAAFCATTWNKDLKAFYLRLRQRGKHHLTAIIATARKLVILANTVVARNAPWTECRNQI

SEQ ID NO: 79113 - protein, 409 aa, unidentified
MNTGTITAVGIDVSKHKSTVAARRPGGEVVLLPFDVEHTAEGLKKLVAKLRQLDGEIRIVMEHTGMYWRPIAMTLKEAGFYVSVVNAILIHNFSDNSIRKVKTDRADAMKIANYGLTFWSDLQEYTGEDENRQLLKIQSRLYERTATTAGMLRNGLISLLDQTFPGANKLFRDESRNSRGHVKWIDFVLRFWHKECVAALSLAAFTDTFQKWCKRTGYKFSASDAERIHAIARNAVATLPKNDSTKLLITQATNSLNAIYDSLQAIRTEMDRLASMLPEYELVMGMEGIGKVTGPQLMAEVGDVRRFSHKGALVAYAGVDASPYQSGSFDSKSRHVSKRGSPHLRRVLFVIMSMTLIRANTANPVFCFMDKKRAEGKHFYVYTVAGSAKFLRIYYAKVKEYLNALEKTA

SEQ ID NO: 79114 - protein, 345 aa, unidentified
MNKINVIGLDLAKNVFQVHGVDSAGEVVVRKQLKRSQVRRFFTNVEPCLVGMEACGGAHYWTRELAGLGHTVRMMAPVFVKPYLKTNKNDRNDAEAICEAVQRPSMRFVQPKTPEQQCVLHLHRARRLLVRQRVALSNHLRGILSEYGIVLPQGAKAIMQRLPELLEDAENDLPMLTRDLLAECKEEYDQLMKRIERLEGRIKDWHVTHDVSQRLASIPGIGVLTASALAATVGEGQDFRNGRQLAAYLGLVPRQASSGGKVRLLGMSKRGDGYLRGLLIHGARNVIYHIRRRLRAGQPGGNAWVEQLLQRTHPNAVAVALANKMARIAWVLLVRNQTWCPARPV

SEQ ID NO: 79115 - protein, 339 aa, unidentified
MSIVMGLDQHRGQITGEWIDTETGEIQRARVAPADRVHVRKWLARFRGRDLEVALEATTGWRFVVEELRLVGAVVHLAEPAETAGLRGPKKRAKNDRADARHLRELVMVKRLPESWIPLDHILDLRARVRLRHTLSEQRSEWQQRIQATLYHQGCPQRRQLMTADGRAWLAEQPLPAPAREQITVAIAMIDALELQIAPLDKELRAYARRQVGCKALMAHYGIGELTAVTILAELGDCTRFSSSRQAVRYAGLDITVYQSDQRRAPGHISRQGPPALRWALYEAAQVARRGERSPDREYYLEAKERIGGGRACISVARKLLKRSYHTLRELGEEALAPA

SEQ ID NO: 79116 - protein, 347 aa, unidentified
MGNHSRDLSSVTTVGLDLAKHVFQVHAIDASGRVIFAGEIRRAKLRTFFQALPPCLVGMEACGSSHHWARELIALGHDARMMPPAYVKPYLRRQKNDAADAAAICEAVTRPSMRFVGVRTVENQAMLMHHRAREMLVVQRTQLINGLRGHLSEIGVIASQGYKAARELADRIEARDATIPLCVCEALAPLVAQLRKLDEAVDKIDQALMKKAKTDATAGRLMSIPGLGPITALAMAASVQDASSFSGPREFAAFLGLTPRQNSSGGKQKLGRISKMGDRYLRKLLVVGAHAVLHHRQPHTDALRSWAKKLMETKPFKLVAVALANKLARIVFAVLRSGGSYTQMPPA

SEQ ID NO: 79117 - protein, 369 aa, unidentified
MNYPISVGLDVHKRSIAAYSYNILTDEKRVGTFGSDIAPLIAWLEESKAPYRVVYESGHSGFSLKRTLEAAHITCEIAATSKMAKVKGDRIKTDARNAEDLARLLAAGKLSFVYMPPIDFEGMRDVNRAYVAVRDALAAEKQRISKMCDRYGILFEKDVKPWTPEHLTWLNGISLPSKGASIAMTHYLDERERLSDEKTRILGLIKGFCVEDELKPTIDALRCLRGIAEYTAFCLLVEIVDFTRFDPPSAFGSFLGMVPSEYSSGETRAQGKITKTGNTLVRKAIVESAWSSYRAKRAYKRPVDGVVPELARAANKANKRLFDKVQGLKAAKKKPCVGVVATARELALWVAVIAGACQTGCIDRLEECL

SEQ ID NO: 79118 - protein, 402 aa, unidentified
MNAVGIDVSKGKSMVAIMRPFGEIVSTPFEIKHISSDINSLVKLIKSIEGESRIVMEHTGRYYEVLAHQLSEANLFVSAINPKLIKDFDNDSLRKVKTDKADSVKIARYALDKWQNLKQYSVMDELRNQLKTMNRQFGFYMKHKTAMKNNLIGILDQTYPGVNTYFDSPARSDGSQKWVDFASTYWHVDCVRKMSLNSFIDHYQNWCKRKKYNFSQSKAEEIYGKAKELVPVLPKDAITKLIIKQAVDQLNSASTTVESLRTLMNETASKLPEYPVVMAMKGFGTSLGPQLIAEIGDVSRFTHKGAITAFAGVDPGVNESGSYEQKSVPTSKRGSSDLRKTLFQVMDVLIKTHPQDDPVYQFLDKKRAQKKPYYVYMTAGANKFLRIYYGRVKEYLASLPES

SEQ ID NO: 79119 - protein, 367 aa, unidentified
MAKGSTTFVGMDAHKESNSVAMLLPGEVQPVEWQCTTDRAAVRRLVRKVMRQAPGEVRFCYEAGPCGYALQRWIEEEGPVCVVVAPSLIPRKRGERIKTDRRDARKLAELYRAGLLTEVHPPTQEDEATRDLCRAREAAHEDLVRSRHRVSKLLLRRGWQWEGGKKNWSQAYWRWLKGLRFEHRPDQWMFEDYLLAIDQIETRLKALEAQIESISQEPRYAEAVGALRCFRGIDTITAMSIVAELHDVMRFESPRGLMAYLGLVPSEHSSGGKEHRGEITKAGNGHVRRLLVEAAWHYRHRPSLKILAKRRAGQPKRVIAIADRAMHRLHRRFNRMLERGKARPKVVVAVARELTGFIWAALRPERS

SEQ ID NO: 79120 - protein, 358 aa, unidentified
MTDTATSPIVIGGVDTHKDLHVAAVVDAHDRVIATEAFSTTRAGYRAMLRWMRTHGDIARVGIECTGSYGAGVMRHLDQAGIEVLEVTAGDKADRRKRGKDDTIDAEQAAHAAYARRRTVTPRAHDGMVESLRALKIARSTAVKARRVALQMIHALIISAPEELRDQLRNMTRMQLIRTIASWRPDATGYRDPVTATKMSLKSLARRYLELQDEIADLEIAMHALVDELAPDLLARPGVGYESATQLLITAGDNPDRLASEGSFAMLCGTAPLPASSGKTTRHRLNRGGDRAANSALHMIAVSRWRIDPATKEYVARKKAEGHSNPEILRLLKRYIARETYYLLRNQHRAIHQRATTA

SEQ ID NO: 79121 - protein, 385 aa, unidentified
MAKVVIGVDPHKRINAVVVLNSKAKVLGRAQFANSADGFRQLRAFSRQWRPRTWAVEGCNGVGKHLAQRLVAEGERVVDVSTRRAALVRVFAGGNGRKNDDTDAHSIALVALHTPDLVEVRPDDRTVTMRLLANRRHELVGLRTQAVCRIHRDLVNLIPGGAPRALTAVKAKELLATVRPRDEVGRLRRRLIAEQIADLVAIDRRLAELMAQIKAAVAETPTGLTNLFGVGPVTTARLLGEVGDVARFRTRHHFASYNGTAPVDSSSGGGPAAYRLNTKGNRKLNHAIHMVAITQVRNDCAGRAFYLRKQAEGKTPKEALRALKRRISDVIYRQLLEDAAAERGPGGQAGTTPMTSVAGPTPMADSSVRPQPGPRRETTPFPATA

SEQ ID NO: 79122 - protein, 346 aa, unidentified
MGKSITDLSSVTTVGLDLAKHVFQVHGVDASGRVVVAKAIRRNKLLEFFASLPSCLVGLEASGSAHHWTRELIKLGHDARMMPPAYVKPYIRRQKNDASDAAAICEAVTRPSMRFVGVRSLENQAALMRHKAREMLVAQRTQLLNGLRGHLTEIGVIAPQGPRYARDLAGLIEACDERIPFEVCEALAELVHQLHRLDEAIVRLDRTIAKMAQKNETARRLMSIPGFGAITASAMAATIQDTSSFAGPREFAAFLGLTPKQNSSGGKQKLGRISKMGNRYLRKLLVVGAHAVLFHRKPHSDPLRMWAKKLIEKKPFKLVAVALANKMARIAFAILRGKTIYREIPA

SEQ ID NO: 79123 - protein, 332 aa, unidentified
MLNCIGLDVSKSSINVHIAKNTQDTQIENNPKKIKSLYSKLKKIYKKELGEIVFIFEPTGSYSEALRKFCAQKEIKCFIINPKQFSNFAKALGAEIKNDTEDARVLAKAITLAKEGQIKVPTVDEDVETIKELMSYYKFITKQTTQLKNHFEALAAKEGNAFTIKELKKSIKESKLKEQRILDQVQAVIDQNPKYKRAYDNIISVIGIGQISSIVLLHLFLKYPDANQRQIISLAGLNPIYKQSGSSLQSAYRISKSGSKLYRGTLFMGVMNAIRYDENFKVFYDRLKKKGKHTTQAQIAVMRKMIVTAHSLYKNDRQYDKNFTLKKAEQML

SEQ ID NO: 79124 - protein, 345 aa, unidentified
MDKIIRIGMDTSKQVFQLHGVNAGEKPVLRKKMRRKEMIDFFTTCPPTSVAIEACGGSHHWARLLTSFGHEVKMIAPQLAKPYVKRNKNEAADAEGLCEAMARPTMRFVPVKTVDDQAALMLISVRTRLIANRTQLANAIRGYANEFGISAAKGLAHIPMLLERIKVEKTVPGLAQELFMSQAEEYAHLEKKIADVEAKVKAWQRNDERSIRLNTIPGIGPIGSALLIMKTPAPELFQSGRQFAAWIGLTPKDHSTGGKLRLGGITRAGDEALRAVLVAGATAVIHHARRSGKASRWLAELLTRKPPKLAAVALANKMARIAWKLMVSGETFSAKSGPALTGYAA

SEQ ID NO: 79125 - protein, 315 aa, unidentified
MSKMVVIAGIDVSKGKLDIHVLPSNQTFVVTRDPRGLTDLARRLRQAGVEQVALEASGDYERIVIEALEADGLVVHLLNPARVRAFAEAIGILAKTDPIDARLIALYCQHFPDKGLTRRPEQARKLGEFLNMRDMLLKLAGEIRNSLEHVREPALKALADTLAADVAAKLKDVERGIAKVIADDEASARKARIIRSFTGAGPVLTSSLLARVPEIGGVTRHAAARLCRAAPSDRQSGRTRHRSSIEGGRDHVRPVLHMAALAAMRSNPIIKAFAQRLSAAGKPKKLVIAACARKMVVILNAMLRDNTAWKYAKAA

SEQ ID NO: 79126 - protein, 341 aa, unidentified
MSESALIGIDLGKHTFHLHGQDKSGREVFHKKCSRAQMMQFFARLPSCVVAMEACAGSHYVARQLAAMGHAAKLISPQFVKPFVKGNKNDFVDAEAICEAASRPSMRFVTPKTESQQTLSVLHWMRESLVRDRTRTANQMHGFLLEFGVSLPRGLAIMKRLAVVLAEHELPVRLTVLLQRLHNHFVYLDEQIKAMDKELACQLADDDLGSRLLSIPCVGPITASLLAVEMGDGKQYRCSRDFAASVGLVPKQYSTGGKANLLGISKRGDKHLRQLLVQCSRLYMQRLDHQKGALADWVRSLLSRRHSNVVACALANKLARIAWAMAAHHTQYEAGPDALNA

SEQ ID NO: 79127 - protein, 342 aa, unidentified
MQVTTIGLDIAKRVFQVHGVDAAGAAVIRKKLRRSELLQFFARLAPCVIGIEACATAHYWARELTALGHQVRLVPPSYVKAYVKRGKSDAADAEAICEAVTRPSMRFVPVKSAEQQGVLVLHRARELLVRQRTMLVNGLRGHMAEFGITAPQGIQRVPELVAALKDETTGIPQIAREALAAMVVQIENLTTSIKQMERRIVAWCRSNAAARRLATIPGVGPITASALAATITDPTLFRSGRHLAAWLGLVPRQHSTGGKTKLGRITKMGDRYLRKLLVVGMTAVIRSARRTKAPAFAWVNALLERRPARLVSVALANKAARIAWAILVRGETYRAPAMEAAA

SEQ ID NO: 79128 - protein, 317 aa, unidentified
MDSVQPEVFAGIDVAKDWLDLHVEPNEHSERFDNTNEGIQLLIERLTSLGATFVAFEHTGRYGRKLMGALEASQINSAMIDGRQIRGFATAIRRIAKTDPLDAKTIAEFASLIRPTKQTYPLEQELKPNDLVVRRRQVVDFSKMEKARLTQDTNEEAINSINQHLAWLKAEEQRLSELIFEMIGSRSDWKRRYEIIKSYPGAGPVLASTLTAELPELGRIGKSKISSLVGVAPIPRESGQITDRRRIVGGRKSVRNALYMASISAQRTNPTIAKVIEKMVSAGKPKKVARVAAMRKMLITIDAMVRDDRPWDPDVGG

SEQ ID NO: 79129 - protein, 329 aa, unidentified
MSKNSIVCAGIDTGKHKLDVAIRGVKGQLFELLVENTVDGHKVLSAWLREHKVKRVGIEASGGYEQAVVLYLRKKKFVVVVFQPKQVRAYATFNLQIAKNDKLDAALIADCTAAIKEINAPPDERMTAFAKRMTFIDQITEDVARIKTRCESCRDKQILHYWREEIARLERRKKAELKALAAAIREHDDLSKRLDLIESVDGVGLVTAVAILVRMPEIGTVTREEVAALAGLAPYDHESGNHVGERHIKGGRGRLRKSLYCAALPASMRWNHQLVSMYRRLIAAGKLHKVALVACARKLLIFVNTVVERGSPWEKSRAPGKFELGLRAA

SEQ ID NO: 79130 - protein, 448 aa, unidentified
MFTMHYKRLLTLIDSVSSYLSVGLDVGADFTWMSIALPNGSFIGKPFKIVHSDPRSRDLAVAKIKEAQETYSLKSRCFLESTGIYHIPLLCFLRDKGFDCSVINPIITKNSTNINIRKLHNDKFDSKKAALVGLNVSLKTSIIPDDSVVDLRNLVRDYYYFKDLQSAVALKLTAELKVSFPAYAKVFSKVTTQSSLKLLSSYPLAEDMLAASKDDIVKIIRSTARFGEAYALRKYDAIIAAAQDTAVFGRALPSNAVRIRLYIDTYQEYQKHLDALLKALHETVDRLQDTLIYDQICLLQSLRGIGFLSAIVLIAEMGDFKLFSSPKKLYAYFGLDPAVKQSGKLNGDKVHMSKRGSSLARRVLHMVALNNVKVDKGSGTPVNPVVYDYYTRKCSGKKKTVAMGAVMHKICNIIFAMLRDNKPFEVITPEEHCRRFAAEHPNKIRKAA

SEQ ID NO: 79131 - protein, 377 aa, unidentified
MKTVRFVGLDVHAQTIAVAVAEVGGEVRSVGVIPNDPQAIQRVLKKLGKAEQLRVCYEAGPTGYALYWQLTRLGVHCEVVAPTLVPVKAGDRVKTDRRDAAKLARCYRAGDLTPVWVPDAAHEGLRDLVRAREAAKRDQLRARHRVSKFLLRQGRRPPADSAAWGCRLLWLKQQSFEQPAQQATLEDYLHELEHQSARVMRLERAIDAAVESVPQKMRAVIAALQSLRGVAQISAVTLVAELGEISRFSHPRQLMGYSGAVSREHSSGERIRRGSISKAGNAHLRRIVLEAAWAYRHRPAIGRTLAARQRTQPARITQIAWRAQQRLHDRFRKLIARGKSPQLTVTAVARELLGFIWAIGMEVEQSRQWLPRAARAA

SEQ ID NO: 79132 - protein, 425 aa, unidentified
MNYKQNEKINQVKESTLVVGIDIGSTTQYARAFDWRGIELGKVFTFSNSREGFEAFKAWMQHLQDKYRKSDVIVGIEPTGHYWFDLGAYLEDEGILLVMVNPYAVKQTKELDDNSQSKNDRKDPKVIAKLVTEGRYSAPYTPDGVYADLRIMVANRKRLIREMTQIKNRFARWFAIYFPEYTDVFGDYEAQSSMLLLKKVCTPEAIVELGAEKINQIWRDAKLRAVGMKRATTLCETAKRSIGLKKGSSAARYEMKLLLEDYEYKKAQLDAVMEEIEKLCRKIPESEQMLAIKGIGVITVAGFLAEVGDVRRFESPRQIQKLAGLSLRENSSGKHKGQTTISKRGRSKLRAVLFNAAIPLIAKNPEFKSLHEYYTTRANNPLKKKQSVIAISCKLIRVFYAILANGVTYDPQKMLSDIRRQPQAA

SEQ ID NO: 79133 - protein, 380 aa, unidentified
MNKLGEVNFENRPSRYPAFVEDVRKICGTKEIVFGLEDTRGFGRNLAAYLVGRKFEVKHVNPAYTSAVRLANPIIYKDDSYDAYCVARVLRDMVDTLKDAKHEDIFWTIRQMVKRRDLIVKSNVMNKNQLHSQLAYSYPSYRKFFAMIDSKSALCFWENYPSPEYIWNTTPEEIYQTIKPVHQALKIQRIHEIISMIERDGDTRKDYQPERDFIVRNIVKDIRHNKELIAEIDDELRKLIPLTGYKLHTMPGIDLVTEAQIISEIGDINRFPDSDKLARFMGLAPVQFSSAGKGKDQRCRNGNRALNAIFHFLAIQMVAVSASGKPRHPVFREYFEQKVKEGKNKPQALVCVARRLVRIIYGMMKTRTEYRPYEKVDDKN

SEQ ID NO: 79134 - protein, 387 aa, unidentified
MTVLTVNNLPAATHGETVRCLFAIELSKMSWVIAFNTPLSEKISRRTLTGCKWKRLLELIEEVRARVSREMGRAVEVVSCYEAGYDGFWLHRQLEAHGIRNYVIDPASLQVDRRARRVKTDRIDTERLLRSLMAYLRGEPKVWSVVRVPSVAEEDARRLHRERDRLVSERVQHVNRIKGLCALQGIYDYNPLRPQAMARLEQMRTTQGGALPPRLKSEIKRELQRLELVVEMIAALETERDAIVEDEASTHVNAKKIQNLHKLKAIGPEFAAVLVGEIFHRDFNNRRQLASYVGFAPSPFQSGSVAHDQGISKAGNRKGRTTGIELAWLWLRYQPDSDLSGWFRARVGTTKGRIRRIAIVALARKLLVALWRYLETGVVPRGAVLKG

SEQ ID NO: 79135 - protein, 387 aa, unidentified
MPQPNDLSRSLVALDQDSTIIAVVELSQSSWLVGGILPGIERQPCKKLEPSPERLLALLHRWRDESVRAGRTITRIAVAFEAGRDGFWLARWLAARGVEAHVIHPSSVAVSREHRRAKTDRLDTELLKRGFLGWLRGERGHCSMARVPTIAEEDAKRPNRERECLVKERTRLVNRMKGTLARLGIRNFRPTLRNAAEHLAALSTPEGSGLPPNVAAELERDIARLRLVIGQVKQIEEARRQRLEEQPERGRHAMVRLLARVVGIGIETADMLVNEVLSRPMRDRRAVARYAGLTGAPDESGARRREQGLAKAGNARVRRGMIQLAWRFLRFQKNSALTQWYQARTADRRGATRKTMIVALARKLLIALWRFVTIGEPLDGVTLRPAS

SEQ ID NO: 79136 - protein, 310 aa, unidentified
MDPIYVGVDVSKDRLDVAVRPSGEAFVVTRDGKGLNELVERLQLIAPVLIAVEATGGFETIVAAAIAGANLPLAVVNPAQVRHFAQAVGQRAKSDPIDAAIIARFAEAVKPQPRPVPDEQARLLMELVSRRMQIIEMLVAERQREKRAGAMRVRKSLARHIAALAKELPVIDRDIDTLVRGSPAWREKEDLLITVPGVGNTIARTMLAKVPELGSLDRRKIASLVGIAPFTRQSGQWRGKSMIGGGRPAPRAAIFLAALSAIRCNPVLRAFYQRLLTRGKPKMVALIAVARKILTILNAILRDKKQWQPA

SEQ ID NO: 79137 - protein, 404 aa, unidentified
MSETEPVPTRFVGLDIHKEYIVAVGVDAAQAVVLGPLRFSVNELADWSARHLTPQDAVVLEMTTNTYAVYDILVPLVHSVTVVHPPHVALIVRAQVKTDRKAALALAQLHAAGLLVGIWIPPQPIRDLRALIAQRWKMVRLATVAKNRLHSALHRHHLDAPDSSLPFSPKHKAFWLSLPVSVTERAIIACDWETIEFAERQKAALEASLAQAAAGDERIPLLVQLPGIGLIGALTLLAAIGDITRFASVKHLVGYAGLGARVHDSGTLHQTGRITKAGRKDIRHIMVEAAQSAARTHAHWKAELARLEPRIGRRKAIVAIARKLLVAVWHVLTDQEADRFANPQQVACSLLAHAYKMGVKNLPDGQSALQFTRQQSDRLKLGRDLTHIPWGSNQYKLPPSTLSG

SEQ ID NO: 79138 - protein, 349 aa, unidentified
MDRTTYGLDIAKNVMQLHWVDGETGEIGRRKLPRAKLREFFAQRQPARVAMEACGSAHHWARELGGLGHQVELLPARQVRAFVRSNKDDAADARAIWLAAQHSDIRRAPVKTVEQQGVMSLHRARSHWVSVRTATINMLRGLLYEFGVCLPGGKKAGLKTIGARRAEIDDQLPPLMRRLVDLQLEALKDVERSIDQLDAEIAEQQHQLGTARTLREMPGIGVLGATALAATLGDASGWRSGREFSASIGIVPSHSGTGGHTRVGHLSKRGDPYLRTLLIHGARAVITHARVKPAWLEELLRRRPLNVAVVALANKMARTAWALVAHGRAYQPEWKSTPPSGCGAQAQVA

SEQ ID NO: 79139 - protein, 457 aa, unidentified
MASKQTSKNGKRGQLSVVHPDAAGIDIGSRFHVAAIPDDRDGDSVRMYGTFTGDLVRMAEWLQESGVRTVAMESTGVYWIPAYEILEERGFEVILANAREAKNVPGRKSDVNDAQWLQRLHSFGLLRGSFRPDQEITTLRAYLRQRERLLDYAASHIQHMQKALMEMNLQLHHVVTDITGKTGMQILRAIVAGEHDPRQLAEYRDPRCKATQETIEAALTGHYRAEHLLALEQAIALYDTYHAHVEACDQAIEAHLAEITKDATPPSDPLPKAKHRDANRNAPKFDVRTALYTVTGVDLTQLHGIGPYLALKLIGECGTDMGRWPSAKHFTSWLGLAPGCKISGGKVLSARTKRSSSRAAALLRLAATTLSRTSTALGAFYRRLASRVGKAKAVTATARKIAVLFYNTLRHGMVYQDPGANYYEERYRSRVVTNLKRRAGAMGYELVPTNTEAPAWG

SEQ ID NO: 79140 - protein, 357 aa, unidentified
MCAKKQGSLEDLAIIGVDIGKDVFHLVGFDRSGQVVLRRKIKRFALQDTFAALPRCIVGMEACLSAHFVSRTLRHLGFEPRIIPAIYVKPFNKGQKNDYNDAEAIAEAAVRPNLQCVTEKNQDQLDLQALHRVRARLVSRRTATINQIRAFLIEQGITVRSGLRALDNSFEAILEQRKDEMSPRMRRVLTGLRYDWHWLDGRIDQVSEEIKEVSRSEENCARIMSIPGVGPMISTAMVAAIGKGEAFDRGRDFAAWVGLVPQQFSTGGRTILGRITKRGSRYLRMLLVQAARIIMMRPHLWPNFSFGNWLAGAVTRMPGNKAAIALANKLARIAWSILRHGTSFDAARDRDMATDAI

SEQ ID NO: 79141 - protein, 420 aa, unidentified
MKVTYQTCCGVDVHKSFLVATIIKTTSEVQPSYQKKRFSTFNNSILEFKQWLLDNSCRDVCMESTGKYWVPVFNLLEDELNVTIANPKWVKAVKGNKDDTKDSKWIGDLFRLGLVPGSYIPCKPIRILREFTRYRYKLTSCRSSEKNRFQNALTVCNVALDSVVSDIFGKSATSVIDYLLEQSDNSINHEEISSRLLRSLKKKSESVIESIEGYQMTESQKYRMRLVHAHMDYITSTISDIDSMIDSLVEPYENAVQLLCTIPGVDRNSAITIISEIGTDMTQFSNSKRLCCWAGLTPGNNESAGKKKSVRITRAGVYLKPTLVQVAHAAVKSANSPYYKQKYERIMKRRGKKRAIIAIARMILTAIYQMLSTGEAWNPSDLYKIDMPEPLREKQKEKAIKQAKKLLINEGIISESQLVS

SEQ ID NO: 79142 - protein, 346 aa, unidentified
MRFYNRPHTYYCGIDLHVKTMYVCILDGAGQVLVHRNVPSTPAAFLETVAPYREGLVVAAECMFTWYWLADVCAAEGITFVLGHALAMKAIHGGKAKNDRIDSHKIAVLLRGGMLPQAYVYPAAMRSTRDLIRRRLHLVRKRGQLLAHIQNTRAQYNLPVFGRKLAYRTNRDGVVEHFPDPSVQKSIAVDLALIDQYDALVIDLDLTIVREAKRHNADAFHRLRSVPGIGKVLALTILYEIHDITRFDRVQEFASYARLVKCKKQSGGKTLGTGGAKMGNVHLKWAFSEAAVLFLRHTEGKKLIARIEKHHGKGKALSILAHKIGRAVFYMLSRGTVFSMEKFLAA

SEQ ID NO: 79143 - protein, 374 aa, unidentified
MIVIGCDYQPSWQQICWVDTATGETEEKKLDHASGESERFYRRLQGPVLIGMESTGNCQWFVELLSSLGHDLWIGDASCDPRSQKHDRRDAALILKLLLEGRFPRIWTPSGAEKDLRQLLIHRYKLVRIRAQVKTELQHLAMNQGVTKKRKLWSKAGEKVLRELPLKPWASRRREDLFRVREMLNGQIELLDQAVVEAAEKNERARLLMTQPGVGPITSMAFVLTMGDVSCFPRGKQVASYLGLIPREYSSGGHQRLGSISKQGNRFLRMLLVEAAQGAVRYDQGFRNEYLHRCHKKAKGVAKVAAARKLAIRLYWMLRTNTVLDAAHEYGVSRDRSCREQLAGAAGQRKPAWAGKLDRRIDWALSSRRKPGFG

SEQ ID NO: 79144 - protein, 418 aa, unidentified
MKTYLLRQSKTVESQKIRRPSRPQPVAAANAPEVLRPADGAPHGPVLHIGLDVHTASIAVSIAPSATTEVRRYGMIGGTHDDVLRLAKKLQAAHPGVTLRFCYEAGPHGYPLCRCLRAHGYDCIVVAPSKIPRQPGDRVKTNRRDADQLARLDRAGELTAIYVPEPQDEAIRDLIRARSQVRQQQHRARQQLKMFLLRHNFRYAGTKAWTQKHLNYLATVKLPFAEQQFVFQEMVNGISEAGERLERYETQLPRAVAGWRWAPVVQALMSLRGVALLTAATLVAELGDLHRFATARQLMGYLGLVPSEDSTGDKRKQGGITKMGNGLARKALVEAAWNYRTPARLSRELLKRQAGLPKEVKDLSWAAQTRLHHRYQHLTKVKHKQSTVAAAALGRELSGFVWALGRLVAPHAPKPGTA

SEQ ID NO: 79145 - protein, 413 aa, unidentified
MDVLVDVCAALDVHKDRITGCVRRWASSGRRRLSEVRTFSTMLADLGELRRWLEREGVTVVGMEATGVYWKPVWYELEDAEVFELKLLNPTHVKAVSGRKTDVRDAVWLARLVECDMVDGSFVPPREVRELRDVTRYRRRILEERGRELQRLQKLLEDAQVKLDSVVSDINGVSARLILNALCDGERDPDVLAELAQRRLRAKIPQLREAVPGRFNDHHAVLVRELLAHIDYLTGIEQRLDARVDELIAPFSWARELLTTIPGIQNRNAENIIAEIGVDMSHFPTAAHLASWAGMCPGNNESAGKHRSGKTRHGDPWLQSTLVEAAWAASRTHHTSMRARFHRITQRRGYERAVYAVGHHLLVVIWWMLTEHVPYNEMGENYQQRPVDPERRRRYLVHQLEQLGLQVTTQPAA

SEQ ID NO: 79146 - protein, 458 aa, unidentified
MSSMTTLPVVHPHAAGLDIGKTEIYAAVPPTADPQPVRVFGTFTPDLHALADWLVACGITTVAIESTGVYWIPVHEVLEARGLQVCLVNASHIQRVPGRKSDFQDCEWLRQLHSLGLLAASFRPDAEMVTLRAYLRHRAELIQHRAPHILHLQKALRQMNLQLDSVLTDITGQTGLAILRAILAGERDPVKLAQLRHPNCHSPEETIAKALTGTWRAEHLFVLKQAMALFDFYTTQIVECDAEIVRCFSVIRPRFTPPAEPVITAESVPGPTVTARRKSATHSTHSKNAPAGNIRAEILRITAVDLCAVHGISASIAQTVLSEIGTDMSRWPTVKHFCSWLRLAPRNDISGGKVLKSRTLPHQHRAAQAFRLAAQAVSRADCALGAFYRRLRARLGPQQALVATAHKLARIVYFMLKEHQPYQDRGAEAYNTRYREQEVKSLQRKAAKLGFTLAAKAA

SEQ ID NO: 79147 - protein, 345 aa, unidentified
MMDHYVGLDVSVRETSVCVVDETGKLLKEAKVPTEPGSIASLLAKGSYVCKRVGLEAGPMSQWLYAELAAAGLPVICVEAQHMRSALAAQRNKTDRNDARGIAQMMRVGLYRPVHVKTLQSQERRLLLTARKLLQAKLLDLEAELRGTLKNFGLRVGIVGKGGFRQRVRELIEGREALTAVMSALLEAHEALQTQYNVLHKRLLDLVRDDPLCRRLMTAPGIGPVIALTFQATVDVPTRFPKSRLVGAHFGLTPKRYASGETDHSGRVSKCGDAMMRTALFEGAQALLVCTKKWCSLKAWGMAIARRRGVKRAIVAVARKLAVILHRMWLDGTEFRWGKEVPSAA

SEQ ID NO: 79148 - protein, 345 aa, unidentified
MEKHIVVAVDIAKVVFDVALSHEPGRVAERKRLSRAAFSLFLAQLPAATVVMEACGMAHYWARKLEELGHRVVLLPPHQVRPYVTRNKTDRTDAKGILEAYRNADIRPVPVKSVAQQVLCSLHRFRSGWLSARTAQINTLRGLLRELGVVIPLGVEKVLPLVRALIADADSGIPDALRPVLATACDEIEALSDNIKMTERQLEALAEQTPAVQRLRSVPGIGLLIATALVAFLGDVQRFPSGRHLASYLGLTPREFSSGMKRRLGRISKRGDAYLRMLLIHGARSILCHAKKAKQHDRLRTWALALEKRTRHNTAAVALANKLARIAWAVWKHDRDYVSKIEQAA

SEQ ID NO: 79149 - protein, 315 aa, unidentified
MAMPVPVSKPIVGVDVAKNELVIYHAELDLLEGIPNNKTAIKKWLKALPGTVAVAIEATNIYHLEFADLAYEAGCVIYMVGGYELSHYRKGVNIRAKTDAQDAKLLARYLKNEADELRPWTPPSPLYRQLLSLFRRRAALVQARVSLTQSWANEPLLKASFTEQVKSMQKLEGLIEKMIGDRLKEAGLSDQLKRCLKVEGIGFLTGARLVTSFQRGDFRNADAFIAFLGMDLRVSKSGQKDNRRSLSKRGDSEARRLLHNAAMAASRTAAWKEFYQAQRARGYSTTQVLVMLARKLARVVFALLKGQSEYQPKVG

SEQ ID NO: 79150 - protein, 315 aa, unidentified
MVDVPCFVGIDVAKAQLDIALRPAGERWAVPNDASGIVPLVARLQALHPTRIVREATGGLERAATAALAAAGLPVVVVNPRQARDFARATGQLAKTDALDARALAHFADVIRPTPRPLPDAQTQELRALLGRRQQLIGMRTAEQNRLVGTNARLAKDIEAHIAWLNAGIATLDDDLETMLRASPLWRENDDLLQSAKGIGPVSAHTLLRELPELGTLTRQQIAALVGVAPLNCDSGTLRGKRTIWGGRAHVRTVLYMSTLVATRFNPQIKAFYERLLAAGKVKKVALTACMHKFLTILNAMLKHRTPWQPREVQS

SEQ ID NO: 79151 - protein, 341 aa, unidentified
MYKVSGWDVTEAREKIMFYLGIDVSKAKLDCALFDSTTSKQKCKVVSNDPDGFAKLLEWLAKQKAEAVHAIMEPTGVYHEPAALALTDAGISLSLVNPAQLRNFAKGLGVKTKTDKADSNVLARFGATQNPELWQPPSIAARTLKALLARRDVLADHLQREQNRREMIQFSEVPEPVQQSIAASIEFLTGELARLDQQIQSHIDDDPDLRGKKDLLETIPGVGPRVALNMTALLAARHFERAEQLAAYLGLVPVQWESGTSVSSRPRMSKAGPSHLRKLLYMPAVVAIRANPHIKALYERLLIRGKPKMAAIGAAMRKLAHLCFGVVHTGKPYDGNFTHQA

SEQ ID NO: 79152 - protein, 368 aa, unidentified
MENDITAFVGLDVHKQSIAVAVAKPGRSAPRFVGTTGPQLSELVKALSHLGEPRHTLIAYEAGPCGYGLARELLARGYCCEVIAVAKMPRKPGERIKTDRRDALTLARYLRAAELTAVAIPDTRDEAIRDLSRAREDAVRARLKARQQLKAMLLRHGHRYSGKTSWTAAHERYLAQVSFAHPAQDIAYAEYRQAVHEAQERAERITAALREQVASWRWQPLVKALMTLRGIEFVAAVTLLAELGDLSRFAHPKQLMSYLGVVPSEYSTGESRVQGRITKTGNAHVRRVLIEAAWTYRFPARMSREIVVRHEGQPQAVRNIAWRAQLRLCSRYRRLQARGVHQNKTCTAIARELAGFIWDIARQLPTTT

SEQ ID NO: 79153 - protein, 468 aa, unidentified
MQLRLGIDVACRAAHQASLADEAGQLIWVGRRFRTVAGDLDRLWSILPGDVEPGDVTVVMEPTRNAWVPLAAWFRRHGARVVLVPPEQSSDLRAYYSKHTKSDRLDSRMLARLPLLHPEGLHAEQGLGPGDALRRTTRLRANLVKRRTRSLARLDALLEILGPGWVQALGTDLANKTPLRFLAAGYACPHTVKRLGMARLARFIYRHSKGAWGEDKAAGLLAAANETLALWESDLDFGELADDIAVEARLALQLTEEVKELDERISVLFAQADPHGILISAPGVGAVIGAQLLGRLGDPNRFRSLAGVRSFSGLVPRLDASGIAGQHGGPTKRGDASLREAMFIAADHARRIDPSFAARYHRLMVTAGKHHNSALCHIAPALLTRIVACWRRGEPYIIRDLEGRPISAAEGRRIVSQHYPISPQLREGRRSIAQSRSTPGRTSRRSKESQSAPSTGPSIAEATPAAMT

SEQ ID NO: 79154 - protein, 387 aa, unidentified
MQKPHDDSKACDATFVQDSTLVVVIEMGLSSWLVAGMIPGVSREPLKKIDPKAEELLQLLYRWRDEAIAAGKEITRIAVAYETGRDSFWLARWLRKRGIDAHVIHATSVAISREHRRAKTDRIDTAMLRRGFLGWLRGEPGHCSMAIVPTVAEEDAKRPHRERDSLVHERTSTINRMKSILIQFGVRNFNPILRKAREKLDAVRTPEGIPLPPNTVAALRRHIERFCVINEQIKAIEQTRLQHLERDPADRFNAMVFLLVRIIGLGVETAEQLVREILSRQLRDRKAVARYSGLTGSPDESGSKRREKGLSRSGNGRVRKALIQLSWRMLKFQPESALVLWFKKRTENVQGSRKPMIVALARKLIIALWRYVNTGVVPEGFELRPAA

SEQ ID NO: 79155 - protein, 484 aa, unidentified
MAAKKKDAKTGTDRSSAGVAAEHGGDGAEVAEDRVQVVEYAAAIDVAKGFGMVCTRVPGSRADRRLQKVWRVEATFKEVTALMDHLRCEGIERLVLESTSDYWRIWYYLAEAAGLEVWLVNARDVKHLPGRGKSDRADCVWHCKLNERGMLRRSFVPPQEVRDLRALTRTRARLAQDQARHQARVEKILEDALLKISVVISDLFGTSGRRFLDALVAGERSPKALAALGDYRLKATRQQLEDALTGQFRDVHAFEISTHLRIIDAINAEIVLLDDKIGEQLALVPRTAPACTACGLIGGGHAPGCADEGTPLLGLAARLDEITGVGECNARVLIAELGTGPSQFPTPGHAAAWARLTPRTDQSGDTARPGRTGKGNRYLRGALGQAAMTAAKTDTRLGAMYRRIARKRSKQKAIVAVSRVICEIAWILICDPGARYQELGPDYYSPRSPARQTRDKIREIERLNPGTKVILAPADPGTGARQAA

SEQ ID NO: 79156 - protein, 395 aa, unidentified
MYFLGIDIGKRTHVASIMNEEGKVLLKGFSFPNTTEGAESLIERMVDYSGAPSDFVIGMEATGHYWLSIFSYLHESDYLIHVVNPLQTDGWRKGTEIRKRKNDIIDSVLIADLMRYGSFVETVLSDENVFSLKQLSRYRTYLVGTASDFKRKIIAVLDQVFPEYATIFTKQGVFGKASKELLLAFSAPIDLENISSETLAQYLAELSRNRIKAEKADQLKQAASNSFGVKFAQEAFTFQLRSMIEQLKFIESQIKETEREIKHIMDTLNSVILTIPGIGPINGATILGEIGDIQKFSNPKKLVAYAGIDASVTQSGQYEATHNVMSKRGSPYLRKALFSAASVASQCDPVFSAFYQKKVSEGKHHLTALGAVSRKLCYVIHAILTKNEPYIIVSD

SEQ ID NO: 79157 - protein, 392 aa, unidentified
MRKPKQCRPHNDLSRSLIPLNLNHTLIAVIELSQKSWLVAGIIPGVERQPLKKLEPGEDALSTLLDRWRKEANKAGYKVERIAVAFEAGRDGFWLARWLRAQGIEAHVIHAASVAVSRERRRAKTDRLDTEQLKRAFLGWLRGERDHCKMAAIPTFAEEDAKRPSRERESLVGEQGRIVNRMKATLARLGIRSFNPKLKNAAESLEDLRTAEGEPIPPNTLTELHRDLERRRLVIEQIRQIEAARLERLRRTPKAKPNAMVLLLARVIGVGIETADMLVQEVLSRNLRDRRAVARYAGLTGSPDESGSKRREKGLSRAGNARVRRGMVQLAWRFLQFQKHSALAQWYRVRTEHARGSRKKMIVALARKLLIALWHFARDGVVPEGVLLRPAH

SEQ ID NO: 79158 - protein, 342 aa, unidentified
MQHVAIDLHDEYSQICVMNEQRELLAEIKVPTRRGALRDFFRQRERSRVIFEAGPHALWVSELLTELGHEVVACHARRIRLIAESRNKNDRVDAELLARLSLSDLELIRPIQQRSRSTLEQRSIVRSRAALVETQKRLRTMLRGLVKPFGVQLAGGKKRALTQAASAELPELARQSVDAILNILHSIADQIRVLNEVIEQLTTDHPTVRRLQTIPGVGSLVALSYIHAIEDPARFGASDVGPYLGLTPSNRSSAGKKLGPKDRGRPGDPYVRSLLVQAAWTLMNSRSESELARWGRALVQRVGPKKAAIAVARKLATLMHHLWLQDQDFRPSPQPHRQAVAV

SEQ ID NO: 79159 - protein, 420 aa, unidentified
MTSPNAIPADAVLVAIDIAKACNEVLIEAPSRKRRRRLSVLNNRAEHDRLVEVLQTYGRSVICAFEATGNYHRPVAWRLAEAGFEVRLVSSLALARTREALHNSWDKNDPKDAQVILHMLKIQATQVYHDPLRAGINDVQELSKTHEAIARAKTEIQHRILTHYLPLYFPEIDRFRGNSRSDWFFAFLDAFPTPASITTLTKEAFVAGAWDVVGRKVSKTQILMDIYETARTSIGLPLPLEAPAIRMFRMVIAEARSLIRQRNEIETQADELLRHSKDYLLLRQIPGIGPINALTIIAEAGDLRRFHHHRQFLKFCGLDLSTHQSGQYRGQTRLSKFGNARLRRTLWLAGQVAIRQRENGFRHKFERYIARDRDNPDLRRKAMTAITAKMARVVHAVVKGDSDYRPFVEGRVPGGRTSVS

SEQ ID NO: 79160 - protein, 413 aa, unidentified
MLFVGDDWALDHHDVEIQDQAGRRLGKARLPEGVEGVARLHGLLARFLPEDAEPSQVLIGIETDRGPWVAALVAAGYRVFAVNPRQAARARDRLGVSGAKSDAGDAHVLADLVRTDAHQLPQVAEDSDLADGVQALTRAHQALIWDRARHVLRLQATLRDYFPAALEAFADLAEPEALELLGKAPDPDRAARLSRSQIAAALKRARRRDIEGKTTAIQAALRAPALGRGPVLTAASAAVTRSSISVISALTTEIAQLETEVKAHFGQHPDTGIYLSQPGLGQILGARVLAEFGDDPHRYASAKARKNYAGTSPLTIASGRKRTVRARFVRNDRLVDALTRQAQSALRASPGARACYDALRARGIGHQAALRQLANRLVGILHGCLTTSTHYNEATAWPQATTTSQNRQQPAAA

SEQ ID NO: 79161 - protein, 338 aa, unidentified
MHNITIGMDIAKSVFQVHGVDKRTGTVIKKRLARSKLLGFFAKLEPSLIGMEACSTSHHWARELEALGHEVKLLPANYVKAYVKRGKNDAIDAEAVWEGLERPTMRFVPIKSREQQGVLALHKVRSQLVGERTRLVNLLRAYMAEFGLVAPQGIWRIAELKAIVGDKADERLPASCRAALTAVVRQLDSLANAIEDLDRAVVAHCKSNETSRRLSAIPGIGPITASALVATVGDATVFKSGRHFASWLGLTPRQHASGFKDRKGRISKMGNPYLRTLLVLGATATMRQAQRGQSSASAFVRRLLAKKKSVRLITVALANKMARIVWVLMARGECYRAA

SEQ ID NO: 79162 - protein, 370 aa, unidentified
MKSIIYVGMDVHKASFTLSCFSVTTQETFATVKISPDAKAIKKYLDGVSLSRSEECEFVCGYEAGCLGYTLYHQLTAMNIRCVIMAPTTILRNSKRIKTDRIDAENLARCLAYGGYKSVYIPTAQDEAVRDYLRMRDDHKLMLKKIKQQINAFCLKHNKIYPGNKSKWTQAHVKWLNALEFDGYLQDAFNEYMITYRELADKVERLESQIEQLAELEEYRDKVKKLICIKGIKTHTALSLIVETGDFSRFQSAERYASYIGLVPGEHSSSEDQNRLGITKAGNRHMRMLLIEAAQCYSRGVPATKSKDLKSRQKGALPEVIAYADKASIRLRRKYIRMELVNKKKANVAKTAVARELACFIWGMMTDNIA

SEQ ID NO: 79163 - protein, 432 aa, unidentified
MRYLGLDVHKRVVQACTLDEGGRTLHALRFDLTRDTLTEFARRHLDDDCAVALEATTNTWAIVDVLTPFCPRIVVSNPMRTKAIASAKIKTDKVDAEVLAQLLRCDYLPTVWTPDAQTREQRALASRRSALTRQAISLKNRIHSVLHQRLIFGPAELFSTKGLAWLRSTELPPIARGEIDTLLRLLDALQIEQASLRVDVDRAAFASQDIKLLMTLPGIDATTAHAIMAAIGDIHRFRSPDRLAAYFGLVPSVHQSAEHAYHGRITKQGNSNVRWLLIQAAQIAGRHPGPLGKQFATLARRKNRNVAVVAIAHKLAILAWHLLTRGAPYRYALPRTIETKLARLRVSQKGRRTTGPTKGQPRPANYGTGIGTRRKKALDAALQDEQLPPTAPAPAGETRVLSELKLRAFAEGLQYETRVPRRRAHATAAPEG

SEQ ID NO: 79164 - protein, 359 aa, unidentified
MKEQRNEISFSGQKIYVGIDVHLKSWSVTVLSATSVLKKFSQNPDPEALHGFLTRSYPGAEYHSVYEAGFCGFWIHERLTALGIDNIVVNPADVPTKSSEKLRKTDAVDSSKLARSLRANELKGIYTPDSISLEMRSLIRLKNSITKDTTRQKNRIKSQLRYLGIEIPQEFLAPFSNWSRRFIAWLKEVEMHTPSGRQALDIQIRHLEELRRQKLEMTRALRALAKTDRFREPLRLIMTVPGFGQATGMAFLSEICDIARFRNAEQLAAYIGMIPMCHSSGEKDGTGDITVRKHAVMRCNLIEAAWVAVRQDPAMNLFFTEQCKRMPKSKAIVKVARKLVTRLFFVLKHQTEYVNNVVS

SEQ ID NO: 79165 - protein, 390 aa, unidentified
MIYVGIDVAKDKHDCCILGSDGEILFSPFTIQNSLQGFDELYEKIWSLTSDLTEIKVGLEATGHYHLNLLRSLLDNGLPSFVINPLHTNLYRKGLSLRKTKTDKVDAASIAMMLLTDRTLKPYSDTSYHNEELKSLTRYRFDKVQERARLKTSVSRLVSILFPELEKLVPSLHMASVYALLSEFPGASFIASAHLTRLKHLLYDASKGRYSRDMALTVRDAAASSIGSAIPAKSLELKHTIHLIEILTSEIDEIEAAINSIMDTLDSPITTIPGLKNRMGAMILAEIGDFSRFENPDQILAYAGLSPTTYQSGQLTSSYAHMEKRGSRYLRYALFNATQYVCIWDPTFKAYLAKKRSEGKHYFVAISHACKKLVRVIYRMQLTGEPYRTA

SEQ ID NO: 79166 - protein, 390 aa, unidentified
MILVGIDVAKDKHDCCIINSDGEFPEEVFSILNNREGYETLYKRICSLAVDLAKVKVGLESTGHYSSNLLAFLLDKHLTAYVINPLRVNLFRKGQSLRRTKTDKIDSRNIAHLLMTDSSLKPYSLSSYHMEELKSLTRYRASMVRERTKLKTSIARLVTILFPELEQLVSSIHIHSIYAMLEKFPGAAYIAAAHLTRLAALLLKASRGRFGRETAIRIRDTARRSIGAVSPAKSMELQHTIAHLRVYDQEIGEIESEIEKIMDDVNSPITSVPGIGMQMGAVILAEIGSFRRFDSPDKILAYAGMSPSTYQSGKLTGSYSRMEKRGSRYLRYALFNVTRYVCHYDPGFTAYLSKNRKEGKHYYVAISHAVKRLVRVLYAMEISGNRYKTA

SEQ ID NO: 79167 - protein, 323 aa, unidentified
MYSIGLDISKSTINVYVPHNDLDLVIENSLKGIKTLYSKLKKQYKKELDKLVFVYEPTSNYSFLLKSFCANQNIKSFIVNPKKSASFAKVMGHRNKTDIKDARLLSKMIVTAKNEDIKVPIINSIEEELKELIACYKLIIKQQVIAKNHIAALKAKREKSYSIKELELQYQFLKKQELKLIKQIKSIIKKDEKLQETFKNLQTIDGIGEISSIVLLSHFTQYPTANQKQIVSLAGLDPIEKSSGSSVKGKTKISKVGSKICRGTLFMPAMTSVRYNERLKSFYDRLKENGKHTTVIQVAIMRKLLIIAHSIYKNNEAYERNRI

SEQ ID NO: 79168 - protein, 338 aa, unidentified
MKAYAGIDLHSSNNYVGIINDQDQRVYQKRLPNQVEHILEALEPFKESMEGVVVESTYNWYWLVDGLQAHGYTLHLANPSAIKQYEGLKHTDDKWDSFWLAHMLRLNILPEGYIYPKDKRPVRDLLRRRLLFVRHRTAHILSLQSAITRNRGYTMSARDIKKLDSCDADTLFDNPFLTLAARNSISALQFLKIRIAEIEKAVKAHIQLTPEFEYLLTIPGIGTILGLTIMLEVGDIARFPKVGNYSSYCRCVKTERLSNSKKKGEGNRKNGNKYLSWAYVEAANFFRRYCPKADAFYQHKKAKKNGIVAIKALSNKLARASYYIMRDQVPYDPKRLFR

SEQ ID NO: 79169 - protein, 343 aa, unidentified
MKIKRVGVDLAKNVFQVHGVDSKENPVWRRRLSREKWLKSLLTKVEPGCEVGMEACAGAHHWARELQAHGLTVKLVAPQFVKPYIKSNKNDANDAEAICEAMSRPTMRFVTVKSVEQQDIQAVHRIRSELVSQRTAKGNQIRGLVAEYGMVAPQRLSHLRRAIPRWLEDAENGLSGRLRRLLDGLRGDLVELGRRVEELDEEIEAIAKSHPVAQRLQQLRGVGPLTATALIAAVGNGEQFAKGRDLAVSLGLTPKQHSTGGKERLLGISKRGDPYLRSLLVHGGRAALYAARNKDDRLSVWVKNLAARSHPNVAAVAWANKTARMAWSMIRHGTDYQPERATS

SEQ ID NO: 79170 - protein, 322 aa, unidentified
MNPVSTPSVFVGIDVSKARLDVCIVAETQACFSVDNSAAGVAELVSRLRLIAVTRIVIESTGRYSRLVAAELCAASMPVCVVNPRQARDFAKSLGRLAKTDAIDARSLAEFARVAGLRLCEKQPENQAILDDRITRRRQVVQMLVMEHNRTEGVTDKLTIGHIKKVIRLLEQQREDLDREIAKLIDADDDWRKRRDALVSVPGIGQSTASILVTDLPELGKLNREQIAALVGVAPINRDSGTLRGKRGIFGGRPHVRATLYMATLSAMRFNPTIKAFADRLREAGKAFKVIAIACIRKLLTILNVMLRDNQPWRDPCLAKNA

SEQ ID NO: 79171 - protein, 451 aa, unidentified
MKDLSMEVVNPNAAGIDIGSRSHFVAVGQKEEDVKEFGVYNDDLSALAKWLKEHEVKTVAMESTGTYWQNLFTVLQGAGFEVILCNGKFTKNIKGKKSDVQDCQWIQKLHTLGLLSSSFLPDEATEQLRTYCRHRMNLIEQGADTIRKLQKYLRLLNFRLDIVVNDVTGLTGLSIIKAICKGETDPEKLASLRNGNCKKSEEEIAKALQYNGRKDYLFALRHEYEMYVTLQSRIEECDAEINTLLKAQISSDENKKQHHIEKKVHKRVNKNNPKNIDINLLSYQYFEGTDLLSIEGLGHSTVLTIMSEVGNGIYKFDTAKQFASWLRLSPNNKISGGKVLSNRIPKGSNRLKIALRNAANVIGNLKGTALSDFFKRIAFRKGRVSAISATARKLAVIIWNMLVKKIPYKPENTYEFLDQKRKRKVMEMKKLIHKFDITPDDLGLQLNISNL

SEQ ID NO: 79172 - protein, 374 aa, unidentified
MSIKKGTDPVNIKRAKEEIKEINPENLTVFMESTGTYHLPVERYFKENGFNTLVINSLTTKNNYDTIRKTKTDKKDCYRLAKLFFVNEVEYHELSKKDLYANLKAMTRQYFYLLQQNVSCKNRYKRLLNICFPELEKIFKSTRIYDDTALNFIKEFPHAEIVKEKRIDALYNNLYKTNGRNLNFYKRLSETIKIASANSYPGVDKEHKDVKNLSDMAKIVQNNNNVINELRDKMIETAKKSPYYEIINSFYEIGEILTAEILGKLGDITRFDSPKQLIAFCRLDPTIKQSRKSINVKGAISKRGNKYARYILFNCSQMVVKLGASNYPEHPVYIYYQNKKAEGKHYYESLTACSTKILRMLYSMCKNNKQFLEN

SEQ ID NO: 79173 - protein, 338 aa, unidentified
MKFKRIAIDTSKHVFTLHGVDEQEWPVLRRELKRGQVEAFFSKLLETEVVLEACGGSHHWARVLQAMGHRVRLIPPQYVKPFLKRGKNDRNDAEAINEAAARPSMRAVVVKSVDQQAKAIIVKHREMLVGQRTQASNALRGHAMEFGVVVAKGAANVAPLLAVLAADMAIPAAAREMFVQMGAHIEALESRIAGLDAELLAMHKAHPVSRLLAEVPGVGPMIAATMALTVEPENFASGRHFAAWLGLTPREHSTGGKQRLGKISKAGNERLRSLLVVGAMSVIRCAKPGSKSASPWLLQLLERKPRKLAAVALANKMARIIWAMMARGEAYRRQPIAA

SEQ ID NO: 79174 - protein, 346 aa, unidentified
MTYYAGLDVSLKEVSICVIDDDGEVVAQGTAPADPEGVAGWFKNRSLAPKRIVHESGQLSIWLQRGMIQLGLLAICIDARKAHKSLSARLNKSDKADAEGLAQLARMNWFTPVHIRSEESDRLRALVGGRERMIRLRKDLEGHIRGVLKAFGIRMTGVGQAQQRQGFRDQLAAAGETDPVLRTIADGFIAAHTTLCKATADFDRALKAKSKSHPITRRLMTIPGVGPIVSLSFVALVDDPDRFSKTSDVGAFLGLTPRRHQSGEMDWSGRVSKCGDPTMRRLLFEAGSCVIRQVKRFSTLKSWAVRLAGRRGFRKAAVATARKIAVLMLTLWKSENDYRWTQEATA

SEQ ID NO: 79175 - protein, 421 aa, unidentified
MELEPQELERVFRERACGLDVHFSFVTACLIVPGKGKRLRILEEAFETNVKGLKRLKAWLTENECEAVGMEATGVYWMPVYAALEEAFDLEVANPLQIKTLGGRKTDRKDARWIAEQVRHGRIKRSFVPPPEFRDARRLARFRRQLIQARTTISNEIQRTLAESGITLAAWVSDVLGVSGMAILEALAEGKSIQDELPDCLKTSLKKKMAPIAAALEAPLGEVSRSILVLHLERLEQVEGQIARVEGALFKVLEPHADKLALLMTIPGLARMSAAIILAEIGVNMAAWPTEKHFSAWAGVAPGCKETGGKAKRAPVRKGNPYLCTILMECAAPAIRKKDCHLQPKYHRLCKQLGSKMKARMAIAHKLALIIYRNLGANAEYKEPAPKPMSNKTKAKIKNARIRDLERLGYKVVIEPLEAVS

SEQ ID NO: 79176 - protein, 343 aa, unidentified
MCSVTSKAVFVGLDYHAASVQVCVMSSDGQVLLNQSCANDWRAVVGAVRRRCGEGVSVQAAIESCCGAAGLADELIARGWSVNLAHPGYVSRMKQSPDKTDYTDARMLADLQRVGYLPRVWLAPEEVRELRRLVHYRQSLTKERKNLKLQIGATLREARQKAPANANSWTKAWLAWLENSAVLSPNARHITTHRLRRLAAVCQELSQLDKRLEQQTREDPLVQKLLTVKGIGLVTAVTFRAEIGRFDRFRTGKQLGRFCGVSPRNVSSGQKQADAGLIQAGNSELRVLVIEAAHRLIRCDERWTALAAKLSRRGKPTCVVIAAVANRWMRWLFHQMQPACLAA

SEQ ID NO: 79177 - protein, 386 aa, unidentified
MQTLNELSQSRIVLKQDGTLIAVIEMSLSSWLVAGIVPGVERQPLKKLTVDQSALLKLLNRWREEAEKAGRKIERIAVAFEAGRDGFWLARWLRARGIEAHIIHASSVAVSREHRRAKTDRLDTQLLKRAFLGWLRGERDHCKMVAIPTIEAEDAKRPNRERESLVGEQTRIVNRMKAALSRLGIRGFNPKLKKAAERLGDLRTPEDEPIPPNTLAELRRDMERRRLISDQIRQIEDARLVHIEHAPSDGPHAMVRLLARVIGVGIETADMLVQEVLSRNMRDRRAVARYAGLTGSPDESGTKRREKGLARSGNARVRRGMIQLAWRFLMFQKDSALAQWFRARTENARGTRKTMIVALARKLLIALWRLVREGVVPDGIVLRPAQ

SEQ ID NO: 79178 - protein, 374 aa, unidentified
MYFLGIDIGKRTHVASIMNEEGKVLLKGFSFPNTTEGAESLIERMVDYSGAPSDFVIGMEATGHYWLSIFSYLHESDYLIHVVNPLQTDGWRKGTEIRKRKNDIIDSVLIADLMRYGSFVETVLSDENVFSLKQLSRYRTYLVGTASDFKRKIIAVLDQVFPEYAPIFTKQGVFGKASKELLLAFSAPIDLENISSETLAQYLAELSRNRIKAEKADQLKQAASNSFGVKFAQEAFTFQLRSMIEQLKFIESQIKETEREIKHIMDTLNSVILTIPGIGPINGATILGEIGDIQKFSNPKKLVAYAGIDASVTQSGQYEATHNVMSKRGSPYLRKALFSAALVASQCDPVFSAFYQKKVSEGKHHLTALGAVSR

SEQ ID NO: 79179 - protein, 350 aa, unidentified
MLIIGCDYHPSFQQIALVDSETGELGERRLMHREEAEQFYQGLKRGGSAVRVGMEASGHSRWFERLLHELGFELWIGDAAKIRAKRVRKQKTDRQDAQLLLQLMREDRFPRIWVPDAENRDLRQLLWHRHRLVQMRTRVMNQLHVVALNEGLRRKKALWRAAGRKELESFGLAVWASRRRQDLLDLLDQLTPKIQELTQALEEEVEKRPVARRLRTHPGVGALTALAFELVIGTAERFHCGKQIASYVGLAPAEESSGDRRRLGHISKQGNVLLRFLLVEAAQVTVRSQPEWRRRFFHLAMRRGRKIAKVAMARKLAVHLYWMWRQGWDYGQLQKLGSHAGEPGNRDEVQ

SEQ ID NO: 79180 - protein, 419 aa, unidentified
MKEKYAVLVGLDWADQKHDLQWRETDTGEVHTMVLPQSPEALHEWIGTLRAKYPEGRIAVCLEQSRGAVVYALMGYGNLDLYPVNPLTLSEYRKAFHPSGAKDDPVDAGLLFDLLERHPEILKVWHPDTESTRLLRSLGEDRRKAVDLRTGLCHSLRARLKEYFPQALNLVGDSLYSPLCCAFLLKWPRFEAIAAARPETIRKFYYAHHSRSESLIQQRLEHIATSRPLCTDAAVVEAALFWVRTLVPQIRALNRAIQDYDQRIDQLFKAHPDHFLFRSFPGAGPQLAPRLLTAFGTDRSRYARAGEATNYFGISPVIERSGQQQWIHWRWHCPKFLRQSLVEFAGNSIRFCPWAKVYYYQQLQRGKRHQAAVRALAFKWIRILFRCWQQRTPYDEAKYLDSLRRHGSWIPKQLQSATE

SEQ ID NO: 79181 - protein, 321 aa, unidentified
MLIGIDVAKAELVVAARPTGERWAVANDERGIRTLVERLRAAAPRVELIVLEATGGYELLCVGALAAAGLPVVVANPRQVRDFAKATGQSAKTDRIDADVLALFAERVRPAVRALPDADAQELDALLGRRRQLLEMLQAERNRLGQVFGRGKPLVKKSLRAHIAFLERELRIADTDLGAMVKRSPAWRERDDLLRSVPGVGPVLSLTLLAELPELGRLTRREIAKLVGVAPLSRDSGTMRGRRFVQGGRAGVRAVLYMAALVATRRNAVIRAFYQRLLAAGKPRKLALVACMRKLLTTLNTMARTQQRWSAEYAMNARNPA

SEQ ID NO: 79182 - protein, 337 aa, unidentified
MEYFAGLDVSMEETHVCVLDRDGVITHQAKVASTPADIAQELKKTPACRRVVFETGRMAPMLFHGLADHGVPVVCVESRQAYQALKSLTTHKTDRNDARGLAHLARTGFFKSVHVKSLPAHAVRSLIIARKKLVGQRVTLENQIRGLAVVFGVRLPRALSPAFIEQALRSSEGITGLSAAMRGLIGARAAVLAAVAAIDADIKRMVRASEACRRLMTIPGVGQLTALAFTAAIDDPERFKRSRDVGPYLGLVPRRYQSGEVDYTGSISKCGDRRVRTLLYEAANVMLTRCRQPLKLKAWALAIAKRSTMRKARIALARRLAIIMHAMLRQGSEFKPA

SEQ ID NO: 79183 - protein, 344 aa, unidentified
MEITTIGLDLAKSVFQVHGVDATGQVVVRKSLRRAQMLPFFARLPPCLVGMEACGTSHHWARELIKFGHQVRLMPPAYVKPYVKRGKTDAADAEAVCEAVIRPTMRFVPVKSPEQQAALSMHRTRDLLVKQRTQLVNMIRGLLAEFGIDIPKGLERALLMARQIVDGKAPDVPMEAAKIVSTLAQQALDIHVRLREIDRDLLVWQRGNDVARRLMTIPGIGPVGATALAASITDPHQFRSGRQFAAWLGLTPLQKSSGGKERLGRITKMGDKYLRKLLIVGMTSLVRRARYNPKTVDPRLADLLARKPVRVATVAMANKTARIVWAVMARGETYRAGHRPALAT

SEQ ID NO: 79184 - protein, 319 aa, unidentified
MSRIILGIDVAKKTLDVALIADERTLIKQFANSPAGFNLLAAWLESLHLSAIDVCLEATGSYGEAVALFLHEQGHRVAVVNPLRIKGYAQSKLQRQKTDRTDARLIASFCLSQEPAQWFPPSPEVRHLQALMRRIEALEEMLQAELNRLSAAPPEVQPSLQRIIDTLHREIKKLQEQVRQHIDQFPDLKEQSRLLQTIPGIGERTANLLLSEIEFERYSSARSIAAQAGVTPRKRQSGTSLKQTSLSKLGNARLRKALYFPAIVARQHNEIVKEFAKRLKKRGKTPMQIVCAAIRKLLHIAFGVLKHKRPFDSSLAFSA

SEQ ID NO: 79185 - protein, 347 aa, unidentified
MSEIHIVGLDLAKQIFQVHAISAEGAVVVRRQLRRSQVLAFFAKLPSCLVGMEACGGAHFWAREIARLGHQVRLMPPSYVKPYVKRGKTDAGDAEAICEAVSRPTMRFVPVKTAEQQAAAMVLKTRDLLVRQRNQAINALRAHLSELGIVSGTGVSRVAALIGIVRDPDDARLPVIARRALSDLADHIEALSERLHRLDREIVAQSQEDADLRRLTAVPGIGPISAASLKALVPDPSGFVSGRHFAAWLGLTPRAHSSGGKERLGRISKMGNPTLRTLLILGATTVLRHARNGGKASPWLQAILSRRPPKVAAVALANKTARIVWALLTKGSHYRNPGLAASSAMDA

SEQ ID NO: 79186 - protein, 356 aa, unidentified
MQSKAISFKGQKVFVGIDVHKKTWSVTTLLEVGMPKTHSQKASAKELFDFLNRHYPEGEYHAVYEAGFSGFSTYYALKEYGIECSVVNAADVPTTQYESVMKSDPIDSDKMARALRAGMIKGIYIRERDNLDDRGLVRLRKSIQQDLTRYKNRVKHMLHANGVEIPEQFDRSCNWSKAFINWLREDVVLLSSTRASLDMLLDQVETVRQNLLNITKKVRSLRNKKEYADMYDALTSIPGIGPICAITLLTEIYDVKRFKNERQFASYLGLVPTCHCSGEKASFGEMTFRGNKHLGPLLIEASWVAIQWDDALSVAFTNYRRKGLMPQESIIRVARKLSNIIFSMLKTGNHYAPANA

SEQ ID NO: 79187 - protein, 349 aa, unidentified
MRFYIQPHRFYCGVDLHARTMYLCILDDAGQPLLHREFPAQAGAFLDAIAPYRDGLVVAVECMFAWYWLADLCAEHGIPFVLGHALYMKAIHQGKSKNDRLDAAKIAGLLKGKLLPQAYVYPKAMRATRDLLRRRSFLVRRRADLLAHVVNTNSQYNLPPLNKKLVYPANRAELNLAERFTDPSAKKLIECDLALIDALDAQIHDLELHLVRTAKIDDPQAYARLQSIPGVGKILGLTLLYEIHDVARFPEAGNFLSYARLVRPTHESAGKPQGFGNKKIGNAHLRWALGEAACLYLRSSDQAKRWQARMHKKHAPGKTLGILAAKLGRTVYHLLRTKTVFDERRFFAS

SEQ ID NO: 79188 - protein, 431 aa, unidentified
MLKINPLSTLYVGIDVSSKSNYVCALDFFKNKYINSSFANNQPGAEELALKILECLNQHPDLTMVVAALESTSVYSIHIANYLSSCEELMRFKPYVFVLNPKCTANYKKSYIGLGKSDPIDAFVIADYARAGNIESEPWRGSQFLALKRLTRHRLHLVECMTREKTYLISNLYLKFSELQMLEGDDQPFCDIYGATSSSVLMEYLSPEEILASSEEDLIAFLAEKSRNRIKDISKTADLLKKAARDSYRLDKALYEPLNVSIASSFNCIETFKREIKVIDNAIEKEIKGLNPNAFIILQSIDGIGPVFAGGIIAEIGDITAFHSSDALAKYAGLTWKSNQSGDFDGEDTPMIKAGNRYLRYYLGEAANSMRKHNVEYGAYYRKKYNEVPKHQHKRALALTSRKFVRLVYGLLARNQLYSGVSLDTSIKNSN

SEQ ID NO: 79189 - protein, 421 aa, unidentified
MQTEPEFTAFIGIDWADQKHVWCLQAGGSTQRETGELEHTPEAVESWVAHSYQRLGQRPIAVAVEQSRGALVFMLSKYELLHLFPVPSQMASSMRQALYPSGAKDDPRDADLLLDILLKHRNNLRRLSPDSEASRRVQNLVEERCKLVDEKTAQINRLTDHLKVYFPQVLDWFGRLDSDVVCALLERWPSLEELQKAQPANLRAFLRKHRCRDQERIEGRMEAIRQGIPAIHDRAVIEAKSAAVRVIVRVVRVLGEGIEELDGQIEEAAAAHPDFFIFNSLPGAGPVMAPRLLAAFGSQRERYRSADELQSFSGIAPLTETSGKRKWVHFRWACPKFLRQSFHEWAGHSIVQSGWARAYYQQQRSKGNSHHEAVRSLAFKWIRIVFRCWQDRVAYDENTYLAALVKHGSPLATIVATGKTM

SEQ ID NO: 79190 - protein, 395 aa, unidentified
MFIVGIDIAKRSHEAIIIAEDGQVVRKAFSFRNNCTGYNLLLEQVRRLTLVKSQIVFAMESTAHYWLALYARLLKDGYAVMVLNPIQSHSLRELYIRKAKTDARDSLIIADLVRFGRCKASNVPQDNILALRELCRSRAYLVDMAADLKRKLIALLDRIFPEYESLFDSVFSKASIAVLCKYSTPQKVKNANLRKLTDILIESSNGHFGEWKAHQLKEAACSSFGIDDSGGGYSTVLGMFLEQILSLTAQADSLEKQISGFFQEFNNPLTSIPGVVTVLAATILSEIGDITRFSSADKLLAYAGLDPSVKQSGEFKSNQNRMSKRGSPYLRRAIWLASTVAVHRDPMFQTYYEKKISEGLHYMNVIGHVSRKMTAVIFAVLRDGQPYQPILQSAG

SEQ ID NO: 79191 - protein, 313 aa, unidentified
MTSLSKMKTIHYIGIDVSKKTLQIDAANLAPTCPNQAKALHLWLRQLPARAHLVLEASGGYEKLLTTMAHRAGVPVSIINPVRVRAFAKARGQRAKTDRIDAALITDYAQCLQPAPTPSVSAAHARALELLRARQALVEQRITWINLLEHATDTGLIKLYKKHLRQTDASIAALEKEITTAVTADAVLAARYQRLLAQFGVGAITAATLVLELPELGYLNRKQIAALCGLAPFAKDSGEKRGVRFVHGGRNQLRRALYMATLSAIRQKSSPLQSFYLRLRTNGKPGKVALIACARKLLTYLNSQLKNPELSPK

SEQ ID NO: 79192 - protein, 343 aa, unidentified
MKYIGLNLHKKSIFATVLGEGGKILSRAKIGSNSRYIYYYLKSQGESNQLSVAMEASYNWQHFYRAVEEAVDNIVLAHPLKTRIIGEAKIKTDKIDSKVLAYMLRTDMLPRAYVPSRDTMENKMLLRGRISLVRIRTQIKNKIHAVVDRNKDSYCGLENLSDIFGKTGKHILRDTKIGPTDYRILTGYLDLIDEIGKKIKDLESQIDKRSLEDREIKLLRTIPGIGSFTAFLVKSEIDDITRFASKEKLCSYAGLVPSTHGNGEKLYHGRIVKQGNKFLRWALTEAAQTSIRCSQYFRYHYSKVRSKKNANSATIAIARRMAEVIYVMLKEGRAYIEKPVDIK

SEQ ID NO: 79193 - protein, 347 aa, unidentified
MNFYTQQHKYYCGIDLHAKSMYLCILSQEGDIVLQRNIRTSSEVFLKAIERFREDIVVAVECIFTWYWIADLCAKENIPFILGHALYMKAIHGGKAKNDRIDAHKIAVLLRGGMIPQAYVYPREMRSTRDLLRRRMHLTRKRAELLAHIQNTNYQYNLPDFEKRIARKANRVGVAEHFPDENVKKSIELDLKLLDYYDQLLPRLEHEISLIAKAHDADSYFRLRSIPGIGRILGLVILYEIHDIRRFPTVQNFVSYCRLVKSAKESAGKRLGSSGKKIGNVHLKWAFSEAAVLFLRRNPEARKYREKLAKKHGKAKSMTILAHKLARAVYYILKRKEVFQMNTFFER

SEQ ID NO: 79194 - protein, 413 aa, unidentified
MDVTCGIDWAEDHHDVAVVDQDARLLGKLRIGDDAAGFQDLLRLLADHGDSPDKPIPIAIETSRGLLVACLRASGRRVYAINPMAVARYRDRHVVSGKKSDHQDAVVLANILRTDAELHRPLPDDSDLARVIAVLARAQQDAVWDRTRAHNRLRSHLREYYPAILEAFADKREQLLAREARAILAIAPTPAEAARLTRSRLTAAVTRAGRQRRIETETERLLEVLRRPWLRQPSLVEKAMGQQTRALLAQLETACRACDELAHDTEELFLQHPDAEIITSFPGLAVLTGARILAEIGDDRTRFATARDLKAYAGRAPVTRESGKSRRVSHRRVKNSRLAAAGRHWAFAALTASLGAHSHYNRRREAGDRYHAALRNLFNRLIGQLHHCLTTRQKFDEAVAFAPPTLPSLATAA

SEQ ID NO: 79195 - protein, 332 aa, unidentified
MNAVSTLGIDLAKNTFSVHGVDEDGVVTVRRTISRGKLAELVTRLPPCLIGMEACSGAHEWARRFAAAGHTVKLMAPKFVTPYRKSGKNDGNDAEAICEAVCRPNMRFVPIKSVQQQAELSLHRVRQGFVEERTATLNRVRGLIAEFGYVLPNGVEQLRRQVSEVIDRLPARVARCVRDLLEHAERLRNKALEYEREIRTSLQHNELARRAHTRPGIGPITASALVATVGNGHDFKNGRQFSAWLGLVPCQYSTGGKTRLGHITKRGDPYLRTLLVMGARSVLQRAYRESDPLSRWALAVQQRRGYHRACVAIAAKNARVAWALLAKESAAA

SEQ ID NO: 79196 - protein, 418 aa, unidentified
MKREQNASMSELRYIGLDVHKQYITVGGMNAQQEIVLRPRAVEMERFKTWVEGNLRKTDEVVLEATTNTWDVYDTVAPLVGRIVVAHPAEVKQIANSRVKTDSQDVIRLVRLLIADIVPEVWVPPVEVRQLRALISYRWRLVKMSTAIQNRMHSLLHRHNIQAPGGKVDTGENRAWWETLKLSELETLRLKQEIKTLRLVREHIVEVEKELGRLSNSERWGAQAVHLMQIPGVGIIVTMTILSAIGDISRFENPKKLVGYAGLGAGVHDSGQKHRDKGITKFGRKELRWALVEASWQAIRSNPRWRAEYDELCKRKHPNQAIVAIARKLLVTLWYLLNRQEAYKHSSEEDLAYKMLTWAWHMDKTALNGMSNQQFAKYGLLRLKKGENLTRIVRGGLPRRIASKEEVLALKPNLQPPQ

SEQ ID NO: 79197 - protein, 311 aa, unidentified
MADKTAFVGIDVSSVRLDVAQLGGASHSFANDDEGIAALCDWLKLRPCERIVMEATGGYEAVAASTLVSVGLPACVVNPARVRDFARASGVLAKTDAIDARVLAQFAYQMRPELRPMKSEEAQELTAVVARRRELVQMRDAETNRLRLASTAVRKDIETHIAWLKARIKETSRELRRRIKAHAGWQITDRLVQSVAGAADVLSATVIALLPELGQPSGRRIAALIGIAPFNNDSGRRKGHRQIKGGRTEVRNVLYMASLSAIRYNPAIKRTYQRLVAAGKPKKVALTACMRKLLLILNAVIRDQTPWDRTK

SEQ ID NO: 79198 - protein, 343 aa, unidentified
MDYFAGLDVSVKETSVCIVDDTGRLVREVKVASEPEALLQVLMTPGQTFKRIGLEAGPLSQWLFSALAEAGLPVICVETRHMRAVLKAQINKTDRNDARGMAQMMRVGIYRPVHVKTLRSQKLRMLLTHRKLLQSKAIAIDNDLRATLRNFGLKVGLVGTGKFEARIKELVEDLPDLAVLVEPLLVVRRVLREQIDILHRRLLAIVRDDDVCRRLMTVPGVGPVVALTYRATVDVPARFRNSKAVGAVFGLTPAKYQSGEVNRTGAISRCGDEMMRMMLYEAAQIVLVRSTKWSWLKAWAMKIARHRGMKKAIVALARRLAVILHRIWVDGTEFRWTREVAAA

SEQ ID NO: 79199 - protein, 385 aa, unidentified
MLSKGGEKTQNREGRGRSNTLEANKPGGEQDRRATTKPAESPNSRWGHKVEPELRKAGSGPKSKWVKVMSQYAELYVGIDVAKRTLEVALSSGELLSVVNDDAGIAELVQDLVKRAPALVVLEATGGYERKVWLALLEAGIPTARVNPRDTHHFAQAHRQLAKTDRLDARGLMLFAAQMRPRPDVAPAAADERLQELVGRRQQLTTMLAAEHNRHQQAISPANRRSIQTVIRFLERQRKALDQAIEKQLSKNAQARELNELLQTAKGVGRVVSATLIARLPELGTLTRRQIAALVGVAPYDRKSGDWDGRSHIFGGRADVRCALYMATLSAVRRDPHLRAFYRRLREQGKAKKVALTACLRKLAITLNAMVKNRTPWSPSCPTLA

SEQ ID NO: 79200 - protein, 344 aa, unidentified
MKIVGCDFHPSFQQIAILDTVSGEIEERRLVHKDGAAEQFYGALEAPALIGMEAVGNSLWFEQLVTRLGHELWIGDAAQIRASYVRRQKTDRRDAGHILRLLVEKRFPRIWVPSEAERDRRQLLLHRHKLVQIRTRIKTELQHLAMNQGMQKKRRLWGVRGRADFKNLSLGGWTAQRREDLLSLLSLVQGQVDKLDEAVKEMAAGDAQAQLLMTQPGVGPVTSLAFVLIIGDVKRFKRSKQVASYLGLIPSEHSSGSKRRLGAISKQGNVFLRTLLVEAAQSACRYDEQFRREYWHRCHHKPTGVAKVAAARKLAVRLYWMLRTQTPYRPAVHNGGSPSHPVVG

SEQ ID NO: 79201 - protein, 432 aa, unidentified
MSQFLNDFVVGIDVSSEFSIVAMLAPTGELIRKPFRIDHNPVGFHKLLDILKKEEERLKRKPIYFVESTGIFHLPLFFFLKSNDLKGFVLNPLCVHSTKNFDLRKVKNDNKDSEAIARLAKYQDVKVSMMPEPQILVLRMMTREYYAVSDMLTMMKNRLCTDLYLLFPGFLNVFSGPFGKTALAVLKSYPSPRAIRDADTDVLTLLIAKTSRKGSEWASNKVALLRDCAQLASSMPSEFSMLDTKIKIHIDGIQHMQASLNGIEAQVKTMIKSKEFPAQAKRNIELLDEIPGIGFFTAATLIAEIGDFNLFNSPKALTAFFGLDPSVNQSGKFNGDRNKISKRGTRIGRRILFTVAMASIRRTRDGKEINPVLRDFYASKCVSKKKKVALVAVMHKLLHYIFAVLRDQKPFELRKPEDHQSWRNTKLQPAAA

SEQ ID NO: 79202 - protein, 350 aa, unidentified
MSIVAETVEYVAGIDTHARTHTYCLVHARTAAVVDTATFPTSKSGNARAINWIARRSQGSVLAAVEGTSSYGAGITAALTEQGVEVVEVRPAARSTHSHAGKSDQLDAEAAARSVIGRDYDTLARPRQTGPRAALRVLLASRSIIDQQRTANRNALTALLRTIDLDVDARKPLTDTQIRVIAAWRTTRTAAAVDASVIARREARRLAVAVLEQTQLLKDNYRQLHQLTEQLAPGLQDVPGLGPVTAAIIVCAYSHRGRVRSEAAFAALGGIAPLPASSGNTSRHRLSRSGDRQLNRAFDIAVRTRMSYDSDTRAYIARRRAEGRTNREIRRCLKRYVCRSVFRQLQASTA

SEQ ID NO: 79203 - protein, 394 aa, unidentified
MGKLYVGIDISKDRSSANGIDDHGKSRFEISFDMDGTGFSEVLKAIEANSEGHEDVMAAMESTACYHINLYSFLSAKGIETVVINPLLIANFAKLSLRKTKTDKKDASTIAQFILAHRDSVTQLAVSQDLQDLRDMARERESLCHQISATKVEIRRVLNTTFPELESMCNPFTKVMLHFIQRFPSARLVSVAKPNIIAKTLKEKPCSCRIRFTPAELINIARKSIATVSPGKEIILSGKIDTLLHLQKRSDELTKALTKYCESSIVEDLKIVTSIDGIGNNTATTFLAEIGRIDNYASHKNLIAFAGIDPTVYQSGKYEGASKISKRGNRHLRRVIWIMTVRVIHHNPMFKKYFFKKRSEGQPFKKAVFATAHKLMRVVFAMLSHKTYFQEECI

SEQ ID NO: 79204 - protein, 395 aa, unidentified
MSNGSGVSRGDRNRNARLARLRELVPVTNAVVGIDLADAKQMVVVTDHDSKVLARKTFRCRAWNLGAALDWAAERAEAKGWAGVTVACEPTGHRWRVLGQLAAERAMPFVCVQPMLTSWARRSEDLTFDKTDEKDAVLIARLTAQLRCYVPEPVDETWGRLRHLGTRREQLVIEMVSQIQQMRALLECVWPAALDTARQPFRSKTWAAAMILVCERDRGDLARTRRLGIDRFEQVVRREIIRRGGQKPSLRILRQLFTALADPTGVTAHRSGALERVAFLMQDWHDAAGKLADTETRMTDVLDELNLTKLATSIPGMSAVGAAAILAETGDPNRFATARALVKHAGLAPREKLSGTFVGRTKLTGQGRPALRLAAWRASGGHNVATPSTPPAMSI

SEQ ID NO: 79205 - protein, 387 aa, unidentified
MTQVDNLSRSVDAFDQDASLTVVVEMSEASWLVTGMVPGVDRRPLKKLEPDPDALLRLVERWRSEAEKTGRTIERVALAYEAGRDGFWLARWLRVRGIEVHVIHSTSVAVSREHRRAKTDRLDTAMLMRVFLGWLRGERGHCGMVAIPTLEEEDAKRPSRERESLVGERTRIVNRMKSALARLGIRGFKPKLRKAPERLAALRTPEGGAIPANMLDEFRRDMARLAVVREQIEEIEQGRLERLEQAPAARPNAMVHLLARIIGVGIETADMLVREVLSRNLRDRRAVARYAGLTGSPDESGSMRREKGLARSGNARVRRGLIQLAWRFLMFQKDSALVRWYRSRTEGPKGARKTTMIVALARKLLIALWRMVTTGVVPEGVVLRPVA

SEQ ID NO: 79206 - protein, 340 aa, unidentified
MSEITTIGLDLAKHVFQVHGVDASGATVLRKQLRRGQVVAFFATLPRCLVGLEACATAHYWARELQAVGHEVRLMPAQYVKAYVKRNKNDAADAEAICEAVGRPSMRFVALKTAEQQAALLLHRGWERLVRQRTSLVNALRAHLAEFGVIAPQGLRNVARLIAIVRDASDTRLPDLARQVLRVLATQLEQVAATVAAIEQQLTTWHRNNPMSQRLASIPGIGPIIATALAATVVEPIDFASGREFAAWLGLVPRQHSTGGKARLGGISKRGNRYLRRLLINSASANLLRSKATNADPWVIGLHRRRPSLVVAVALANKTARVAWAVMRREESYRHRSAAA

SEQ ID NO: 79207 - protein, 334 aa, unidentified
MQNVTLIGIDLGKNSFHIHCQEKHGNTLLRKKFSRIQLTQFLATCPPCIVAMESCAGAHFMARHISQLGHQVKLISPQFVRPFVKSNKNDFIDAEAICEAASRPSMRFVTPRAEDQQAMSALHRVRDALVRERVKATNPMHAFLLEFGISMPRGIAVIKRLATVPEEHELPPYLVRLLTRLHQHYGYLCEQIEEIERELKNHLADDETAQRLLTIPGIGTITASLLATKLGDGKNYLSSRDFATSTGLVPRQYSTGGKSTLMGISKRGDKNLRRLLVQCARVYMQRLEYQSGRLAEWVNGQLTRHHSNVVACALANKLARIAWAVTTQGTVFSK

SEQ ID NO: 79208 - protein, 334 aa, unidentified
MSIMNMHPQGGVANGGRLNAGVDVCKRHLDVCLDTEARRIANDAKGWDELTAMLKAGGVDLVVVEATGGYERGLVCAMQGAGLSVARVNPRQARDFAKSMGVLAKTDQVDARCLRDFADVLARHKDRRKYITPMLESARQELAELMTRRRQLVDMRVAENNRLEHAGKVAARSIASVIKLLDKQLSAIDAQIDEHMDTHFRSQRELLDSVKGVGPVTILTLTAALPELGKLGRRQIAKLVGVAPLADDSGSRQGKRRIWGGRGGVRAVVYMAALVAMRHNPVIRDFYARLVAAGKPKKVAIVACMRKLLTILNAMLRDQAMWNAARHVEVPVAA

SEQ ID NO: 79209 - protein, 356 aa, unidentified
MSEITRVGVDLAKAVIQVHAVDAAGKLVTNRQLSRDKFLPWCGQLPAGCLVAMEASGGSHHWARKLIALGLNAKIIAAHLVAPYRLQGKGGKNDANDAAAVCEAASRPTMRFVPVKTTVQQGVLCVHRLREGLKEDRTASINRIRGLLTEFGLVVSKSPDKLREKLTDMLEDASNDLSGLARLVIEEAYGQWKDFDERIAWCDERINSHVKEDAHAKVAKELVGIGPVTASAVVATVGDFNQFKNGAQFGAWLGLTPRQNSSGGKNSLGGITKRGDMYLRTLLIQGAKSAVMTAHKRTDPISKWLFQLREKSGWQKAAVAMANKNARILWAIMTKGCHFDPRHVSVKPVVPATAMA

SEQ ID NO: 79210 - protein, 442 aa, unidentified
MNPSIVRYVGLDVHKRVVEACIVDSQGKVLFRERFALTRRVLELVAEKHLRPTDKVAMEATTNCWAVADLLRPRVAEVVVSNPLATKAIATAKVKTDKVDAYVLAQLLRCDFLPRVWQPDEASRLLRELCRRRSALTGQRTKLRNRIHSALAMRLIVPNTSQLFRDEGLEWLRAVELDAQARLLVDSDLRQLASLQKEIELLDAEIARRGYQSQAVKILMTLPGVDTVTATAIMAAWGDVQRFRDGDHATSYLGLAPSTRQSADHCYHGPITKRGNSLARWMLIEAAQHLDKNPGPLGSFFRRLLRKKTRNVAVVAAARKLAWIGWHLVARNEPYRYAIPSSTQAKLSRLRLKATGQRRRGGMAKGQKATAKLAGGSRTIKPLAEVCRAEGLPEPTLLRPGEERTIRRAGCQQFVARISTVQVVPRGTGSSSLLRRNGHARN

SEQ ID NO: 79211 - protein, 340 aa, unidentified
MEKAIMIGLDIAKNVFEVHGRTAAGEVVVRRSLKRGQVEKFFARLPAAVIGMEACGSAHHWARVLGKLAHEVRLMPPAYVKPYVKRNKSDVIDAAACWEAVGRPDMRFVPIKTVEQQAALSLHRSRDLLVSQRTQLTNALRALLSEFGIVAGKGRAGLARLVDELRAGTLELPADAVVAATALADQRAALDAAADALERRITAQAKADKNAAMLQTAPGVGPLSAHATLATMPDPALFKSGRDFAAWLGLAPRLNGTGGKTRTGAITKQGNSPLRRLLVLGATTWLRQVKARPEKASPWLRGMMARRPSKVVAVAQAARTARILWAMLSHNQPYRAPAIG

SEQ ID NO: 79212 - protein, 345 aa, unidentified
MEITTIGLDLAKNVYQVHAINGVGEVVVRKALRRAQVLRFFERLDPCLVGIEACGTSHYWAREISKFGHQVRLMPPAYVKPYVKRGKTDASDAEAICEAVSRPTMRYVAIKSCEQQAALTVHRTRDLFVKQRTQLVNMIRGLLAEFGIEIRRGITHALSLAERIAAGEMPDIPALAAKMIASLAGQVLDLQTRLRELERELLAWHRSNDIARRLATIPGVGTICATAFAASVTDPHQFRSGRQFAAWLGLTPLQHSSGGKERLGRISKMGDKYLRRLLVVGMTSLVRRAKYKPDAVDPRLAALLSRKPVRVVTVALANKAARVIWAIMARGGIYRAPQPAGAGIA

SEQ ID NO: 79213 - protein, 404 aa, unidentified
MTVVIGIDPHKGSHTAAALNEAEAVLGELRVRSGAAQLEQLLAWAAQWPERTWAIEGAGGLGYLLAQQLVAANERVVDIQPKLAARVRLLATSSTNKNDPNDARSVAITALRSPEAKEVRAEDHAAVMKVWAKRRHDLVSARTRVVCRLHAVLCELVPGGISGQLYASKAATMLDEFEPYNAIAAARHELGLELLADLRRVDEQMRETKKRIALAVAASKTTLTEIFGVGPIVAATVIGYVGDVTRFASSDRFAAYNGTAPIEVSSGPRKIYRLSRRGNRRLNHSIHMAAVTQIRNLRSEGRAYYDRKVAEGKTGKEALRALKRRISDALFRQLQIDAQRAQGSIMGPGGQTGNDSKACVTDSHPDDRLFGKATPEPETTLRPAATAFRSGRSKTLARSARRAS

SEQ ID NO: 79214 - protein, 417 aa, unidentified
MDVHRDFCEIAIAEPDGRVRSAGRINSRLEELELFAGSLAADDVVVLEATSGAGLIAEIIEPHVAAVLVANTRKLPQISKAKAKTDRLDARTLARLAASGFLETVWAPDERTRALRRLCARREALVRARTRAKNEAHAVPARNLCGRPPVSDCFGKQGRAWLAELQLPVDERLTLDGCLRQIDFLDTEIGALEAALATQALDSPEILRLMTVPGVNLHTAAAFMASVGDIRRFGSARQLVGYLGLDPRVRQSGNAEARHGRISKAGSSLARGMLGEAAWSAAQTPGPLRAFFERIRARKGPQVAATATARKLACLFWCLLTRQEDYAYARPSMTRTKIRRLELAAGAPPRKGVRGIAGNKNAQTREAEREIARRAETAYRRTIADWKTAGPAKTGAGATPGRASSRPSKGKAARQTP

SEQ ID NO: 79215 - protein, 319 aa, unidentified
MGKIIGIDISKQVFDVSFLEGNLWKHNVLSNQLLGFEKLMTFIEKEDIVVMEASGTYYLPLAEYLYSQKINVVVENPLSIKRYAQSRLKRAKTDKADSKVIAEYGKKNLDELSLWNPESKTCIRIRQMHTRIQMIQKQTSQTYNQLEAFRSSGFLDEKLKIEMNNSIEQLRLGKEMLESEIEKLALEEFEETIECLTSIPGIGMKTAIMLIVITDNFKKFEHHKQLIAFVGFSPRIYESGSSVRGRSSICKMGKSQIRKLLYLCSWSAKRWNKKCKEMYERLITNGKAERVAKIALANKLLKQAFAIGKNKVKYREDFC

SEQ ID NO: 79216 - protein, 428 aa, unidentified
MIFAGLDLHKKEVEAVVLDQDGRILHRSRFPATRAALETFATTHLSPDATVAVEATTNTWPVAAILQPLVHKVVVSNPLRTKAIASAKIKTDKVDALVLAQLLRTGWLPEVWIPGEETRLMRQRSTERAMLSADRTRIKNRIHSVLHQRLIEAPAGDLFSRKNLAWLKDLALDPFGRDCLDRHLRQLERVERELEALTAQIAVHAHRTPAVQLLMTLPGVDFTVAETILAALGDLSRFETPDKAASYLGLVPSTRQSGEHCYHGPITKQGARHARWLLVQAAQHAALHPGPLGAFFRRIAKRKNRNVAVVAVAHKLVVLAWHMLKNNEPYRYAQPRTVEAKLSRLRIQATGRKRKGGIAKGQPRPPQYGGGRTKAIPGLDDLCAREGLPPLAPPKPGERTMLARQGLAAYAAAVRVPKRVPRGAKSEA

SEQ ID NO: 79217 - protein, 345 aa, unidentified
MNVTTIGIDLAKNVFQVHGVDERGQAVLRKQLKRGQVLQFFVNLPACLIGMEACASAHFFARKLIELGHTVKLIAPQFVKPYVKTNKNDARDAEAICEAVGRPNMRFVPIKNSQQQALLALHRARQGFVKARTAQANQIRGLLAEFGIVLPKGIHCIAQKLPQILQDAENALPALTRELFSRLFEHFRELDRHVKELQAQIQAWHREDPQSRRLQAIPGVGPLTASALVASIGDARMFKNGRQLAAWVGLVPRQDSTGGKTRLLGISKRGDTYLRTLLIHGARAVLRHLHRHPDQAQGWLARLAARRNPNIAAVALANKNARIVWALLAHGREYQGHYSQALARA

SEQ ID NO: 79218 - protein, 383 aa, unidentified
MEYQAARPTRVIEQRIRCSSPSVIMCETQIYTNMKHWIGIDVSKAKLDLALSDDQGRILHEQQIANTDKAIKGIFNRWRKKYGVIKDDCLVCLEPTGHYTLTALHTLVELELPTWLAHPRDIQKSIGVQRGKSDAIDARRIAEYARRFKDKARLFTADSLKLEKVKHLLTLRKQLVRERKRYQLQIKDWNPCLGEELKKTFDRFAKKQVRVLEKAIREVESMIVLELGKDQQVKRKYELVRSVPGVGPVLGAYLLATTDGFKRFLTPRALACQAGVVPFDYRSGTSLKSRPSVSQQADRDLKSLLHMAVLGVIQNPGDLQDYYLRKVAEGKAKMAVINALRNKLIHRIYAVLQRNEPYELNYVPIHSRAAQNNPALILANAME

SEQ ID NO: 79219 - protein, 309 aa, unidentified
MSEKIFIGIDVSKNSLDVAIAHSEEFMNFANTEEGQADLKDFISSKRPALIVLEATGGFERGVLRELASARLPVVSVNPRQVRDFAKAMGILAKTDKIDARVIARFAEAVKPETRPLRTEEEGQLDSLNARRFQIVEMLTAERNRLAHATKWTKKGIQGHIRMLERLLVEINREMDDLIKNSPIWRQKDKILQSIPGIGKVMVRTVLADVPEIGTMNRRQISALVGVAPLNRDSGKYKGRRSIWGGRSKVRTVLYMCAVTAIRCNPKIKMFYERLREAGKCFKVAITACMRKLLVIINSMIKTETCWSS

SEQ ID NO: 79220 - protein, 377 aa, unidentified
MSTIRFIGLDVHADTIAVAVAEPDGEVRSFGVIPNRLESIRKLVAKLGPVGNLKACYEAGPTGYVTYWQLTALGVACEVIAPTLIPVKAGDRVKTNRRDALKLARSYRAGDLTPVWVPDAAHEALRDLVRAREDARQDQHRARHRLSKFLLRHGQRPPDTIKKAWTLKYMTWIKEQVHFDESASHATLLDYVREVDHMAERIERLERAITEAIEKAPPEMRAVIAALQALRGVAMITAVTVVAEVGSLSRFQSPRQLMGYSGMVSREYSTGNHTQRGSITKTGNAHLRRVIVESAWAYQYRPWVGGFLRKRQQGLDQDIKDLAWKAQWRLHTRYKKLAAAGKKKPQIVTAVGRELLGFIWAIAVRIEAQFKTERKVA

SEQ ID NO: 79221 - protein, 410 aa, unidentified
MGLYCGIDWATQHHDVAVIDDDGRVIARGRVSNDAAGFAALLTLLAEAGDSAAHPIPVGIETDRGLWVGALRETGRVIYPINPLTASRYRARYAVSGAKSDATDAVLLANIIRTDPDAHRPLPADTELAQAIRVLARAQQDAVWARQQVGNQIRDLLKDFYPAALAAFDQLPEGGLARADARTILAAAPTPAQAAALTPARLRRLLVKAGRRRHLDRDVERLREIFTDTYLHQPPVVENAMGIQLSALLRQFDAAAIAADELAEAAIAHFERHPDAAIITSFPGLGMLAGARVLAEIGDDRSRFADARGLKAFAGSAPITRASGKKTVVLHRHIKNRRLAAVGPIWALSSLRASPGARRHYDTRRAAGDWNHQAQRHLFNKFLGQLHHCLQTGQHYDEHRAFPPPLLLAA

SEQ ID NO: 79222 - protein, 430 aa, unidentified
MKSNTQNAKIEAITEKTLVLGIDVGSETHYARAFDYRGIEYSKKPFKFSNTEAGFVTFKEWILDLKERHEKDKVVPGMEPTGHYWFNLGKFLQDNEMKPVLVNPHHVKKSKELDDNNPTKNDRKDPKVIAGLVREGRYMIPYLPDGVYADLRTASNIRFQLQAELTRIQNRISRWFNIYFPEYKTVYRKPDAKSGMLILKAAPLPEDILTLGIDGVNQIWRDAKLRAVGKARAKTLIEAAKHSVGSKEGAVAARMEIRMLLEDYESRSIRLQEVMTLIEGLVKQIPMAEKLLEIKGVGIRTVSGFLAEVGDISRFNNPKELQKLAGLALVENSSGKHKGETTISRRGRKRLRYLLFEVAMSLVAKNPEFRELHNYYTTRRLNPLKKMQSLMAIAAKLIRVFYAMLTKGVDYDPKKMISDIKRPTVYLQAA

SEQ ID NO: 79223 - protein, 353 aa, unidentified
MDGLILAIDLGKFNSVCCWYDTATKSATFRQVRTTRAELGRDLTWRRVVGVIIEAGSPAGWVHDLCGELGLPCWVANTSGVAWQWKSLKRKTDRDDALKLARLAAIDELPTISVPPRPVRQWKSLIGLRKRLVGERGRGQNRIRGLLVGQGLAAPAGNKAWTELGLDGLSQLARPLSECSDTELWRGELTALIARHSFLDGQIREVESVLDALAQSSRAVQLLTSVPGVGVRTAEVIAAHLHEGRRFRNADELSAYAGLVPRQYQSGLCDRRGRITKRGPKLLRAALVECAWCSLRYNRWALATWKRLVANGVSKKKAIVALARKLLIRCWGILKSGQAWQNPPSAVATNAGN

SEQ ID NO: 79224 - protein, 428 aa, unidentified
MGQVCLKRKELNQTMQQQDIAAFIGLDWADKTHSIHLQAGHGKREHSTLEQKPEVLHEWVAQLRQRFQGRKVAIAIEQRKGAVVHALMMYDFIVLYPINPKALARFREAFRTSGAKDDPNDSELLLDLVLNHHERLRAWIPDSTEARKLQLLCEQRRKMVNHRVALTNRITSLLKQYFPQALDWVGDVACIQACDFLSNWSTLTAVQRARQDTLREFYRAHNCRKASVIEERIGQIKAAVPLTSDPAIVEPLSLCVQTYAGQLRLLIRAIQDFDDRIATTFALHPDRDVFDSFPGAGPVGAPRLAAAFGTDRSRWQSAVEIQSHSGIAPVTKRSGQSVSIQHRLACPKFIKQTFHEFSDQSIRFCAWARAYYDQMRDRGKDHHAALRALAYKWIRILFRCWKDRKPYDDAKYLHALRQHGSELVKDFC

SEQ ID NO: 79225 - protein, 339 aa, unidentified
MQITTIGLDIAKNVFQVHGIDAAEKVVVRKQLRRGQMLAFFKALPPCLVGMEACATSHYWARELTKLGHQVRLMPAKDVKAYVKRNKNDAADAEAICEAVRRPTMRFVQIKSVEQQGQLMLHRARDLLMRQRTQLINALRAHMAELGIVAAQGREGVKELLKIIASEQDARLPVDAHASLVVLAAGLQALQTMIGSIERRIIAQHRSDEASKRLRSIPGIGATAIAATVPDPKVFRSGRDFAAWIGIVPRQDSTGGKQKLGPISKRGDQYLRRILVVGAHAVLKRACHQPEKYPWVTRLLERKPFRVVAVAVANKMARVAWALLARGGSYRAPALAAAA

SEQ ID NO: 79226 - protein, 423 aa, unidentified
MQTDGANQQQYAASIGFDWGDQQHAIALQAAGSGRVETQTIKQTPESLHDWVLSLRNRFGGRNVIIAIEQSRGAVINALLGRDFVHVMRVPPKSLARYREAFYPSGAKDDIPDASLLLEWARDHRDKVKVWTPDKPETRALQKLTEFRRDTVGRRIVITNMLTQSLKEYFPQALSWAGELDTHMACDFLEKWPTLEKLQKAKQAQIRKFYQERGCRRTEVIQQRLEEIRLARPLTQDSAVISTSITVLETLIPQLRCLIDAIDRIESQIHELFNEHEDRDIFDSFPGAGPVMAPRLLAAMGSDRSRYDAALEVQQHSGIAPVMERSGNSTWVHRRFACPKFFRQTFHEFAGLSIRYSSWACAYYKMQIDKGKGHHAAVRALAYKWIRIIFRCWQKRVPYNEEIYLEALRRKNASLLKYLAAAA

SEQ ID NO: 79227 - protein, 347 aa, unidentified
MALTIVETRAITGGVDTHADIHVAAALDPIGGLLGVREFPATPAGYAYLLGWLGGFGTVCLVGIEGTGSYGAGLARYVTAAGVRVVEVDRSDRQDRRRQGKSDPLDAVSAARAAQSGRARGAPKGRDGTVEAIRALMVARRSAAGERTRTINQARALILTGPDDLRARFARHTAAALVSGIAALRPRPGDVPGYAARIALRELGRRAVFLDGQLGRLDELIAPLVSEHAPGLIALYGIGPHTAALLLIAAGDHPGRLRSEAAWAHLCAAAPIPASSGKVTRHRLNPGGDRQANHALWRIVFTRMGSDPATRAYVERRTSEGKSKAEITRCLKRYVAREVYPHLRPTG

SEQ ID NO: 79228 - protein, 362 aa, unidentified
MLGFARTKSPKGAFMRFYTNQHKHYCGIDLHAKKMFLCILDASGQIVLHRNIAASPESFLRAIAPFREGLVVGVECMFAWYWLSDLCSKEGIDFVLGHALFMKAIHGGKAKNDKIDSQKIAVLLRGGSFPVAYVYPPEMRATRDLLRRRNHLVHKRAELLAHIQNTAIQYNLPEIGLNLSYEGNRKEVDQHFPDPQVRKIVQVDLAMIDAYDDVLKILEPDIEKTARRHDRHALMLLRSVHGIGQILGLVMLYEIHDIGRFQTVQDFASYCRLVRCSHESAGKKKGTGGAKIGNAHLKWAFSEAAVLFVRHNPSAKKLMDDLTKLHGKGKALTILAHKLARAIYHMLKRNTPFSLKQFLATA

SEQ ID NO: 79229 - protein, 403 aa, unidentified
MRAICGIDWASDWHDVHISDETGGVLAIEQFSHDERGVGALIDLLVAHRVEACAIERPDGLLVGRLLAAGVTVLAIHPNRLKAARDRFRAAAGKNDRFDALVLCELARTDRHRFPALAPCGDETLALRALVRTREDLVKARVALANQLRAQLEAFWPGAARIFADVDSPIALAFLERYPSPGEARGLGERRLEGFLARHAYCGRRSPAELLARLRSAPTAVVGELECDARRCAVIGLVATLHPIVEQISQLTSQIAGAVRAHPDGEIFLSLFRDRKSVVTAAGLIAEIGDNRSRYPTDDTLAADAGQAPVTVQSGKRSSVSFRWACDKRLRDHVAVLADSTRHWHPWARDTYQRARARGADHPHAIRILGRAWTRVLWRCWQDHTAYDPAQHKALNALLAEGG

SEQ ID NO: 79230 - protein, 299 aa, unidentified
MFPVGIDVSKNTLDLCMLYDGIKGRIKTRNIQNNRHSVENILRWLRLQHCSPEDVHVVMEATGVYHERLATELHDAGFRVSLANPHRSREFARGMGIMTKTDKVDAYMLACYAFLKKPHRWEPPAPEIRYLGALLRRRDVLLGDALREENRLEKYLSTDTPADIISSCRRMAQLLREEVSNIERQIKAHIKASPALRRDYTLLTSIKSVGPQLGMHMLVVLRSHNFVSAEQAAAFLGVVPIEKRSGTSVRRRPRMSKIGPPQLRAKLYMSALCGKIYKCVIFTMRCACGVNLKWWPLAR

SEQ ID NO: 79231 - protein, 408 aa, unidentified
MQHTEQVIIGVDPHKLSATIEVVDDHEWMLGSGRFTTDRAGYAAMRKYARIWPQRVWAVEGANGVGRPLAQRLLESGEHVVDVPAKLAARVRLFDTGHNRKTDAHDAHAVAMVAVRTRGLRVLRVDGQLEALRMLVDRREALTRRRVQTVDRLQALLAELLPAQAKKDISTGQAKRMLATVRPRDVAGTTRRRIAAEELAELVAVEAKMKKANAELKAIVVDRGSRLMDLHGVGTVVAARVLADVGDVARFADRNRFASWTGTAPLDASSGEQNRHRLSRAGNRRVNHMIHIAAISQLRVDCDGRAYYRRKRSEGKKPLEAIRCLKRGISDAIYRQLVADEQRAGGTGPGGHCRGDSNIQRGRLPPAHRHFTTSRTRATDATRTVRDPEDQPPQSTSDDRLTTEVFLR

SEQ ID NO: 79232 - protein, 414 aa, unidentified
MPHLTLVRRDTIILTESVLVVAGADTHADTMHVAAISMTGAVIGDREFPTTRTGYAAAIRFLTSLGQVERIGVEGTASYGAGFTRVLTAAGIEVVEVTRAVKSTRRLKGKSDPLDAYSAARTALAGDGLATPKDDATAGLRALHIARRSAVKHRTAVINQIKAMLVSAPDVVREKYRGLTTLKLIEALARCRPDAQVEPWAQSLLVAAKLLAQRVQFLETQAEALEAQIDALVTEANPGLRAAYGVGADTAAQLLITAGANPHRLHSEAAFAALCGVAPVPASSGKTNRHRLSRGGDRAANNALHRVALVRLSHHQPTKDYAQSQLNNGHSKSRMEVLRKLKRAIAREIFKLLTRQIAVPDYADLRPVRQAKNITVTAAANHFGVWPTVISRIERGLQRDDSFAETYRHWLQIA

SEQ ID NO: 79233 - protein, 355 aa, unidentified
MSIVGGLDIHRKQITFDYVELETGRFERGQICPADREHVARWLSRFDGMSGVAFAMEGCTGWRYVAEELRNAGIEPHLAEPAETSALRGPKRRAKTDKADARLQRELLAAGRLPECYIPPSQVLEWRALLELYHDLRAEHTGWAQRVHATCFHQGTTAVGEAGVIRGSRERLESIVEEQLSPVGRLQVNTALSIMDTLAEHLDRLRRRLVATARHVYGARALMDAIYGVGPMTSLALCAWLGGADRFSSSRKAVRFAGLDITVHSSDSKRSPGRLSRQGPEVLRWLLFEAAKTSARSCAPGYSYYTDVKERYDANRAALSQARRIVRQAVHILTDLGDDAFTVIAQPAAPTMVAR

SEQ ID NO: 79234 - protein, 335 aa, unidentified
MEEVTTVGIDLAKNVFSLHGVDAAGRAVFRRTVRRDRLVETVASLSPCLIGMEACSGAHEWGRRFERHGHTVKLMAPKFVAPYRKSAKNDGNDAEAVCEAVTRPSMRFVPVKSIEQQALLALHRVRYGFVVERTAIINRLRGLMCEFGVVLPLRSVSVRRLAAQAAETLPDLARGAVGDLLQQLHQLDERIDAYDRQIEQQAKLSAPARRLMEIRGIGATTALAIVATVGNAREFKNGRQFAAWIGLVPNQYSTGGKSRLGHISKRGDAYLRNLLVQGARSVLHSAPGRADRVSRWALKLQDRRGYYRTLVAIANKNARIAWALLARDQELVTLN

SEQ ID NO: 79235 - protein, 421 aa, unidentified
MLNKNLIKQGKYVNREILVVGVDIGKYTHAAVGTSLEGGFTKSFSIRNNRRSYENFERIMEDWKERFNCRYIVIGFESTGHYWKPLVYYLKDRGYILSEVSPSSTKKSKEMMDNSPLKSDPKDARVIADLVKQGKILTPIFPEGKILSLREIVHTRENFIKEWTSILNRLEKIMDVAFPERKEIIKKVGNKTSLFLLKEAPFPADILKKGLRWLSKYMWKKSRGRYNELNAKRLYNSAKETVGLKQGMEGFLYELNALLVRLKEINKKIEEVESIIESYLEDIEEARYLLSIKGVGPNIAAAVISESGGLSKYRRTESVIKIAGLNLYERSSGKRRGEKHITKRGRKLMRQKLYFTALQQTHPGMPLYSYYRRLVEENGLEETKAIIATARKLLRIMFALVRDKSEYKWNYKERKSQKEAA

SEQ ID NO: 79236 - protein, 396 aa, unidentified
MTTTSDIRVSVDVGCHRHSVAIGLPSGEVLDEFELDHRPEGIEVFFNRVDSRQRRYGGAVSVAMEGYNGWARPLDTLVRQHGYRLFNVNNLKLARFKEIFPAAAKTDRIDARKGLELFQLCDHLPLAKGVLQEVAATPKENDVLKRLTRRRRSVVDEKGRILSRMQSDLQAVCPGLLAITKDADNVWFLNLLSHSDDLTKLARLHQKTVLGIRAIGRKYAAIIGDWQKHASFSHEVDYVGPMIIEDARRILELRETVKALEARCKEAANGSPIAQLIDTVPGFGLVCSSELAGEIGTVDRFTSEASLAVYIGMATLDNSSGSVRGSKNPKHVNSRAKAAMMVGVDRHRKMIPESQRYYEKKRAQGKTHNQAVRALGRHLSRVIFRMLTQDRPYEVR

SEQ ID NO: 79237 - protein, 370 aa, unidentified
MRKSVLYVGLDVHKMSMEVAHAESGAYGEVRHYGRIGGDLEALDKVTRKLQAKGAELRFAYEAGPCGYQVYRHLTAQGYSCLVAAPALIPRRPGDRLKNDRRDALALVRLLRAGELTPVKVPDADDEAMRDLTRAREDAISVERRAKQRTAALLLRHGRRYPGKTTWGRGHWRWLAQQAMEHPAQQIVLQEYLDAVREASARVQRLTEQIRELIPQWRRAPFVAAYQALRGVSRIVAATLVAEVGDLSRFKNPKEFMAYLGLVPSEHSSGASVRRGHITKTGNGHARRVLVEAAWAYRLRARVTRPLLKRQEGLPESVRQLAWKAQLRLCARYRRFQARGKHKNTVITAIARELAAFIWAIGQSVEPVTP

SEQ ID NO: 79238 - protein, 358 aa, unidentified
MQTKVNENTFDGQSIYVGIDTHLKSWKVTVMAGDIHYKTFSSPPNSDGLVKFLKTNFPGAGYYSAYEAGFAGFWLHRELTKLGINSIVVNPADIPTSDKERKQKEDRRDSRKIAKTLQAGQLNGIFIPSERVQQDRNLLRTRDSVLKDLSRNKNRIKALLYFQGIHIPERFVAHSNWSNAFIQWLRELGFEHSTGRSALDALLTMVHHQRSLLLKITRQIRDLSRTPDYCDNVDLLVSVPGIGVLTAMKLLTELESIERFKTFTQLCSYVGLIPSTNSSGENEVTSGITPRRNLRLRTALVESSWIAIRNDPALLSSYQRLSKRMPGNRAIIRIARKLLNRMVHVLRQKEKYERGVIK

SEQ ID NO: 79239 - protein, 456 aa, unidentified
MQHYYLGIDVSKGYADFVILNDKKKPIEENFQLDDTFEGHCCLYERLLRFFEDHPDSTIYAALESTGGYEDNWFSALIKFQGTLNLKTARLNPLGVNANSKADLKRNVTDKISAQNVAEYMIAHPEKISYQQQDHLASLRKQWGFIKMLTKQSTQLLNQLEVLIYNANPELLVYCKDGTPGWFLRLLIHYPTASSLSRAKIVKVARIPYISPDRAKELVGNAKKSVASATDKITGKLIIATVKQILHLKQVIKAQTKLMAQECSVPEVDLLKSFIGIKDFSAIGLMLEIQTVERFLSVKKLASFFGVHPVYKVSGDGIGGFRMSKRGRKEPRQILFMVTLTAIQSNPLIRGTYQEHIQKGMEKMAAIGLCMHKTLRIIYGMLKNNSAFDPEIDRRNREKMVIHNSKVNKDKNRRYQAFDSNAPISRRQHGKREERKQSHSDNNTNNGIIAPAPLST

SEQ ID NO: 79240 - protein, 350 aa, unidentified
MNHVAIDLGGRESQICVRGGDGQILQEERRPTLGLQRYLATLEPARVVLETCAEAFMVAEWARSAGHHVTVVPASLVRALGVGSRGIKNDVRDARNLSEASCRMQQLPSVHIPRAASRELKSLCTLRDSLVTSRTKLINSARGWLRGQAIGRVKPGSADSFTQRLRALWRQKTGGDLAPALQRHALSIDVLTEQMLAAEQELQDFARADATCRRLMTVPGVGPLVAVRFFCSIDDVSRFSSAHALQSYIGLTPGEDSSSDKRRPTGITKAGTPRVRWLLQQAAWVAWRFYKNDPIVQWAEGVAQRRGRKIAATALARKLAGIMFAVWRDGTAYQRTRATHDSTETAEVAA

SEQ ID NO: 79241 - protein, 375 aa, unidentified
MVKRSREVGDLTIGLDLGDQYAHVCAVDATGEKTEEARIRMTATGLKNRFGSMARCRIALEAGTHSAWVSRLLKACGHEVIVANPRKLRLIYENDRKNDEADAEYLARVARMDPKLLAPIQHREAKTQADLAVLQSREVLVESRTKLINHVRGMAKAMGGRLASMSAEAFGKKAQVSIPDELRAALAPVMEIIRGLTQQIREYDQWVQKAADERYPQTAHLRQVAGVGALTAMAYVLTIQDPGRFSKSRTVGAYLGLRPKQAQSGQGDPQLRISKAGDGYLRRLLVGSAHYILGPFGPENDLRTWGLKLAARGGKNAKKRAVVAVARKLAVLLHRLWASGKRYEPIRPVKRALSPVPTAAAGSRSSPSVTAAIGT

SEQ ID NO: 79242 - protein, 369 aa, unidentified
MLFVGIDLHTNCFTCCYLDKSGGKRLETFDLKAEGLQRFFATLTKDTHVLVEATINTFAFVERFQDLVAQVVIANTHKLKIISFTDKKTDKVDAEKLARVIKTQVLSGEQQASPVMIPSHLVQNLRSLFSTYQLLRKQIVSTKNRIHSLFAQNLMPFTKKYIFGKNSRALLREIAMEPTLSYQINFLFDELEHLEWKTDQFVEKILVTAHPFIHEIEILTSMSGTSTFTAAAIMADIETVARFPNAKAFTSYLRSTPRIESSNTKTIIKSTNKSGRKLSIVLLSQSLNHFRNADPFLKAWNNRLCEFKRKGVVRMGLCRKAFTQIYQMLKKDEPHRYSNTILHNKKMNEYRMFLRSYGISGLFEQKKGA

SEQ ID NO: 79243 - protein, 303 aa, unidentified
MKDTVSRTGSEDQKPARSFIGCDAHRKYSVFVALDEQGKTTAPLRVEHQPRELRNFLRHLPAGTAVAVEATGSWYWLVDEIEAAGLIPHLAQPFAAKRMTGMGGKKTDSVDARCLATLLRNGTLPETWIPDSANRDLRNLMRTRLSLREYQTGLKNRVLAAINAYGLRDPAEDADLFRGKGRVQLAVYKSQLPKHTQEAVIRQWDLVDALEQQVENLERQLKEELKPVADAQRLKTLPGVGAVLSATIYLEIGAVTRFACAERLASYAGLVPVVHASGGRVFHGPTTNRSNPYLRWAFVEAAN

SEQ ID NO: 79244 - protein, 408 aa, unidentified
MRVVFGIDVSKASSEVAILVNGEKVHNYTMSNDAIGFSRLLGDLKTVHKPEIIFEATGVYSRRLQAFLDEHGYAYTRLNPLEAKKQLDSLRVRKTNQIDAEKLAQSQFVLNRKPTYVQEEVYQNLRDLSRFYQNLTEDIVRAKNRLHKVLQVTFPELENILSTPTGEQYWNLVITFPCKDFVLDLSKNELSKSIRQSTSKRISDKRVAYLAEKLTALANQSYCAVKKTSPILEEVHYYAKELLRLSEQRQAVLDQMVELAQPLPEYDILLSIPGIAETTATSIIGELGDIRRFQSANQINAFIGIDLRHYESGNFLAKEHITKRGNPYARKILFKCIHNIASVSHTNPCHIADFYENEKDNRKRLQRSRTRLPPYIVSFGQCITSLCITNFTITLQPKIGKTVYALSL

SEQ ID NO: 79245 - protein, 438 aa, unidentified
MTTTTIRYVGLDVHKRVVEACIVDQAGKVLHRERFALNRGVLELFATKVLQPSDHVALEATTNCWAVADALRPHVAKVLVSNPMATKAIAQAKVKTDKVDAHVLAQLLRCDFLPEVWQPDEGTRQLRELTGRRSALVGQRTMMRNRIQSVLAMRLIEAPSRLFYGDGLEWLARVEIDTQARLLVDSDLRQLEFLQKEIDALDAELARRGHASDPVKLLMTLPGVDVATAESVLAAWGDTKRFPDGDHAASYLGLVPSTKQSAEHCYHGPITKRGNSQARWMLIQAAQHLDRNPGPLGHFFRRLCRKKNRNVAVVAAARKLAMIGWQMLTSNEPYRYAMPRATGDKLARLRVRATGQRRRGGASKGPKAVAKLPGGSYTVRSLSGVCHSEGLPPLGPLSPGEQRTIQQVGCENLVAQISQPQLLPKAVRRRTKQVATHD

SEQ ID NO: 79246 - protein, 395 aa, unidentified
MFIVGIDIAKRSHEAIIIAEDGQVVRKAFSFRNNCTGYNLLLEQVRRLTLVKSQIVFAMESTAHYWLALYARLLKDGYAVMVLNPIQSHSLRELYIRKAKTDARDSLIIADLVRFGRCKASNVPQDKILALRELCRSRAYLVDMAADLKRKLIALLDRIFPEYESLFESVFSKASIAVLSKYSTPQKAKNAHLGKLTDILMESSNGHFGEWKAHQLKEAACSSFGIDDSGGVYSTLLGMFLEQILSLTAQADSLEKQISVFFQEFNNPLNSIPGVGTILAATILSEIGDITRFSSADKLLAYAGLDPSVKQSGEFKSNQNRMSKRGSPYLRRAIWLASTVAVHRDPMFQTYYEKKISEGLHYMNVIGHVSRKMTAVIFAVLRDGQPYQPILQSAG

SEQ ID NO: 79247 - protein, 346 aa, unidentified
MLLIGCDFHPSWQQVCWLDTETGETAENKLVHVSGDAERFYRRFTTPARIGMESTGNCQWFVELVTRLGHEVWIGDAAKIRASDARQQKHDRRDAALLLQLLVEGRFPRIWTPSSEQKDQRQLLIHRYKLVRLRAQVKNGLQHLAMNQGVQKKRRLWSEAGQTLLRELPLKPWAGRRREDLLQLMSTLDEQIALLDQAVAEAAEKNENARLLMSQPGVGPVTSLAFVLTMGDVHRFPRGKQVASYLGLIPREYSSGGHQRLGSISKQGNRFLRMLLVEAAQIAVRYDPQFRSEYLHRCHTKPKGVAKVAAARKLAIRLYWMLRTQKPYPEIVRSESSSRVPLVSAS

SEQ ID NO: 79248 - protein, 408 aa, unidentified
MTIVGIDVSKGKSMVAAMKPGGELVAAPYEVRHSDIELSHLALDVLCMEPDTRVVMEATGRYHEPVAALLHSEGIFVSILNPLLIKQSGAGSLRKVKSDPKDALKIAKYGLDNWSTLLEYTPMEAIRQQLKLCARQCDLYNKSIVMLTNNLISLSDKTFPGVNELFSSPEKADGHLKWVDFYRRFWHCDCINRMSPDAFEERYKKWCKSKGYHFSTDAADALYAASCRPYTTLPRDNNAKLLVTVAADQLIALRENQSKLEAEMLNFCKQLPEYETVMAMYGVGKSTGPHLMAELGDVRRFLHRSSIVAFAGVDPGVVGSGKMQLSSVTTSKRGSPQLRKALFQVVSTYVKCKPENEAVYQFYAKKRDEGKPFFVCTTAAANKFLRIYYARVKECLNAVESATQVEEG

SEQ ID NO: 79249 - protein, 392 aa, unidentified
MNPCALGWDNHRKFSKVSVMEQTPEGEIRAVERARLEHDDKDAMRAWLSHLDPEIPVALEATFGWPWVADLLEELGHPVHLGHPPIIRALAKHEAKTDRCDSDRLGKFQLRGILPESYLAPPEVRQQRERTRYRMALSSLRTAVKNRAQAILHRHGILHDFSDLFGKAGRRFLEDLTLPEGSQQALKGYLALLDTLALMIHEVEQWMAKNLEEDELVRLLTTIPGIGLILAHVIYAEIGEIKRFPTFRHLASYAGLAPISDDTAGREGPRHCSAACNHVLRWAFVEAVHGVQRTKGPHGFRLRQLNARLSGQGRQKGRKSSAKVAVAHELSKLVYVVWTRRVPYTDTPPPRPGSREGRRQPKEFPTVKTTLRSNQPRHPMVRRRATVGQTRK

SEQ ID NO: 79250 - protein, 316 aa, unidentified
MKNYIGIDISKSSIDVYDGKKSYKFENNESGFKSIVSLVEEMKETVFIFEPTGIYSYGLTEFCDKNSIGCVIVSPKVSRDFARSLKVRSKTDKIDAKVLYKYQSHVEPNMIKVPKINHQAIKIQEMLNSYELLKSMIQQFKNQLESISEDNKDLVRLTKKMIKLHEKEADKLFAKIEKLLFKDESIKRKYEAMLSIPAIGNKSALYLIAFFIKYPLANAKELTALVGLDPVMRDSGTYRGKQRISKHGGQQLRNLMYLPTLASLRFNDRIKVFYTRLTTNAKSKKSAVIASMRKLILMAFSIFKSEQNYQYLVVEN

SEQ ID NO: 79251 - protein, 357 aa, unidentified
MSSEKYIGLDVHQATISVAVTDSQGKVIMESILETKASIILEFFAGLRGSLFVTFEEGTWAAWLYDLLKPHVTEVLVCNPRKIPLHKQGNKSDKIDARKLAERLRLHDLKSVYHGENGIRMLRELARSYLTVVKDLSRVMNRLKALYRSWAIPCAGRDVYYRRHRSQWLEKIPEAGTRRRAEQLYQQLDMLQHLRQQARRELLAESRKHAITARLRKIPSLGPIRCALAVALIQTPHRFRSKRQLWTYSGLGLETRDSGEYHFVHGQPRRRKKQATIRGLNKDYNHDLKGLFKGAATRASVKPGPFQDFYQRSLAKGIKPTMARLTLARKIAAITLTLWKKGAPATPLGWLYDSETE

SEQ ID NO: 79252 - protein, 339 aa, unidentified
MNTTTYGLDIAKSVFQLYWVDGGNGEIVNRRFHRDELILFLAQRPAGRVALEACGSGHWWARKIASLGHEVVLLHAKFIRPFVQTNKTDAADARAIWTAMNQPGMRTVAVKTEDQQAMLSMHRIRSLLVKFRTMQVNQLRGLLYEFGVTLRAGRVAGLGEIRKRMADLESELPVMLWSSLQDQLKRLDEMDQDIDRLEKQMGNWQKQEAACRAISEIPGIGKLTATALVATMGDAKAFKSGREFAAFLGLVQRQHGTGGKVRLGSISKRGDSYLRTLLIHGARTVTYKAKVPTAWQTSIQARRPMNVAVVALANKMARTAWAIMAKGSKRPAVPPVFLS

SEQ ID NO: 79253 - protein, 308 aa, unidentified
MNEFKPEASRITTVSARLALPEHGCYAAYVGLDVHKETIAVAVAEPGRQEPRSEGEIANRPKSVEKLVRRLSERFGGGVIQFVYEAGPCGYGLHHQLAGTGHACVVVAPSRIPKAPAERIKTDRRDALKLARHARNGDLTPVWVPGPEQEAMRDLTRARGDMKVQERKARQQLSAFVLRHGHAWSAGKTRWTAAHYAWLESLKFAHDWQQVVLQEYVDAAKAATRRVADLRAQMERALASWSMAPVVVALRGIDTLAAMVLLAELGDITRFDSPRQLMAFLGLVPSEHSSGGRRRQGGITLTGNGHAG

SEQ ID NO: 79254 - protein, 422 aa, unidentified
MNESKQFKATIGLDWADQKHDLWIRPANESKSEHLRLEQSPEALHEWAAKLRKRFDTGQVAIGVETSRGPVISALMSYDFIVLFPINPKALKDYRAAFSVSGAKNDRTDAQLIEEFIRLHSEKLKALQPDTELTRKLSGFVQDRRHLVDERTRVVNQVHSKLKTYYPLAETLIGSEMNSRLAAEFLSRWPDLESLLAAQASTLRAFFYKHNSRSAKKMEQRLEAIKTAKALTSDPGIIEPARELVLALAGMLKCLHKSVARLEKTIELAMDQHPDAPIFRSLPGAGPALAPRLLVAFGTQRDRFQSAQEVAQFYGVAPVVIQSGNSELVRVRRRCPKFGRQTFHENASCVAKTEPWGRTYYEQQRKKHDDKHHQACRALAYKLIRIYFSCWKTRTEYKSNTYLNALQKHGSPLHNRLNRIGE

SEQ ID NO: 79255 - protein, 411 aa, unidentified
MIKENYIYVGIDLHKETHTAVMIDCYNQKLGEITFPNRPADFPKLVAKVKKCNTDGKTIVFGLENAYGYGRALAVWLIDKGYLVKDVNTAISHRQAKHRGAMYRKSDSDDAEAIALATLNMLDKLPDAYPNDAYWSLGQLVHRRDNIMKQRTRLVNQLHEQLCIAYPSYKQFFNDISRPTALYFWEHYPSRKYLKGKSVEDLRAELVPVSHNKCSTKTCEKILDAVASDKVKNNAYQDARDMVTLSIVSDLQHYDIQLAEVDKMLEQMYKMLGCTLTTIPGVNVITAVKILAEIGDIKRFSNANKLAQFAGIAPLHLSSSGKGKDVATKQGNRRLQATIYFLAIQMVQVSSKGTPRNSVVRAYYEKRKAEGKTSQQTLICISRRLISIIYGMLKNGTEYRMPVVENVGENR

SEQ ID NO: 79256 - protein, 417 aa, unidentified
MKKNNKFGKKSELRTRPAKSGNTGQRETKEVLAELVGRLKEKLNPKVASVSPTEEHPRGGLKPNLDRLTVGVDLGDQWSKYCILDLEGETLAEGQVRTTQEDFAEFFKCLSSVRVVIEVGTHSAWAQEVIGDCGHEVVVANPRLMEGSKRRKRKNDRIDANKLARLGRVDPQSLHPMKHRSREVRQDLVILRARDALVAVRTELINATRGMVKSMGRRLPSCSSRSFASQAEQGLPVEIREALLPLVRLAKALSHSIKAYDRKIEELASEKYGHTKLLRQIKGVGPITSLAYVLTLENPKRFTRSRDVGPYLGLVPKQEDSGESQPQLGISKAGDRMVRKLLVGSAQYILGRFGPDTDLRRYGLKLCQRGGKNAKKRAVVAVARKLAVLLHRLWVTGEVYEPLRNSLSLAGVAAIAA

SEQ ID NO: 79257 - protein, 429 aa, unidentified
MQNESTPDARGPVFCGVDTHADSHWLCVLDWRGRKVLSRQFPADAAGYEALAGAIAAAGEPACVAMEGTSSYGAGLTRHLASLGMPVREALSPARMQRRRPGQGKCDEADAERAARAAMSGSRLGTPKSQDGWVDGVRCMLAARSGAVKARTSAINTARSLLTTAPEGLRSRFRGMGGPRLMEELPSVRAEGALGAALGALADLWAAARDAALDMERAIEASLEENCPALLAMYGCGPVSAAKLAVAAGDNPGRLRSEASFAAICGACPIPASSGKTVRHRLNRGGDRQANSALHEIARQRVMRDPETAEYAERARARGKSDREVMRCLKRYVAREAYRALMRPHEIRRPEDASELVAARRAAKVSQVRAASILGTSEKYISMLERGQRELKPIRRAYEAWVEAGLPLDWDRQAFEAERKMDSKKHLAK

SEQ ID NO: 79258 - protein, 391 aa, unidentified
MVCVGIDVAKDKHDCCILDSDGTIRADCITIPNNMDGFKQLLQTIRDCTKRSDKIKVGLEATGHYSYNILGFLLDNDLAVYVMNPLHTNLYRKSLSLRKTKTDRVDARTIATMLLSDVDLKSYTDTAYHNEELKSLTRYRFDKVRERAKLKQSVSRLVTILFPELEKLVPSLHIASVYALLSEYPGAKQISEIHLTKLTNLLVTASKGRYGKDKAIQIRDAARTSIGSVMPAKSLELKHTIKLIRELTSEIDEIEVSIQKIMDELNPPILSIPGVGIQSAAMILAEIGDFSNFESPDKILAYAGCSPSTYQSGKLTNCYAHMEKRGSRYLRYALYNATKYVCYWNPVFAEYLAKKRAEGKHYNVALSHATKKLVRLIYALQKSGKAYLTAA

SEQ ID NO: 79259 - protein, 374 aa, unidentified
MTSLKQGIIQDNMRVVFGIDVSKASSEVAILVNGEKVHGYTISNDAIGFARLLGDLRTVHKPEIIFEATGVYSRRLQTFLDDNGYAYTRLNPLEAKKQLDSLRVRKTDQIDAEKLAQSQFVLNRKPTYVQEEVYQNLRDLSRFYQNLTEDIVRAKNRMHKVLQVTFPELENILSTPSGEQYWNLVIAFPCKDFVLDLSKDELSESIHQSTSKRISDKRVVYLAEKLIALANQSYCAVKKTSPMLEEVRYYTKELLRLSEQRQAVLDEMVELAQPLPEYDILLSIPGIAETTATSIIGELGDIRRFQSANQINAFIGIDLRHYESGNFLAKEHITKRGNPYARKILFKCIHNIASASHTNPCHIADFYKKRKRQS

SEQ ID NO: 79260 - protein, 376 aa, unidentified
MEHHSEAFVGIDTSKLKNAVAIAEGGRNGEVRYLGEFDTSAAATRKLVEKLAGKYGTLSFCYEAGPTGYGLHRQITGLGQECAVIAPSLIPKKSGNRVKTNRRDAEGLARNLRAGELTAVWVPDERHEAMRDLSRAREAAASDMKRTRQRIASMLLTKGLHYPGKKGWGKAHRTWLASIKLEHRESRIAFEELIAAEREAGARVGRLEQAIREAVPGWSLAPVVVALQAARGIDLVTAVTILAEIGDLTRFASARELMAYLGLVPSESSTGDRVQRGAITKAGNGRVRRVLTESAWCYRHPPRIGKEKQAKVEAAPEAVRVIAWKAQVRLSGRYRALMKKGKQKNVVTTAIARELAGFIWAIGQAMAGTFKAEARG

SEQ ID NO: 79261 - protein, 397 aa, unidentified
MNEFSAQMQKESAASTQAMAVMLHRGVQAERYALYVGLDVHKETIAVAVAEPGRGEARYVGEIANTPKAVKKLVDRLAGEVSGELMLFCYEAGPCGYGLYRQLLDLGQACEVVAAPSSGRIKTDRRDAMGLARLLRAGELRRVWVPDEEQEAMRDLSRCRSDFKGQEQKARQQLNAFVLRRGHHWPRGKSRWTQAHYNWLESLKFEQPAQQVVLQEYVEAVRAATVRVAQITEQLMAAIRQWKLGPVVDSLVALRGIDKIAAVTILAELGDISRFGSPTQLMGYLGLVPGEHSSGRRRRQGSITCAGNGHARRMLVESAWSYRFPARQTMHLKRKAQHASGEAKAIAWRAQKRLCGRYRALNLAGKNQKVVCVAIARELTGFIWDIVCHEMPRVDTV

SEQ ID NO: 79262 - protein, 310 aa, unidentified
MMDATVVGIDVSKERLDVHVEPAGEAFAVARDAAGLEALVERLKPLSVTAVAVEATGGFETVVAASLCAASLPVVVVNPAQVRAFAQALGKRAKTDPIDAAVIARFVAATNPEIRPLPDAETTMLSDLVTRRRQIIAMMVAERQREKRAPARMKKSIARLTKALQKELTAIEEDIDDAVRGSPVWREKENLLSSVPGIGLTISRTLLADLPELGTLGRRQIAALVGLAPFTRQSGQWRGRSFIGGGRAAVRSTIFMGAMVAARCNPQLRAFRHRLIAAGKPKMVALIAVARRLLTILNAILRDKRPWQNA

SEQ ID NO: 79263 - protein, 324 aa, unidentified
MFVGLDVHKKYTEVAIVDEDGVVTEQERIENEPGRIEEFSNRLCNATMVLESSSSWYWLYEILSRRHRVVLSNPAKTKAIASAKLKTDKVDALMLANLLRGGYIAESYVPSRRVMSLRELVRYRANLVRMRGSVKNRVHAYLLMNNIRIDYSPFTKGFLEELRKVDDARVEGYIRIIERLNLEIHEASKRICNEASSDESARLLMTIPGISYYSALLLVSEIGDVNRFPDSAHLVSYAGLASSTHSSGGSTYHGRITKAGSPYLRWVLNQCTWVHIRSEPEGNVASFYRRLSGKKGNSKAMVAASAKLLKIVYWVLKEKRPYHG

SEQ ID NO: 79264 - protein, 414 aa, unidentified
MFAVGVDVSNGRSTVAVLQSKTKVILKPFEVPHTPEALGRLVDKLNSLDGETRVIMEHTGRYYESIAMFLDSAGFFVSALNPLLFKDYQEGISVHPVKTDKADAVRIAKFGLDKWDLLRQYEPMDTIRYQLKTLNTQFQMASKSKTAFTNNLIALLEQNYPGIRKHFPSPARADGSEKWVDYVGTFWHIDCVRKISLKAFAERYLKFCQKHGYNFSEEKAAELYCHAHSTIALVPKSDISRLMVREAVNQLSTISHTVETYRAEMNRLASQLPEYKTVMGMYGVGPSIGPQLMAEIGDIRRFPQRNSIIAFAGIDPEKDDSGDKVSKTGKSTKRGSPYLRKTLFVIMDILLRLQPADDPVYQFLDKKRSEGKPYYVYMTAGGTKFLRIYYGKVRDCLIEKGLWDKPMIESGNPD

SEQ ID NO: 79265 - protein, 335 aa, unidentified
MHYLYYVGLDVSKETFDASLVAFEDANEMAHRKFANSRKGICSCLHWVEKRHGILLDDVIFCAEDMGSYISEMAVCASDRTLTFNFSLISPLVIKYSMGIARGKTDRVDARRIAEYAITHYRKIALYLPAEKELCQLRTWLILRAHLAKQRVAKLVLLEKLDYKEKFADVSIQRSMLQEEIAYAETHMKTIEREMKELIAADSNICRNYKLLTSIKGVGPITAIVMLCSTLNFTKITDHRKFACYCGLAPFEHSSGTSVHGGCHTSSMANRDIKVQLNRSALIAIRCDPQLKAYYERKVAEGKHKFSVLNAVRAKIAARCFAVVRRGTPYVALQI

SEQ ID NO: 79266 - protein, 352 aa, unidentified
MLKYALGMDASKKDIHVCLSVIDSGQQVKVKASNKFGNSIQGFRDLLAWLNRHKKESDIPLVNVIEATGVYYEACALFLFKAGLNVAVVLPNKAKKYLQALGLRSKNDKIDAAGLARMGAEQYLELWQPMDEFFYTLRAMTRHHQTLQELRTSINNQIHADEHSIYSIKSITKQNKKLKVAIEKQLKEIEQAIHDHLYSNAEVAEKINYITGIKGLGYMTVAAVLAETNGFVLFKSIAQLTKYAGYDVIEDQSGKHIGKTKISKKGNSRIRRALHMPAFNMIRYEVGNFKPFFDRIFEKHHQKMKAYVAVQKKLLVIIYTLWKRNEAFKPGGQNKSSGNVETEPSFALTEDH

SEQ ID NO: 79267 - protein, 444 aa, unidentified
MDRIEPVVAEPVSKAVESARESAVESFASLTHFGGFDWAMSEHQFAMVDRDGSVLMNLRFNDDAEGWASLRKAIAPYPHLGVAIETSTGPAVERLLELGVILYPMNPRAAERYRDRKSPSGVKSDCLDAWCFADALRTDGHGWRQLRPSDPPTAELRILCRDQISLIEQRTALVLQLKAALHEYYPTALEAFDDWTKPGPWAFVLQFPDPHRLLGASKHKWEKFLHTHKLYRPETAAKRLELFAKAKAFASPSQAVTSAKSLLAISLAKSLCTLADQLEAYRKRIAELFNTHPDHDCFGSLPGAGEKIAPRLLAELGSDRDRFESPESLQMYAGTAPMTRQSGKSSITRIRWLCNKTLRSTVHHWANLSRASCAWAEIYYQQKKKSGMSHAAALRCLGQRWLKILWKMWQTRTNYDEALHTRNQIKHGSWVIALKHPPQPATAG

SEQ ID NO: 79268 - protein, 348 aa, unidentified
MAHFVGLDVSVKETSVCVIDDAGKVILEQKVPTEPADIIALLTSLGVTYGRIGVEAGPLSQWLVNALTASDLPVICVETRHMKALLTAQQINKTDRNDARGIAQMMRVGLFKPVHVKTLAAQEQRMLLTSRKLLQRKLLDLECELRGTLRNFGLKVGVVSGGRYEARIRELVVGFPRLAAIAEPLLNVRRVMRQQLAVLHKMLLNTVRDDPVCRRLMTAPGVGAVVALTYRATVDQPQRFVHSRAVGAHVGLTPKRYQSGETDYDGRVSKTGDALLRTMLYEAAHSLLIHSGKWSWLKAWGVRVAQRRGMRRAIVAVARRLAVVLHRMWVDGSEFRWSKDSAAVPTVA

SEQ ID NO: 79269 - protein, 358 aa, unidentified
MSEITRVGVDLAKNVIQVHAVDTAGKVVTNRQLKRDKFIEWCLQLPAMCLLAMESCSGAHHWARKLIELGLDARIISAHLVTPYRQQGKGGKNDANDAAAICEAASRPSMRFVTIKTIDQQSMLSVHRLREGYKADRTACINRIRGLLSEFGLVFTQSATTLSAQLSATIEDASNALSGLARMAIERVQMQWRELDDHIDWCDQRIAAHLKQNEQVRQATHLMGVGPVTASAVVATVGNFKQFKSGSQFGAWLGLTPRQNSSGGKNNLGGITKHGEVYLRTLLIQGAKSAVMTAHRRDDPISKWVHQLREKSGWQKAAVALANKNARILWAVFTKNVTINPGHISVKPGSPQAVMYAA

SEQ ID NO: 79270 - protein, 367 aa, unidentified
MTCFIGVDLHKTQFTVHTRTENRVESMDQIIQYPVTNEGYANFLKRIRNLKTRGYEVKIGVESTGNTRYFKSQVEKAGAEVTVINTLKFKVINESTKKTDKHDASTISEFLSKDMLPESYLCNKETENLRRLLKSRERLVRSIVGQKNEIHALLVSMGLPDELRCLQSKKGRQKILDTLESNNDYVLEAQSVKLMIAIIEQMENGVKTVEKQLTELTEEDEMVNRLMTIRGCGKITAWTIRAYTEDIGRFATAKKYAAFCGLVPWVQDSNETIHHGKITKRGPQELRTSFVQLVLGIHRCKDTSEWRMMQRYEYMKKNKGSGKSIVATARKMAEIVWTMLSEKKDFDGKKMVGNYKRPNLVEQALSD

SEQ ID NO: 79271 - protein, 355 aa, unidentified
MNDAKYIGLDVHQATISVAVLDSAGTLVMEAILETKAETVLQFIGGLRGSLHVTFEEGTCAAWLHALLKPHVTQVLVCDPRKNALIRAGNKSDRIDARKLADLLYLNKLNPVYHGETGIRALQEVARSYLALTRDTTRVMNRLKALYRSWAIPCAGQRVYAPRYRSEWLAKISEAGVRRRAEIYYQQLDALRSLREQVRRDLLAEGRKHSAMKLLRQIPSIGPIRAVLLIALMQTPHRFRTKRQLWAYCGLALKTSTSGEYRIVEGQLKRSKKFLAIRGLNANHNHDLKNIFKGAATRVAAVPGPFQEFHAGLVARGMKPTMARLTLARKIAAITLIVWKKGVGFDAEHLKQQAA

SEQ ID NO: 79272 - protein, 423 aa, unidentified
MEVLHECVAGLDVHKDNVVGCVRTVSGDKTTREHRTFDATTDGLLALLEWLTLCRCELVAMEATGVYWMPVWRILSDGAFKLIVANAAHIKAVPGRKTDMKDSTWLADLAAFGLLKASFVPDEEQHELRALMRTRKQLVREQTRHVQRIQKTLTEANIKLDSVISDIMGRNGRRMIEAMITGVRDPRKLAALADQRLKATPKQLYDALHGRLTDHHRFLLQLHLGQWDTLDATIKGVDREVATRVFRMDTEGTAAKANFSDLIDQLVTIPGVSRLSALTILSEIGTDMSRFATAGHLVAWAGMCPGQNESAGKRKRTRLRKGAPWLKTMLVQCAWAAKRKKDSYYKAQFFRLQSRRGPQKAICAVAASLLTAIYHMLKDGTIHQDLGSGYFDQRPPEIKVKRLVNQIAKLGFEVTLQPIAKAA

SEQ ID NO: 79273 - protein, 410 aa, unidentified
MPNLPPSSVTRFFGVDLHKHFLFLAAVNSLQEIVQKPIRIPLEDWLVWAKKNLLPTDVLAVESTTNSWDFFDGISGLVARVEIANAGKLPWIGLSRVKTDKHDAIKLAKLCAAGLIPQVWVPPFHIREARSLLAHRRRLVGIQTMTRNRLHSLLHRHMLELPDGQPFSPKNLPWWNSLPISPTEKILLRHSLEILDHLKPQITQLDAEIARLSDSPEWQDPMTFALQIPGVGVTVGLTVLSAIGDISRFDAPKKLVGYSGLGASVHASGQTFRQGRITKSGRRELRTALVEAAWSAVNSDPYWKEEFARLSRRLDTGKAIVAVARRLLVILWHVLSKRQSYRHCSDIQLATRMMRWSWTIRRHHPKAVASRIFIRRPLMTLGAGKELAGFRYNNKPRGLASEEEVAGLAP

SEQ ID NO: 79274 - protein, 356 aa, unidentified
MSRDIKYIGMDVHKEAIVIAVRNTRGHVVMESIVETKANSILQFIHGLQGELQVTWEEGTWAAWLYDLLKPHVHQVLVCDPRRNALLKEGSKNDKVDARKLADLLRTGMLRPVYHGEHGLRTLRELARTYQTLSQDLNRVMNRLKALYRGWGIACGGTQVYAPRYREEWLGKIEPVGVRRRAELLYQQLDGLQALRRTLRPELLAESRKHKAAKLLRQIPCIGPIRAARLLALMQTPHRFRSKRQLWTYSGLGIETRDSAQYRFVRGELQRAKKPQQIRGLNRNHNHEMKDIFKGAATRASCGVGPLRNFYVALLDKGMKPEMARLTLARKIAAIALTLWKKEERFDAEPLKMQAA

SEQ ID NO: 79275 - protein, 365 aa, unidentified
MLIHVPPETRVLAMDVHANTISTGLLEPGSDSPLLDKISTDEESVRRLIARFEAPARVWACYEAGPTGYELARILRAAGMHCEVIAPSLIPARPGDRIKTDRRDARRLALLFRAGQLSAVRIPTTAEEAVRDLCRARADMVIDRTRARHRLGKFLLRHGRVWRGGDNWTLRHQAWIRSQRFAERALNETLAHYQATLSAREAAVDAIDADLAAWYDRAPFADAVHRLAAYRGVTELGGLSLAAEVCDWRRFPTAGMFMAFTGLVPSEDSSGERTRRGGITHAGNAHLRTQLVEAAWAYKAKAQVGATLRRRQEGLDPAVAARAWAAQLRLCGKFRRLDARKTNRKTVVTAVARELAGFVWAEMSA

SEQ ID NO: 79276 - protein, 412 aa, unidentified
MEVIHERCCGLDVHKRTVVACIRIQKAEGGAHMDIKTFSTMSFDLLILRDWLTASRVTHVAMESTGVYWKPVFNLLEDQFHILLVNAHHVKALPGRKTDVKDCEWIADLLAHGLVKGSFIPPEPIRDLRDLTRYRKSLIDERIREVNRLHKLLESANIKLASVATNVMGISGKDMMHALLGGEADPEILAELARGRLRKKIPALKQALEGRFRSHHRFMLETILAHIDFLDESIATVTEEVVSRIDPFAQTVELLCTIPGVEKRTAQVIISEIGTDMSCFPSANHLASWAGLCPGNNESAGKRKAGKTRKGDQWLRRALVEVAWAASRTKETYLSSQYHRLVARRGKKKAIVAVAHTILVAIYHILANGIPYQDLGPNYLVKLNETNIKRYHVRRLQELGYEVSITPLEQAA

SEQ ID NO: 79277 - protein, 335 aa, unidentified
MALYCGIDLHSNNHVIVINDENDKTVFEKRIGNDLALSLDCLEPFKDEIVGIAVESTFNWYWLVDGLMEHGYTLHLVNTAAVKQYDGLKYSGDVKDAYHLAHLMRLGILPTGYIYPKEQRMVRDLLRRRMQLVQTASKQLLCIQNQIWRSTGVRVGSNQIKKKDFEITLLSGYLKLAADTNLRIYRSLQKEIQLLEQSVEAAIETPETLDLLQTMVGIGPILGLTILLETGTVERFENVGNYASYCRCVQSLRESNGKKKGEGNAKSGNKYLSWAFSQVAHRAVRHEPKVKAFYDRKYQKRNGIVAIRAVAHKLARAAYYMLKNNEPFNVNKAFG

SEQ ID NO: 79278 - protein, 344 aa, unidentified
MDYFAGLDVSVKETSVCIVDDMGKIVRELKVASEPKSLLAALKNPAYRFKRIGLEAGPLSQWLFSALAEAELAVVCVETRHMQAVLKAQINKTDRNDARGIAQMMRVGLYRPVHVKTLRSQKLRMLLTHRKLLQSKAIAIENDLRGTLRNFGLKVGMVGTVKFEARIKELVENLPDLAELVEPLLIVRRVLREQIVILHRRLLAIVRGDEVCQRLMTTPGVGPVVALTYRATVDVPARFRKSKAVGAVFGLTCSKYQSGEIDRSGRISRCGDEMMRVMLYEAAQSMLRSKKWSWLKAWAMQIARRRGMKKAIVALARRLAVIMHRIWVDGTEFRWTREQAAAAA

SEQ ID NO: 79279 - protein, 341 aa, unidentified
MEHCGIDLHTTSSEIAVIGERGEVSEQARLATTETSLRRWFGGRPAMVICLEAGGQSAWAARILQSLGHEVVVANPWRVRLIAEATLKNDQVDAVTLARLVRADRRLLCPIVHRSAETQRQRGVLRARRVLVSARTACLNASRGILRSFGIRTPAKKAARLAARLADASIPEELVAVVAPLVQLALELDERIEALDEQVEALGASHPEVELFRTVPGVGPVVALSYALCIEDPQRFARSRDLAGYLGLRPKMRESGTTSRFGRITHQGDTEMRMLLVQAAHCLLRARADSDLKRWAVGVAGRVGKQKAVVALARKLAVVMHAMWVRGEVFRPFSKAVDAAA

SEQ ID NO: 79280 - protein, 402 aa, unidentified
MNAVGIDVSKGKSMVAIMRPFGEIVSTPFEIKHTSSDINSLVKLIKSIEGESRIVMEHTGRYYEVLAHQLSEVNLFVSAINPKLIKDFDNDSLRKVKTDKADSVKIARYALDKWQNLKQYSVMDELRNQLKTMNRQFGFYMKHKTAMKNNLIGILDQTYPGVNTYFDSPARSDGSQKWVDFASTYWHVDCVRKMSINAFIDHYENWCKRKKYNFSKSKAEEIYGKAKELVPVLPKDDITKLIIKQAVDQLNSASITVESLRTLMNETASKLPEYPVVMAMKGVGTSLGPQLMAEIGDVSRFTHKGAITAFAGVDPGVNESGSYEQKSVPTSKRGSSDLRKTLFQVMDVLIKTHPQDDPVYQFLDKKRAQKKPYYVYMTAGANKFLRIYYGRVKEYLASLPES

SEQ ID NO: 79281 - protein, 370 aa, unidentified
MRHGSTLYVGLDVHKDSIAVAYATTDGPSDPVHVGAIGTRQCDIDALVRKMQSKSAPLVFIYEAGPCGYWLYRHLTRKGLTCFVVVPSLIPRKPGDRVKTDKRDAVTLARLARSGDLTPVYVPDVPDEAIRDLARAREDALRDLNTGRFRLKALLLRHDIRYVGRANWGPEHVRWLARLVLPTPAQQLVFQEYVRPVTERTQLLHRLAAELLEQAKPWRLYPVVDALQALRGVQFTVAITTIAELGDLTRFDNPRQLMSYLGLTPSEYSSGDRRRLGGITKAGNGHARRVLIEAAKAYRHRAKVSEQIQTRQQHLPAPIRDIAWRAQVRLCGRYRKLLARGKHPNTIAAAVARELAAFMWAIARTQAVSA

SEQ ID NO: 79282 - protein, 341 aa, unidentified
MTEVTTIGLDLAKRVFQAHGASASGTVAFRKKLRRDKMLSFFAAQPRCLVAMEACASAHHWARELERLGHQVRLIAPAYVKPFVKRQKNDAADAEAICEAAQRPTMRFVAVKSEAKQALSAVFRARDLLVGQRTQLINALRGHLGEYGIVAPQGPSHVERLIVEIEDPDSLVPDSARSCLQLLVDTLRALRDRIDLLDAQITARAKQDEGARRLMEIPGIGPMIATAIQALAPPAETFRSGRDFAAWVGLTPVQKSTGGKTRLGRTSRMGERTLRRLLIIGASGVVRWAKRKGVPRGSWLGGMLTRKPPMLVIVALANKIARVAWALIAKGESYRAPAVAA

SEQ ID NO: 79283 - protein, 351 aa, unidentified
MIARSDAACFVGVDLHKDTLVACTIAAKDREISYRKIACVAREKVREFLADLPRPSVVAIETVGFYRWLWTEAEPIVDQVVLADARGCRALAGRRIKTDREDAFNVAELLMTGRLPTAWAPPNDIQRLRDLTRHRNGLSRDHAKTLHRVKSIMNRLNRPGPARMDAAGLQRYLVGSVERIEADDLMMLWQHQRRLVEVEQDRSAMERRIIDVMRAEEFRRLREILESIPGVGLITAATAIAEIGDFSRFPDAKAIGRYAGLTPTGYSSADKHRLGRICKTGSPDLRWVLQQAAWTAIRCDPAMKKVATKISKGSKTRKKAAAVAVARKILVLMWTLVRKDEPYKAREPLAA

SEQ ID NO: 79284 - protein, 348 aa, unidentified
MAVTIVEAARAITGGIDTHGEVHVAAALDEVGGLLGTESFDATPDGYSALFSWLAGFGAVGKVGVEGTGSYGAGLARFLAQAGVEVIEVDRHNRQDRRRQGKSDPIDAVAAARAALSGRAHGHAKSRDGAVEAIRVLVVAKRSARQARVKALTQMRQLTFTAPDQLQCRIKGLPTPQFIVAAKGLRAAQSSDTVTAATKVALSSLAHRIGELDEEVARLDDRITPLLEAHAPELLNVYGVGIDTAATLLVTAGDNPERLRSEAAWAHLCGVSPLQASSGRITRHRLNRGGDRQANRALWVIVISRLASDPKTQSYMERRMKEGRSKREIIRMLKRYVAREVYRSLPRG

SEQ ID NO: 79285 - protein, 332 aa, unidentified
MAAIAGYRARATASGHSMERVITVYEAGWSGFWLARWIMRHGMEAYVIQPSSVPVDRRMRRAKSDGIDAELLLRTLLAWLRGEPRVCSMVPIPDEADEDARRCVRERTELISERVGLTNRIGAVLATLGVSDYNPLLRSRHRRLTELRTGLGEPLPRNAQAKIERLLARLELVLAQIAELERERDAVVEAEASDKASKMIQQLTNLRGIGVQSATVLVREAFVRRFANGKALGSYAGLASSPYSSGGIDREQGIGKAGNRRVRTVMVELAWLWTRYQPGAAQVRWFRKRVGSTGRRARKIMVVALARKLLIALWRFVIDGVVPEGAILKPAA

SEQ ID NO: 79286 - protein, 310 aa, unidentified
MDAIVVGIDVSKDRLDVHVLPSGEAFFEANDAAGAEKLGGRLLELSPALVALEATGGFETLAAAMFGAAGLPVAVVNPAQVRSFADALGKRAKTDPIDAAVIARFAAATGVKAKPLADGQTRLFADLVARRRQIMAMIAAEEARLNRAANRQLKKSIARLLTALRRELKSLDADLDRQIRASPAWRMKEELLSSVPGVAKGISRTLIAELPELGSLTAKQIGALAGLAPFTRQSGKWRGKSFIGGGRPSVRAALFMGALVASRHNPVLKAFRDRLVARGKPKIVAIIATARKLLTILNAIIRDQKPWQNA

SEQ ID NO: 79287 - protein, 421 aa, unidentified
MSKQNVEIAAFIGLDWADQKHVLTLQEAGSDQRHRFTLDHTPEALQSWIQLLRNRFGGKPVAIAIEQTRGGLIYALMHVEFIHIYPVNPQTAAKMRQAFYPSGAKDDPTDADLLLEILMTHRQHLRVWVPDDVRTRSIQLLTEGRRRLVEERTALTNQLTAALKEYFPQAVDWFGDLNTARACAFLQRWPSLQDLKQATPSSIRKFYKTQGYRGQDKLEQLITNIKDAQPLTEDDAVLLASAMMVHALVMAIPSLTDSIERYDQQIAALFDQHDDSTLFGSFPGAGPTLAPRLLAAFGSDRDRFECAADMQQLSGIAPVTEKSGKSIWIHWRLACSKFLRQTFHEFAAQSIFQSDWARAYYDQQRQRGKSHHAALRALAYKWIRIMFRCWKTRTSYDEAQYCNSLKIRRSPLAAELAAAEK

SEQ ID NO: 79288 - protein, 413 aa, unidentified
MRIVYPRCCGLDVHKRSISACLLTPHEEGGTQQQVRRFGTVTRDLLELCDWLTSNQVTHVAMESTGVYWKPVWNILEASVTILLVNAQHVKAVPGRKTDAKDCQWIADLLQHGLLRGSFVPPNPIRQLRDLTRTRASLRQDHTAVANRMQKILEDANIKLASVATDWLGVSGRAILSRMLDGEQDAGTLADLCRGRLRDKIPEMQLALEGRMTEHHRWMLRLQREQLEFLEAQIVKLETKIQEQMQTYQEAVDLCTTIPGIEAIAAANLVAEIGVNMNQFSSAAHLASWAGLCPGNNESAGKRLSGKARNGSVWLRRNLCQAAWAASHSKNTYLSAQFRRLAARKGKKRALVAVGHTILVIVFHMLKNHQPYRDLGADYFDRRNAEQIKRSLIRRLERLGLQVTVQNRTLEPA

SEQ ID NO: 79289 - protein, 334 aa, unidentified
MENIALIGIDLGKNSFHIHCQDRRGKAVYRKKFTRPKLIEFLATCPATTIAMEACGGSHFMARKLEELGHFPKLISPQFVRPFVKSNKNDFVDAEAICEAASRPSMRFVQPRTESQQAMRALHRVRQSLVQDKVKTTNQMHAFLLEFGISVPRGAAVISRLSTLLEDNSLPLYLSQLLLKLQQHYHYLVEQIKDLESQLKRKLDEDEIGQRLLSIPCVGTLTASTISTEIGDGKQYASSRDFAAATGLVPRQYSTGGRTTLLGISKRGNKKIRTLLVQCARVFIQKLEHQSGKLADWVRDLLCRKSNFVVTCALANKLARIAWALTARQQTYVA

SEQ ID NO: 79290 - protein, 365 aa, unidentified
MQKISTMRTSGRKIFKGQLTIGLDLGDRSSSYCVLDEAGEIILEQKVPTTAEAVEQTFKRMPRSRIAMETGTHSPWVSRVLTELGHEVIVAHAQKVRLIVKSRRKDDRMDARTLARLARIDPELLTPVQHRSAQAQLHLTEIRARAGLVSARTALINAARGLVKSYGERLQKCGAFQVSREIGSGLSAGLREALEPLLREVESLNERIKEYDRRIEKMAGEKYPETALLKQVKGVGDLIATTYVLTIEDPHRFRKSRDAGCFVGLQPGRRNSGESEPQMHISKEGDEYLRKLLVQGAHYILGPFGEDSDLRRWGQKLAARGGKNGKKRAVVAVARKLAVLLHRLWVSGEVYEPLRNSQKAITVAA

SEQ ID NO: 79291 - protein, 387 aa, unidentified
MPQPNDLSRSLVALDQDSTIIAVVEMSQSSWLVGGVLPGIERQPRKKLEPSPERLLALLHRWRDESVRAGRTITRIAVAFEAGRDGFWLARWLEARGVEAHVIHPSSVAVSREHRRAKTDRLDTELLKRGFLGWLRGERGHCSMARVPTIAEEDAKRPNRERECLVKERTRLVNRMKGTLARLGIRNFRPTLRNAAEHLAALSTPEGSPLPPNVAAELERDIARLRLVIGQIKQIEEARRQRLEEQPERGPHAMVGLLARVVGIGIETADMLVHEVLSRPMRDRRAVARYAGLTGAPDESGAKRREQGLAKAGNARVRRGMIQLAWRFLRFQKNSALAQWYQARTADRRGATRKTMIVALARKLLIALWRFVTIGEPLDGVTLRPAS

SEQ ID NO: 79292 - protein, 344 aa, unidentified
MVIIGIDPHKSSFTAVVVDRSGVTVASRRFVVNAGTATQLTTWGEQWPERQYAVEGAKGLGRGIAQILAARGEYVVDVPSTLAMKVRVLSTGGGRKTDPDDARAVALTALYHSGLHNVHPEDQTTILRLLSERREDLARERTRVLNRLHQLLRELIPGGVPTGLSADKAAAAMRRIKPGTATDACRRDLAKELLTDLRRIDSNIKANEAQMRDALAATTTTLHEIHGIGRVLAAKLLGHIGDITRFPSADHFAAYTGTAPLAASSGENTRHRLNTGGNRQLNSVLHTIAVCQSRDPGPGRIYYQRKIGEGKTPAEARRALKRRLANVVFRRMIRDHHHALTMTA

SEQ ID NO: 79293 - protein, 343 aa, unidentified
MNEITAVGLDLAKRVFQVHAADREGRAVSRKRLRRSHVLSFFAKLPACLIGLEACAGSHFWARELQALGHEVRLIPPQYVKPYVKTNKNDATDAEAICEALIRPTMRFTAVKSVEQQSVLMLHRTRELLVRQRTMLINALRGHCAEFGIVAAQGRSRARELIELVEDPADDRLPSIARQALQCLTSQVGSIQIQIASIEKKLLAWHYSCEASRRLAEIPGVGLITATAVVASAGNATQFRSARQFAAWLGLVPQQRSSGGRERLGRISKRGDGYIRRLLVHGARARLAWSRRKKEVRSAWFTGLLARRPTNVVLLAMANKTARVAWAILSRGERFENRNGAAA

SEQ ID NO: 79294 - protein, 343 aa, unidentified
MQVSTIGVDLAKNVFQVHGVDNAGKVVITRQLRRKQVIDFFSKIPACLVGMEACGTAHHWAREISKLGHHVRLMPPSYVKGYVKRSKNDAADAAAICEAVTRPSMRFVPIKSADQQALLMLHRTRDLLIRQRTQLINALRAHLAESGLVAETGREGLAQLAEIITDESNREALPSAMKQALQASVDQLAALELQIGALDRAIYAHHRANDMSCRIETVPGIGVIAATAIASTVTDPSNFKSGRDFAAWIGLVPRQHSTGGKERLGGISKQGDRYLRRLLVIGATSVVQHARRHPQKYPWIIRLLARKPAKLVAVAVANKMARIAWAIMAKGGYYRRPELAAAT

SEQ ID NO: 79295 - protein, 407 aa, unidentified
MRVVGLDVSRTFGEIAYLEEGQVRPGGRVMLQHEPLQRFAQGLQPSDAVVLEATGNTAAIVTALKPHVAKVVIANPVQVRLIAEARVKTDKIDAAILAQLYASGFLPQVWMPDDRTQALRRQVARRSQIVRHRTRLKNEIHSVLAAHLIPQCPAADLFGRKGRVWLSEQPLPMDERLAVEQRLRELDRLEEDLEAIDRLLCEAVLQDDQLKRLLTITGVNCIVAIGLLAAIGDISRFAAPEKLVSYFGLNPRVRQSGLQPAQHGHISKVGRAHARAMLVEAAWSAANAPGPLRAFFLRIRGRRGQQIAAVATARKLAVIAWHVLAGQEDFAWSRPALTAKKRRELELRAGMPAKKGHRGPAAEYSLKEVRATEHAAAQVAEQAYVRFVANWRPKKPSPSRTEEASRR

SEQ ID NO: 79296 - protein, 408 aa, unidentified
MERFYLGVDWADQFHQVWVSDFDGKKVVEKKVTQNVEGLAEFGRWLDEQRAKPIELWAAIEKPQGRIVDFLLDHGVEVYPVNPKALDRARDRFRMSRSKSDGFDAYVLAQFLRTDHGHLRALKPNSVQAQELKLLTRDQQRLGHQKTRLLNQLTATLKEYYSRPLEVFSDLETQIALDFLKQNPTPDDLSKLTRRQWNRFAKREHHLGAERAQELWEQLNQPQLTVPEHVVRAKAHLLRVLLGQLDPLRKAVKSYEERIKSFFGSMPTAELFKGLPGAKTGTIIATLWAELGDAKNRWESFRHLQAEAGVVPVTKTSGKSRVVQFRFSCNKIMRHAAYWLAFVSLNRSEWANHYYRDQRAKGHSHHQSLRALGAKWLKIIFVMWRDHKPYDENYHLANIAQQKMRQAA

SEQ ID NO: 79297 - protein, 341 aa, unidentified
MNIITVGIDLAKNVFAVHGVDDNGKPALVKPKVSRADLLPLIAQLPPCLIGMEACSGAHHWARLFRQHGHTVKLMAPKFVAPYRMTGRRGKNDAADAAAICEAVTRPNMLFVPVKEEHQQIILCLHRTRQGFVEERTASYNRLRGLIAEFGIVLPQKVTCLRREIGAQLEDLPGYANRCVADLLTHADRLDERIAEYDRAIAQAARDDERSKRLMKLPGIGPTTASALLASLGGGHDFKSGRRVAAWIGLVPGQYSSGGKARLGRITKAGDNYLRNLLVLGARAVLNSLGDKQDRFSRWARSLQERRGYWRAVIAIAAKNARLAWAVLKYGEDFRLALGKD

SEQ ID NO: 79298 - protein, 416 aa, unidentified
MVDVIVERGAGLDVHEATVVACTLCSAPGGGRPVKATKTFGTTREELVTLVEWLQSQGVTHACMEATGVYWMPVYAAIEASGTITPILCNAAHIKNVPGRKTDVKDGDWFGQLLRHGLVRNSFVPAKPFRELRELTRYRRSLVETQASERQRLIKLLEGAGIKLAGVLSDVFGVSGRAIVRALIAGTATAQEMAKLARGQARKKYAALVKALDVELGVHHRLMLECQLDRVESAEADIATLDKEINRRLLPYAKQMAALMRMPGVDRIVAMTVIAEIGIDVSMFPTASHLAAWAGVCPGNHQSAGKNKPAGARKGNIYLKTTLCNAATSASRKNGSYYKDKYHKLKARIGGGKAALAIAHKLLVAIYHVLRGEPFRDLGENYLNQRNPKRAAARHVKFLEKLGYSVKLELLPQNPM

SEQ ID NO: 79299 - protein, 399 aa, unidentified
MLAVGIDISKSKSVAAILNQDGSMHTSPFEFHHTQPELDAFIKYILNSKQSATILMENTGHYHYPVLKAFQEAGLPVCMVNAYQIKKFGDMDLRKAKTDKKDAVRIARYALEKSYSLVPYTSMEQKYEDLRFLARQYNQRMLTLKTNKVFLLNLLDETMPGITNILPLTTRTPETSLSVLFINRFKSYDRIKKMGKSRFLDAFEKIARKSRNRQTKTYGLAIYEATLRNITTRGENEYTLAAQDQCLELVCESQKAADSIILKMKTLAETLPEYAVLRSMAGVGNRLGPLILAEIGDIRRFHSGKALNAYAGNDAPPYQSGTFESHNRHISKRGNAALRKYCFEVMQALKLTRPQNDPVYLFLLKKEQEGKPYNVAKMAGVNKFLRIYYARAMETLKQQ

SEQ ID NO: 79300 - protein, 312 aa, unidentified
MDAIVVGIDVSKDRLDVAVRPTGETFAVGRDADGLEALIARLAPFAPAAIAVEATGGYETVVAASLAAAGLAVVVVNPAQVRSFAQALGRRAKTDPIDAQVIAHFIEATKPAVRPLPDEATRLLGELVARRRQIVGMIVAERQRQKRLTEKRLQQSIARLLAALQKELSALETAIDDAVRGTPAWREKEDLLASVPGVGKIIARTLLAELPELGSLDRRKVAALVGLAPWTRQSGQWRGKSFIGGGRASVRAALFLGAMVAARHNPDLKLFRNRLIAAGKPKLVALVATARKLLTILNAILRDKRPWHPQDA

SEQ ID NO: 79301 - protein, 355 aa, unidentified
MKNQQVNEKLNFLGQEIYVGIDVHKKQWNVFIMSKLKEHKGFAQPPRAAVLADYLRSNFPGAIYYSVYEAGFCGFWPHRDLIKEGINNIVVNPADVPGMDKEKKNKSDKVDCRKLCRGLRNGDLKGIFVPDRVLLEDRELVRLRSKLVRDIRRCKCRIKGMLNFYGIHTPSSGWSNAFINWLKELEFNTPSGTFALRTLIRELEHITDLKKQIARQLRSLIKQERYAGPIKLLFTIPGIGLVTAMTFLTEVGDTSRFNRLDQLCNYIGLVPSIHGSGDTIHVGSLTPRKNTHILTLLIESAWTAVGKDPALMHTYHKLCTRMKSQEAIIRIARKLVARMRFVLLNHTQYQLRLAA

SEQ ID NO: 79302 - protein, 341 aa, unidentified
MGEASTIGLDIAKRVFQAHGADAAGYVVFRKRLTRAKLLEFFVAQPPCVVAMEACGGSHHWAREIGKLGHTVRLIPPAYVKPFVKRQKNDAADAEAICEAAQRPGMRFVPVKDEAQQANSVVFRARDLLVRQRTQCINALRGHLAEYGHVVPQGTAHVDALVALVEDPNSSVPESARTILKVLIGTFEALGVRIQELDAEITRRAKADLVARRLMTIPGIGPIAATAITALVPAPEGFRAGRDFAAWLGLTPLQRSTGGKRRLGAISKMGERTIRRLLILGASAVVRWASQRGAAEGTWLARMLVRKPRMLVTVALANKTARTVWALLVKGGTYKAPVAAT

SEQ ID NO: 79303 - protein, 343 aa, unidentified
MCSVTSPAVFVGLDYHASSVQVCVMDKEGKVLMNRSCANEWQAVMGVVRQRCGPGANVQAAIESCCGAADLADELICRGWSVNLAHAGYVARMKQSPDKTDYSDARMLADLQRVGYLPRVWLAPEEVRELRRLVHYRQSLAKERKSVKLQIGATLREARQKAPANVNPWTKAWLAWLDQSAVLSANARHITTRRLRRLIALQEEIRQVDKRLERQTRADPLVQKLQTIKGIGLVTAVTLRAEIGRFDRFRTGKQLSRFCGLSPRNASSGQKQADAGLIKAGNNELRAMLIEAAHRLIRCDERWTALAARLSSRGKPTNVVIAAVANRWIRWLFHQMQPGQLAA

SEQ ID NO: 79304 - protein, 392 aa, unidentified
MRKANDMSRCLAAFNQDSTLVAVIELGLKSWLVAGIVPGIERHPLKKLKPNEGALLALLYRWCEEARKAGHPINRICVAFEAGRDGFWLARWLRSRKIEAYVIHPTSVPVSREHRRAKTDRLDTGRLMRAFIGWLRGETDHCSMCAIPTFEEEDDKRPNREHQHLVGERTRIINRLKSCMARLGIRDFNPASRKAPERIAKLRTPEGVPIPPNTLDELEHDMAHLRFIDDQIDEVEKARLARLRKEPNKKSHAMVLLLARVRGLGIETADMLTHEVFLRDLRDRRAVPRYAGLTGAPDESGERRQEKGLARTGNARARRGMIELAWRFLVYQKESALAKWYWTKTADRRKDIRKIMIVALARKLLIALWQMVTTGEIPEGVELHPQDYRIRA

SEQ ID NO: 79305 - protein, 345 aa, unidentified
MPIVGGLDIHRKQLTFDYLDTETGEVKRGQVAPADRAHLRAWLARFAGRDDVAFALEGCTGWRYVAEELAAAGVVAHVAEPADTAFARGRKRHAKTDKTDSRHLRELLAEGRLPECWIPPPVILECRALLELYHDLRAEHTAWVQRIHAVFFHQGAPALGDGALRTGKDLAAVRAAAAAHLSPAGQLQVAVALEVLEALDARMHQVRHQLLSAARHLTGAKVLAARLYGVGPVTALAMTCWLAGKDRFSSARKAVRFAGLDITVWSSDRKGPPGRLSRQGPPVLRWAVYEAGKTHARSSAPDHRYYAQVKDRQDGKRAALSEARKLLRQACHILAELGDDALSAA

SEQ ID NO: 79306 - protein, 365 aa, unidentified
MKKVSRGTGRMEQPEITMGLDLGDRFSHYCMLNEDGDAIESGRIQSTEVALRRHFEGEPTMRFALECGTHSPWISRLLEQLGHQVIVANTRKIRAITASESKNDKNDAEKLARFAFCDPRLLSPIRHRSPARQQDLNLIQARATLVRARTMIVNALRGLVKSAGGRLPACSPQGFQERVEASIPPALAEAARPLLNQIVALNAGIQQMDRGIEQLGNRYPEIPVLRTVPGIGPLIAAAYVLTLDRPDAVQHSRQAGAFLGLRPRQSQSGDSDPQHRISKTGNVYLRSLLVQAAHYVLGRFGPDSALRRWGLKLAASGGKRGKKRAVVAVARKLAVILHRIWRTGNGWQAFPQSQNNTASKSACMA

SEQ ID NO: 79307 - protein, 375 aa, unidentified
MPAKVRFLGLDVHAATIAVAVAEPDGSVRSLGTIANRAESIRTLVKKLGPVEQLRACYEAGPTGYVLYWQLAELGVACEVIAPTLVPTKAGDRVKTDRRDAEKLARSYRSDDLTAVWVPDEGSEALRDLVRAREAAKQDQLRARHRLSKFLLRTGRRSTMGMKVWTAPYMAWVRQIQFAQPAQQATLLDYLHEVDHQDERVKRLEQAITEAVKLASPQVQEVVKGLQALRGIAEISAVTIVSELGHVSRFESARQLMGYSGAVPSEDSSGKRKRRGSITKTGNAHLRRIVVEAAWSYRHRPATGPRLRKRQEGVPEPIKEIAWKAQNRLHKRYLRLAAAGKEQRKIITAVGRELLGFIWAIAVKAELSGKQQMTA

SEQ ID NO: 79308 - protein, 408 aa, unidentified
MTVVGIDVSKSKSMVAAMKPGGKLVAAPYEVRHSDIELSHLALDVLCMEPDTRVVMEATGRYHEPVAAQLHSAGIFVSILNPLLIKQSGAGSLRKVKSDPKDALKIAKYGLDNWSTLREYTPMEAIRQQLKLCARQCDLYNKSIVMLTNNLISLSDKTFPGVNELFSSPEKADGHLKWVDFYRTFWHCDCINRMSSDTFGERYQKWCKRKGYHFSADAADALYAASCGLYTTLPRDNNARLLVTVAADQLIALRENQSKLEAEMLNLCKQLPEYETVMAMYGVGKSTGPHLMAELGDVRRFLHRSSIVAFAGVDPGVVGSGKMQLSSVATSKRGSPQLRKALFQVVSTYVKCKPENEAVYQFYTKKRDEGKPFFVCTTAAANKFLRIYYARVKECLNAAESATQVEEG

SEQ ID NO: 79309 - protein, 347 aa, unidentified
MKILSLDLGKYKTVGCDYELESGQHRFRGSVTAPAALAQMVKEVKPDRVVIEVCNIAGWVSDLLRGMGVEVQVANTSDDAWRWRKVKKKNDRSDALKLAQLSAVNQLREVHIPTIEVRQWRALIAFRQQLVKRRGKVKNHIRDLLITEGQILPRGAKCWTQIGVARLEAMARPLSEVGINELWRGQLDIELRQLREVVQEIAVAEEKLNAIAAADPRVALLRTIPGVGPRLSEAIVALLDRPERFQKARQVSAYIGMVPKQFDSGESERAGRITRHGSRLVRSLLVEVAWAGLRYNPWVRQTYQRISGGKKSRKKIAIVAVGRRLLVRCWAMLRDGTSWRPPAAQTT

SEQ ID NO: 79310 - protein, 317 aa, unidentified
MEQHSTGGTICAGIDVSKAWLDIALTPGQEAWREANTAEGHARLAQKLKAVGVEKVGLEATGGYELAVTEALRAEGLPVIVFQPRQVKAYGAFKLQRAKSDGIDARLIAQCTQAQDTLRDAPSPDLLALAEHLTRIEQIEEDLARARIRRERFRDERLLAQLADEIARLKRLKAAELARLGQAVADRAELAHRMKLLLSIPGLGNRTALALVIRMPELGRLSRTQAAALVGVAPFVHESGRYKGQRRTGGGRARLRTSLFAAAQAAALRWNPALVALYRRLAERGRPHALAIVACVRKLVIFANAVIAKDRPWKTPA

SEQ ID NO: 79311 - protein, 394 aa, unidentified
MTTTTAPGSGSSTCAAVLHLAMELSRRKWKLAFSTGLGQKARERNIDGGDRGALLEEIERAKERFGLAASARVVSCYEAGPEGFWLHQFLCAHGSENFVVDSASIEVNRKRRRAKTDKLDVRALLRLLIRHLLGEEKVWRVVHVPDAAAEDRRQLHRELATLTEERTRIRNRIRGLLQTQGVEVRKGWGWKQLGERLKEQRLWDGRTLGARLMERLARELDRLKVLDEQMATIRRAMAAELKAVAQENGPVAMMQRLMQLRSIGVQISRVLVMELFSWRDFQNRKEVGGCVGFDATPYDSGATHHEQGISKAGNVWVRRVLSQLAWSWVRLQPQSALTKWFMERFANGGRRQRARGIVALARKLLIALWRYVRGGQAPAGALVGKEEVYVLRAA

SEQ ID NO: 79312 - protein, 466 aa, unidentified
MKQSSTKRSAKKSTKTRRVKRALKPMNPFAAGIDIGSQTHYAAVPPHCDERPVRSFGCLTPDLHALAKWLEACKVTTVVMESTGVYWVPVMEVLELHGFEVFLVDARHARNVPSRKSDVQDCQWLQELHTYGLLSSAFRPHKDMLPLRNYWRQRDNLVRQCTRHILHMQKSLEQLNLQLHKVLSDITGVTGMKIIRAILAGEQDPEILARMRHGTVKKSEATFVKALTGNYREDHLFALKQAVQLHDIFQEKIAELDAQTDRYMATLEAKAKPEDLPALPARKAQTKRRKNQPHFDLREQLYRITGVDLTQIDGISAITAQTIITEQGMDMSAFPSEKHFASHLGLCPNHQITGGKIIKRKSRKVQSRAAKALRLAAQSLHHSKSALGAYYRRMRGRIGPAKAITATAHKLAKLIYRTLKHGQAYVDKGQEAYDKHYNERQLKNLARRARRMGCELIIADTGEIVS

SEQ ID NO: 79313 - protein, 444 aa, unidentified
MKVHYYYMGIDVSKGYADLTILNQQKEVIEENFQLDDTFEGHNHLFKILSSFYVQHPGSKLFVAVESTGGYESNWFNTLHKLQSKMELSVARLNPFGVSHSSKASMSRIITDKQSAKFIAEYLISYPEVVNYESEDYFASARRQWTSIKMFTKQKTQLLNQLNSLLYIANPEILSFCRDGVRLWTLLLLEKYPTALKISRAKVTSLSKIPYLSKVRAEEIIENAKQSIASANDEITAETIIAIVKQIISLKKIIAKQINLLENSIDLPNEVELLKSFNGIGTYSAVGLMIEIISVERFQSSKKLASFFGIHPVFKVSGDGKSGFRMSKKGRKEPRNILFNITRYAIAHNDFIKEIYANHLKKGISKLAAMGAIMHKILRIIYGMLKNNTPFNAQIDIDNRNKSNNEEKQSTKLKLERRYQKHDNIAPTSRRQNKLRKENEPIPK

SEQ ID NO: 79314 - protein, 402 aa, unidentified
MNAVGIDVSKSKSVVAIMRPFGEIVSTPFEIKHTASDIHSLIELINSVEGESRIVMEHTGRYYEVLAHQLLEANLFVSAINPKLIKDFDNDSLRKVKSDKADAVKIARYALDKWQNLKQYNVMNELRNQLKTMNRQFGFYMKHKTAMKNNLIGILDQTYPGVNTYFDSPARSDGSQKWVDFASTYWHVDCVRKMSLNAFIDHYQNWCKRKKYNFSQSKAEEIYGKAKELVPVLPKDAITKLIIKQAVDQLNSASTTVESLRTLMNETASKLPEYPVVMAMKGVGTSLGSQLMAEIGDVSRFTHKSAITAFAGVDPGVNESGTYEQKSVPTSKRGSADLRKTLFQVMDVLIKTHPQDDPVYQFLDKKRAQGKPYYVYMTAGANKFLRIYYGRVKEYLSSLPES

SEQ ID NO: 79315 - protein, 364 aa, unidentified
MKKIAYLGVDYHVKTVTITVYLDNEGFYETVRFNNNDKTIAKYLKKLSKQFDIKLCYEASSSGYVFQRKMDKLGYHCDVIAPSLIPRKPGDKRKNDHRDSKKLAENYAKGLLTVVHPPTESEESIRGLVRCHLAMKNNEKRIKNQINAYLLSKGHRWPKSKWTLGHLNWLSTLELCDEYSQMVLEEYLGHLEYITTRVQALKQEIEKLANSEIYAPSVKKLRAFKGIGTMTAMLLIVEITDFRRFPTAGALMAYLGLIPGEETSDSRSKDKAITKAGNTRCRKAIIGAIQHYMKQPRITSPMQRDLEKVDAHSANIAIKCMKRLNKRFWALIHKGKTPNKAKVAVARELVGFVWAMMQPEPTII

SEQ ID NO: 79316 - protein, 343 aa, unidentified
MYYIGLDIHKKTISYCVKDASGQIHREGKIGSTRCELDSWIKTLPQPRMIAMEATIFTGWIYDHLLPHAEKVKVANPLMLRAIAAAKRKNDRIDSNKIADCLRCDFLPECYMASTEIRDRRRTLRYRNLVLKQMTQMKNRISGLLMETGVSYNKQRLHKLGYFMELMSCNEEVNESIRPLLKLSRETVVRSQRLDYALVHSLERDPLLAERLKRLRTIPGVGPITALTWALEIGDVSRFQSVKQAVSYCGLCSAERSSADKLVRMPISKQRNKHIQQVLVEAAKLAPRYSHELALVYERERLRGNKNRATLAVARKMVAYMLAVERRQQDFVPVGELGGTAAA

SEQ ID NO: 79317 - protein, 343 aa, unidentified
MELYVGLDVSLKETSICVVDGSGEIVCEGAVLSEPEAIAEFVKTEAPQAKRIGLETGPTSTWLWHELRALGLPVICIDARHAKAALSMQINKSDRNDAAGLARIMQCGWYREVLVKRLSCHEVRAALNSRAMLVKIKRDLENQIRGLLKNLGLRIGKAGGNVFSRRVKELVSDQSLLQEAVNPLLTVRESVRREIADLHRKLLALAREDKDSRRSMTVPGIGPITALAFHSVIDEPARFRRSRSVGAYVGLTPRRFASGEVDWSGRISKCGDRMLRSYLFEAAGVLLTRVPQWCKLKAWGHRLWKRIGFKKAKIAVARKLAVMLHRMWRDGTDFIWSSKEVAV

SEQ ID NO: 79318 - protein, 387 aa, unidentified
MSPKLNAGIAVIGIDIGKNSFHVVGLDRRGAIVLRQKWSRGQVETRLANLSPCLIGMEACVGAHYLSRKLTSLGHDARLMPAKYVRPYSRGQKNDFRDAEAIAEAVQRPTMKFVATKTAEQLDLQALHRVRERLVSQRTGIINQIRAFLLERGVAVRQGLRFLRIELPRILATPSEVLSPRMVRVIEDLAGDWRRLDERIEGLSSEIETLARRDAGCERLMSVPGIGPIISSAMVAAIGSGDAFTKGRDFAAWLGLVPKQISTGDRTILGKISKRGNRYLRVLFVQAAWVVLIKPKSWDRHGLKPWLEAAKKRLHHNVLAIALANKLARIAWSVLAHGRTFEASKKQRDSTRVAEAPYLPRSARGLETRWRIGLPGRMRTLVTQMAP

SEQ ID NO: 79319 - protein, 347 aa, unidentified
MDHIGIDVHKKESQICILAEGGELMERRIPTQPRRFAEELGARPHARILLESSTESEWVARCLEGLDHEVVVADPNFAPMYATRTRKVKTDRRDARALAEACLLGAYRAAHRLSDAQRHVRARLTVRDTLVRTRTRYISLTRALLRQHGWLVPSGSAEGFPRRVMALLLPGRLRSEVAPLLALMRHLQQQLAYLDERITAVTQTDERVRRLQSVPNVGPVTAAAFVAALDDAARFRRAHEVEAYLGLVPRELSSGETQRRGRITKAGSSRVRWLLIQAAVSMLRLHDPRTAALREWAERIAARRGKGIAVVALARRLAGVLFALLRDGTVYEQARREPRDMHAAVPA

SEQ ID NO: 79320 - protein, 411 aa, unidentified
MQVIHPRCAGLDVHQKTVVVTSMITQQDGTVERERQTFSTMTVDLLVLDDWLRQRQIEVIALESTGIYWRPVFTILEEGRTVILVNARHMKAVPGRKTDIKDSEWIADLLRHGLLQASFIPPEPIRELRELTRYRKTLIQERADEVNRLQKVLEMANLKLSAVATNVLGKSGRAMLDAILGEQQNPLVLAELARGRLRSKLSDLQQALDGRVQPYHRFLITRILAHIDFLEQSLLVLQQEIEKRLIPYAEAVELLKGIAPLQEKAIATVVSEIGVEMDRFPSDKHLASWAGVSPGNYESAGKRLSGKTTHGNPYLRAVLCELAWVVAHTKGTYLSAFYHRIARRRGKKRAILAVAHKLLVVIYHVLKTKKPFVDLGADYFDKLETTHIQRRAVQRLEQLGYQVTLTPVQVT

SEQ ID NO: 79321 - protein, 319 aa, unidentified
MAQNDLHVVGIDVAKDKVDACVRSSAQRQTFPSSAEGRRELIAWLRRHQVGKAVMEASGGYERDWAKALRIAGIEVRIVDPKRVRNFARSAGRLAKNDAIDAEMIAWFAETFGNAPNQVHDAERERLSQIVNARQGLLDVRTELQNRNEHSVPEVVQKMHARLLKKIAVEIAKLEAAIAAMIKATRHFSELAAIIESVPGLGEGTSAGLIATMPELGHVSNKVAAALLGVAPYDDDSGKRRGERQIKGGRRKCRNLFYMACLGAATRHNPALNAFYRRLIAKGKEKKVALVACMRKLIVILNTMIARGQKWDANLHLAS

SEQ ID NO: 79322 - protein, 324 aa, unidentified
MINKIHGIDLHKKHSTISVRNREGQEVEFTLRCYDLRYYIKFLGPEDAVVIEVSSGSFYWADLIESRGAVYYVLDPHRFRIIRDSWNKTDKHDAWNMSKALWVYIITEEFGIPTVYKPDIIIRELRKLFTQHNLLNRQIRMLKNNIQATVVENGLTLTSKGKSRLFSPKYGMSVFEGRELSHSSQVSIEMSFGLLWRLEEEKETLYGEIMLAGEPLKSKVELLITIKGIRPLSALAFLADIGDVERFKKLKKMNAYLGTVPRENESAGRSRKGHINREFRQLTRTLLTQSINHVSNASPYLRRFYENLVQRRGAGRARIALISV

SEQ ID NO: 79323 - protein, 401 aa, unidentified
MSKKNTRNALDTSLSYAVIGLDLAKADCAVAAVPCSDDDLGLIDRMDYESLFEQAEKLGPTLFAMEPCCGYSQISLRLQNMGHEVKVISGHAVKNWIATHKSNQKTDLNDATALAKLALYDHDLQPIRVKNVEECRIASVQAIRIQLRTQATKSLVCFKSLCQCWGIVIRRGSLNTKKMAEAVAAVEKLLGVEVASSLMILRDAYKFTMKQINALDKLLDALVEANEQARTMKTVLGIGTQTAARLAVTTGDIKRFPMPRSYVAYFGLAPRNIITGHSGTPSPSKRGALKPVSSRGQGKVSRRGDRVARSFIIQGAATIYMLYCKDMLPECQLRRWLHEQIKRGKPYGKIIVSLAAKLLRIVWALLTYGEKFDSHKAGVPRSVLAAMEKPLKHDAAAESAA

SEQ ID NO: 79324 - protein, 337 aa, unidentified
MVEYKSMKKVEETVGIDVSKLTLDVHLHKAGLHQQFGNDEAGFKKILAWVKSKVLKQDEMLFCFEHTGWYCILLGHFLHEKGMDYCCVNPTEIKRSMGLKRGKSDKADAKEIAYYAWLRREDLVPSKPAAANLIELQRMMSLREQLVKQAVALKNLRCGMEQLTGKGSNDFSVLSITESIEHLETQAKKVEKAMEALIKADDQMQTNYKLSKTVKGVGLVLAVQMLLHTHNYTRFDNWRQFSSYCGLVPFPYQSGTSIHGRSKIHPISDRKMKSLLSMSAISAIQHDKELKMYYAKRVGEGKPKMLVLNIIRNKIVSRVFATVNRGTPFVELNQFIA

SEQ ID NO: 79325 - protein, 426 aa, unidentified
MPYRIAGIDVHKKKLAVVVADVEVEDEYQFERRWYGSNPEHLQLLAEWLLEQQVEEVVMESTAQYWKPVWDALERCWKVSAEKREGAGRMSGALHLAQALSNRGRRGRKRDFRDAERLVKRLVSQELTLSFVPDAEQRLWRTGTRTKYQLRRNRVRLQNQLEALLEEAHIKLSSLVSDLLGASARRMLKALADGESDPVALAALADHRLRATSAQLRDALGACTELSPVYRRLVKMALEELQLIEQQINQLDQEIASLLHQHQEAVDAVERLAEVPGLGVDSAQQIVAEVGARAATFASAKNLSSWVGACPGQEESAGVNYSRRSPKGNRQMRRILNQAANAAVKHKGSIFEIVYRRLVPRLGHNKTIGAIAHRLCQLIWIILHNSIRYKERGPAVCEKAKQARTSRTIRTLRALGYRVEPLGNPA

SEQ ID NO: 79326 - protein, 321 aa, unidentified
MTYVGIDVSKATFVVAYSSAKTGRTKTFKNTVKGVHEFIQTVSAAEHHCVLEATGNYSALLVYLLSEAGITVSLENPLKIKNFARATLTATKTDETDARLIALYGERMQPVPYKLRSDSILILKQKRTVLRQLKKQLVATRNLRGSLEILPSFDPECKKTIEKTIAFLEKQIKAMEEKIASLAQGEYKKQMDLLTSIKGIGVTLAAALIVATGGFTYFDNAKQLTRYLGLSPTYQQSGTSVNVKGHINRNGDSSLRSQLYVAAFSSLRCNTECKACFDRLRSNGKPGKVAVVAVANKLLRQAFAVVTQGKPYVDGFKSEKP

SEQ ID NO: 79327 - protein, 330 aa, unidentified
MKQYKYFFGVDVSKKTVDITLFDHQQTIHRQFINNISGMEELQQWLKELNQNRSEVLFCMETTGLYCFPLTQFLADNGIDIWIEHAAQIKKSSSLDRGKNDKIDSRRIALYAAKNLDRLRLWKPMSTTLEKIKHLANLRERLVETKKRLATPIKEIEEMGNVVMAKLLTKTIKNSLSAVDKDIINIEAKIIDIVNEDDNLKQLFKLITSVVGIGFVTAINLLIYTKGFTVLNETRKLACYCGVAPFEYSSGTSIRGKTKVHFMANRKLKCNLHMASLSAIKLDADIKKYYERKVAEGKNKMSVLNAVRNKLLARVIAVVNNKREYVKKIA

SEQ ID NO: 79328 - protein, 415 aa, unidentified
MKVVYPICCGVDVHKSFLVGTIVSTTSGVEPHYQKKRFSTYNNDLHRFCDWLLSNGCKNVCMESTGKYWVPVFNILEERGITTTIANPKWVKAVKGNKDDTKDSKWIGDLFRLGLVPGSFIPSKEIRVLREFTRYRYKLVSMKSSEKNRFQNAFTVCNVALDSVVSDMFGKSATAITDYLISADSFDAEYCTSLLQRSLKKKADSVIESIEGYSITDEQKLRMRIVRSHLDYIQSAIAEVDSAIDAMVTQHEGLIALLQTIPGVDRNSAITIISEIGTDMEQFGSSKRLCCWAGLTPGNNESAGKKKSVRITRAGVYLKPALVQVAHAAVKATDNSYYRLKFEQISKRRGKKRAIIAIARMILTAVFQMMSTGEVWNPTDLFKVDMPQALKEKQLEKAIKQATRFLEKHGVFTPA

SEQ ID NO: 79329 - protein, 369 aa, unidentified
MELYVGLDVHSKQSVFVIEDADGNVVARGEVPTSREGMERLRNEHALPAGTAVALETGTTSFFVARELSRVELRPVVVDAHEVRLKAHRPTQKSDRRDARELCEGIRRGIYRTIVHVPPLEVSRLRETLSRRRHFVRLQTAEVNAAKRLLRSAGLGQLARSLGTEAGWAKLESSLKEKDEVLAMYVGQHRAMWRSAREQVKALDRVLEVQGAAFAEPLGRLQTVPGVGPIVAATAVAVFSDIHRFPTAKHAASYAGLIPCTHQSGDRNGQGRITKRGSGELRTMLCEAAHHAARANHPLNPYFRKLCAKRGYRMAVIAVAHRLCRILYSMLKNRTNFDIGKLGVERGPFRRTAQHLYRLKVVPIATTNA

SEQ ID NO: 79330 - protein, 393 aa, unidentified
MAGDNLIEKRAAIKPDTLVVGVDIGKFMHVARARFPDGSFTHPLSVTTDADGFRILREHMVRWQRQAGCTDTVVGLESTGVYWENLAFWLEGRGYRVVQVNPLHVHRSKEMLDNSPGKTDGKDALLIADLVAQGKYLSFVMPRGDFAELRQLATLRARLVVERTTYLSRLHLEVSQVFPEFSRVFRDIATRVARRVLYYFPTPTDIRKHTVAQMARQVRRGGGIRLREDKLLLLKERAAVTVGINEGESALVLALRDTLAALNALDKRVGQIEARMSEVVARIDESQYLLSIDAVGPVSAAVILGETGGIRRYVNAEAILKLAGLNLFEVSSGMHKGARHISRRGRPLLRQILYFIALHHVQPGMPLYPYYARLVDRGTPKPKALVALSCRLV

SEQ ID NO: 79331 - protein, 342 aa, unidentified
MNQAIIGIDLAKNVLQVCYISKHRELLCNNAMSRQKAKEFLAKTKPAVVAVEGCNGCHYWGRFAQQFGHEVRVINPKKVKRYLEGHKIDKNDALAIANAALQIGLKYSAPKSLEQQALQSLESSRRFLSRAIVSLGQHIRGTLLGYGIATPCGEKGLKATVAIAMECDTDIPGSVVKVISAYWQQYNLLKSELKALEKAKNAVTHQIEPCKRLMQIEGVGESTALMLYTILGDGKQFNNGRQASSFVGLTPKQHSPGGKVIMIGIDKCGGVKDLRSLLYLGAMSYIGRMPDIPKTQKDAWLAKAIERIGFKKACIALANKTVRTAWAMLRYETEYKPILLAA

SEQ ID NO: 79332 - protein, 403 aa, unidentified
MKHVIAFDVSMGKSYMVIYNAQKQCVFESEIKHSKPDFKKLQEKIHKLTDETRESPKIVFEATGIYSRQLERFMQNNQYTYCLLNPLEAKIQCDSLRIHKTDRSDAHRLALTHFTVTRRVSTETDNLFYQLKSLSRLYSELDDELSIIRGRMHKVIQLTFPELERIFTSKSDLFLNFVQLFPHPDCVLGLSKTIIKNRIRANTNKKISNITAEKKAIQILEIAKICYPAVSQNDVLCDQLKLYARRYQELLHQKESCISKMVYVAKQRAEYDIIRSLPGIGPNTAVRLMAEIGDITRFNNNKQLNAFAGIDIRRFQSGKTFFKDKINKRGNKHLRKLLFLIIQNMIKQRRYGQNHIVEYYDKLKTQPYNKCHKVASIACVNKLLKLLFYLITHNMHYDYRLTA

SEQ ID NO: 79333 - protein, 378 aa, unidentified
MQSMKQEDTLVVGGVDAHADTHHAAALDERGVLLATKSFPTTTPGYAELLGWLRAFGAVAVVAVESTGAYAAALVRYLREHDVRVVEVNQPHAHTRRRVGKSDPIDAEMAARLFLAGKAKAIPKQTDGIVESIRLLRAARHSAAKSRSAAMVQLGGLIVTAPQELRDQLSAPKTIRGKAALCRRLRPSIGELRRPTHAAKFALRSIAGRIDALDDEIAVLDRQLEQLVRAAAPRTIQLLGISTGHAGQLLVTAGQNIERLRGEAAFAALCGANPIPASSGKTTRHRLNYGGDRQANRTLHLIAVCRLRYCARTRAYTQRRTAEGKTKPEIMRCLKRYIAREAYNALRADLAALQHPAPSATVTISCSAGPIGTTRRRT

SEQ ID NO: 79334 - protein, 313 aa, unidentified
MKYVGLDLHKKNIFATVLDDGGKIISKAQIRSKKEDIYYYLKKQQETDNLSIAMEASYNWQYYYRIIENLTDNITLAHPLKTRIIGEAKIKTDKIDSRVLAYMLKADMLPACYVPSKVAMENKILLRSRISLVRIRTQIKNRIHTIIDRNRDTYNGLLEDLTDTFGKTGIKIMQNTKIDEVDYKILIDQLDLISYINEKIKNIEAEIGKKALMDDDIKLLKTIPGIGDFTAFLVKSEIDDIKRFSCKEKLCSYAGLVPSIYSSGEKLYRGRITKKGNKYIRWALCEAAQISLRNSLYFRYYYYKVKNRKNTNS

SEQ ID NO: 79335 - protein, 336 aa, unidentified
MKYRVIVGVDVSKKTLDFVGLVDGEKLFHMQTTNNQKGIKSFYNKLSKEVDIDQDQWLTCMEHTGIYCNPLINYCIKQSEDLWIEDASKIKTFHGTSRGKNDAVDALRIADYAYSKQKKAILWVEPRQVIKNLKMLNNLRNRLIKSKKELSAPLKEEQGFEGEQLSEEHKLLLEPLLKNIKAQIKEVEKKMGQLIKADEHIKGLYKLITSVRGVGMIVAINTIIESNEFNKISCPKKMACHSGVAPFRYDSGTSVRSKSKVSHRANKRLKTLYHLAAMSAVSSKSGELKNYYERKIKEGKNKMAILNAVRNKIIHRIFACVRDNRKYEEVYSYSLV

SEQ ID NO: 79336 - protein, 365 aa, unidentified
MQKISTMRTMGKKISQGQLTIGLDLGDRSSSYCVLDAAGEITLEQKLPTTPEGMKQTFAKMPRCRLAMETGTHSPWVSRLLTALGHEVIVAHAQNVRLIVKSRRKDDRMDARTLARLARIDPQLLSPVQHRSAQAQLHLTEIRARAGLVSARTALVNAARGLVKSYGERLGKCGTFQFRQETATGLSAGLREALQPLLLEVESLNERIKEYDRRIERMSKERYPETALLKQIKGVGDVIATTYVLTIEDPHRFRKSRDAGCFVGLQPGRRNSGESEPQLHISKQGDEYLRTLMVQGAHYILGPFGEDSDLRRWGQKLAERGGKNAKKRAVVAVARKLAVLLHRLWVSGEVYEPLRNSQKAIKAAA

SEQ ID NO: 79337 - protein, 347 aa, unidentified
MELGAHAGISLDPPEQLLELTLAVIRLGKRGSSRPFQTIRSPVMNGIGIDVSKRQLDVGTTDGKTLQVSNSRSGFAELDLWLQGHPAVQIVLEATGGYEQPVLDFLHNAGHPVVRANALRARKLAQGLGHMAKTDRLDAYALAKMAALVKLRSYQPLEPWQREMRDFVRARRQAMHALTVARQQQEMVGNRELRRLLQANITCLQRTVERLGKRISEQVSKQPQLAVLKSMKGVGPGLQAVLASYLPELGKISGKAVASLVGVAPMSHDSGTMRGKRSIHGGRAEIRQVLYMASMSAMRHEPRLRDFYQSLRARGKEGKVAIVAVMRKMLVILNARMRDAQGGSIPA

SEQ ID NO: 79338 - protein, 381 aa, unidentified
MSAATRRSECNGETVLFMAIEVSDKTWKVGTTVSPAQKARTKNVPGGDVEALRREIQRAKKRFGMAEETQVVSCYEAGREGFWIHRWLESEGVINAVVDPASIDVNRRKRRAKTDRLDVFMLLSNLMRWWAGEKKTWSVVVVPTERDEDARHFHRERGTLKKERTAHTNRMKCLLKLYGISQQKIDGNFVEQLGKHRLRDGSPLPPQIRQRLEREYQRLAFVESQIELLARQRSEALRHSKDERIAKVRKLTQLKGAGEVGSWTLVMEIFGWRKFDNRRQVGSLAGLTGTPSDSGATNREQGIDKAGNAQVRALLIEMAWSWVRYQPDSEITIWFNRKFGGAGKRHRRIGIVGVARRLLIAFWRYLEQDIEPKGAIIFKTP

SEQ ID NO: 79339 - protein, 389 aa, unidentified
MKIFVGIDIAKLNHFAAAISSDGEILIEPFKFTNDADGFQLLVSKLESFDKNSLIIGLESTAHYGDNLVRYLVAELYQVCVLNPIKTCQMRKNNVRKTKTDKVDTYVIAKTLMMQDDLRFVSFYDLDMMDLKALGRFRQKTIKQRTRLKIQLTTYVDQVFPEIQYFFKSGLHQNAVYALLKEAPSPKEIASMHMTHLANLLKVNSHGHFTKEQAKELRVLAQKSVGANDSAISIQITQTIQQIELLDSQLEKIEAEMTDIMKFNDSVIMTIPGIGYINGGMILGEIGDIHRFSNPNKLLAFAGLDPSVYQSGNFQAKTTRMSKRGSRVLRYALVNAAWNVVRNNATFKAYYDAKRAEGRSHYNALGHCAGKLVRVIWKMLTDEVEFNLE

SEQ ID NO: 79340 - protein, 355 aa, unidentified
MRILSLDLSKYKTVACEYEAETGRHQFATVLTTQKALHDLIVDREPDRVVIEICSIAGWVCDLVRSLGIEMQVASTNDERWQWRKVKRKNDRRDGLKLAQLSARNELDLVHVPQSEMRQWRALIAYRHHLVQRRTKIKNHVRELLLREGQLLPRHRSAWTQAGLAALEAMVKPLGEVSMDELWRGELEVELAQFKAVQKQLTEVVAKLDALGAANHNVRLLQTASGVGPRLAEAVVTMFDDPKRFRRGAAVSAYIGMVPKQWDSGETERLGKITRHGNRLVRSLLVEVAWCALRHNPWARETYQRISGGKKSRKKIAIVAVGRKLLVRCWAMLRDQSAWHWEGQSAVVAPPAPTA

SEQ ID NO: 79341 - protein, 342 aa, unidentified
MSEIITVGLDLAKNVFQVHGADGAGRAVLRKKLRRDQVLAFFGDLPPCIVAMEACGGAHFWGREIGKLGHEVRLIPPAYVKPFVKRQKNDAADAEAICEAAMRPTMRFVPVKSEETQGAAMVFRIRELLIRQRTQAINALRGHLGEFGQIAPQGTANAARLIAIVEGPDSGLPVDAIAALKVLVAALTHLEAEIGKLDAEIFRRAKENEVARRLMTVPGIGPLIATALAVLAPPPETFRKGRDFAAWLGLTPRQHSTGGKQRLGATTRMGERSLRRLLIIGANSVIIKRHGHAAARPGTWLGGMLMRKPPMLVRVALANKMARIVWALMARGGVYQSPAAAA

SEQ ID NO: 79342 - protein, 339 aa, unidentified
MSAGAQGRSAHVPPRVPRVAPGVLAGVAWSDRGPLSPPVTVGIESTGYSLWFHALLQRLGHTLLVGEAAKIRAMVVRKIKTDRRDARHLRDLLKDDRFPVVWIPDPATRDLRALIKHRLRFVRIRTMVKNGLHAIALNQRLALGPSLWSRAGLAQLHALVLPPHTRRRRDDSLELLQWLNGHIDELDLHVATAAAADPDARRLMTHPGVGPLTALATVLVLGPVGRFPGSKHVVSYIGLAPAVSASADKYRLGHISKQGSALLRWVLGQAAPLAARGDAALKRIYFAVLRRRGRPKAKVALARRLLVRLYVMLRDQIDYDEFCRRGRAQRPGLEARIPV

SEQ ID NO: 79343 - protein, 400 aa, unidentified
MNAVGIDVSKGKSTVTVLQPFGVVIAEPFEVLHTADELKKLVTFIKSLSGETKVVMEYTGAYYEPIANALYEAGIFVSVVNPIIINDYSTNRVRKVKTDKIDALRIAAFTLDRWLELRKYEPADTIRKTLKVMNRQCLNLNRILVMQKNNLISLLDSVFPGANNLFTSPCRETDGHEKWVDFVLKFPHVDTVAKLSLSAFKAKYHSWCKKEEYRYSEPKAEKIHKYARTLVSTIPPTESIKMVISEAAKALNSTLEALGKLHSEMDALSARLPEYEAVMDMYGVGKILGSQLIAEIGDIRKLHSGKALVAMAGIDPPPHQSGTVDTRSRSISKRGSPALRKTLFQVIGVYLQRQPKDEPVYQFLEKKRTEGKPYKVYMIAAAHKFLRIYYARIREVMPKQ

SEQ ID NO: 79344 - protein, 435 aa, unidentified
MSKRAEMVELQVETEQVARVAAIDIAKASAVVCTRLPAERGGRREQRVWEVAAHTGAIEELADHLVCQSVELVVMEATCTYWKPYFYLLEARGLRCWLVNARDVKNVPGRPKTDKLDAVWLAKLAERGMLRPSFVPPKPIRQLRDLTRLRKTLTEDRTRYRQRIEKVLEDAQIKLSAVVSDLFGVSGRAILDALVGGERRPAVLAELSKGSLRGRKSTLVGALTGQFEGHHAFVIGLLLEDHDRLDAQIARLSARIEQAIERIDAGPGDGDGRLGLVARLDEIPGVGRTCAETILAEIGVDMSVFPTPGHLASWAKLTPRTIQSGAKNSHGPAGTGNRWLKGPLGEAASAAAHTKTFLGARYRRIAKRAPAKKAIVAVSRNILEVAWVLINDPEARYTDLGAHWHERHVNHTRKTRQHVRELEHLGYSVTLTQIS

SEQ ID NO: 79345 - protein, 408 aa, unidentified
MEVLYPRCAGLDVHAKTVVACVRLASGTQVAYEHRTFSTSTRGLLELDEWLTAQAVTHVGMEATGVYWKPVWHVLEDHFTLVLANAMHIRNIPGRKSDKNDATWIADLLALGLIRSSFVPPAPIQELRDLTRTRKQLVRESTRHTQRIQKTLEDANIKLTEVLSDLLGTSGRAILQALVDGETNPERLVDLTSGRLKAPRAQLVEALHGRVTAHHRFMLKLHLAQIAALETAIADVEAQIRERLAPFRAAVSLLTTMPGLRETAVAVILAEIGDDMSKFPSAGHLVSWAGLCPRLDESAGKPRSTRTRQGAPWLKTTLVQAAWAAARKKESYFHGQFLRLKSRRGPKKAILAVAASMLTDVYYMLRDGVEFHDLGDQYFVQCDRKRVTKRLLQRLRDLGLDVEVKNAA

SEQ ID NO: 79346 - protein, 389 aa, unidentified
MFYVGLDVASEKHDCCILDKDKKVDKIFSIANSSSGFHTLLAELKGLSDHDVKIGLEATGIYSENLSVFLRRNGFDVSTINPLLIKKHQCSTTLRKTKTDKADAKGIARYIAGEDFQPDLPVSYHIQELKSLTRARFSAVQDRSALKNKVKRLVQLLFPELLGEFSDLFGRSASAILRQYPSAAKLAACRSNALAALLRKTSRGRFGQSKAEHLKQLAKNSIGNPSPARTLELKMLLDRIELLSEQISEYEQEIKRIMDQLDPSILSIPGISYTLGAAILAEIGNIQRFASPAKLLAFAGLEPSIYQSGKFVPASGKMVKRGSPFLRWALIQAAGYVPMYSSTFARYRAKKLAEGKTAAVTRSHVAKKLVRIIFSLLSHHSSFSDQLAA

SEQ ID NO: 79347 - protein, 421 aa, unidentified
MQVLYERCAAVDVGKDVVAVAVRVPGDGPDGRKTVKRTFRTFYGVLREAARWLTDQRVTHVAMEATGIYSMPVYHALVEHGDFEQVVVCNAGHVKNVPGRKTDLSDAEWLVHLLECGLLRGSFIPPVEIKAARDVIRYRTKLTESRTSELQRLGNVLQDAGIKIDSVASTITTMSARAMVEALIDGERRPKTLADLAKGRMRAKIPDLARALEGRFGDHHALMCRLHLDHLDHLDEMIAKLDAQVEEMMEPFRPQRELLITIPGIGQMSSAVVISEIGDDVAAYFPTAEQLASWTGLCPGNHESAGKRYRGKRRKGNQHLQPWLVECAWAAVRTDGYLREFYRRQVRVHGGFRSPTAKKKAIVAVAHKLAVIIWHVLTTGRQYEDLGADYFTTRIDPEKEKNRLVAKLEAQGYTVTLEPAA

SEQ ID NO: 79348 - protein, 400 aa, unidentified
MDKDRIVAGLDVHKDTIYLCVMDNTEAVIFAKVYGTLTPDLELMCSEMVSHGVTEAAMESTSTYWVPVWNALCESMSLKLVNPYFIKQLPGRKSDVKDAQWIAECLLKNLIRGSFVPDKTVQDMRKYNRRIFDLNEDLTYNSNKQDAALQRCGFRLSNYVSRVNGKSYQKCVRAIITGITDPEELVKLIHGKTLRKYGRNIIKDAVTGDFHQADICLLKQYAELIGVIERQIEECRNALIAMCQEHFPKQFKRLQSIPGVKERAASAIIAETGADMKPFEKATNLVGWCGLKPRNDISNNKVKSNRTTHGNRFLRQILIEISWVASRTRNCFFSNFSYVQCTQRHKNKMKIQVAIARKLLVAVWHMLTKDEDFIDVYLKRLEKQAEWQNDIQALESLLVG

SEQ ID NO: 79349 - protein, 349 aa, unidentified
MEFYAGLDVSLETTSVCVVDREGKVIREGKLASDPDAIEMFLAEWGIHLKRIGLEAFSFSGWLFTGLEEKGLPVVCIETRHAKAAMNAMLNKTDKNDARGIAQMMRTGWFRAVHVKSGEAQTLRALLVGRKAMLGKVIDMENMIRGLLRPFGLKVGPISTGQFDARIRELVAGMAKLEAIIAPLLDARYEMRLQLAKLHRLAVVAAREDKAVRRMMTVPGVGAVVALTFRATVDDPTRFKKSANVGAHFGLTPRRYQSGETDYTGRISKCGDEMTRTMLYEAAIAILTRIPRNFKLRLWGLRLMKKRGLKRAAMAVARKLAVLLHKVWVDGTVFRYGAGVKRGRIAAAS

SEQ ID NO: 79350 - protein, 445 aa, unidentified
MPAFAKVFDPTFEDLEDPYRHYDADGEPLEDRLYLPVGFDPGKKHTEVVALHPFPGHDQIVWQRTIPTTGLTEAFWLVEKMQRVAEPFAAVPVFVFEATSIYWRPLRDLFVRLGLPTATVSAVQLKNLRGTQTRKKKSDAIDALQVAKLFKNGSSHASRIPPEPLASLRELCRAHLFFAEFLVAAQNRMIAQQFVLHPESRTPFTRINQRTPMALVTQGLIAPGRLLALSLEELSQLLRRASHGRHGVDVAMQLRQSALTTLAMPPAEAAVSYSLALLGRSYLYVADQILRPLEHRIRDLLQQVPFRHYLQEIPYFGPIVIGTILGELGQPAWFRTADDVVAWFGLDPAVFASAGKQAAGLPLTKRGSRYGRRILWLAAQNWCKYTKIGVQFFRHYRCGKGLSYDATVCAFAARLAKLSWAMSRDGTHYDARRAFRAYLPAQISA

SEQ ID NO: 79351 - protein, 454 aa, unidentified
MDATTVAVDLAKSVFQLAVADSSWRVIENHRLTRIQFERWFANRTVSLVIMEACGSAHHWARWLNSFGIEVRLLPAAYIRAYVRRNKTDAADARALLDAARAADIDPVRVKSVEQQALQGLHRIRSLWMSTRTSRINALRGFCREFGLSIPQGARTGVEAISRVLADPRSPVPALIRETMRLLIEEIRLLEQRVAQLEREFTALARHSAACTQLMSVPGIGLLTATAMVAATGGDVTHFRDARHFASWFGLTPKEYSSGSTRKLGRISKRGDRYLRMLLTHGARAVLRAAALARDASRPLDGLRTWATEVQRRTNHNKAACALANKLPASATRSCATTLPTAIRSLVRTRSSNAPPSPSPPDRFIPSPHPCAETDRSSWQTGSHPRDRTPITLPALQQPLVPIGASRADSMSAPVIQSPPQMPDIRLQVIQPGKSETRSILIYGGVHRRIVSAT

SEQ ID NO: 79352 - protein, 346 aa, unidentified
MTILEDTRVITGGVDTHADMHVAAALDPLGGLLGVREFPATAAGYADLLGWLSGFGPVALVGVEGTGSYGAGLARYLATARVRIVEVDRADRQDRHRQGKSDPLDAISAARAAQSGRAGGAPKGRDGAVEAIRALMVAKRSARNERTQAINQARALLVTGPDDLRARFAGLTAAALAEAIAALRPRPGDAAQYAVRIALRELGRRVEFLDGQLERLDDLIVPLVTARAPGLLSLYGVGPDTAALLLVAAGDHPERLRSEAAWAHLCGAAPIPASSGKTRRHRLNRGGNREANHALWRIVITRMSAHPATRAYIERRTKEGLSKKEIIRCLKRYVAREVYHHLRAGG

SEQ ID NO: 79353 - protein, 369 aa, unidentified
MGDRITYVGLDVHKESIVVAVAEGGLRGEVREYGRIANTPAALDRLARKLGGEGVKLRFCYEAGPCGYGIQRQLSAQGHECVVVAPSLIPKRAGDRVKTDRRDAASLARLHRAGELTAVWVPDAGHEAMRDLVRARLDAVHALRRARQQLSGFLLRQRRHYGRPAWTRLHRRWLAGLRFEQPAHHLVLEDYIAAAEAAEARRDRLTGQIAAMLPDWTLAPVVAALQTMRGMALVNAATLIAELGDLSRFANPRQLMAYLGLVPSEHSSGTSVRRGGITKAGNNAARRLLIEAAWSYRFPARLSRELLLRQENQPKPIREIAWKGQVRLCARYRRLARTGKPANIVTTAIARELSGFVWAIARQVMAAAG

SEQ ID NO: 79354 - protein, 338 aa, unidentified
MGLYCGIDLHSTSSYLSVQDARDQVVEGKKLPNRLDVVLAALEPYRDELVGIAVESTFNWYWLVDGLMEASYPVHLAHPAGMAQYTGLKYTDDRHDARWLGHLLRLGLLAEGYIYPKQKRAVRDLLRKRAHLVRQRTANLLSLQNLWARNSGELVRGNALVLLGRSVQLEALESKELRLAMEVTLAVLAALNEQIDRLEKAVFARGKLEPDYQLLQSIPGVGKILGLTIVYETSDIRRFRKAGNYASYCRCVDSRRLSHGKKKGEGNKRNGNRYLSWAFIEAANFIVRYEPRARRFLERKIAKKNRSLAIRALAGKLARATYFMLRDQKRFETDRLFA

SEQ ID NO: 79355 - protein, 450 aa, unidentified
MAKSKRRKHRKLERSLPEMRPNAGGIDVGATEVFVAVPADRDPDSVRSFPTFTQDLQELADWLKQSRVDTVAMESTGVYWIPLFQILEARGIEVHLVNAQHVHHVPGRKSDVLDCQWLQYLHSVGLLRASFRPEQAVCEIRSLMRHRESLVEMSCVHVQHMHKSLDQMNLQIHHVISDITGVTGLAIVDAIVAGNTDPKELAKLRDYRIKASMETVTKSLVGDYRAEHIFTLKQSLTAYRHYQQLIADCDAEVQRRIQTFDRENAGPRASADTNSNAPANPTRFDLRSHLERIFSVDLTVIPGFECLRIQTLLSELGADLSPFQTPDAFCSWLNLCPKDGSSAGRRIRAPKIKTKNRATQAFRFAAQALHHNQSYLGDYYRSQRARYGAPKAIKNTAHKLARIFYHLVMTRQPYNETVFAKLEIRNQQRRFRKLQSLATQMGYSLVQLHA

SEQ ID NO: 79356 - protein, 331 aa, unidentified
MLNMHRVTTIGIDISKESFDVAILRDEQYQLAHFENKPGGYRKLVKWLKKREAEGGHVCLEATGRYGQALAIYLHEAGYPVSVVNPARIKAYAASQLKRNKTDKEDAKVIAHFCASQKPSHWTPPAAEVLELQMLVRRVDSLKGMRTQEMNRRQAGQSSEVVQANIEDHIAYLNEQIKTLEKEIKELIDNHPELKRQKELLVSIKGISDITAAKFLAEVPDVNQFKTAAQLAAYVGVTPRQKTSGTSVRGKSHISKMGNSRLRAAFYMPAISAMKWNPIVIPLVERLQKRGKLPKVIIGAVMRKLIHLAFGVLKTGKPFDPNYLQHRQLEA

SEQ ID NO: 79357 - protein, 336 aa, unidentified
MLYAGLDLSRKRLDFHLLDAEGATVEVGAAPPDADGLEGLTQRLDRHGAPIRAAIESMNGARFVHEIADAQKVKGLAPLACKTDRIDAWVLAELSRRELVPAIWLPDPHVRAERERARWRLHLVRHRSSLKQRVHAVLLAHGKPCPVSDLFGLSGRELLARLALPEPWCGNVQASLRLIDELDREIDNCERELRRLGADHRYVPLLLTIPGIGWVLAYTIAAELGDIDRFPSPRKLAGYSGLCPRVYQSGETDRRGPLAKQGPKYLRWALVEAAVHASTHPAYRERYQRTKARVGKQRGAKVAQVDLARRLAEAIWHMLTRNQSFAPAGATDPLAA

SEQ ID NO: 79358 - protein, 344 aa, unidentified
MDNHTQYLGFAGVDLAKKVMQIHFVTEDGEITDKSAKRAEFLDFFRNRGKCLIGMEACGSSQDWARKLEAMGHEVHLMSPKAVKPFVSGQKNDHNDAIGIYKAMFNGVRRVPVKSTEIRDLQTLRRIRSQVTKDKVKEINHVRGLLAEYGIVMGKSLNAFNKDISSALEILTERGDVSPLVAEELRTTVEAIKAKIERQKKLDQEIEQLARGCKNYENFLKTPGVGPFTAAMLCVLLCDPSIFANGRQFAAYIGLAPRSRGSGGKNYVTGIPSKFNCDSESRAVLVECAQAIARCKNKSLWVEEILRRKPKKVALIAIANKLARQVWAMANKGESFKQMAVLTA

SEQ ID NO: 79359 - protein, 379 aa, unidentified
MLNKSSIRTIGVDVHKESYSLCTYCPESDSFVGEITMTSSSKMVANYVKRLEKDLEPNVSIIIGYEAGPTGFGLQRDLLKAGIDCKIMAPTTIYEKKGGNRVKTDRGDARKLAKALNWGAFKEVIPLSPEDEATRDYIRMRDDRQNALKKAKQQLKSFLLRKDKHYPEKGKRWTLKYRGWLKSLEFELSADQLTFNEYYAEVCRLEEMVERFDQQIEEYSQDDRYRENVSNLRSFGGIDTHIAMATVCEVGDFSRFPTAKDFSSYMGLCPGQQSSGGKTQMTGITKAGNSNLRRLFMESANSMARTTIFNKSKRLKARQSGNSATVIAYADQGTARIRYKYNKMVREGKNANLAKAACAREIACFVWGMMTGNINGEVA

SEQ ID NO: 79360 - protein, 370 aa, unidentified
MAKRSMFVGMDVHKESIDISLAEEGRDGEVRHYGVISGDLEAVAKVVRALRAPQRRLRFVYEAGPCGFGIHRYLIAQGEDCVVVNPSSMPKRSGDRIKTDRRDGDALARLHRAGELTAIYIPTAADEALRDLVRARADAVGLSTQAKHRLKAFLLRQGRRYPGRAGWTRPYRRWLADLSFPLAPQHIALQEYRDTIDETERRVERLTDQLRQQTPAWRWAPVVDALQALRGVSFVTAVGLVVEVGDIRRFDHPRQLMAFLGLVPSEYSSGPSVRRGGITKAGNPHARRLLAEAAWAYQGAPRIGRQMLYRQEALPKIICDIAWKAQLRLTSRFRKLVARGKAKPKVATAIARELTGFIWAIAREVPPPAA

SEQ ID NO: 79361 - protein, 356 aa, unidentified
MSTMTRVGVDLAKRIIQVHAVDAIGNRITSLALPRDKFMAWCAQLPPGCVVAMEASSGAHHWARRLIALGLDARIIAAHLVEPYRVQGKSGKNDANDAAAICEAASRPHMHFVPVKSVEQQSMLCIHRLREGFKTERTACINRIRGLLAEFGLVFAQNPTELLRGLLDVIEDASNELGGLARLALQRAWGQWRELDAHLAWCDERIAAHLKASEPVRQAEKLLGVGPVTASALVATVGDFKQFKNGAQFGAWLGLVPRQRSSGGKATLGAITKRGEPYLRTLLIQGARSAVMTAHRRDDPISKWAHRLREKSGWQKAVVALANKNARIVWAVFVRGKAFDAHHVGIKSGAPGALAA

SEQ ID NO: 79362 - protein, 345 aa, unidentified
MQITTIGLDLAKSVFQVHGVDAEGKVAVRRKLRLAQIRQFFAGLAPCLIGMEACGTAHFWARELMAMGHQVKIMPPSYVKAYVRRGKNDAADAAAICEAVMRPHMRFVPVKTEEQQAALMLHKARELLVRQQTMLINAIRGHMAELGMSAPQGSAKIKDLIAVIQDSEDQSIPALARAALQPLVRQLHTLDEQVETLDREIKAWHTRNETSRRLATIPGIGVLTASAIAATVPDPSFFSSGREFAAWLGLTPRQNSSGGKERLGRISKKGNTYIRRLLVTGATSMLRFARAKTAAGADWVNGLLQRRPARLVTVAMANKTARIAWAVMVRGENFRVPVRPMTEAA

SEQ ID NO: 79363 - protein, 320 aa, unidentified
MTSRGAEKMNNDTIGVDVSKDHLDAHRLADGATRRFANTKGGHKALIKWLTETPLYRVVFEPTGPYHRAVERALGIAGVPFVKVNPRQARRFAEATGKLAKTDRLDAAILARMGALLELEARPARSELLFELKELYVAREALVKDRTAAKNRGKALTLSLLKRQNAQRLEQIDRQIATVEAAILQIIEANVSLADRFAILISIPGVSNITAFALLIAMPELGSLEAGQAANLAGLAPIARQSGRSAGRSFIRGGRADVRQALYMPALVAARFNPDMKAKYAHLIETGKPAKVALTAIMRKLVVLANALLKANRPWTPKTA

SEQ ID NO: 79364 - protein, 329 aa, unidentified
MQYSYFVGIDVSMKALTVVISDADKNQQPAREFLNTPKGHRQLVSCLRRLKAGVHAVLEPTNVYHLKAATALYMADGIDVSVISTSAANHFAKAAMQRAKTDRVDARTLAEYARVHEPAPWQPPRKEAVELRSISRLVDSLVKRQTALKCQLHSAQHGQVAVVVIQTLKAELRTLQGRIKKLRQSALVLIKADRQFARWYQLLLSMDGIGTKTAIYILGEVGVLPSGLTKKQWVAMAGLDPQPRESGSSLHKPRRISKQGGARLRRAFFLPANTAARHCQEIGNYYEKLQDVTGSKLSALCAVMRKMLQAIWGMLHYDQPFNPSLFCQK

SEQ ID NO: 79365 - protein, 345 aa, unidentified
MESMYYIGLDVHKKTISYCVKDRSGQIHREGAIPATRVGLDLWMKTLPQPWTAAMEATLFTGWIYDHLLPHAAALKVAHPLMLRAIAAAKKKNDRIDANKIADGLRCDFLPECYMASTEIRERRRTLRYRNLLVRQAVQLKNKISGLLMEAGVSYNKQKLHKVGYFRELLATNQEIGEGLRPLLRICRETLVRLQKTESALVRSLEHDPLLAERVARLMTIPAVGPITALTWVLEIGDVKCFSSIKKAISYCGLCGAENSSANMIKRTPLSKQRNKHLQSVLIEAAKLAPRRSSGLALVYDRERQKGNANRATLAVARKLVAYLVAVDRRQKEFLTVEKENRTAA

SEQ ID NO: 79366 - protein, 347 aa, unidentified
MLIIGCDFHPGFQQVAIFDNLTGEITEKRLQHRAEAEQFYRALAGQAVLVGMEACGHYPWFERLLAELGMELWLGDAAKIRASVVRKQKTDRRDAEHLLDLLRENRFPRIWVPSLEVRDVRQLLVHRHKQVQARTRTKNQLQAMALSSGVQKKRKLWSKVGREELEQLPLLPYAAERRKRLLETLDSLEAEIGELDRRVAEEAGQRPEAVRLMTHPGVGPVTALAMVLTLGPAERFESAKQVGSYFGLIPSEASSGGKQRLGRISKQGSSFLRFLLVEAGQTAARYDPQLKRFYRRLATRKNRGVAKVAVARKLATRMYLMLREGWTYAQLNQAVMSVSPSHSVAGE

SEQ ID NO: 79367 - protein, 304 aa, unidentified
MNGIGIDVSKRQLDVGTTDGEILQVSNTAAGFAELEVWLKEHPADQIVLEATGGYEQRVLDFLHKAGRPVVRANALRARRLAQGMGHVAKTDRLDAYALAKMAVLVKLRAYQPLEPWQQRMREFVRARRQAMQALTVARQQQEMVGDRELRRLLQANITRLQTLVARLGTQIGEQVAQQPRLAVLKSMKGVGPALQAVLASYLPELGRISGKAIASLVGVAPMSHDSGTMRGKRSIHGGRAEIRQVLYMAAMSAMRHEPRLKDFYRSLRARGKEGKVAIVAVMRKMLVILNARVRDAESGPIPA

SEQ ID NO: 79368 - protein, 394 aa, unidentified
MPELFVGIDVAKDTSSAQGIDGSGKGRFSLTFAMDSEGFMQLWNAIAEHSKDISEVIVAVESTACYHINLYSFFTAKGVSIVVINPLLIANFAKLSLRKTKTDKKDAMSIAQFLLVHRKSISQLSLSQDLQDFRDIARERESVCNLLSAHKVEVKRLLQSTFPELERIADLSTRVMQEFIAAFPSARLVKMAELKVIQKMLQRKGVGTRLTYTAEDLIQAAKQSIATISPAKELILQGKVRTLQHLQERYEELTKIMTEYCVSSMLEDFEIITSINGISKRTATTFLAEIGYIGNYASHKKLIAFAGIDPTVYQSGKFKGSSRISKRGNRHLRRIIWMMTTCVIQHSATFRAYFMKKRREGQPFNKAVFATAHKLVRVIFAMLTQRTMFKEVCP

SEQ ID NO: 79369 - protein, 392 aa, unidentified
MVISVGIDVSKDKHDCFIVNSEGEVLADVFTIPNNMDGFHYLLQRIQDCANTQNKIKVGLEATGHYSYNLLGFLLDNGLPTYVLNPLRTNLYRKSLSLRKTKTDRVDARTIATMLLSDAGLKPYTDTAYHNEELKSLTRYRFDKVKERAKLKSSVSRLVCILFPELEKLVPSLHTASVYTLLEEFSGAKQIAAAHLTRLKTLLETASKGHYKRDMALEIRDAARNSIGSWMPAKSLELQHTIRLIRELDDEIAEIEKQIQAIMDELNSPITTIPGIGFRMAAMIFAEVGDFTRFDSPDKLLAYAGMSPSTYQSGQLKNCYPHMEKRGSRYLRYALYNATKYVCHWDPTFAAYLAKKRAEGKHYNVALSHATKKLVRLIFAMEKSRQPYCSAA

SEQ ID NO: 79370 - protein, 392 aa, unidentified
MYYIGIDIAKKAHEVCFLDQNGQVLDGNSFKVPNTLSGVDKLQKMLDKYGLTSENAQVGMEATGHYWLVLYSWLFEKGFDIKVINPIVTDALRNMRVRKVKNDRIDAEIVAKAIMLGEYQETAIADGDTLALRQLCRFRLWQVHSESDLKRKIIALLDQVFPEYTNLFSDIFGITSKELLLQYTTPEEMASLSAKKLTLLLSKSSKGHFSQEKAMEIRAVAQSSMGIRIATDAFAFQIRQMVEQLEFIEEQTALLDQQIEAYMEKLDSPVTSIPGIGPVYGAVILSELGNIHRFPSAKQIVSFAGLDAQIKESGEFTGTQTHISKRGSPYLRRAIWGAAFVASWSDPQLKDYYEHLRARGKPHRVAVGAVARKLCYIIFAILSENRPYEVRA

SEQ ID NO: 79371 - protein, 356 aa, unidentified
MDKVIREGAVRVGVDLAKRVIQVHAVDATGHVLTSRALPRARFIDWCVRLPAGCVVAMEASSSAHHWARKLVALGLDARIISAQLVEPYRMEGASGKNDANDAAAICEAASRPKMRFIPVKSIEQQSMMCVHRLREGFKEDRTACINRIRGLLAEFGLVFPQSPRELQAVLSDVLEDAGNELGTLARLTLQRAQAQWRELDDHLAWCDERIDAHRRSNPEVQHAATLIGIGPVTASAAIATVGDFKQFKNGAQFGAWIGLTPRQRSSGGKNNLGGITKRGDTYLRTLLIQGAKSAVMTAHRRQDKISSWVLALRERSGWQKAVVALANKNARILWAVMTRGDVFDPNHLSVKPTAC

SEQ ID NO: 79372 - protein, 344 aa, unidentified
MVYIGCDQHKHFCQLAVLDEEGKMIQQQKLYHDDRETLKRYFTSLPPGSQMAVEASGFESWLADFVQDLGIKVHLSHPLKTRAIAEAKIKTDKVDAKILAQLLYADLLPKAYLASPETRRIRYFLRFRLCLNRYRSSLKNRIHSLLHGLGICPPAVTDLFGVTGRRFLDSLRLGEGYQEALLGYLNLLDTTEARINCLKKRLAARVKENPDAERLETIPGVGVLLSQLILAEIADIQRFASPERLSSYAGLVPSIHQSGQRLYHGPCPDQGNKFLRWAMVEAAQTAVRKDPRLKDFYERINRKKGSQKAIVAAARKMLVIVFYVLSRKENYHFNVFPRQARQSA

SEQ ID NO: 79373 - protein, 352 aa, unidentified
MERFRVGIDVSAKTLDVAYRNVKGLIERQTFDNETTAHAALVRHLSKRAGGKKVRVVLESTGVYGLDLALALDRAGFEVMVANPRATANFAKATMQRSKTDRLDCAMLLEFAEQMTFKQWQAPSKTQLQVRGISRRVHALMTTIRDEKNRMHAANQVDGTTIVKRSIRDTIKQLETQVRKLRAIALELIMSEPELARRYERLLTVKGIGMISAIAILAELAVLPSDMSDRQWVAHAGLDPRQFESGTSIKMPPRISKRGNKYLRSALYLPARVACRFEPGVASFAARLRGSGKKPLQIHVAVMRKLLHAIHAMFRSGQDFDGSRFYLKAAGAVGTSGIASSAISEVSTAHFP

SEQ ID NO: 79374 - protein, 342 aa, unidentified
MDRTLYALDLAKQVFQVFWVEERSRTREKRLKRAQVLEFFGGLAPARVAMEACGSAHYWGRELMKLGHEVMLIHPRYVRAFVKTNKTDCADARAIWSAAQQPEMRAVPVKTVESQTILALHRVRAGRRDMRTALMNQLRGLLAEFGVVLKRGRAAGLAELYRRSSELEAKLPGTMMSLLREQCEAIARLERDVRALEGRIRAAHAGDERFASLTGIPGIGLLGASALLARVDNGQQFRSGRQASAFVGIVPRQHGTGGSVRLGAISKRGDPYLRTLLIHGARSVIARSKHPSPWLQGLIARRGKNVAAVALANKNVRIAWALLRRGGRYEPDHQARVLAVQH

SEQ ID NO: 79375 - protein, 470 aa, unidentified
MPERENKIISHQTEKESAKAKEFTVADLPRHLRHINVNAAGIDIGSDRHLVAVPAGRDVVSVREFKAFTADLHALADWLTQCGVTTVAMESTGVYWIPLYEILEERGFEVYLVDARRTKNVSGRKSDVLDCQWTQELHTYGLLVQAFRPPDEVCVLRSYLRQKEMLVQTAAEHIQHMQKALQQMNLLLHNVVSDITGVTGMNILKAIIAGQRDAQVLAALRDRRCQNSVETIAKSLVGNYREEHLFALRQAVELYETYQLKIADCEAAIAAYLLRQDHHTDDQPPAPQKPIPARNRLRAGVDVRDQLYKMSGVDLFRVSGLAADTLLTLAGEVGFDMTPWKSVKHFSSWLALCPGTKQSGKRVLSRKTKPSANRAAQAFRMAAVTQARAKTALGAFYRRIRSRSGGREAVTATAHKIARIFYSLLTKGSAYVEQGEATYEQQFKERRLKALKKQASALGYQLSPLTATSF

SEQ ID NO: 79376 - protein, 387 aa, unidentified
MSEAFDPRKSATAFDQASTLVVVLELSGKSWRVAASAPGLSRRPLRNLATRDIGAVLKTIERWKEEAHKAGCEVERVVAGYEAGLDGFWIARALTAHGVEVHVMHPSSISVERRGRRAKTDRIDLDILLRTLLGWLRGEPRHCTMAPIPSEAEEDMREPGRQREALTAARLKVENQMRSLLARYGVADFRPRLKKAAEHLARLRTVDGRPLPPNTMASLERMLAQHQLLSKQLKEIETAREQVMTVADPDRLQRMIQMLAGLVGVGVETATTLVHEVFSRRFRDRRALAAFVGMTGTPYDSGGSTREQGLSKNGNPRVRRILTQLMWRWTIFQPQSALTRWFVARTGGAKGRIKKIMAVALPRKLLVALWRYVEIGVVPEGVRLAAA

SEQ ID NO: 79377 - protein, 444 aa, unidentified
MGKPQVFDDQEQGRVFERVAAVDVAKASGVVCLRLPHPAQPAGRRSQVWEVPATMHAVTELARRLTAEGVQKVTLESTSDYWRIWFYVLEEAGLAVQLVNASQARNLPGRPKTDKLDAMWLARLTEMGLLRPSFVPPAEIRVLRGYARARTRLTHDRTRCFQRLEKLLEDALIKVSAVASKLTTRSVQDMIRAMIAGQRDPQVLAGLARTRMKAKHDALAEALAGLFTDHHAELAQLLLDQIAFLDTQIARLAMLIGEQLASLRAAGGTGADGATGPGPGAIALPVIARLDEVPGVGAELAASIISETGLDMTRFPSPGHLASWAGLCGRTIQSGARTRTGKGQGNAWLRGYLGRAAIAAARTSTFLGERYRRLARRRGAARAQVAVARSILIIIWHLLNDPTARYHDLGPGHYQARTDKSRKARNHIRQLQALGYTVTITQAA

SEQ ID NO: 79378 - protein, 271 aa, unidentified
MNVTPVGIDIAKSVFQVHYIDPDTGEIVNKPIKRSQFLEYFANRSRCLIGMEACGSSHHWARQLTAMGHAVKLMPAKFVKAFNIRNKNDAADARAIWLAVQQPSKAVAVKTEMQQAVLMMHRQREQLVKFRTMQINCLRGLLAEFGEVMGAGRVAMAKAIPDTIARIEERLPKVLIDSLRDQWSRIEKMGEEISTIERRLREWKKEDRAVKSIFDIPGVGLLTATAAVAMMGDPKAFKSGREFAAWAGLVPKQTGSGGKVSLHGISKRGDT

SEQ ID NO: 79379 - protein, 326 aa, unidentified
MNGSTNPAGAAAQPQVEHFVGIDVAKAKLDVSVLPTRARFTIDYGDAGLTDLLARLTALQPTLIVIEATGGYERRVAGELTAAGLPVAVVNPSRVRHLARGTGTLAKNDRLDSDNLALFAQVVRPTPREKTPQKLDELEMLVTRRRQLVAMIVMETNRLKQLSAGRARDSVVKVRASLEDERKLIDKQIFELLRSDDEWNGKLQLLTSVPGVGVTTAATLTAELPELGKLNRRQIASLVGLAPFDRDSGALRGKRFITGGRKSIRVALHMAAFNATRFNPTIKAQYERLRAAGKSFRCAMVACARKLLTILNSMAQRNQHWQPQRA

SEQ ID NO: 79380 - protein, 350 aa, unidentified
MLIIGCDYHPAFQQIAFVDSDTGELQEGRLQHREEAEKFYRDLAAQGMKVRVGIEASGHARWFERLLAELNLELWIGDAAEIRAKRVRKQKTDRQDAQHILSLLLEDRFPQIWVPSWENRDLRQLLWHRHRMVQARTRIMNQLQGVALNEGLRCKKRLWRESGREQLEAFRLARWASRRRHDLLEMLDRLTPTIAELTQAIEQEVEKCPAAQRLRTHPGVGPLTALAFILIIGRAERFQCGKQVASYLGLVPLEKSSGNQRRLGHITKQGSSLLRFLLVEAAQVTVRSLPEWRSKYYHLTMRRGRKIAKVAMARKLSVRLYWMMSKEWDYGQLTKFGSHAGKLGTGDGVK

SEQ ID NO: 79381 - protein, 419 aa, unidentified
MRIIKTKKDKIVNGRTLLVAVDLGKNKHMGYYRCPDGTDIKPFEFSNNRPGHQKFYDRICQAKAAHHLQEVVVGFESTGVYGEPLIHFLNDKGIKLVQVNPMHTKRMKELEGNSPGKTDRKDPKVIADIMELGHFLTVVIPEGVSAELRRLTQARERSVERRTAFYNQLQDLVFIIFPEFLEVMKDIKTRSAQYLLRHYPTPQAILQCGVDELSLVLRRVSCGKLGRQRAEALYEATARSVGIKEGQRSIVLEIEEILLGIERGECFIAKLEREMRGLLEQIPYSRSLLSVKGIKAVTAAGLIGEVGDFRKFRTISELLKLAGLDLYEISSGNQRGNRHITKRGRSLLRKLLFFASLNMIRKGGVMHEPYQRYTGRGMPTHKALVAISRKLLRILFALVRDHREYVVNYSERENLKLAA

SEQ ID NO: 79382 - protein, 424 aa, unidentified
MEVMHERVAGLDVHKETVVACVRVMVGGRRPKRECRTFATTTEGLLNLLEWLTATRCSHVAMEATGVYWTPVWKILSDGDFELIVANAAHIKQVPGRKTDMNDATWIADLLACGLIRASFVPEEEIQELRSLMRTRKQLVREQTRHVQRLQKTLEEANVKLDSVVSDIMGVSGRRMIEAMIGGERNPQRLAALADRGLKASPKQLYDALHGRLREHHRFLLKLHLTQWDALDATIRDIDRQVDGQIERMDETTEDQQPPFRQLILRLCSIPGVSHLSATSILAEIGRDMRRFATAGHLVAWAGLCPGQNQSAGKSKSSRLRKGAPWLKTMLVQCAWAAKRRKDSYYMAQFQRLKARRGPQKAICAVAASILTAIYHMLRANAPHRDLGADYFDRRSPDAKARRLVRQLTKLGFAVNLQPLDAAA

SEQ ID NO: 79383 - protein, 343 aa, unidentified
MIIIGVDAHKRSHTMVAIDEQGRALGERTVQATTPGHHHAFRWARKSFGSELLWAVEDVRSLTVRLERELIDAGHRVVRVPTHLMARSRKASRTPGKSDPIDALAVARVALRESDLPVATHSPRTRQLKLLLDRRDDLVQYRTAATQRLLWHLHEIDPTYEVKPGALSWSTTQAAVADMLTRHHGLVAEIAGEELWDVQDATPRINELQRRIGTVVRSAAPSLLELHGCGPLTAARIVGETADVGRFKSEAAFARWAGVAPIPDWSGTTRGQLRPFRGGNRQVNAAVHIIALTQIKKGAPGEQYYRQVRDRKGSHGAAFAALKRRVVRSIYTRLRADRSLLAD

SEQ ID NO: 79384 - protein, 446 aa, unidentified
MGNGSGLSRGDRRRNERLAGLREVVSLDRAVIAIDLADEVQSVVVTDHDSRVVARRRVRVRAWELGPVLDWALGQARRAGFEGAVVACEPTGHRWRIVEQLAVERSMVLVCVQPLLVGRAREGEDFTKDKTDDKDAVLIARLVTELRCYRPEQSDVTWARLRQLGARRQRLISESIACVQQLRDLLECVWPAALTAAAQPFDSKSWQASISVVLDRCDGDLGQVRRLGWNRFARAVQRELPRWGTTRWFSPIVRAVFDALDDPTGVAVQRPAGLERARFVLDDWHACRERLITVETRMVSVLDELDLTDLVTSIPGLSAVGAAQILAEAGDLNRFTSPRSLVKHAGLCPRENTSGKHHGVSRLSGRGRPGLRLAAWRAVWGAIHANPVYQARLAHLTTRATNPLTPGQARAAIAAALLRQLHVVVTRRVHWNPALAGQPNTHAIAA

SEQ ID NO: 79385 - protein, 417 aa, unidentified
MNQPTAQRGLFIGIDWADQKHDIHAIDREGKGFHQQLEHSAESIDAWVAEMLKLAGGQPIAIMLEQSRGVLIYALMFRENVLLYPVNPKQLARYRDSYPGGGKSDPTDAMYLARMLLERITTLKAWQPDDENTRLIANLSQQRRKLVDGQTKLRLQLTALLKSCFPVVLELFGKQHQLPLLLSVLCRWSDPRQLRRADRRLIRRVLSEHSVRNEHQQKEILERIRAAQLLTRDDAQITPSAMAVMLLAHQIQQTLKTIEEFDAAIDEAMKQHPDAHLFTNLRGAGSALVPRLLCAFGSQRDRWEDADSLASFSGIAPVTKQSGKQRHVHRRFACPKYLRQTFHEFADCARRFCPWSKARYRMLRGMKHHAALRKIARSWIRILFRVWKTRVPFDCDRYIANLKQRCPDIIPYLAQES

SEQ ID NO: 79386 - protein, 451 aa, unidentified
MEHPMAQRNRAFSRGGLQVTHPDAAGVDVGGATHYAAVRADATEEAVRQFGCFTAELNAMADWFEQCGVKIVAMESTGVYWIPLYEVLERRGFEVLLVNARHVKNVSGRKSDVLDCQWIQQLLTFGLLRGAFRPAERMCALRAFSRQRARLLRDQGRCVQHMQKAMTLMNIQLANVISDVAGATGQRIVRAIVAGERDPHQLAAYRDVRIHASEAEIAASLLGNWRDEHLFALRQALAAFDFCVSQLVECDGEVERAMALLHKHAGAPAAGKRRSRARNAPKFDVREHLFKVCGVDLTRIDGIDVSTAMTVISEIGCDMSRFATVKHFTSWLGLCPGTKISGGKVLGAATKRSVNRATQALKLAAAALRSSKSALGAYYRRMCARMDKGKAVTAAAHKLARLIYLLLTKGEEYTDRGQLYYEERYRERVVRSLNKKAFELGMQLVPCPNPA

SEQ ID NO: 79387 - protein, 408 aa, unidentified
MQVTFGIDVSKSTSTVCELIGESKNELTITNNRPGFIQLLHELTAFSKHPQIIFEATGVYSRTLQSFLEDYGYDYVILNPLKAKKEMDMGLRHNKTDKTDAYHLALIQRLYHHPINQLQSQTYKQLNALSRFYDQLTADLVMAKNRLHQALQSTFPEIENLFSSAKGKNYWQIVVRYPHCDLVRREDKKQLINWLMSLKGIAFKHALRTADKLIELAYQAYPVVSCSSIEVEQVQYYAHRLLNLSDQRENLIARMVKLAKSLPNHDLENLESIPGFAQTTAVRVLAELGDLRRFSNPNKINAFIGIDPGRYQSGEMDSNLSITKHGNAVARKLLYRAIGQIDNAAKTNPCHIADYYESKKLSSQTKGFKKIAIASIHKLIRTIYALIINDQPYDYNVATHNQKDFSRN

SEQ ID NO: 79388 - protein, 358 aa, unidentified
MADQSKLSHVIGGVDTHKDLHVAAIVDHQDRVLGTESFATTRQGYRLMLAWMRTFGDVQRVGIECSGSYGAGLLRYLQNAGIEVLEVTGPDKHDRRRRGKNDDFDAESAAHAAFAKRQTVTPRSRDGMVESLRVLRACRKSAVQARRVALQMIQMSIVCAPDKLREPLRNMTRMQLIRTLAAWRPDLTAYREVEEAYRISLKSLARRYLELHDEVADLDDMIGAIVKDLAPELLEQTAIGLNSAAQLLLTAGDNPERLKSEASFAALCGVSPVPASSGKTVRHRLNRGGDRAANSAIHIIAIGRLRLDPRTQTYVAKRIAAGNSKLEAIRSLKRYIAREVFGVIMRRQKQINQAQIAA

SEQ ID NO: 79389 - protein, 399 aa, unidentified
MYVGWDWASESHDVSVVDPDGRVVFHTEVEHTEAGLESILRRLRRFGEPAELPVAIERPSGLVVERLLAQGHPVVPIHPNTFNAARARWGASRAKSDPGDSYRLADFLRTDGHRLRRLEPLAEITRNLQALVRSRDDQVEAKVAATNQLTALLDAHWPGAGAIFGRLDSEIALAFLEAYPTPESAARLGEKRMARYLIRHSYCGRRTPAQLLTRLQSAPVAPSRLDAEILRELVLAQVRLLRTLLGSIASLDRAIAALLPEHPKTQLLAALPRLGGGVNLAQVLAEVGPILDRAIDVEQAAAECGASPVTKASGKSRSVHFRWAANTRARKALQTFADNSRHSSPWAAHVYQQARARGKRHPHAIRILMRAWLRVIWACWHSGTAYDPARHGGEQRAAA

SEQ ID NO: 79390 - protein, 356 aa, unidentified
MNKAKTLNFSGHTIFCALDVHKNSWRINNRDKDFELEDYSQDPCADSLYKHLKSRYPGANFKIAYEAGFCGFGIHRCLSKHDDVECLVVNAADVPTSDKEKKRKTDKIDARKISRELSKGNLAGIYIPDPVMEHGRSLVRQRTRLVQDQTRCKNRIWHLLMFSGLKLDADKPKQYWSKKFIESLRKLPVTDDGLKQTLEIAIDEYLAIRMLIMKAILYMRKISGQSLFQPVQKVLQSIPGIGLINAMIIHTEIMDMKRYPRLDALCNDCGIVPDTEDSGDTKKDKGITHRCNHYLRPAIVESSWVIIRKDPAMLMKYNQYCQRMHENKAIIKIAKHLLSRIRYVWLQQKEYVIGVV

SEQ ID NO: 79391 - protein, 322 aa, unidentified
MAMLSFGGIDVSKDRLDITVLPDEQCSSVSNDAAGWLELIEQLRGSSITAIGVEASGGYERGVVRALLAAGMPVRQVNPFKLRQFAKASGILAKNDRLDARMIASFVAIMPTRPAQRQTPMIEQLAAMLTVRRQLSDHKVATENASRLLEDAMLQRLSRRRVARLTADIDLLDQRLVEIVTADPALAHRFRLLTSMPGVGAVLACTLIALLPELGHMSRKQVAALVGLAPYDFDSGKLKGRRCIWGGRARVRHVLYMAALSASNWNPALKAFHDRLEATGKKPKVVIVAVMRKMITTLNAMLRDGTAWVDRYSGRRSASTAR

SEQ ID NO: 79392 - protein, 320 aa, unidentified
MMAQNDLVVAGIDVAKDKVDVCIRALSLRRTFAATAEGRRELASWLRRQKVGKAVMEASGGYERDWAKALRGAKIEVRIVDPKRVRSFAQSAGRLAKNDTIDAEMIAWFAETFDEARSQAYDATREQLHQMVNARQALKGMQAKLESQGEHALPAAVQRMHARILKTITVELVKFEAAIAAMIQATPRFTELAEIIESVPGIGRTTSAAIIAAMPELGQANNKIVAALLGVAPYDDDSGRRRGERHIKGGRRRTRNVFYMACLGAATQHNPVLKAFYDRLVAKGKEKKVALIACMRKLISILNIMIERRQKWDASRYALS

SEQ ID NO: 79393 - protein, 418 aa, unidentified
MDVVVERCAGLDVHRDNVVATVRVPSEDQHRYDRQTRTFKATLAGLAALRAWLEGWAVTLVGMEATGVYWMTVFQALEDRFECWLLNAHHLRNVPGRKTDVKDSEWICDLVAHGLVRASFVPPPEIRRLRDFTRLRKAQVNERARVIQRLEKVLQEAGIKLTSVASGPYSKSARAMLEALLSGISAPEQLAELAKARMRQKIPQLREALANRFEIEHHGVLVAQLLAHIDTLDQAIANLDEKISAMLAPHQPIVELLCTIPGVAERTAQVLIAECGLDMSQWPTVGHFASWAGMCPGNRQSAGRQRSGHTRPGPHWLREALTESAKAAARTKGTYLAAHHAQLRGRRGEAKATGATRHDILVAYYHIVRDQVPFRELGPDWQRRRYSPEHRARRLQRQLEALGYSVVIEQRQEAEQAA

SEQ ID NO: 79394 - protein, 342 aa, unidentified
MNEYDGRQFVGIDLHRRRSVIVRQSESGEQLSAVRIINDPVALGLEIERAGPNPEVVLEATYGWYWAVDTLQAAGARVHLAHPLGVKGFRYRRVKNDVRDAADLADLLRMNRLPEAWIAPPATRELRELVRYRAKIVAVRSGLKAQVHAVLAKAGVLIPVSDLFGVGGRQRLAKVPLGAAYVQRVISLLELIDALDAHETRFSIMVADKLCGHAGYQAIQQLPGVGPILGAVFVAEIGDVHRFADPAPLCSWAGLTPRHHESDTVVRRGHITKQGSKLVRWAAVEAIQRHPATSKIALDRTRIASRRGKNIAKIAAARKLLTLVYYGLRDGHIRALAPRRAA

SEQ ID NO: 79395 - protein, 315 aa, unidentified
MEVAGRFIGIDLGKRTYEMCIVDQKGKITRTGGKTDFAGIDKLCEKLNADDAVAIEACNLAFRIERSIRKSVGCKVCIMNAGRLAVIYMSTRKTDKEDSMKLAKLLKNHDEDELPIVTPPSDEEWERRKLLSEYRSLKCQRTKEINKLHAIFEHNGYTQFVRKDMSSEKNRDNILPLLKGYEKEEAERLIERLTLLEKQIGQLLQKINAEVEKDEKIQKVMTVPGIGPITALAYVAYVGDVKRFDNAHQVSNFIGFVPKVDNSCTICRSGHTTKQGNPLLRSLLVQAAWATVKSKNGVVLIVHGKSFCQSSVVSQ

SEQ ID NO: 79396 - protein, 404 aa, unidentified
MQATPTFAGIDWSWQHHALCIVDGGGQRIDEATVPHSRPGLNKITTLLRHHGVVRVGIERGDGPVVEHLIRDGFEVVVISARQVTSLRARYGSAGNKDDRFDAFVLADALRTDAGRWSIVQPDREETIALRMLVRARHDLIGHRIAVANQLLAVLQHNFPGAVGLFSQLDIPISLAFLRRFPTEAKAAWLTPLRLAHWLKANSYCGRHTPTHLIEHLHQAATGRVTGAAAEASEVIVETLVGLLATLRREQDQLEARIKEALLAHPDGIIFQSLPRAGTIRAATLLAEIGDCRARFPHPAALAAAAGVAPSTRQSGKHLTVAYRRGCNKQLRAALIDWAQDTPRANTWARDTYDRARARGCRHPHAARILAQGWTRILWRCWHDHLPYNPDLHGRLNTLQRPAA

SEQ ID NO: 79397 - protein, 392 aa, unidentified
MVVSVGIDVSKDKHDCFIVSSEGEVLADVFTIPNTMDGFHCLLQRIRDCTAPQDKIKVGLEATGHYSYNLLGFLLDNGLATYVLNPLRTNLYRKSLSLRKTKTDRVDARTIASMLLSDAGLKPYTDTAYHNEELKSLTRYRFDKVKERAKLKSSIARLVCILFPELEKLVPSLHIASVYALLEEFPGAKQIAAAHLTRLKTLLETASKGHYKRDMALEIRDAARNSIGSWMPAKSLELQHTIRLIRELDDEIAEIEKQIQAIMDELNSPITTIPGIGFRMAAMILAEVGDFTRFDSPDKLLAYAGMSPSTYQSGQLKNCYPHMEKRGSRYLRYALYNATKYVCHWDPAFADYLAKKRAEGKHYNIAISHAAKKLVRLIFAMENSRQPYFSAA

SEQ ID NO: 79398 - protein, 342 aa, unidentified
MQITTIGLDIAKNVFQVHGIDAAEKVVVRKQLRRSQVLGFFKALPPCLIGLEACATAHYWARELTKLGHQVRLMPAKDVKAYVKRNKNDAADAEAICEAVRRPTMRFVQIKSAEQQGRLMLHRTRDLLMRQRTQVINALRAHLAELGTTSAQGREGLKELLKIVASDADERLPADAHASLVVLAAELQAMQTLIGLIEKRIVTQHRENKASKRLLTIPGIGIIGATAIADTVTDPKAFRSGRDFAAWIGLVPRQDSTGGKQKLGPISKQGDRYLRRILVVGAHSVLRRARLNPQKHPWLTQLLARRPFKVVAVALANKMARMAWALLAKGGAYRAPALAATA

SEQ ID NO: 79399 - protein, 377 aa, unidentified
MSKIRFVGLDVHAETIAVAVAETGGEVRSHGVIPNRLESVRKLIGKLGPVGALKACYEAGPTGYVLYWQLTQLGVACELIAPSLVPTKAGDRVKTDRRDAEKLARCYRDGELTAVWVPDAAHEALRDLVRAREAAKKDQLRARHRLGKFLLRHGRRPEGLKAWTKKYLEWIKTHVHFDQAALEVTLADYLEEVDHVAARILKLEKAIDEAVRQAPPEIRAVIEALQALRGVAQTTAATIVSELGCVSRFQSPRQLMGYSGLVAREHSSGNRVRRGGITKTGNSHLRRVLVEAAWAYQHRPNVTGFLLRRQKNLALSDEVKKIAWKAQQRLHKRYQAFAARDKNKNQIVTALGRELLGFIWAIAVHIEGQQKQLRKIA

SEQ ID NO: 79400 - protein, 409 aa, unidentified
MPLRTTYEVGGEGIPHAAGTCNVPLRTTYEVGGEGISYVAGTCNVPLRTTYDKIKRPPHKQVVRCKKNPEEVKMQKYDHYVAVDWSKNNMAIAKMTNHSDIPKVVDVQTDVEDLKVYLKQLKGSVILTVEESTPAQWLYTELNGLVSKMIVCDPYRNKLLNEGSKTDKIDAKKLVKLLKAQLLKEVYHSGEDFLKLRKLVRGYMAITKNGVRLKNQRAALWLSAGRIKEDIEIVERHEEFAIKQFDSIIASNENSRTAYEKEFKRLRNKNEVIKSVTTIPGIDVKGAVKMVALVVDARRFKNKSAWLSYCGLIKHEKISGGKSYGRRNPRYSRIAKSVFKTAAIACTRMDETSVFKRYYEELIKNKNYPEFNARHALARRIAIITLGVLKTGKPFEDRWNGVKNKSPQD

SEQ ID NO: 79401 - protein, 409 aa, unidentified
MDRQLERCCGLDVHKETIAACVRIGGRSGRASQHVQTFRTTAADLVILRDWLAAHGVTHVAMESTGVYWKPVFYALESDFTCLLINATHIKQVPGRKTDIQDCVWIAQLLEHGLLRGSFVPPVPIRELRDLTRYRKALIQDRTRVANRLHKALEDAGIKLATVASDILGVSGRAMLEALAQGTTDPTMLAELARGRLRGKLPALRAALAGRFRTHHAFLVGQLLTHLDYLDEAIGTLSTEIERHLIPFSDQLNRLDSIPGINRRTAEVIIAEVGVDMRAFPTAAHLASWAALCPGNNESAGKHKSGKTRKGNRWLRTALIEAAAGASRAKDSALRARFQRVLRHRGPKKAVVALAHALLRIAYHVLAQGTTYRELGGNYYDRRHTQRLTRRAIRLLEGQGYRVILEPAA

SEQ ID NO: 79402 - protein, 331 aa, unidentified
MKTKEIIGIDVSKLSLDCYDHKSGSHEIFDNTLTAIAKMVSWSLKTSGANKNELWFVFEHTGLYSNQLIQYLSSNGCQFHVAPGLEIKRSLGVTRGKSDKADARRIALYGYRFREELVPFQVASEALASLKRLMSMRRKLVAQRAGHIATLGEQQRILNKENEKVLFTAQQEIIHTLDLQITNIEQELDRIIAEDPELQNLYGLLTTVKGVGKVTARFLIVHTVGFTAFSTWRKFASYCGIAPFPNTSGTSIRGKTKISHLANKEGKALLSLCAGSAIQYNPEMKAFYKRRIEEGKNKMSSLNIVRNKILARAFAVVNRGTPYVNTMKYAS

SEQ ID NO: 79403 - protein, 373 aa, unidentified
MEGKMYCGIDVAKNKSSVCILGQDKEVKAEFEIEHTREGFEQLEKHLTKDTKIAMEITGIYCKTLYEYLKERYNVSYIDNIQMHNFAKLHFYYVKNDKVDAKLIALYLLSGHKTVEIVKFDELKDLSKVYQSTIKQLTRYKLMFKSQLNVIFPELEKEFSIQSFRAIASLLSKHPTPEKIAELEAGEINKFLANKAKSEKIKRLAGESIGIKDTPLFSFKNNIKIIIFYQSLIDKLKAEMSANLAKTPYCKLLDEFGYNVISLATIVGEIGDIRRFSNYKKLVKYCGLDVSEKQSGRAKSVNCFITKRGNKTLRFTFYNLVLTHLRNENNISNFYYRLKEAGKHPKQCHMAAARKLVVKCWFDMMRCHYHSSL

SEQ ID NO: 79404 - protein, 343 aa, unidentified
MNITTIGLDLAKSVFHVVCFNKQFKEVKKRMLRRNQVLQFFAQLQPCLVAMEACASSHYWGRELRALGHDVKLIPPQHVKPYLRGNKNDYNDARAIAEASTRPSMTFVAIKTTEEQDMQAIHRMRAQCIRDRTALSNSTRGLLGEYGIVLPKGLATLRKSIHGLLEDAENGLSDRFRNLLARRYGQFVELDEHIAFYTNELELLSQQDDACQRLQTVPGFGPIVSSAFRSVIGDGRAYGHGRDASASLGLVPRQHSSGGKNVLLGISKRGDSYLRSQLVHGARAVVIQAARKDDPLSKWINRIRAERGWNKAVVAMANKMARIGWAILRHNIIYQPASEPSVR

SEQ ID NO: 79405 - protein, 349 aa, unidentified
MVIVGIDAHKRTHTAVAIDAAGRKLGEKTTRMTTTEANLELLRWADEFGPERRFAVEDCRHLSRRLEADLLAAGEELVRVPPKMMAHARDAARTYGKSDPIDALAVARAAVREPDLPLARLDGPARDLRLLVDHREDLVRDRVSHINRLRWHLHELDPSWDPTPRALVRFKHLDATLTRLDGLEGTVAVVARDLVGRIRELTVAANDLQRRIAEAVERIAPTLLGLAGVGVLSAAKIVAETADVRRFRSKDCFARHNGTAPLPVWSGNHPRHRLSRTGNRQLNAAIHRIAITQMRIHDGAKAYLERRITMGNTKTEALRALKRRLSDVVFRALLVDAETAAEARFGEAA

SEQ ID NO: 79406 - protein, 307 aa, unidentified
MPEAGRFVGIDVAKAELEVVERPSGARWTVPNDVAGWGQLREQLAAARATAGYELGVVASLAAAGLPVVVLNPRQVRDFAKAIGRLAKTDALDAAVLAHFADVVRPPVRPLTEPVTEALEAWLTRRRQLVDMLTAEEQRRARAPQAIQRQIDAHVQWLRRQLEVVEKDLTDTLRASPVWREKDELLRSVPGVGPIMAVTLLAALPELGRLNRKQIAALVGVAPINRDSGTHRGRRAIWGGRAHVRATLYMATLTAIRCNPVIRTFFGRLVAAGKLKKVALTACMRKLLTILNAMMAARTAWKPGIVA

SEQ ID NO: 79407 - protein, 360 aa, unidentified
MTKVNQLDFTGTTIFCGLDVHKSSWRVNIRDSELELKDFTQPADATLLYRHLTKNYPGAKYKAGYEAGFCGFGIHRQLSSLGIECVLLNAADIPKGDKDRRQKNDKRDARSISQELSTKRTLKSLYVPSPAWEHARTLVRNRHQQISDSTRCKCRIWQFLHFSSLPAPDKEETGQYWSRKFIQKLEDMVCNGSLELKSALQIKLQDYLNKRQLLLLSTRAIRSMYRQQAYWPQMQLILSVPGIGEINAAIILFELQDIFRFKSFDNLCSYVGLIPDTDDSGETKRNKGLTHRRNNFLREALIESSWVLVKKDPAMLLKYKNYCKHMHKNKAIIRIARHLLARINYVLRKQTEYVNGLLQG

SEQ ID NO: 79408 - protein, 395 aa, unidentified
MFIVGIDVAKRSHEVCMITSDGQTVQRPFSIRNNCTGYNLMLEKIRKHTNIKSQIVFAMESTAHYWLALFTRLRKDGYHVILLNPIQTSAMRDMFIRKIKTDAKDSFIIAELIRFGRYAESNVAQDRLLALKELCRNRFYLVDMAGDLKRKLIALIDRVFPEYEAQFDTIFCKSSVALLKKYPTPQKLSNAHLDKLTELLWNSSNGHSGEWKARELRELARNSFGVEDCDGAYSTLILLMLDQIQSLSGKADALEKEISRLFQSFDTTVTTIPGVGPIIGAVILSEVGDISRFSSADKLAAYIGVDPSVNQSGEFQAAHAHMSKRGSPYLRRCIWMASQVAVQRDPMFRAYYEKKAAEGLKYMTIIGHVTRKMTAVIFAILRDHKVYEPVLPTAA

SEQ ID NO: 79409 - protein, 337 aa, unidentified
MDRRYVGIDLHRRRSVIYAMNADGERLFCERIDNDALRLLEVVGAAGEGAEVVIEATYGWYWAVDLLSDAGFSVHLAHPSGNDWGKRRVKNDERDARDLADLLRLGRLAEAWIAPPAVREARELVRYRARLVQLRSGLKAQVHAVMAKEGVLPGVTDMFGPKGRQLLDAMELADAYLVRVESLRDLIEIYDREVGMLERKIHELLRDDRGYQAIQALDGVGRTLGAIFVTEIGDITRFRSPEALCSWAGLTPRHRESDTKVVRGKITKQGSKLVRWAALEAIVRYHGGPPLRDGFHRIAERRGTNKARIATARRLMTLVYYGLRDGEIRCLQQRAVA

SEQ ID NO: 79410 - protein, 404 aa, unidentified
MNMNAVGIDVSKGKSMVAILRPYGEIISKPFEVKHTVSGIRSLIEQIQSIDGESRIVMEHTGRYYEPLVRELSKADLFVSAINPKLIKDFGDNSLRKVKSDKADAVKIARYTLDSWTELRQYSLMDEIRNQLKTMNRQFDFYMKHKTAMKNNLISMLDQTYPGANTYFDSPAREDGSQKWVDFSATYWHVDCVRKLSLNAFIDHYQKWCKRRKYNFSRSKAVEIYEASKELVSILPKDDLTKLIIKQAVEQLNTASQTVDQLRTMMNEAASKLPEYPVVMAMKGVGPSLGPQLMAEIGDVTRFTHKGAVTAFAGVDPGVNDSGDYSQKSVHASKHGSPVLRKTLFQVMDILIKTKPDDAVYLFMNKKRTEGKPYYVYMTAGANKFLRVYYGKVKEYLSTLPQSN

SEQ ID NO: 79411 - protein, 354 aa, unidentified
METTADTYVGLDVHRKIVVATALDGTGHELAQEKFGPEPSELTDFLSRLPGRKHVALEACSMWAPYYDTAASTGAEVTLTNPYKTRLIAEASLKSDKVDSEALARLLRVDSLPTSFAPSPEVRALRTLVQDRVFYRRYWTAVANHTYHFLIARGIPYEDRLLKFRRKREVLRKLHLPEIDRGLATLLALEERCKELEREIHSAWVESEDGQLLTTIPGIGELTAMALVAYLCPIERFPTSRHAASYVGLVPRSYQSADRQYHGKLKRDSNGFVRWLLVEASWTHRHRERKGDVARTARRITRHRGSGKGTVAGAHKLLRIVFAILKERRPYLPHAPEPTAPTQALRRLRTTASQ

SEQ ID NO: 79412 - protein, 336 aa, unidentified
MTIIRIGLDTSKHVFQIHGVDENEKPVLRRQLRRSEVEKFFAQLPPTRIGIEACGASHHWARLLRGLGHAVLLMPPQYIKGYVKRGKNDAIDAEAICEAMSRPTMRFVPVKTAEQQAALTMLGVRDLLVKQRTMLINALRGHAAEFGVTAAKGPNKVVELLQRLATGEGVPALAREMLGMLASQLEAVNGKLKAIEARLMAWHRQDQTSQCLATIPGVGPIAGVSFALKIPDARAFRSARHFAAWIGITPRENSTAGKHRPGKISHEGDESLRRLLVLGATAVIQRAKRGRASPWLLGLLARKPKKLAAVALANKMARVIWAMMISGEVYRRPQEA

SEQ ID NO: 79413 - protein, 409 aa, unidentified
MTRSIGLDVHPTTVYVTVLNPSQDKLEQYEFPLETPALEAFLASLRPDDRVALEATGNTYYLYNRLKKVVDDVVVAETAKLKKLLGGAKTDRNDSGGLAYLAYIGALPTVWMPDERTQKSREFLQYRAGLVRDQTRYQNKIRSLLSKYNQKCPVADLRSNDAQLFLTKVKLNLPWLSREKLALLLEQMQAVSESLKRADDLVEALAAEHTETDLLATVPGVDSLLALTILACVGDIGRFPTPESLANYAGLVPSVHSSGVKKRHGKITRKGNRLLRWAATQAVQSLRKVPGPFRNLYRRLTRRGKHGRAVVACGRKLLVVLWHMLRTGEAFRGADPVRVERKKTRRQNRRSQARARLSDSRARHDRTLTANLAILRDLASQNKSATPIPEQLRPHFCARHADQLLRLRS

SEQ ID NO: 79414 - protein, 381 aa, unidentified
METLHSHCAGLDVHQKEIVVCIYIGNSETELTKEIRTFPTFTKHLFEMLQWLEELHITHLAMESTGIYWKPVFNILEDYFDITLANAQRIKNVPGRKTDVADAEWIAKLLRYGLIEKSFVPPSDIRELRDLTRLRKKMIGNMTAEKNRIQKTLECSNIKLGSIISDVFGVSGRKLLTRLVEQGYVNSHEVEENIHGSMMPKASQITESLFGTLNPHQIFLIRQSWNHILFIEESIQQIEEKIDELLSPYQEQVELLLTIPGVKKHAAASIIAEVGVEMGQFPSAQHLASWAGLSPGNHESAGKKKSTRTTKGNPHIQSMLCEVAWAISRTRHTWLSGKYWSLAARRGKKKALIAIAHKVIKIIYHILDQRSGFIEYSKILS

SEQ ID NO: 79415 - protein, 360 aa, unidentified
MISERTSVGLDVHALSVVGCAIDGVTGELDRRRLTPDPAEVLAWVSSLPGPVWVVYEAGPTGFGLVRFLRERGVDCLVAAPSKLQRPAGDRVKTDAGDALLLARLLKLGEIVEVTLPTVEQEAARDLVRAREDARGDLMRARHRLSKLLLRQGIVYYGGQAWTGKHDVWLRSQRFELSGLQLAYDSAYEAMLHTVDRRDRLDRAITEMAMSSDYREVVQRLACLRGISTLTGFGLAVEIGDWHRFTGSSIGAYLGLVPSEHSSGKSRSQGSITKTGNTHARRLLVEAAWHHRKTYRTPGATMRARWDQAPMPARVRGHEGNTRLHARWNAFTVRKKRPVIANVAIARELAGWCWSLAVLE

SEQ ID NO: 79416 - protein, 439 aa, unidentified
MPRKKRTTDEVVEVVYERCCGMDIHKDNITACLNIGGKREVKEYTTMTDDLLLLSNWLKENEVEMVAMESTGSYWKPIFNIFEIQNIPAILVNAQHVKTLSGCKTDKRDAKWISGLLRHGLLKPSFVPVRAQRELRELIKYRISLTEESVRVMNRMEKVLQGANIKLSSVISKTGTKTELAIIKALSEGIYDPRLLSEMAKGTLRAKKEELIRSLNGLIEEHQRFLLKSMYNHLERLNAEIETVEGEIDKRMEADDEVLKRLEEIPGVGKTTAQAILAEIGTDMEQFPNEGHLASWAGICPGQNESAGKRKSGKTRKGNSTLKKTLVQCANSASRAKDSYLSAQHKRIAARRGRKRANVAVAHSILIICYFIIKDGTTYEDLGGDYFDRRNKDRVIHRSIAKLESLGYDVILKEKSEENQTTFVIKEKPPDVSVDENVA

SEQ ID NO: 79417 - protein, 307 aa, unidentified
MFVGIDVAKDRLDVHVRPAGEAFTVARDGEGIEDLAKRLSAMTPTLVVLEATGGFETVVAAGLAAASLPVAVVNPRQIRDFARATARLAKTDTLDAAVIAHFAEAVNPPPRPLADAQSRLLGELMARRRQLIEMIGAESNRRRMLTVRRTLKSVDRVLATLKAQLEEIDHDIDIAVRGTPAWRETEDLLISVPGIGPRIARTLIAELPELGRLDRRQIASLTGVAPFNRDSGTLRGRRTIAGGRPVVRAALYMSVLVSIRRKLPLAHTYHRLRAAGKPAKVAIVACMRKLVTILNAILRDKKPWATA

SEQ ID NO: 79418 - protein, 354 aa, unidentified
MSQTPNTAVAVIGIDIGKNSFHVVGHDAGGAIVLRQKWSRGQVEARLANMPPCRVGMEACVGAHHLSRKLASLGHDARLMPAKYVRPYSKGQKNDFNDAEAIAEAVQRPTMKFVATKTAEQLDLQALHRVRERLVSQRTGIINQIRAFMLERGIAVRQGIGFLRKELPTILATRTDALSPRMLRVIEELAGDWRRLDQRIDGLSGEIEALARQDQACSRLMTVPGIGPIISSAMVAAIGTGDVFSKGRDFGAWLGLVPKQISTGDRTILGKISRRGNRYLRVLFVQAAWVVLVKIKDWERYGLKSWIEAAKRRLHHNVLAIALANKLARIAWAVLAKGRAFELTRTDDASVRPA

SEQ ID NO: 79419 - protein, 378 aa, unidentified
MPDVSSTAPEQVRLWVALDVHKFSIVAATLPPDGGTPEVAQIETTPAAIRRFIARLGGPEGLAVCYEAGPGGYDLLRLLTRIGVACDVVAPSLVPVRPGDRVKTDRRDAKKLVRLFRAGELRFVAPPSPAHEGLRDLVRCRDDVRRARTAARHQVAKQLLRHGHIYREGKKSWTKQHVAWVRAQRLEHPLAQRALEHARAHLDSLDAQLAALDAELEQIARREPWADPVRWLCAFRGVAYRTALGLLAEIGDWHRFGHPRELAAYLGLVPSEYSSGEQRHRGHITHAGNQHARRLLVEAAWHYQHRPRRPRTEPDVPPEVAARAWRAQLRLHHRHRALTSHGKRSTVATVAVARELAGFLWAAMTHQPLRDEQETAAA

SEQ ID NO: 79420 - protein, 386 aa, unidentified
MKTVAGLDVHKDSVYLCILRENGEKIERVFGVLTPQLDSMRDFMAENKVSEVAMESTSVYWIPIWRVLVDSFELKLVNPYFIRQLPGRKSDVRDAQWIAECVMKELIRGSFIPPPLVQQLRLYDRRIFELNAELVRKYSKIDAILQRCNIRLSNYVSNTDCKSYKNVVKRISEGVTSPQELLMLVHKRIINKHGEDTILAALTGVVSEAEIDMLAQYVAESALLEDNKNKCIEKMREICNREFEEQMKNLQTIPGVSERSALTVLAEIGPDVNAFPSAKHLVSWCGFNPRNDESNKKIKSNKITHGNRFIRISSVQCAWAASRTKDCYFSKFYAFHTQVRKKFKLKVVVSVARKILVCIWHILKFNVSYKDFEPQKSVAKDSTQLA

SEQ ID NO: 79421 - protein, 347 aa, unidentified
MKKIFIGIDVSKEKCDATAISAENGLTGVEKLDYLVFENRPKGFRTLLSWAKKLRSDIPQEDILFVCETTGAYDRALCDYIYSKGLDIWRESALQILWSSGVRRGKDDKTDSLMIAEYALHHMDKVHLYESPDSRILEIRTLFLYRRKLEQEKTSKLVRIKELEATAGKSRTLTFILRDAKKSIRQLEKSIKECEDKILELIEADKALNKSYQHLDSVKGLGIVNITALIVYTNNFKAFKTSRKMATYWGVAAFRSKSGTSVDKRADVRNLSSSMLKSYLTQAAMHTIAKGGIYHDYYHRKIAEGKTHSIALNNAKNKLLHLAMSLVTHDMDYEANHEFLRTQRVAN

SEQ ID NO: 79422 - protein, 337 aa, unidentified
MIIIGCDFHPSFQQIAMLDTETGATEEHKLMHTSGEAESFYRKLASPAVVGIETVGNDQWFVQLLQKLGHEVRVGDAAQIRASYVRKQKTDRRDAKHILRLLVEERFPRIWIADTEMRDHRQLLRHRHKLVQIRTRVKNELQHLMLNQGMQKKQKLWSTEGRAALASLPLAPWTDRRRKDLLSLLVMLDAQLESLNDAVTRVAQEYPGVPLLMSQPGVGAVTALAFVLTLGDVHRFPRGKQVASYLGLVPREHSSGGKQRMGGISKQGNRLLRFLLVEAANIAVRFDPELRKEYLHRCHQKHFTVAKVATARKLAIRMYWMLRTQTPYPQVLSSRVA

SEQ ID NO: 79423 - protein, 344 aa, unidentified
MKKVVAGIDLHSNNVVIGIMDMDGKRVASQKVSCELEEVAKFLAPYEKRLEQIAVESTYNWYWLVDGLRALKYPVVLANPAGMQQYNGIKHADDTNGAFFLAELLRLNILPTGHIYDPELRPVRDLLRRRLMLVHHRTALMLSFKSLYTRTTGQELARGKLKDLEVQEAQELYEHPANQLIAGMQVKHIEQLTESIEKIEQAVLSCARELPCYSKLTTLPGVGRILGMTITMEVGEVKRFAGQGNFASYCRTVEAKRTSNRKKKGENNSKCGNKYLAWAFVEAANFARRYDEQCRRWHDRKAAKTSKVIATKALACKLAKAAWYLMAGDVAYDAKRMFGPATTK

SEQ ID NO: 79424 - protein, 398 aa, unidentified
MRFAGIDIGGERHAVAVVNEGGAVLVKSTFFGEDAAGYERVKDLLDDPDDCLVAMEATGHYWRNLFAFLVGQGFKVALLNPLRTRRFAEEELERTKTDSVDALGIARFAAQKRPVPTPVADEVTAELRELVRLRTRYVDEHSDRMRQLHRAVDLGFPEFTCHVRMNTVLATAILARYPTARSYSGVSVRKLARLAYDGRHQVGEILARALIETAKISVGSHHSEAYGLQVKYTCSDMELLRNRVKQLDQEIEGKLQTHEVGKLLTTIDGIGSRTAACLIAELGDPSRFRDAAALASYVGVVPRLRQSGKRAFSGARGLPLGNARLRHRLWMPTLVAVRKNPWLRAHYDRLLAAGKRPKVAIVACMRKLLGAIYSVARNRRPFVPRLATAGHEQPMTAS

SEQ ID NO: 79425 - protein, 410 aa, unidentified
MLFIGDDWAEAHHDIEIEDEAGRLLVRKRLVEGLAGVTLLHELIAEHLDPSGEPDQVLVGIETDRGPWVQALLATGYLVYAINPLQVARYRERHSTSGAKSDPGDAHLLAEIVRLDRAHHRRIAGDSEIAEHVKVAARAHQTMIWSRVRQVNTLRSLLREYYPAALAVFGTDLASPDALAVLAAAPTPELGRRLSQARIETLLRKAGRQRNIAATAARIKTALGSDQLTARPGVVPAYAASASALVAVLTTMVTQTEVLAGQVEQGFGRHPDVEIYRSQPGLGVILGARVLAEFGDDSDRYADAKARKNYSGMSPITRASGTKRVVLARYARNRRLGDALFRQAYSALRASPGARACYDRQRARGASHYQALRTLANRLVGILHGCLSHHTLYDENQAWHTPDDKLTIAA

SEQ ID NO: 79426 - protein, 374 aa, unidentified
MEGITFVGLDAHKVWISVAMLMPGRETAIEWQVPNEAAAIRKMLRRIEREAPGEVRFCYEAGPCGYALQRQIIAWSEASCMVVAPSLIPTKPGERVKTDRRDARKLAFLFRAGLLTEVQPPTEADEAARDLCRAREDARVDLLRCRHRLTKFLLRRGIVFTAGKRAWTNMHRQWLYSLRFEHVCDQTVLADYLLAVEHIEQRLTSFVSQLEQLAKDERYAQAVATLRCFRGFATVTAVTIVAELHTFHRFSSPRKLMAFVGLVPSEHTSGQRRRLGAITKTGNSHVRRLLIEAAWNYRHRPRVGTLARRRTGQSPRVIALADRAMQRLYRRYIHLTLKGVPSQKATVAIARELVGFVWAALSPLALAAELPHAS

SEQ ID NO: 79427 - protein, 394 aa, unidentified
MKLVGIDVGKNSHHFCVMDKETGEFNVTPSSFSNNKKGFDFLINSLKPYSKKSILLGMEDTGHYHVALLKFLLSNGYTVALINPKTTDLTRKMEGGITKNDKLDTITICDVLDTPERKKQYRITKVDRFDLYEQRQLTRHHHNLKEELNIYCNRLQKSIDLVFPEFNTLFGSKYGVVYMNLLKTFGSAEAIASTDIRTIRKCFEIKGRGGRISLTAEKLKECAKNSIGISSEVETIQIKHLVSQIMLIKEQIAEIDKKIEEFSIKNNSPILTIPGISHFSGTSIISELGDICNYTKASQIIKFAGVAPYHYESSQFTAQHTAITKKGSKYLRKTLYQIILPVISNNEVFYAYYTKKLNEGKGHRCAQDHCIRKLLRVIYHLLSTRQPFNPKLLV

SEQ ID NO: 79428 - protein, 345 aa, unidentified
MEQISRIGMDTSKYIFQLHGVNTAEQPVLRKKLRRKEMFAFLEKLAPTVIAIEACGASHHCARLLQSFGHSVKLIAPQLVKPYIKRGKNDAADAEALCEAMSRPTMRFVPVKTAEQQAGLMLVGVRDRLIRNRTQLSNAIRGYAGEFGLTAAKGKAHLAPLLERIHADESLPALARELFAAQAEEYAQLQAQIDEVDARLMAWHRADECSRRLTKIPGVGPIGAVMLTMKTPEPELFRSGRQFAAWIGLTPKDHSTAGKVRLGGITRAGDEGLRSVLVVGATTVIQHAQRGGRPSPWLTQLLKRKSPKLAAVALANKTARIAWKLMVTGENYAAKAAPAALAAAA

SEQ ID NO: 79429 - protein, 313 aa, unidentified
MSQNNPAILYVGLDVAKFSLQLHLAGDLHSLPNDPKGHARLLKLLRAHPGAQIVCEATGGYEQPVIRALQAADIPVSVLEAGRVRYFARAQGQRAKTDPIDAAVLTHYGVTFQPAPTPGLSVQQQRLADVTQRRRQLIHTRTMETNRADHYTDPLCVRQHRQFLKLLEKQIDQCDQIITSLIAADAGLARKAKRLEAIPGVGRVVAATVLAEMPELGKLNTQTAAALAGVAPYNRDSGKLTGWRHISGGRRPVRSALYMAALSAVRYDRILKDFYQRLRAAGKKPLVALTACMRKLIVLMNHLLKNENFQLAS

SEQ ID NO: 79430 - protein, 422 aa, unidentified
MVLKGVPMALKIVYKICCGIDVHKNFVVACIASTDGKGVTTYESHRFSTYTRGLKNLLQWLLKHNCKDVCMESTGKYWIPVYNVLENDCTIVLAHPKYVKAIRGKKTDKKDAKWIADLFKHDLVTGSFMPPADIRQLRDLMRYRFKLTCFKSSEKNRLQNCLTVSNIQLGNVVSDTFGKSAQAILDKLLENPADTSFDLEPLVYKSLKKKLPELRDAIDGYITPEQAGKLKVIKAHYENLESRKAELEELILALAAPYQQELAILQTAPGIRSDFTAIGIISEIGTNMEAFPSAKHLCSWAGLAPTNNESAGKKKSVRVSKAGCYIKPLLVQCANAVIKSNKHPEFRNRYLRIKKRRGHKKAIIAVARMLLTALYHMLKNGENYNSELYRKSEVSPVDREITVEQAIIIARNQGYKIKSATA

SEQ ID NO: 79431 - protein, 309 aa, unidentified
MKESFVYVGVDVAKAYLQVAAGEQNVGYANTPAGHRELVGWLRSLGKVAVVLEATGGYERALVEALQAGGIVVSVVNPRQVRDFARAQGRLAKTDKIDARVLVDYARALHPRPTVAQSPGQRRLTELVRTRSQLIASRVIQENQLEHVAEPMARRCLREMVRAFALRIARLDQAIAELVDGDAVLGPKARRLAQVQGVGVTTAAMLLAELPELGSLAKTEAAALAGLAPRNRDSGRFRGQRRIGGGRHAVRTGLWMPTLVAVRHNPVLKAFYQRLRANGKPAKVALTACARKLLIYLNSLLKNHQLCPC

SEQ ID NO: 79432 - protein, 331 aa, unidentified
MGNVTTIGIDLAKNVFSLHGVDASGVVVLRKTVSRARLLEVVAKHPACLIGLEACSGAHEWARRFQELGHTVKLMAPRFVAPYRKNGKNDGNDAEAICEAVSRPSMRFVPIKTLEQQAVLCLHRVRQGFVEERTATINRLRGLLAEFGFVIPQKAAEVRRRATEWLEQLPPRAACAVRDLREHLRVLDARVKEYERSIETHARDHEHAKLVQQRLGIGPMTASAIVASVGDVREFKNGRQFSAWLGLVPRQHSTGGKQRLGHITGRGDPYLRTLLVMGARSVLQRASSQSDPLSRWALAVRLRRGYHRACIAVAAKNARVVWAMLNQRAST

SEQ ID NO: 79433 - protein, 409 aa, unidentified
MNDSGKRYIGLDVHKHYLIALAVDQELQVVLPARRVELAHLEAWMKKTLTRQDEVVLEMTTNTWQLYDELAAYAGAVTVVHPPHVALITRSQVMNDKIAASILARLLAKGLLVGIWIPPQEVPELRGLVAQRQKITRLATQAKNRLHAVIQRHHLVPPKGSLFREDQKAWWQALPLGRLEKLNLQSDLETLQFAEKQLVHLTDAMTDMAAKDEQVSRLMHLPGFGVIVAVTVWAAIGDIRRFTESKYLVGYAGLGSRVHDSGLTTRTGRITKAGRRDLRVVLVEAAQAAANHHPHWKAELARLEPRLGRNQAIVAIARKLLIVVWHVLTYNKTDKFAEPQKVSQKLLHFAYDVGKNKPAGKSAAQFVRQRLDDLKIGQDLIHIEWGSKNPIPLPPSSLTEQERSDVPNT

SEQ ID NO: 79434 - protein, 346 aa, unidentified
MTIVEATRAVTGGIDTHGEVHVAAVLDEVGGLLGTQSFRADPDGYAQLLSWLGAFGEVSKVGVEGTGSYGAGVARFLARAGIHVVEVDRQNRQARRQAGKSDPLDAIEAARAALSGRAHGTAKSRDGSVEAIRVLVVAKRSARGARIKALTQMRQLTFSAPDQLQSRLKGLPIAQFVAAAQGLRPTRSPDAVTAATKASLSSLAHRVADLEAEIAELDAMITPLLREAAPELLAVYGVGIDTAAALLVAAGDNPERLRSEAAWAHLCGVSPLEASSGKVTRHRLNRGGDRQANRALWHIVITRLASDPRTQAYMERRVKDGRSKREAIRMLKRYVAREVYRSLPRA

SEQ ID NO: 79435 - protein, 423 aa, unidentified
MEHPRIYAGVDTHSDTHTLALIDEYGRPLATQTFTADPTGYERLAAMIGDPDACLGIGVEGTNSYGAALTRRLVEAGYNVYEVLRPKRAVRRRDGKSDPVDALAAARSVLAGDGTSVPKSADGWVEALRALNAERAQLVTAMTALSNSATGLLTTAPEHIRERYRGLRTPIRMRRLAVCRPSGNMVEQGMLVALKAAGKAWKALKEQADLLEKNMRLILEEHARPLLDIYCASTVTAATLAIVAGDNPERIRSEAAFAKLCGACPIPASSGKTNRHRLNKGGNRQGNSALHHIAIVRMRYHQPTRDYVNRKTKEGKGKMEIIRCPERFIAREAYRALISIRRGRTPLNKPPAERGRRLRELRVAHGITQQQIGDALGVHSSRISEIERGTRNLPELERRATLWIQTITTPNQPTQHAETFDNV

SEQ ID NO: 79436 - protein, 359 aa, unidentified
MSTQSKAFSFKGQKIFVGLDVHLRSWSVTILSEQAVLKKFTQDPSPVALNKFLTNTYPDAEYYSVYEAGFCGFWIHWELQNLGINNIVVNPADVPTMAGERLRKTDAVDSGKLARSLRAGELKGIYVPDSVATEIRSLIRLRDSLTKDQTRHKNRIKAHLRYLGIDIPEEFCRPGRTWTNRFVLWLKGLELETKYGKKTLDLLIAQYEDLRGQQLKMMKELRVLSRTERFDKPLQFLMSIPGIGQLAGLTILSEVDDISRFKDAAHFASFIGMVPMCYSSGEHDGTGNITVRRHAKLRWLIVEAAWIASRKDPVLSAAYVEYCRTMKPSKAIIKIARRLVNRIYFVMKHQQPYVNCYVS

SEQ ID NO: 79437 - protein, 355 aa, unidentified
MTSTKYIGMDVHKESISIAVRNAVGKVVMECVIETKASMIVQFIDGLRGDVQVTFEEGTSAAWLYDLLKPHVSKLVVCDPRKNKSMREGNQSDKIDARQLAELLRLDHLTPVYHGEHGLRTLKELVRSYLTVTKDLGRVMTRVKAIYRSWAIPCSGKQVYASRHRAEWLGKINEPGVRRRAEFYYQQLDALRVLRQQVRRDLLAESKKHKAWKLLCQIPAIGPIRAAVLLGILQTPHRFRTKRQLWNYGGLAIEMHSSADHRSVDGHLQRSRKNVLVRGLNRNCNHDLKNLFKGAAVVASSKPGPFAEFYAALVGQGMRPEMARLTLARKIATIVLIVWKKGVSFDAQHLKPQTA

SEQ ID NO: 79438 - protein, 453 aa, unidentified
MAETKQNSKKIVEPMQVVYPNAAGLDIGSREIMVAIPPDREGETVRGFGTYTPDLKELANWLLQSGVTHVAMESTGVYWIPIFELLEERGFEVIVVNARQAKHPPGRKSDVQDCQWIQRLHSFGMLSGSFRPEANMCTLRAYLRHRDNLIEDRAKHIQYMQKALVQMNLQLGQALSDLTGKTGLAILRAIVAGEHNPVELAKLRNGRCEHSQEDLIKALTGHYRQEHLFVLKQALEMFDSFTQRLSECDQEIEQLLNEIKPEVPNDFPPLPPDPKPTSHSKNAPNYDARASMYELARVDLTAIAGMNESLIQKILSEVGTDMSRFPSVKHFCSWLGLAPHNAISGGRVLYSHTLKNQNRAGQAFRLAAQAVARGKSVYSEFYRRVRARSGSKEAIVATAHKLARTFYFMLVRKTPFNQLDVETYLANQRKKDVERLQSKAAKLGFSLQPCPTV

SEQ ID NO: 79439 - protein, 443 aa, unidentified
MKRNRRRHLRGRRGQAFADLVRGVCPEQILCVSIDVSKDFHVVLLHNGLGEIVTPSFEIDIFHTGFDQFCQAVEAALADSAAQVVLVGMEPTGHYYENLARHIQEMGQKVTIVNSFSVKENRRQQMMAHEKDDEIDVAAIGDLLRRGEGSPFRPPSGIYLQLQQLDRARLGELKIQTIYKNRVIGHLDRIFPGLILTKAATKERYEPMFATDFWHCQTLQNLVRICPDPRELAVLSPAGLVALFHQHDCRMGPRTAARIITYAQKVLWPDPAVVTIRRQLLATDLQTLDQVSVRIAHYSQQLQQKLAQTPYQILTRVKGLSPIRAASLAAAAGDPANYHYAGQLFRRSGLVSGRDDSGTRQRQGKGKAITKTGDIYLRRALNDLLNGLILHQPILRAYYHQLKQTKPVGVARVATIRRTVGILWATLRDQRADSLLLRGDTMT

SEQ ID NO: 79440 - protein, 369 aa, unidentified
MDHHSVAYVGFDTSKTKHAVAVAEGGREGEVRYLGEIEATPAAVERLLGKLAHKYKTLHVCYEAGPTGYGLYRHIRALGYTCDVIAPSLVPKRPGDRVKTNRRDAVTLARLLRAGELTAIWVPDEVHEAVRDLVRARDAAAQDLRHKRQQVLSFLLRHGRIFTGHRHWSRAHLRWLAGQAFDHPAQQIVFQDQVDAVADAQARLERLDHQLAELIPTWSMAPVVAACQAMRGVSFLVAVTFVAEIGDVRRFESPRQLMAFLGLVPSERSTGDTVRRGGLTLAGNRRVRRALVEGAWSYRHPARITETIRVRLENLPKAVREIAWKAQVRLSARYRRLIAAGKKAPVAIAAIAREMAAFLWAIGRVVEPA

SEQ ID NO: 79441 - protein, 345 aa, unidentified
MSNVPVFVGLDYHQDSIQVCVLDQEGNVLLNRSARNDCREVGRIVEPLGRVQQVGIEACCGAADFGEELARQLGWKVSLGHPGYIAKMKASPDKCDFSDGRLVADLTRVGYLPVVWLPPAYIRELRQLVNHRQRLVDRQRASKLQVGAILREQRVKIDKERGSRWSKFWTCSVRDNGQFSSHVRWIVNDLLDDIAWTQEKILKTEGRLREATEDDPVVRRLMEQKGVGPVTAWVLRAYIGDFSRFKTAKQLSRYCGLSPCNASSGAKVADAGLIKGCNKLLRLTVVQAAHRLIRTVERWSDLAEALEKRGKHRCVIIGAIGNRWLRNLHHAMKSPEGGKGATGMN

SEQ ID NO: 79442 - protein, 372 aa, unidentified
MNYNTVYVGMDVHKESFSLCAYTIETEKASHYQKTEADCKNVLKYLEFLRTIYGDDANFICGYEAGCLGYTLYHQLTANNVKCIILAPTTMLEQRSKKRIKTDKRDAEIIAKCLAQHNYSPVHIPTAKDEETKEFLRMRDDHKLALKKVKQQILAFCLRHNYRYDGNSHWTAAHLKWLKALTPEALYKEILDEYLLTYQTLSDKLERLDKRIGELATQDEYKEAVKKLCCFIGVKTHTALSVLVEVGDFKRFASAQHFASYLGLVPGEDSSGDNQNRLGITKAGNRHVRLLLTEASQCYARGQVGFKSKELKARQSENTPAIIAYADKANERLRRRYYKMVLNKCKKHNVAKAAIAKELACFMWGMMTDNIA

SEQ ID NO: 79443 - protein, 343 aa, unidentified
MQAVTTIGLDIAKSVFQVHGVDAEGNVLIRRQLKRRYVLAFFQKLSPCLVGIEACAASHHWSRELTALGHTVRLMPPARVKPYVKRQKNDAADAEAICEAVTRANMRFVETKTPEQQSCLMLHRTRQLFIRQQTSVINPIRAHLAEFGIVAPVGRKGVEQLLEVVADASDQRVSEIARACLAALGAQPRMLKAQILEFDRMIMAWHRSNEISRRLDAIPGIGPVLATALVASVANPKAFRSGRNFSAWIGLVPKQRSSGGKDKLGSISKQGDRYLRSLFTAGALAVIRYAKIHGSQHRPWLTALLARRPTKVAAIALANKIARMAWAMMARGERYKEPAALAA

SEQ ID NO: 79444 - protein, 324 aa, unidentified
MYLGLDVSKNTLDCCLNKDGFFYACKISNNQKGFEKLKAWLDGYGCDETLHCCCEATGNYYEAAAEYLAEHYKMSVENPRKIKAYAVSELKRSKNDKQDAKTIAEFCEEKSRKLKTWKPKNQTEKELQSITRYIARLKQQKASETVKRQTASDNIKGLIDETIDYLGRKIKEAEGRLKTYISQNKELKQKADNLTTIPGIGIQTAAIIMAALSGNNDFKTAKQFTAYLGLDPAEYKSGTSVKGKDRISKVGDCITRAALFSPSLVAYRIGTFPRLVANMRQNGKHIMQILTAIMRKLAVVAYTLHKTNTTFEKQRHTRIQQKAA

SEQ ID NO: 79445 - protein, 475 aa, unidentified
MAAKGLLTRGPKRSEPPEAHPQSVPVGKRTALKVQEKVAPRRAGIRATCRSRSAAASAVPEGGGPVRYHLGVDWADQTHAVWVVDERGTKITARTVPHTAEGLSEWGRELDEWRAHGIELWAAIERPEGRVVDFLLDHGIVVYPVNPKALDRARDRFRQSGAKDDPFDARVLADFLRTDHAHLRPLRPSSEAAQELKLLTEDYQRQVRQQTRLVNQLTITLKAYYPRALEVAELTTGLAQAFLQAYPTPAAVAALTERQWQRWARAHRLSATRTRELWEVLQRPQLPVPAHVVRAKARLMRSLVAQLTPVVAAVGEYREAIEDFFARMSTAQWIRTLPIGDHGITAPTLWARLGDAPGRWEAFRHLQAQAGAVPVTKRSGKQQRVVHFRVACDKALRYVVDQVAFLSLRSCEWARAYYDQQRGRGHSHRRALRALGAKWLKIIFVMWQRHASYDEPYHLATMARQQLRQPQTKIA

SEQ ID NO: 79446 - protein, 419 aa, unidentified
MSTEKRKVCGIDVHKSFLIATILDREGNSQTRRVAQDIESLLEFREWILSENCNSVAFESTGDYWRSLFIVLQDRVPVTVANANHIKHVPGRKTDITDSRWIAQLELNDLITPSRIFAGEMYDLRSLTRSRELLVQNRTEVKNKIHHLLDSTNIRLSSVLTDLFGKSGTIILKGLVQNKPFEEIINSLPKRMRARPDAIITTLPASIPPVCLILLQSYLNVIDILDKEIKLLEGRIREALTSKSKELHILTSVPGIGFIGASTLIAEIGNIHDFENADKLAKWAGLTPSVYQSANVTRTGSITKQGSRHIRWILVELAHVAIRSQGQIRTFFERLMPKKGYKKAIVAVARKMLRLVWHLLTYDEVFIDDVPRSKQVKYPKLPKKIQSLGFNTFIELLSKASEVIIKDKSHEIVRLELSD

SEQ ID NO: 79447 - protein, 420 aa, unidentified
MGKIIQRCAGIDIGKRFLMCCILAGAADEEPSSKTLRFDTTVPALERLRQWLRDEQVTHVAMESTGSYWIPVFNLLEDHFTVVLANPEEVKNRKGHKTDRRDAKHLADLLRHQHIRPSYIPPKEIRQLRDLSRRRVQLTQDATRERNRVQKLLEQANVKIAAVLSDVFGVSGQHMILALLDGKATPEQIAKLARGQARHKIPQLIEALEGNRMSEHGRIVIRSCLRHLACVEEEIEHLDAEILARMQTAPFQNAFNLLQSLPGIGQLSAAAILAEIGTDLTPFPTPEQLASWAGLCPGNRESAGIQKGRHTTHGNPYLRTVLVQCAWAATRKQGSVFETRFHHVAPRRGQKRAIVAIAHLMLTILYHMLKKGLPFRGVETACQQRRRLRRAHHHLKSLRRLGLAVQVIDTFDSAPPNATP

SEQ ID NO: 79448 - protein, 341 aa, unidentified
MQITTIGLDIAKNVFQVHGIDAAEKVVVRKQLRRGQVMAFFKDLAPCLVGMEACATAHYWARELTNLGHQVRLMPAKDVKAYVKRNKNDAADAEAICEAVRRPTMRFVPIKSADQQAHLMQHRARDLLMHQRTQLINATRSHLAELGIIAPQGREGVKELLAIIANEADTQLPNDARASLIVLAAQLQALQTTIGAIEKRIVVQHRANKESKRIQTVPGIGVIGASAIAATVPNPKIFRSGRDFAAWIGLVPRQMSTGGKPKLGPISKQGDRYLRRLLVVGAVSVLRRAKLHPGKFPWITQMLARRPFKVVAVALANKMARVAWALMVSGKTCRAAWFAAA

SEQ ID NO: 79449 - protein, 370 aa, unidentified
MGNRSMFVGLDVHKETIDVSIAEGDRHGEVRHYGVIKSDLEPLDKVVRALHAPDRRLHVVYEAGPCGFGIHRHLTNRGEDCVVVSPSMIPKRSGDRVKTDRRDSQMLARLHRAGELRAIYIPDATDEAMRDLVRARADAVGVGTQAKYRLKAFLLRQGRRYPGREGWTLPYRRWLTDLSFPSAAQHIALQEYRDAIGETEQRIARLTEQLRHLAPTWRWAPVVDAFQALRGVSFITAVGLVAELGDLTRFRHPRELMAYLGLVPSEHTTGPRVRRGAITKAGNPHARHLLAEAAWAYQGIPRIGRQHAYRQEGLPKVVCDIAWNAQLRLTTRFRRLVAKGKAKPKVATAIARELTGFIWAIAQEVSPAAP

SEQ ID NO: 79450 - protein, 349 aa, unidentified
MDITTIGIDIAKRFFQIHGVNANGKTVLRKKLIRDQVLNFMSNLPKCLVGIEACGGSNYWARETTKLGHKVNLIAPQFVKPYVKTNKNDRADAEAICEAVSRPNMRFVAVKSTTQQDILSLHRVRERLVKNRTALANEIRGLLLEFGYIIPQGIHKITTKLTEILDEGSLTQISHQTFSDLKEEFIENDKKIKDIEKRLKEIANNLNMYQKLKSVPGLGLITATALIASLGNVTNFKNGRQLSAWLGLVPKQHSSGGKEQLLGISKRGDVYLRTLLIQGARSLLNAKFRYTTEEQRSNKDFSKFTAWMLILEEKRGHNRTVVAIANKLARVVFALLSNNYDYDENKVCI

SEQ ID NO: 79451 - protein, 363 aa, unidentified
MSYIVAGIDVHKKVLMVAVADAGQMAPEFDCRRFGTTACELNHLLAWLQERGVAEVVMESTAQYWKPVWLALEPHFDLRLAQALSNRGPRGRKTDFKDTQRLVRRLIAGELILSFVPDAEQRTMRTLTRRRVQLIRDRIRLQSQLECLLEEARIKLSSVLTDLLGASGRRILTAVAGGEDDPDQLAGLGDGRLKCTRAQLRDAVSTPVAPVHRELLAMYLDQFAFLDDHIERVTVLAAETMREYQDAITRLSQVPGIRVITAQQIVAEVGPTAATFPTGGQLSSWMGACPGRQDSAGENESGRCPKGNHYLRRVLYQAAQAAVKTKNSSFEALFHRLLPRLGYKKTIWAVVRHLTIVIWKILD

SEQ ID NO: 79452 - protein, 333 aa, unidentified
MEVVYRCCCGIDVHKKVIVACLVNGGEQELREFGTTTSEIKTLANWLTESGCEMIAMESTGVFWKPLYNLFELMDLDAMIVNAAHMKALPGRKTDVKDAEWIADLLRHGLLKASYIPNREQRELREITRYRKSLTEERCREVNRLQKILEGANIKLDSVVKDITGKSARKLLQRIIDDDIPDSDEVSKLVHGRMRPKLDQIVASIEEITTPLQRKLLAQIINHIDDLNRRIGELDKLVQEYMAEYEAAIEAIDEIPGIARRSAEVILAEIGLDMGRFPSAAHLCSWAGVCPGNYQSAGRRKHGKTTKGNKALKTILTQCAKSAKTVKSSYFFA

SEQ ID NO: 79453 - protein, 321 aa, unidentified
MDYYAGIDVSLEYSSVCVVDASGKVVREAKVVSEPEALIGWFGSLGLELARIGLEAGPLSQWLYAAMKQAGLAVELLETRHVSDAFKAMPVKSDRNDARKIAQLMRLGWFRPVHCKSTTAQEIRAMLTARKLVQSKLLDLENSLRGILRGFGLKVGKTTRTKFAGRIEELVKGHPNLQTIGQALLRARAVLLAEFNGFEKRVRAMSRLHDKARLFFTSSKQAGPHFGLTPKKYQSGETDYTGRISKHGDASVREALYEAAHLMLTKPIKGCSELKSWAMRIARRAGTNKAKVALARKLAVIMLRMLKDNVPFNPAAKAATA

SEQ ID NO: 79454 - protein, 345 aa, unidentified
MLYVGLDLSRKRLDWQALDELGERVAGGAAPPDRDGLARLGRRLGDAEVLAVIESMSGARFVHDELELQGWDVRVADALKARGIAPLACKTDRIDCWVLAELARLDLVPEVWLPGPAVRAERERARFRLSLVRHRVSLKNRVHAVLFQHGIANPHSDLFGPAGREMLVRLALPEPWRSTVACSLELIDTLNVEIRACERQLERLGADHCYVPLLTSCPGIGWVLAYTIASEIGDIGRFASPRKLVGYTGLCPRVEQSGERDRRGALRKNGPTYLRWALIEAAHVAVRCHPPYRELAERMRSRHGRSRGSNIAAVEIGRRLSEAIWHMLTNNQPFAPAGAASRLAA

SEQ ID NO: 79455 - protein, 412 aa, unidentified
MRIVGLDVSRSVAEIAYLEDGVLHAGGRAGLRRDELERFAASLRSTDHVVLEATGNTAAIVNVLRLRVARVAIANPLLVRLIAEARVKTDKIDAVVLAQLYASHFLPEIWMPDESTLALRRQVSRRSQLVRQRTRLKNEIHAVLAAHLIGQCPATDLFGRTGRRWLSAQPLPMDERLGVEQRLRELDRLSEDLHEVDRALAQATIGDERLRRLLTITGVNTIVAIGLMSAIGAVERFPSPEKLVSYFGLNPSVYQSGPTPARHGHITKRGRSYARGLLVEAAWGAAQAPGPLRAFFLRLRDRRGQQIAIVATARKLAVIVWYVLTRNEPFAWDRPALTAHKLRALELQSGMPAQHGSRKGSAAAYSLKSVRDQERAVAGQAERTYQRLFSRWKQTRPNKRELPLAWPGTPTS

SEQ ID NO: 79456 - protein, 419 aa, unidentified
MSFKILKNNCCGLDVHKTWIYACIGITDSFKRTEYKQARFSSFTKGLQELCLWLAKYNCIDVCMESTGKYWIPVFNVLEKNNIFVTLSHPKYTKPQKGNKTDRKDAKWICDLYMCGMVKPSFIPPADIRQLRDLVRYRFKLTCMITGEKNRAHNCLTVSNLKLDDVFSDIFGKSSRSITEQILQHPGEVFDVAPFVDSRCKTPIEEIQAAVDGAISHEQAVKLRQCLKHIDELEMHKAEIEREIFRLSQKYESVLDLIRTIPGFDKNPLTAIQVLSEIGADMSVFPTAKNLVSWAGCCPRNDQSSRKIKSTRISRAGSYFKPVLVQVANALIKSKKHPEFTTRYRRIKAHRGHKKAIIAICRMILTAIWHILSDLKPYTSEGFLESRPVNKSKILTTSQALNLLKQRGYIIKDDVVPVT

SEQ ID NO: 79457 - protein, 353 aa, unidentified
MDTIYIGVDFHARQQTICSLTTMGGEIQTHELKHQHKDQVRAFYAQFTGHVIVGLEASGYSPWFEQLLEDLGHEVWLGDATEIRRRARWRQKNDRRDAELILDLMLHDEFPRLHRPSPQSREVLRMLRYRQKLIKIRTISKNSLQALALQSGLARRSQLFTRAGQQELRTAAMSPAMQWQREQWLQLLEPLNQRLVETMLWLKQQSQDDARIKLLRTHPGIGFLTSLCVVHTLWPVSRFRNQRKVAAYAGLEPMERSSAERKHFLGISKAGSRVLRYLLIEAAHTAVKKDDDLKRFYQRLVQRRGRPKAKTAAARKLLIRSYIMLRDEIDYAEFRRRAVAARLARQSSRPPCL

SEQ ID NO: 79458 - protein, 316 aa, unidentified
MVGVDVASTHVDVAALGAELPTSLRQVSNDADGHSALAEGLARLKPHLVLMEATGGYEAALACALQAAGLRVAVINPRMARDFARAMQRLAKTDRIDAATLAEFAGVLARRPDAERFIRPLTDPEQQDLAALVTRRRQLVSMQLSERQRLRLARPVARPSIEALLEAIGRQLDDVEAEMSQHVEQRHAQMARLLQSVAGIGRVAAATLIAELPELGRLNRRQICALVGVAPYANDSGASKGRRRIVGGRFEVRRALYMATLTATRHNDAIRAFYERLVAAGKLKKVALIACMRKLITHLNAIVRDHLNAQHHPFTA

SEQ ID NO: 79459 - protein, 325 aa, unidentified
MSSHQITVGVDIAKRKFDAVRFESGKYKHKTFDNSADGFATLITWLLTFGEIKPLICMEATGAYSIPLAEFLVNSGYSVSVVNPAKIKAFAKSELSRLKTDKADAKLIARYALEKQPSLWTPPPPTMIELQALLRRIEHLLEIRQMEQNRLDTANPIIIESIKTLLTTLDEQLESTREQIRQLIDQDPVLKHRAKLLETIPGVGSASIAQLLLALSEHHGFTHAKQAAAYAGLEPRISESGDWTGKTRLSKTGDALLRKALYMPALVAWRHNPAIRVFCERLKANGKNGKAIACAAMRKLVHIAFAILKSNKPFDPLHKTKLALA

SEQ ID NO: 79460 - protein, 397 aa, unidentified
MSTSTDRVVIGMDPHKRSVTIEVMAADETILGRGRFDTDAAGYRCLVRYAKQWSQRTWAIEGCQGIGKHVAMRLVADDETVVDVPPKMSARARMFATGQGRKTDATDAHSVALVGTRMSGLRPVINDEQLAVLRILVDRRRSLGEEHTRKVSQLHQLLLELIPGCAKRDLSAAQAKALLAAVRPRDAVGKTRRRVAAELVADLERIYARKKAANTELEELVKATGTSLLDLHGIGPIGAARLLVEVGDITRFPNKAHFASWNGTAPIDASSGDQIRHRLSRNGNRQINRVLHIMATVQLRNPTQGRGYYDQKKAAGKTSMESMRCLKRRLSNIVYNTMLDDAIIAHAAAGTRTGPGGQRGNDSDSSATGSQPQHRLFGQATPGPVEHQPKPALSKVS

SEQ ID NO: 79461 - protein, 364 aa, unidentified
MHVPIRTKEVNAMPSLAERVDVVIGVDTHKNTHTAAAVAAATGGKLDELTIATDSDGYAALLTWAQSHPGDRVWSLEGAGGYGAGLARFLAAAGEVVLELDRPVRAARRNGAKSDPLDAVRAAREALSREHLAEPKTDGPRAQLAALMAARRSAVEAATLAQHQLHALVIAAPDALRALFRGQTTAVMLATAAKLRPHTGWDPTTVTTAQVLRRLARRSNDLTEEAVEHEKAITTLVKAWRPDLLELPGIGPIVAAQVLTAWSHQGRIRSEAAFAMLAGTAPIPASSGMLTRHRLNRSGDRQLNRALHVVALSRTRYDQRTRDYIERRRAEGKTDREIRRCLKRYISRQLYRQLEHGGRPVDKP

SEQ ID NO: 79462 - protein, 341 aa, unidentified
MDQIIRIGMDTSKHVFQLHGVNAAEMPVLRKKLRRKDMVAFFNKLAPTVIAIEACGASHHWARLLQSFGHTVKLIPPQLVKPYVKRGKNDAADAEALCEAMSRPTMRFVPVKTDEQQAALMLVSVRDRLIRNRTQLANAIRGHAAEFGLTAAKGMAHLVPLLDRIQADESLPALARELFALQVREYIQLQAQIKEIDAKLTAWHRADECSQRLGKIPGIGPIGAVLLTMKTPDPELFRSGRQFAAWIGLTPKDHSTAGKVRLGVITRAGDEGLRSVLVAGATAVIQQAQRSGKASPWLAALLKRKSPKLAAVALANKMARIAWKLMRTGEAYTATSALAAA

SEQ ID NO: 79463 - protein, 370 aa, unidentified
MKNSNRTSSQSGTWKAKPAVVVGLDLGDRWSHYCVLNQDGEAVEEGRLATTEAGLRRQFEGEPVSRVAMECGTHSPWISRLLQQLGHQVIVANARKLRAISHNESKNDRADAEMLARLAASDPRLLSPIQHRSRERQQDLNLLRTRDVLVRARTMLINAVRGLAKSAGGRLPACDAAYFPQRARPALAKELKPAATPLLDQIAALSQQIRKLDGNIDKLARRYPEIALLRTTPGVGPIVAAAYVLTLDRADTVSSSRAVGAFLGLRPRQSQSGDSDPQHRISKTGNLFLRRLLVQSAHHVLGRFGPDSALRRWGLKLAASGGKRGKKRALVAVARKLAVLLNCMWRTGQPYQPFPQTRQTSSVLAAAPQQ

SEQ ID NO: 79464 - protein, 344 aa, unidentified
MGTTIGIDPHKATHTAVAIDGSENVLDEITIRADKNQTSKLIDWATSVDGDGRVWAVEAATGLGHLLSQQLVASGETVVDVPPVLASRIRVLSSGTSNKNDPNDARSVAIAALRRESLAEVHREDAAAILRMLAKRHRELTALRTQAVCRLHAILATLKPGGMGHRLSARQAARMLSGIRGLDAVGEQRRLMAKAHIVDIRRLDRDLEANKAQIRTAVAAADTSVTDIYGVGPVVAAFLIGYTPPIERFETPDTYAAYNGTAPIEVSSGGKTRHRLSRRGNRTLNHAIHTAAVTQISHHTQGRIYYDKKLDEGKTHKEALRALKRRISNTVYRRLVADARRHSV

SEQ ID NO: 79465 - protein, 350 aa, unidentified
MRTKPIPESTAFGIDIGKKVFHVVALNAFGAVIQRSKFSRDTLMAFFEAAPRVLVGMQACPGSQWLARRLIAMGHDARIIPARFVKPYVKSNKTDIIDAAAIAEAVTRPTMRFVEIRTPEQVDLQALHRIRDKLVSQRTALMNQARAFCIEYGLAMRIGAGGFHADIRAHLANQENDLTASMRALLGDLLEDLAYIEGRITSVTAQVEACAREDDTVSRLMTIPGIGALGATALLAAAGDGRQFRRARDMAAWLGLVPAEHSTGGKQTLRGISKRGNKYVRRLIIHGARSCFMHLNRETHALGRWLSALEARTHHNKAVVALANKLTRIVWAILTRPGTVYLRSKGAAPV

SEQ ID NO: 79466 - protein, 457 aa, unidentified
MTRRKHSRPARDIAPVHPHAAAVDIGATLHVAAVRPGCDPEPVRTFGTFTTDLHRLADWFEQCGVETVAMESTGVYWIALYEILDQRGFEVVVVNARDAKHVPGRKTDVSDAAWLQRLHEYGLLRASFRPKGEIATLRSYLRQRERLLEGAAAHIQHMQKALTEMNLQLHHVVTDITGVTGLRILRALVAGERDPDTLAAYSDPRCKAPAETLRAALVGNYREEHVFALAQALELYDIYQAKVAACDQRIEAVLERLKAANPPPAAALPPARPRRRQANEPGFAVREALHAILGADPTQIDGIGPSLALTLVGECGTDLSAWPSAKHFTSWLSLAPHNKISGGKVLSARTRRSGSRAAALLQLAAVAVGRTATALGAFYRRLAARVGKAKAVTATARKIGVLFYNMLRHGMDYADPGASAYEARYRQRVLSNLRRRAKSLGYVLQRADPASAAIAVS

SEQ ID NO: 79467 - protein, 352 aa, unidentified
MIVLGADTHKRSHLIAAVAAGTGELRGEQTVPVGVRGFDALVRWARGLDGERVWVLEDCRHVSGSLERFLIGRGERVLRIPTHLSATARRSSRQRGKSDPIDATAVARVALQEGLAAFPVAHLDGPELDLRLLVDHRERLVRQRVGLNNTLQWHLHDLWPELQLPGSSLFYGRWAPRIARRLARAEQTMRVRIARDELRRIRELSQTIKRLEAEIAGLVAAIAPQLLTEPGFGPLTAAKLVGEIAGAQRFATPAKLARAAGVAPIPASSGNTQRHRLDQGGNRQINAALHRVIVTRARCHPATQDYIARRQAEGKTTREAIRCLKRYLARHVWRHLQPPHPPGGTPPPPSIS

SEQ ID NO: 79468 - protein, 351 aa, unidentified
MPRTSTVHAVTAIGMDMGKNTLHMVGLDSRGAIVLREKVSRGRITSRLANLPPCLIGIEAGMATHYVARELTVLGHDVKQVPPAYAKPFRQAQKNDFRDAFAVAEAVQRPTTRFVPAKTDEQLDLQALHRVRSRLVSERTAVINQIRGFLLERGIIVRQGLRFLRQALPDILAKRTDVLSPRMVRIVADLASDWRQLDERIEVVTDEIETLAKSDSSCRRVMTVPGIGPIISSAMIAAIGSGAAFARGRDFSAWIGLVPKQMSTGDRTILGRISKRGNGYLRMLFMQAARVILLRPASWPKHGFGVWLARAAQRLHPNVLAAALANKLARIAWTVLAQQRSYEARITTAAA

SEQ ID NO: 79469 - protein, 346 aa, unidentified
MLMIGCDFHPGLEELALLDTATGVRRQHRLSHAFGLEPVRQFYAALPRPVRVGLEASGYSQWFEEMLEELGIELWVGDPARIRKAAPRKQKTDRNDARLLLELLEENRFPRIWVPDRATRDLRQLLMHRHKLVTMRGAIGNQLQAIAMNRGVQKKGRLWSQQGREQLKSLVLPPWTMRRRDELLQLREQWDAEIAELDQVVLREAEQNPEARYLMRHQAGVGPITALTVVLTLGPVERFASARKVASYAGLVPAEYSSGARQKLGHLSKEGNPFLRWVLVESATVAVRHDPEMKRMYWRLVERRGKAIAKVAMARTLLTRLYWMLRRRSEGRDLRQRDRVAGKPVA

SEQ ID NO: 79470 - protein, 388 aa, unidentified
MQTAADHPEAPTAIRHDLGAIFISLELSRSTWLITSLSPGGGEKMSKHSVRGGNVAGLLERFAQLQEKARARTGRTFPIIVIQEAGLDGFWIHRVLQNEGIESHVVDPASVATSRRRRRAKTDRIDGEALLRTLLAYKRGEPRVCAMVKAPTPEEEDRRRLCRERKVLTNERVQHVNRIKGLLFGQGVSGYEPLRRNRRQQLDELRTGDGRPLPKHLKTQISRELDRLELLLEQIKAVETERDALLAAQKVALPGPAAMLLDFNGIGPEFTAVLWSEGLFRHFDNRRQVASYAGLAPTPWQSGSVDHEQGVSKAGNPRLRTTLIQLAWLWLRHQPQSALALWFKERVARNGGRHKKTTVVALARKLLVALWKYVTAGVVIEGAVMKTA

SEQ ID NO: 79471 - protein, 343 aa, unidentified
MQTVTTIGLDIAKSVFQVHGIDAAGNVIIRRRLKRRHVLAFFQRLPPCVVGIEACATSHHWSRELKALGHAVRLMPPAYVKPYVKRQKNDAADAEAICEAVTRANMRFVETKTPEQQSCLMLHRTRHLFIRQQTAVINSICAHLAEFGIVAPRGRHGVEDLLDIVADPTDRRVPEVARACLAALGAQLRMLKAQILEFDRRIMAWHRSNETSKRLDEIPGVGPALATALVASVADPKAFRSARHFSAWVGLVPRQHSSGGKDKLGSISKQGDRYLRSLFTAGALAVIRYAKIHGTRHRPWLTALLARRPTKVAAIALANKIARMAWAMMAKDERYKEPAALAA

SEQ ID NO: 79472 - protein, 366 aa, unidentified
MKKTSTVRVKGNMIFKGHKLTMGLDLGDRWSFYCVLDEAGQIILEQKLPTTPEAMKQTFGKIQRSLIALETGTHSPWISRLLRELGHEVLVAHAQKVQLISKSNRKDDRHDARTLARLARIDPELLGPVRHRSAKAQIHLTVIRARAELVSARTALVNAARGLAKSYGQRLRKCGTQQVSRELAAALSVELREVLEPLLQEVESLNERIQQYDARMEKIARESYPQVERLKQVKGVGTQIALTFVLTLEDPHRFPKSRDVGCFLGLRPGRRDSGTSQPQMHISKEGDPYLRTMLVQGAHYILGPFGGDSDLRRWGLKLAARGGKNAKKRAVIAVARKLAVLLHRLWVGGEVYEPLRNSHQAMGAVA

SEQ ID NO: 79473 - protein, 352 aa, unidentified
MREYIAFDSHKRYSLVEREDVATGKIVQQVRLTHAPGAVRRFLARCAPGTAVALEATGNWYWIVEEIEQAGLQPRLVHPRKAKLMMGLINKTDKLDVHGLNRLQRNGTLPTVWIPPRPLRDLRELTRTRLVLVEQRTRLKNRLTATLAKYGVPPSEYSDAYGKSARAELDGRIEPLPEQTRWVCKQLLAQIDFLVRQIRQLEQRLEDLVEVTPEMERLMTLPGIAEILAATIALEIGDIGRFPDAPHLASYAGTTPRVHASGGRVRYGRLRTDVNRYLKWAFVEAANSVAVNHRRCPERHVSQLYDRLRQRKGHHKAIGAVARHLAEAAFHVLRRQEAYRDPVLERGCTSEV

SEQ ID NO: 79474 - protein, 360 aa, unidentified
MTSISHARVERITVGVDTHKHAHVAVALNEIGGLLAKTTITVNTDGYHELEQWALALGSRAVFGIEGTGSYGAGLASHLRRRGHRVIEVVRPNRQQRHLRGKNDRLDAENAARAVLAGTATAIPKSADGCVEMIRQIKIAKDTAVKSRTQAMVTLKTIIVNAPAELREELDELPDRKLLEYCADLPFETMTTPADAARYTLRTLARRHRSLSQEIDIQERILQTLTERAAPQLTSVFGIGADSAAELLIVAGDNPERLRGEAAFAKLCGACPIPASSGKTNRHRLYRGGHRQANAALHRIALIRMRFHEPTIDYVTRRTTEGKSKAEIMRCLKRFIAREIYHILVANVNTGIREVTACQT

SEQ ID NO: 79475 - protein, 427 aa, unidentified
MHYTQNDKIRQATEGTIVVGVDIGSEKNYARAFKGNGIEITRKAFYFSNTLEGFKSFEEMVTKLTVPLAEKKIVVGVEPTGHYWFNFADYCQGKQMTVVTVAPQHVKHSKEMDDNTQRKDDRKDPRVIAKLVIEGRYCIPYRPKGVYAELRVAYNRRCEIVEAETRAKNRIRCWFDLYFPEYRTVYGNVAAITGIVILKQAPLPQDIVSLGVDGILQIWRTNKLRAAGIKRAKTLFEAAQRSICPPDAGRAVRMQLWQLLEEYEYIRKQLQEADIMIGIVTADIPEVNELMKIPGIGLITAAGMISEIGDMRRFDDPRQIQKLSGLAIIVNESGKHKGQSEISRRGRKRLRKILFQAALVLVRSNKEFKSIHDYFTTREKNPLKKKQSLMAVAAKLIRVCFGIVKNGTPYDPTKVLKDIRRAEPKVA

SEQ ID NO: 79476 - protein, 348 aa, unidentified
MTHYQGVECVDDSDHLNFQHKIMQNQTIAGIDVSSETLDICLSNSQGQHSFVIKNDVKSISKFFKAYEHETLLIGMENTGRYNWALYEVLKDLPHHVLVVSPLHLKKSLGLVRGKNDKVDAVRIAGFIMKNHAELPQWKPSSTAVQRLKILLTERNSRIKAKSKILNQQKDHMKMKHLGLDKYLQGLNKQQLTVLNRQISQIECDIEALVKADECMQQQAKLIQSIPGVGKILCWTMLAKTENFTLINEPRKMACYSGVVPFSNRSGTSIRGKDRVSSYADKYIKTILHMAAMRAVRLKNDLRDFYLRKVAEGKNKMSVLNAVRNKIIHRIFAVVKNQTAYQNNLLLS

SEQ ID NO: 79477 - protein, 384 aa, unidentified
MVNNSITFIGLDTHKEFFEVAYLEDSRDAKPVSLGRINGTKPALQKLVRQFESKYPGSTLHFVYEAGPCGYWIYRFLTSLGHCCYVVAPSLIPKKAGERVKTDKRDALKLALLLRSGDIEPIYVPEPEDEAMRDLSRARETAMKDLKDAKYQLKAMLLRNNIRCEVQDNWSAKHLRWLTELILPPPSQQIVLQEAIQTITERIRRLERLDNELSYHVKNWRYYPVVKAIQAMRGVRLLVAVGVIAELGDLSRFDHPRKLMSYLGLVPSEHSSGGKRKQGGITRTGNTRARRLLVEGAHTYRYAARISTELQKRQESLSKEIVDIAWQAQLRLCRRYQRLMKRGKHYNLVVTAIAREMIAYIWAIAREVVLAPVNPAKRLSRVPA

SEQ ID NO: 79478 - protein, 406 aa, unidentified
MTVGIFVGIDWAEHHHDVAVVNADGAVLAKFRIGDDVAGLSRLSRALAGLSSSPAGVQVALETDRGLLVAALVAAGYRVFSVNPKSVDRYRDRYSVSGAKSDPGDALVLAHLLRTDGVRHRSLAADSQAVAVIAVLSRAHQDAIHLRQREASRLRSLLREFFPAALTAFPAVATRSAMVVLGAAPTPQAAARLSCAELHKLLQSTGRRGVPVKAAERLRQIFTAEQLRHPAAVEDAMGCAVRTILTSLIAYDNAIKDLEAELTKHFEQHPHAEILHSLPGLGVVLGARMLSEFGDDPDRFTDPAARRCYAGTAPVTRASGKSRIVLMRRARNERLADACRWWAFNAIGKSEGADAYYRRRRAAGEPHEAALRRLANKLLGQLHHCLQHHQLYREDIAWPTQVDHAA

SEQ ID NO: 79479 - protein, 356 aa, unidentified
MDTYIGLDVHQASCTAALMDRQGKRRRSVVLETNGSALVEFVKTLPGRLHVCLEEGTQSGWLYELLEPHVTQIVVAHVGAATNKATGPKDDARDAYALADRLRTGLIEAQVYKLTGPYSMLRMLVKTHRAVTQDTVRVQLRIKALMRSRGVPAAGKEVYKPKARQTYVEALPRSHRRSAEILFEEYDLLSQVREVMVKELVAESHQHPCTRILETVPGLGEIRVAQLVATVVTPERFRTRSQFWSYCGLGIVQRSSSDWVQDAKGRWARAEVQQTRGLNKNHNALLKLVFKGAATTVIQQQRAEEPLYQDYERLLAAGTKPNLAKLTLARKIASIARTVWSRKEVYKPEVHRTKKS

SEQ ID NO: 79480 - protein, 338 aa, unidentified
MEQQREYVGIDLHRRRSVIVRITESGEVLETVRVDNDPLSVVHAVMHEDQNPEVALEATYGWYWAADLLQAEGATVHLVHPLGLHWDSRRVKNDERDATELAKRLSRGDLPEAWIAPPQLRELRELVRYRAKLTALRTSAKAQVHAVMAKEGVLPAYGRMFGPAGQRLLDEMPVEGVYRDRVESLRHLLEIYERELLLVESHLSRRLKHHQGYSAIQAIHGVGPIMAAIFVAEIGDASRFPSARHLCSWAGITPSHRESDVKVHRGHITRQGNNLVRWAAIEAVARYHGGAPIEPTFQRVAKRRGTMIARVAAARKLLSLVYYGLRDGEIRCLTREAS

SEQ ID NO: 79481 - protein, 412 aa, unidentified
MQVLYPRCAGLDVHCKTVSVCVSVCEAQAKKRQQVRMFSTFTRDLLEMAEWLKEERVTHVAMEATGVYWRPVWAVLEDQFEQMLVNPQHMKAVPGRKTDTKDCEWIADLLQHGLLKGSFVPPTPIQDLRDLTRYRAQLRQSQGRAANRIQKLMEQANLKLSSVATNALGVSGRRMLKAIIGGEVDPEQLARLARGTLKNKIPELMQALEGRVREHHRFLLARFLREWEWYEEEVTALDQRIEQQIRSFESVVALWQTMPGISLVTACNLVAEIGVRMEQFPSAQHLVSWAALCPGNHESAGKRKSGKTRDGNKWLRRSLCQAAWCATRKKDCYLASQFRRLGGRRGLKRAIIAVAHAMLVIGYHMLRTNQGYRELGANYLDRIHKESLQRYHVKRLQNLGFAVTLEPTLAAS

SEQ ID NO: 79482 - protein, 369 aa, unidentified
MHDDTTAFVGLDVHKEAIAIAVAEPGRAPARFLGTVRPALAPLTKALAHLGSPKKLAIVYEAGPCGYTLARRLLKLGYLCEVVAPGKIPQRPGERIKTDRRDALTLASFARSAELTPVLIPDEPDEAMRDLARAREDAVRARLKARQQLKAMLLRHGHHYSGRIFWSTAHQRELAKVSFPHPAQQIAFTEYCLAVTEADERVARLSAALREQAETWRLQPLLSALMTLRGLQFLTAATVLAELGDLRRFPHPKRLMSFLGLVPSEYSSGLSRRLGAITKCGNAHIRRVLIEAAWAYRYPARLSRELQIRQQGQPKAVRDIAWKAQLRLCARYRRMQARGLHQNKTCIAIARELAAFIWDIARHVPIAAG

SEQ ID NO: 79483 - protein, 348 aa, unidentified
MDQVSRIGMDTSKHIFQLHGVSADEVPVLRKKLRRKDMVTFFAKLAPTVIAIEACGASHHWARLLQSLGHSVKLIAPQLVKPYVKRGKNDAADAEALCEAMSRPTMRFVPVKTAEQQAGLMMVGVRDRLIRNRTQLANAIRGHAAEFGLTAAKGMAHLVPLLDRIEADESLPALARELFAIQAKEYTQLQTQIDEIGTKLMAWHRADECSQRLVKIPGVGPIGAALLRMKTPEPELFRSGRQFAAWIGLTPKDHSTAGKVRLGVITRAGDEALRSVMVVGATAVIQHVRRGGRAPHWLAELLKRKSPKLAAVALANKTARIAWKMMVTGETYTAKSVAGSSAGAASHA

SEQ ID NO: 79484 - protein, 352 aa, unidentified
MITIGVDAHKRVHAAVAIDGSGHELRQWRGGTSPADGRRLATWAEALDSDRRWGIEGSHQYGRGLAQQLVAAGETVVEVNPRLTAIMRRGGRERGKSDRLDALAVARVVAQDGAALPVVTSTDASAVLAELAADRASALAEATRLRNQLHQVLHQLSAVDDRAWPDLTDADTVATLTAYQAPGSDPVLAACALRVRHLSTRLELALRQEAATRRAIVQLGHPHLEPLRAICGVADLSAGLLAAELGGHRFTTDAQLASYAGVAPLEASSGEHTRHRLNRTGNRQLNALLHRIALVQLRCDPHAKAYVARRQREGKTQREAVRCLKRFVARRVFHAWQQCTLPPLAQLEVPLI

SEQ ID NO: 79485 - protein, 294 aa, unidentified
MKYALEQESILGVDTHLDVHVAAVINQFGQLLGTQSVSTNTAGYLQLFQWASAFGALKRAGVEGTGTYGAGLCRFLCDKGIMVLEVNRPNRASRRLNGKSDSLDAENAARSVLSGVSKAIPKQQSGACEAMRIVSVARRSAVKAKTQSINQLRAMLVSAPQSVREELWKAKASDCAKACAMIASLGDTVVLKALSKTLKSLAKRWLALSEELKDYDQQLETLTQEHAQQLRSRFGVGPQTAAILLTVAGDNPNRLKSEAALASLCGVNPLPASSGKTIRHRLNRGGSRTANNAL

SEQ ID NO: 79486 - protein, 422 aa, unidentified
MSQEKRYAAWIGVDWADEKHAVCEYAVATASRRGYTIEQRSEALGDWIAQLRSRYGSQPVAVVMEQARGGLIYALMGSDFITIYPVNPQSLAKFRKALYPSGAKSDPPDAELLEEMVRQNPDRFRAWDPGDEQTRSLQLLTEARRKFVDDMTALTNQITSALKTYYPQALDWAGELSSPQACAFLRKWPTLDALQKTRAFRIREFYEKYGRPQRELLNERIREIEKAIPLTQDSAVVKAGAMAIQTLVGQIESLRVAIANYDAEIARIFQQHPDRAVFESFPGAGKVLAPRLAAAFGADRDRFQAALEIQELSGIAPVTERSGKTIWIHRRWACPKFLLQTFHEFADQARRLCAWSKLYYQQLRRRGKDHHAAVRALAYKWIRIMFRCWKDRKPYDDAVYMNSLHRRGSGLALDCGKPLSSM

SEQ ID NO: 79487 - protein, 388 aa, unidentified
MIYVGVDIAKTNHYASIVNHSTGEIIENPFLVTNNKQGFDLLYSKIKDLDKENVLIGLESTAHYGNNFIFYFHEKQFKLGLINPIQTSTLRKTRIRKVKNDKVDSLLICEALSLGYYNLLSNYDIELLEIKSLCRFRKDLKDKVSSAKIQLDSFVDQVFPELNCFFKNNLDIKTAHELLKLYQSPQDISKINLTKLSNLLIKSSHGKYDKNRAIELKQLASRSVGINNSALCIQIKMTIELIELLESQIKDIEKQVSEFIKKSDNVITSIPGIAYTTAAIIISEIGDINRFNNPSQVLAFADLDPSVKQSGTFNASSTRMSKRGSSLLRYALILAANNVQLNTKTFSNYYNIKRAQGKLHYNALGHCAGKLIRIIFYMLKNNVKFNLN

SEQ ID NO: 79488 - protein, 315 aa, unidentified
MEEKETIFAGIDVGKYNVDMAFAGQGEVKRFKNDDDGIGQILGLLKGRQVGRIVLEASGGYQRQLLAALLGAGWPAVAVNPRQARDFAKALGRLEKTDKVDAHVLALFAEKIRPPVRALPDETLQAVVDWLTRRRQLVEILVAEKNRSHQAQGAVRRDIEQHIDWLKKRIHDNERDLPKLLADCPAWNARVQLLDDQKGIGRVSALTLVACLPELGTLSRKGIAKLVGIAPLSRDSGTLRGKRCCWGGRSAVRACLYMVTLVASRHHPVIRDFYERLVARGKLKMVAIVAAMRKYLTILNALTRDHLKAIAVQAK

SEQ ID NO: 79489 - protein, 356 aa, unidentified
MTDEKRRVVAGVDAHTDEHHVAVLDAQGRLLGTAAFPTTADGYARLVGWVRGHGTIDRIGVESTGAFAAALVRKLLASGITVVEVNRPHPHARQRLGKSDPIDAELAARAVLSGTATAVAKDTRGIVEAIRQLTVTRSGGLKARTAALQQLDDLIITAPQQLRSELRRGRTLRARAALCLKLRPNTNTLHEPAQAAKLALRSLARRIRDLDREIDELDRQLERLVQTAAPRTISLFGVGTQAASQLLVTAGQNIGRFRSEAAFAKICGAAPIQASSGRTTRHRLDFGGDRQANRALHLIAICRLRHCDRTRAYATKRSSDGLNRREILRCLKRYIARETYHALRADLEALNPTRHL

SEQ ID NO: 79490 - protein, 409 aa, unidentified
MAMLDVALDPATVVVAVDPGKVMNRVWVSNGDGLLEQPVSLPVARAGIAALERMLAAHSGERVIAIEATGSLHRAWAAELERLYPGALRLFAPSETKAARTQLGSARFKTDDRDCAALTYLARQGAGRRQVEESVVDTLRAAVRHRRGLVDDRKKAQQRLHDQLNGLCPGLSAPAGHGRELPIETPTGQAVLACAAAFAGRPPTMRSLIARAPGRLTKTNAEYWVQRWRGCLPPPPDAEQRAQRLGRDLARFRALQIDIAAIEEEMKAWLAATDGQILTSLPGVAVLRAAAFAAHTLPIARFPDAEHLYSATGQAPALYESASLRKRSRISRQGLAEHRDALMGIAWGLSLFSPSFAERDAELRARGMAPIQARVALARNACRLAYRLLVTQQPFDEEAYRRGRLRRGR

SEQ ID NO: 79491 - protein, 351 aa, unidentified
MIIKEDAMGQFVGLDVSLHETAVCAVDADDGHVIWRGSCGSTPEAIAATVGEHAPTVVRLGLETGTLSPWLARGLEALGLPVVCLDARQAKAVLSLRINKSDANDAHGLAELVRSGWYRQIQVKSQAAYQLQALVGARAQLVKIKVDLMNQMRGLLRTFGLVVGKGGGGKFDERVRELIAEDGALRTPIEALLCSWRQVCEQIGVLDRRLVAVAKRSATIRRLMTVPGIGVVAATAYAAMIDDPSRFARSASVGAYVGLTPRRHQTGELDYTGRISKRGAPLVRSYLYEAAGVVLHRMRRPSWLKSWGRKLVNRLGFKKAAVAVARKLAVILHRIWIDGSRFAWSREQATV

SEQ ID NO: 79492 - protein, 352 aa, unidentified
MLTIGVDAHKKLHVAVAVDEAGRIVGQWRGDNCPEGWDAVTTWARELGAARRWGIEGAGSYGQGLARHLVALGEVVYEVNSRLTAHGRRGARQPGKSDALDAAAIARAVLREGDALPRIQPADEAAILDLLVTEREAAQAEATRLRNQVHALLHQLDPHYRRQIPSLITAAGLAALEQYQATSRHPLDQARAAVVRRLGQRLRLAVEQAAELARQIEERAEARFSPLMGVYGVKGLTAGALAGILGQRRFASEAQLAAYAGVAPLEASSAGATRHRLNRGGNRRLNAILYRIALTQARSSPDGRPYVQRRMAEGKTWREAIRALKRYLVRAIWRRWQECRPPQVAPSATVAA

SEQ ID NO: 79493 - protein, 459 aa, unidentified
MNRKRSKSKVERTLPVMHPNAAAIDVGATMHMAAVRADRTTEPVRSFGTFTTDLHRLVDWFTECGVETVVMESTSVYWIPIFELLDARGFTVFLVNARDAKHVPGRKTDVSDAQWLQRLHSHGLLRASFRPKGQIAELRAYVRQRERLLEYAASHIQHMQKALTEMNLQLHHVVADITGTTGLRIIRAIIAGERDPEVLARLRHYSCHSSAETIAKALTGSYRTEHLFALEQALALYEVYHEKASACDVRIEAVLKELSIDRGRSGSKELPTPRRHRTDQPNALAFDVRAALFALLGKDITMIGGLGPYLSLKLIAECGDDLSSWPSAKHFTSWLGLAPSNKISGGKMLSSRTRRSGGRAAALLRLAAVTVGRTDTALGAFYRRLSARIGKAKAVTATARKVAVLFYNAVRYGMEYVDPGASAYETRYRTRIVNSLHRRAKAFGFVLQPMEPTPAVVVS

SEQ ID NO: 79494 - protein, 419 aa, unidentified
MSDQARWYAGVDWASEFHHVFLTNADGGKIGEKIFKHGGEGLAAMADWLIAASGAVEAGHVNVAIEAPHGPVVETLIERGFVVHAINPKQMDRFRDRFTMAGAKDDSRDAETMASGLRTDPRAFRPLAAVNPVVIELREWSRIAEDLGVERNRLTDRMREQLWRYFPALLELDDDVGAEWFIELWEAAPMPGKAARLRETTITKLLKRHRIRRIDAAHVSSVLQQRPVAVSAGASEAARAHVGTLIARVRLLNRQIKQADDKLGELTARLAHRDESDPDPDPERPPHDSVILASMPGVGKTVLATMLAEAWDVICRRDYAALRSLTGVAPVTKKSGKSCIVVRRQACNERLSNAMYHWARVAMQHDSVSRAKYSALRKRGHSHGRALRSVADRLLNVACAMLKNGAMFDPSAATKKCAC

SEQ ID NO: 79495 - protein, 372 aa, unidentified
MEKDTTFVALDDSKRTIVAGILRPGTDEPELRQIPNEPRHLRRLFTRLKREGSVVACYEAGPSGYDLYRQLTTLGVSCQVIAPALTPRKPGDRIKTDRRDAAKLVRLFRAKALTPIRVPDEAGEAARDLLRCREDVQEDLLRWRHRLGKFLARHGRIYREGRSWTQRHWTWLRSQHFTLPVLQRTYEEYLFAVEQLLPRVADLDREIAALAATEPYRERVGWLRCFRGIDTLAAMILLTEVGDFPRFEHPRPLAAYLGLVPSEASSGERERRGSITKAGNTHARRILVEASWHYRHPPRLGAALTRRSQGQPKSVLAQAWQAQLRLHRRDPAPDRARETAPGRRGRPRARVGRLRLGRPDADGPVGPGRVGP

SEQ ID NO: 79496 - protein, 309 aa, unidentified
MSTNNSIIYIGLDIGKDSLQVNLQNQNFPIPNTRPGHRKLMAQLKAVGQPLLVVCEATGGYEQAVVAACHAAAIAVAVVEPARVRHFAKACAVRAKTDRIDAALLTEFGRQTAPRAQAPLNPSTAALRELSRHRLHLQAMTQNVVQQSRHLTLSALRKQNAALLRQLRAHLQKLQKQIEALLQQDVALQTKAHRLQQVVGIGPKTIVSLLAEMPELGKLNRAQAAALAGVAPHARESGRWQGKRFIGGGRPLARKALYTAALVASRYNPTLKLRYQSLIARGKAPKVALVALMRHLIIHLNSLLKPLAV

SEQ ID NO: 79497 - protein, 418 aa, unidentified
MIIPFRFPYQATVGLDWADQKHDVFVRFANGDSYRRTIDSRPEAIQEWLLELRSTCGEGKIAIALEQRCGALFFQLCTHLSWIDLYPINPHSLASFRKTFFSSRAKDDPVDSQLLEELLRTHPERLRSYQSEPTAERKLDQYCRHRRSLLNLATKTELKLISTLKQYFPLAVHLFGEVGLKSDIALNFLSRWPTLDELRKAKAQTLRCFFYAHNSRSQSLIEERIQLIAQAHSVTNDLALIEPLALTTKCLVAQLRQFNKAINEFDHKIKELFKSHPDHFLFESLPGAGEQLAPRLLSLFGSDRSRWADATDIQKYSGIAPVVERSGKSLWVHRRLARPIFICQTFHEFAQQSTKRSSWADQFYRRQRDKGKSHHSAIRSLAFKWIRIIFACWKANKPYDESFYVDAIAKRNFASSST

SEQ ID NO: 79498 - protein, 351 aa, unidentified
MMIIGVDYHPSFQTIAFLIEETGEYGEQELNHSDGEAEKLYRELKQRGTSVRVGLEATGYSRWFERLLAELGFEVWIGDAAEIKTKRVRKKKTDREDARLMLKLLLENRFPRIWVPSPENRDLRQLLWHRHRLVQMRTRIMNQLQAVAMNEGYRWKKKLFSAQGRALLEKLSLAPWASRRRKELLELLDQLDPKIVELTAAVEHETKKRPEVVQLMTHPGVGPITGLAYVLVIGTPERFPSGKQIGSYVGLIPCENSSAGRQRLGHISKQGNTLLRFLLVEAAQAAARCNPDWRRRYLHLMMRREKRIAKVAMARKLAVRLYWMWRNGWDHSQLVEFGSNAGKLVISHGVK

SEQ ID NO: 79499 - protein, 369 aa, unidentified
MNKQYTLEATLVASAKELKDQKTPKAKRIAVGTDVHLRGYQAARKVDNAAIGAVANFRSEAELLLYVDKQSEQAEEVVVVYEAGPLGYGLYRKLTARGVKCLVCAPDSSQQQRKRRKNNQIDARTLTSNLFNYLNGNEAALQLVRVPTEAQEQARLASRQHDQLVEERKRLGAKGNALLLSQGFGSCKNWWRPKAFSRLEQLLPTWLFEMLQTWVDLLRALDEKIQRAKAALTKRCSGPRPKGAGANSLVQLESEVLDWDLYAKGRKVACLAGMVPSEWSTGDDQRRGSITKVGVPAIRRIITEMVWRIIQFQPQYPPVQKWQEVLRGSNRTLKKKAVVAIGRQLMVDLWRMKTGRVSAEELNLVMVGA

SEQ ID NO: 79500 - protein, 490 aa, unidentified
MAKRKKSTFERLRDGEKLRRWERKQLDRQFQAEEPGWEVVYRNVAGIDVGNASHFVAVDPKQAGQPVREFGSWTAALNEMAVWLKSCGVKRVVMQTTGVYWIPVQDVLEKAGFEVAVVDARGTKNLPGRKSDVQECQWIQKLDVYGLLRESFQTPESIRNIRTIWRLRDRWVKDAGRSIQHMQKALTTMNVQLANTISDISGVTGMAIIRSILGGERDRWELVKLRDGRVQASVEELAHSLEGNWREDVLFELQQAVDGYDFQQKKITQCDQQLEKYLRVQPTRQVAGNGVAEASEVQPAAGEPQKKRRRRTTKPKPKKNQPAFDLGAELHRLMGVDLTRIDGINLCTAQVIYSEVGPDLSRFKGEGNFTSWMGLAPKRDVSGGKVIKQRSTHVANRVANALRMAAESLKDSDSYLGARYRSLRGRLNSGVKAVKAMARYLGCLVYRMLTKGEAWVDRGAAYYEQKRQDRAINQLRRKAAAMGMQLVPAK

SEQ ID NO: 79501 - protein, 377 aa, unidentified
MYRIIKIGMDVHSTNYTLCALEPVIGAEDRVFANITVTPDYKNILMFISNLKMKLGITDEYSIECGYEAGCLGYSLYNQLTAAGVKCVILAPTTMLTQQGKRIKTDARDAHMIAQCLAYGGYHPVYIPTEQDDSVKEYLRMRDDHKSSLKKIKQQTNALCLRHGHHYDGTKWTIKHIKWLRKIELSALYRETLDEYLATYDELVAKIERYDKRIEEIAAQENYCRKVKKLGCFLGIKTHTALSLIVETGDFKRFKKGNTYAAFLGLAPGENSSGDKIRRSGLSKAGNSHLRLLLVEAANGICKGAVGHKSKALKARQAGSSAEVIAYADKGNIRFRSKYYRMIRQGKKHNVAVASIARELACFVWGMMTDNIGTNAA

SEQ ID NO: 79502 - protein, 338 aa, unidentified
MTVVTVGIDLAKNVFAVHGVNAAGKAVLVKPLVRRAKLLELIATLPACLIGIEACTGAHFWAREFQKMGHTVRIMAPQLVSPYRMGGRHGKNDAADAAAICEAVTRPNMRFVPIKSVEQQGQLFVHRAHQGYVSERTALIHRIRGLLSELGIVLPQAFKAFLSGVAQVLEDLPGYCNQVIGDLLNELYHIEEKIKNSEKLIQQLARDNSAAQLLMQFRGIGPMTATAIVASIGNGHDFKNGRQFSAWLGLTPRQQSSGGKARLGRITKAGDSYLRTLLVLGARSVLLGAAKNDDPVSRWALQLKERRGYGRALVAIAAKNARMCWAMLHLRDEFRFPA

SEQ ID NO: 79503 - protein, 355 aa, unidentified
MTSTKYIGMDVHKESISMAVMNSVGKVVMESVIETKASMILQFIDGLRGDLQVTFEEGTSAAWLYDLLKPHVTKLVVCDPRKNKSMREGNQNDKIDARRLAELLRLDHLTPVYHGEHGLRTLKELVRSYLTITKDLARVKSRVKAIYRGWAIPCTGKQVYARCHRAEWLGKISEPGVRRRAEFYYLQLDALRVVRLEAWRALLVESKKQKAWKRLCAIPSIGPIRAAVLLGILQTPHRFRSKRPLWNYGGLAIEMHSSADHRRVDGQLQRSGKNVLVRGLNRNCNHDLKNLFKGAAAVASSKPGPFKEFYTALVAKGMRPELARLTLARKIATIVLIVWKKGVCFDANHLKPQTA

SEQ ID NO: 79504 - protein, 324 aa, unidentified
MNKINHFVGVDISKDKFDVWDSKAGHRSFANQPKGFREFTKQLSSNSFCVMEATGSYYQQLAMYLYGHKISLAVVNPISIKRFIQMKLQQNKTDKSDARMIALYGQEQPGLSPWIPAPEYITQCKQLQRVTVIYLKQNTSLKNHIQSLESRGVKSGILMRSLKRQLKQVRQEIALLEAEMQSLIQQYDADLFVNLSSIPGIGKKTAAFLIVLTNGFRDFDNYRQVSSFCGLSPTEHSSGSSVKGRSRISKRGNPYIRNQLFMCSFTASQCNPQCQLLYQRLVNKGKSKKLALIAVCNKLIKQSFAVAQSGIPYDPAYRSRMVCQ

SEQ ID NO: 79505 - protein, 345 aa, unidentified
MNVTTIGIDLAKDIFQVHGVNEHGKPILRKQLKRHQIVAFFANLLGCLIGMEACASAHFWARKLQTLGHTVRLMAPQFVKPYVKTNKNDVADAEAICEAVARPNMRFVPIKNVDQQAVLALHRARQGFVRARTAQANQIRGLLGEFGLVMPRGITSIAQHVPQLIEDASNELPGSFRLLIQRLTDHLKELDRQVAEIETQIKAWHHASDASRRLAEIPGIGPIMASALVVSIGDGKCFSNARQLAAWLGLVPRQHSSGGEPTLLGISKHGDTYLWTLMVHGARAVVRYCANKDDAFSGWLHRLLTRRHKNVAVVAVANRNARIAWALLTQGTAFRSDYAPSAAAA

SEQ ID NO: 79506 - protein, 367 aa, unidentified
MRKNSTVVKNGNKIFKQPALTIGLDLGDRSSCYCVLDEMGNVILERSVPTTPNGIRQAFGKMPRCRIALETGTHSPWVSRQLARMDHEVIVAHARNVRLIGESSRKDDQLDARTLARLARIDPGLLGPVRHRSAQAQIQLTVIRARAALVSSRTALVNAARGLTKSYGERLKKCGTEQMNRDSSEGLSQELREALDPLLREIESLNERIKEYVQRIEQIAKEVHPEVARLKQVKGVGTLIALTYVLTLDDPRRFRHSRDVGCFLGLRPGRRNSGKSEPQLHISKEGDRYLRTLMVQGAHYILGPFGQDSDLRRWGWKLAERGGKNAKKRAVVAVARKLSVLLHKLWVSGEAYEPLRNNNHQGVRAVA

SEQ ID NO: 79507 - protein, 324 aa, unidentified
MTQHKIIGIDLAKNIFFLFEINHKGKNLCRKKLQRSKLLSYIANKEPCTIAMEACSGAHYWAREFSQFGHEVILYAPQHVKTQRRKQKNDYNDAEAIAEVALYKRPHPVPHKSVEQQDIQSLIRMRRLLVTERTRIVNQVRGLISEYGIIMPKGAAAFRKAIPEILENDENKLSCILRELLSHQYERYLYIDEQVKWFDDKLNQTIKQFENAKRLMSIPGFGPLTSQAVAVWLGSGQQFKTGRDASAAMGLVPRQDTSGDKVILLGITKRGNTYIRSLLVHGARAALRRAKFKSDNLSKWMLELQERRGPNRAAVALANKLMRE

SEQ ID NO: 79508 - protein, 352 aa, unidentified
MNQKRKEVVKSEYLFVGIDLHKRTWHVTIRTDEVELFNGSVPGRWEALRKLLHRYRAQRVHAVYEAGYFGFWLHDHLTEYGVDCLVTPPSLIPMEHGNRVKTDRRDSQKLAHLLAKGMLKRVWVPSAEERFHRQVIRRRRQLVRDRVRTQNRIKSELSFYGVDLPAPKGKWTKIYFDNLSRIKFKNSWMQRSFTRLLEQYEFLCGQIDKQTQLLKELAQLPRYRDRVDILRTIPGIGIINAMEILLELQDLSRFQRAEQLAAYVGLTPSQYSSADKVRMGRITGIGKNSVRAALVESCWMLISKDKEMQRRYKEIKARSGAKRAIVAVARRLLLRIRRMLLDAQPYKFQLIA

SEQ ID NO: 79509 - protein, 343 aa, unidentified
MQAVTTIGLDIAKSVFQVHAVDAGGQPVIRRQLKRRHVLSFFQKLPPCLVGIEACASSHHWSRELQALGHTVRLMPPAYVKPYVKRQKNDATDAEAICEAVARPNMRFVATKTPEQQSCLMLHRTRHLFIRQQTAVINSIRAHLAEFGIVAPVGRQGVEQLLGIVADAHDKRLPEIARACVAALGAHLRILKAQILKFDRMIIAWHRSSEASKRLDEIPGVGPALATALIASVADPKAFRSGRDFSAWIGLVPKQRSSGGKDKLGSISKQGDRYLRSLFTVGALAVIRYAKIHGTKHRPWLAALLARRPTKVAAIALANKLARMAWAMMAKGERYKQPAALAA

SEQ ID NO: 79510 - protein, 311 aa, unidentified
MTELTIGVDISKRRLDAACYTSGRQERFANDAAGLKALRRWIGPGRLVARLVYEATGRYHAGLEAAFAGWPLVKVNPLRARRFAEACGTRAKTDAVDARMLARMGAQLALPPDPPASPGARELRALQTARAGLVGDRIALIQRADQARLPLLRRLAARALRLVEAQLAEVEAAIAARIAADRALARRQEILLSIPCVGQHLSATLVVEMPELGAASAKEIAALAGVAPLTRQSGQWTGKARISGGRGDLRRALYMPALNAIRYHPDMRRLYERLTAAGKPAKVAIVAVMRKLLVLANALVAQDRLWEPRPA

SEQ ID NO: 79511 - protein, 410 aa, unidentified
MIKENYIYVGIDLHKETHTAVMIDCYNQKLGEITFPNRPAGFPKLVAKVKKCNTDGKTIVFGLENAYGYGRALAVWLIDKGYLVKDVNTAISHRQAKHRGAMYRKSDSDDAEAIALATLNMLDKLPDAYPNDAYWSLGQLVHRRDNIMKQRTRLVNQLHEQLCIAYPSYKQFFNDISRPTALYFWEHYPSRKYLKGKSVEDLRAELAPVSHNKCSTKTCEKILDAVASDKVKNNAYQDARDMVTLSIVSDLQHYDKQLAEVDKMLEQMYKMLGCTLTTIPGVNVITAVKILAEIGDIKRFSNANKLAQFAGIAPLHLSSSGKGKDLATKQGNRRLQATINFLAIQMVQISSKGTPRNPVVRAYYEKRKAEGKTSQQALICISRRLISIIYGMLKSGTEYRMPVVENAGEK

SEQ ID NO: 79512 - protein, 355 aa, unidentified
MEGTKYIGMDVHKDSISIAVLNSSGKLVMESIIETKANTILEFVHGLRGSLYLTFEEGTWAAWLYDLLKPHVTKLVVCDPRRNDYLKQGSKSDRIDARKLAELLYSNMLRPVYHGEHGVRSLKELARSYLTITKDQARVMTRVKAVYRSWAIPCAGKQVYGQRHRLEWLGKIQEPGVRRRAEFYYAELDALRSLRLVVLRELLLESKKHSVSTLLSQIPSIGPIRAALLIALLQTPDRFRTKRQLWAYSGLAIETHDSAENQYVNGQLQRSKKKQSIRGLNSNHNHDLKNIFKGASAVAAVKSGPFQRFYAAQISKGIRPEIARLSLARKIAAIILTVWKKGASFDASYLNPQTA

SEQ ID NO: 79513 - protein, 346 aa, unidentified
MQFYTKQHKFYCGIDLHAKKMYACILDEKGEIREHRNMKTNPESFLAAIAPFREDIVVAAECMFTWYWLADLCQKEGIPFVLGHALYMKAIHGGKAKNDKIDSKKIAVLLRGGMIPMSYVYPEKMRATRDLMRRRNHLMRKRSELLAHIQNTNSQYNLEEPFGCIAKPRQRGDIVGAFDHPAVKKSMEVNLKVIATYDVLLDDLERTILKLANHHDPVSYALLQSVYGIGRIGALTILYEIENIKRFPRVQDFVSYARLVKCEKTSAGKSYGTSGAKIGNAHLKWAFSEAAVLFLRNNEPAKKYMERLTRKHGKGKALSILAHKLGRAVYFMLKNKEAFDQEKFLR

SEQ ID NO: 79514 - protein, 344 aa, unidentified
MKNTTIAIDLAKSVFEVGISDRPGHVVAKHRLSRDEIVRFMANQQTTTVVMEACSSAHYWGRTFQSFGHDVKLLPPLYVRPYVQRSKTDRADVKGMLEAWRNTNIRPVPVKTESQQQLTALHRVRAGWMAARTMRINAARGLLREFGIVFPLGASAFAGRVQELIEDADSTLSMPLRQLLHELILEIGELENRIKLVHKQLEAIGAQTPVVERLLTVPGVGLLTATAMVGFIGDVSRFPTGRHFAAYLGLTPSEHSSGLHRRLGRISKHGDVYLRTLLIHGARATLVAAQQHAHPHRLHLWGLQLQHRLGNNKAAVAIANKMARIVWAVWKSGKPFQSHPQNVP

SEQ ID NO: 79515 - protein, 340 aa, unidentified
MDSIGLDLHKRESQLCTLTAAGEVVEQRIVTSRERFSAVLGGRPPARILLEASTESEWVARHLESLGHEAIVADPTYAPMYATRSRRVKTDRRDARTLADACRLGAFRVVHRASDAQRHVRAELAVRDALIRTRTRYVAVVKALLRRDGWRLPSGRPEHTARKVAALPLGPAVLTELAPLLALLAPLQDQIDAADRQLEGGAARDPVVRRLRSVPGIGPVTAVAFAAALDTVDRFASARQVAGYLGLAPSERSSGEQQRRGPITKTGNPRVRVLLVEAGWRLLRSRHPAAAPLRAWAERLAVRRGRAIAAVALARRLARILYAVWRDGREYCPARVTSAA

SEQ ID NO: 79516 - protein, 326 aa, unidentified
MNSTDYVAVPLPVLGLDVAKASVQAELRTTGKRVRFGFANNAKGFAQLAGTLRQHNVPKVWAGLEATGAYSHALALWLHGQSHRVSLLNPRRVKQYARSAGNRNKTDLLDAALIADFVCAHQPAAWQPPTLEVAQLQALVRRREELSLMLQAEKNRLEGVAPNVRSSLERIITTLSAEKTRLEKLIIQQIRSQEQLSRDHQLLCTIKGIGSLTAAILLAEMARPGQVERARQAAAHAGLAPRREQSGTSVRRNRGLGKEGNRYLRKALYMPALVAIKYNAPLRHFASRLRAAGKPKMSIVCAVMRKLIHVAFGVLKHQKPFNPSLA

SEQ ID NO: 79517 - protein, 334 aa, unidentified
MSIVSTVGIDLAKNVFSVHGVDAGGVIMIRRTVSRSKLAQLIAQLPPCLIGMEACSGAHEWARRFATFGHSVKLMAPKFVAPYRKGGKNDGNDAEAICEAVARPNMRFVPIKSIEQQSDLTLHRVRQGFVEERTAMLNRIRGLLAEFGHVLPLRAAEVRRRVPELLETLPMRVASCVRDLLEHATRLEAKALEYEREIRSHVRTNALAQRAQTRLGIGPITASALVATVGNAHDFKNGRQFAAWLGLVPRQYSTGGKTRLGHITKRGDPYLRTLLVMGARAVLQGALRLNDPLSRWALALQQRRGYHRACIAIAAKNARIAWALLAKDTVIAAV

SEQ ID NO: 79518 - protein, 355 aa, unidentified
MNGTKYVALDVHTATIAVAVLNLDGKLIMESVIEAKGTTVIQFIQGLRGELFLTLEEGTWSAWLYDLLQPYVTKIVVCDPRRNALLKEGSANDRIDARKLAELLRANLLRSVYHGENGLRTLKELVRAYLTLIQDLTRVMNRVKAIYRSWGIPCAGQSVYNLRHREEWLGKITQASVRRRAELFYEQLDALVLLRKQARQELLAESKKHQAWKLLRSIPALGPIRAAVLMAILQTPHRFRTKRMLWKYSGFGVVTQTSADQQYVNGQLQRSKKPVFVRGLDPAHNHRLKDLFKSAAIQASTTKGPFREFYEALVAKGMRPEMARLTLARKIATISWMVWRKGLAFDAKYLKPQTA

SEQ ID NO: 79519 - protein, 343 aa, unidentified
MQVSTIGVDLAKNVFQVHGVDSAGKVVITRQLRRKQVLDFFSKLPGCLVGMEACGTGHHWAREISKLGHTVRLMPPSYVKGYVKRSKSDAADAAAICEAVTRPSMRFVPIKSTDQQALLMLHRTRDLLIRQRTQLINALRAHLAEFGLVAEKGREGLAELSAIIADEMNREALPSAMKQALQTIVDQLAALELQIGTLDRAIHAHHRANDMSCRLETVPGIGVIGATALASTVTDPSGFKTGRDFAAWIGLVPRQHSTGGKERLGGISKQGDRYIRRLLVIGATAVVRQARQHPQKHPWIMKLLAKKPAKLVAVAVANKMARIAWAIMARGGYYRAPALAAAA

SEQ ID NO: 79520 - protein, 471 aa, unidentified
MDRKSSTTRSGRRARRGRREKAERKLLERVHLNAAGIDVGSRSHWVAVPADRDPQPVREFQSVTHPLLELADWLEACGIDTVAMESTGVYWIPLYEILEERGFEVLLVNARHAKNVPGRKSDVLDCQWIQELHTFGLLRGSFRPEAEIVALRTLLRHRDKLVQDAAMYTQRMQKALTLMNVQLHHVISDVTGVTGMAILREIAAGETDPARLARHRDRRCKASEAEITAALTGSYREEHLFVLRQALEVYDFFREKLKRCDEEIEARLCSLESRCEPPTLSLPASRSRRRRQFQENAPSFEIRSPLYQLTGGVDITELPGIAPYGALKLISEIGLDMHRWPTEKHFVSWLTLAPRNEVSGGKLLASGTQLSANRAAKTFRMAAMTIGRSDHALGAFYRRLAVRVGKPKAITATARKIALLFYRMLKHKMSYIEIPASEYDERQRQRLLRTLAKRARSLGLDLVDVSTGLVM

SEQ ID NO: 79521 - protein, 362 aa, unidentified
MTTIARDRTAAQIEIAGGIDTHQDTHTAAVVDSTGRPLAARQFPAKATGYRQLLTWLHGFGIILVVGIEGTGAYGAGLARHLASEGISMVEVDRPDRKARRFAGKSDPLDAQAAARAALAGVRTGHPKTRDGQVEALRNLRVARRSAVDQRADCLRRIKTLVVTAPETLREKLRSLPDSRLLATCAAFRPDISQASDPTQATRIALRSLARRHADLTTEITDLDALIEPVVKKTNPRLLDLNGVGPDVAGQLLVTAGQNSDRLRSEAAFAMLCGVAPIPASSGKTHRHRLNRGGDRQANAAIYRIVLCRMRWDPRTRAYVKRRTSEGLSKKDIIRCLKRLIAREIYYVLRTPTPTTDPTIAA

SEQ ID NO: 79522 - protein, 451 aa, unidentified
MQPIRTESLEWAALPHINPHAAGLDISATEIVACVRPDMSVTPIRTFSTYTPDLEALADWLQACHVTTVAMEATGVYWIPVYEILERCGFKVYLVNARHIKNVPGRKTDICDGQWVQTLHTYGLLTNSFVPAPEIRALRAYWRQRANLIEHRAAHIQHMQKALQQMNLHLTEVLSDITGVTGLQILRAIVAGERNAQTLGQLRDQRCRRSPAEIAKALTGNYRPEHVFALKQALALYDFYTAQIADCDAEMERQYAALQPIADAADLPPQTSRKRNSHSKNAPQFDARTQLFRITGVDLVAVTGLDESSVQTIISEIGTDVSRFPTVKHFCSWLTLAPHNAISGGKVLHSRTLKARNRAGQAFRMAAQAVMRTQTPFGAFYRRLAARIGKEQAIVATAHKIARVVYAMLKHQRPFESTSQEAYERQHQERELKRLKRRAADLGFQLVPQSG

SEQ ID NO: 79523 - protein, 353 aa, unidentified
MRTYYVGMDVHGASIVIVVLNGAGKIVMQGVIETSAERVRSYLKQLRGKVYVTFEEGTQANWLHDVVRPLVTEVVVCDPRHNKLMQSGNKSDRVDALKLAELLRLGSLKAVYHGNNGVRTLKELVRTYDCLVSDTTRVMNRLKAIYRGRAMACKGHDIYRQDRRQQWLEKLREPGAKQRADFLYKQLGALKPLRHEAKGLMVKEARRQTAYPWLLSVPKLGSVSVAQLLAIVGTPHRFRSKHQFWSYVGLAVVTRSTADHEVVDGVLRRSKRPVATRGLNRNHNHVLKRVFKNAASSACHSGPFQAGYEARVAQGMDASLARLTIARQLAAITLAIWKRGEQFDPERKRQQVA

SEQ ID NO: 79524 - protein, 395 aa, unidentified
MSYEIFCGLDVGKATHHATGLDGDGNLLVDREIANDETALRRVFTELTEQGTVLVVVDQPSSIGALPIAVARAMGIEVAYLPGLAMRRIADLHPGNAKTDARDAYVIADAARTLPHTLRRVDLGDESLADLSVLVGHDDDLAEQATAVSNRIRGLLLQIHPAFERVLGENAAHKAVLAVLVKFGGPTGIKAAGKAKVGRVLKAGAPRMGERLTNQIFDALAEQTVVVPGTAAAEKVLPRLAEQLLGLQQQRKQVATEVEEALDAHPLSRVLTSMPGVGVRTAARILITVGDASSFPTAGHLAAYAGLAPVTRRSGSSIRGEFPSRSGNKDLKNALFLSAFAALRDPASRAYYDRKRAEGKKHNAAIICLARRRTDVLYAMLRNNQAYIPQTPQAA

SEQ ID NO: 79525 - protein, 431 aa, unidentified
MKPIVKQNTEPNPAEDFAAFLALDWADEKHAFRLQVVGQSKIETGTLEQKPEVLGPWLAQLRERFGGRPIAVGLEQSRGALIHALMAYDFLVLYPIHPTTVAKYREAFKSSGAKNDPLDAGQILEILTKHQDRLHRLNPDTVETRLLGRLVEDRRKAVALRTTHIQALGANLKEYYPQALELTNDNLKSRLACDLLMKWPTFEDFQQAKPSTLKRFYYGHNVRSPEVMERVLTLAQKSQALTTDPALVESGRRLTQMYARLIQALNPAIEDYEQRIQRVFDAHPEAQLFSNLPGAGPALAPRLLAFFGTDRSRYATALNVQSFTGIAPVTKSSGKSKVVYARAACPKFDRQTFHEFSRLSVTKCQWARNYVQYYTDKGKKYHTIIRALAYKWIRILFKCWQERTPYNEDKYMETLKIRGSIFATRHLQKTS

SEQ ID NO: 79526 - protein, 397 aa, unidentified
MYIVGIDIAKRKHEAAVIDGEGTVIIKPFSFTNNCSGYNRLLAMLTKAKLPLDEVSFAMEATGHYWLALFTRLQKEGFRVQVINPVQTNSIRSFYIRQAKTDPRDALLIAEVIRFGHFSESTLHPENIYELRELCRGRHAIVSMQADVKRKVVALLDQVFPEYETAFTNLFGDTSMAILQACPTPKELSGMPLEELCYLIEVSSHKRFRMAKAQELQALARNSFGFAMAGDVFSTMIRLYAKHLDFLKQQVREMDRKIAEIMDTLDTPITTITGIGPTLGAYILSEIGDISRFSSAAKLAAYAGIDPTMRQSGEYNGVRNRMSKRGSPYLRHAIWLAASSAVLHDPALKLYFQKKRDEGKPYMASVGHACRKMVSIIYAVMRDNKAYTPYIPNEISA

SEQ ID NO: 79527 - protein, 430 aa, unidentified
MKSNTQNAKIEAITEKTLVLGIDVGSEMHYARAFDYRGIEYSKKPFKFSNTEAGFVTFKEWILDLKERHEKDKVIPGMEPTGHYWFNLGKFLQDNEMKPVLVNPHHVKKSKELDDNNPTKNDRKDPKVIAGLVREGRYMIPYLPDGVYADLRTASNIRFQLQAELTRIQNRISRWFNIYFPEYKTVYGKPDAKSGMLILKAAPLPEDILTLGIDGVNQIWRDAKLRAVGKARAKTLIEAAEHSVGSKEGAVSARMEIRMLLEDYESRNTRLQEVMVLIEELVRKIPMAEKLLEIKGVGIRTVSGFLAEVGDISRFNNPKELQKLAGLALVENSSGKHKGETTISRRGRKRLRYLLFEVAMSLVAKNPEFRELHNYYTTRKLNPLKKMQSLMAVAAKLIRDFYAMLTKGVAYDPQKLVSDIRRPAAYLQVA

SEQ ID NO: 79528 - protein, 345 aa, unidentified
MTIVEARPVTGGVDTHADMHVAAALDSIGGLLGVKEFPVTPAGYAGLLGWLGGFGTVVLVGIEGTGSYGAGLARHIAAAGVRVVEVDRADRQDRRRQGKSDPLDAVSAARAAQSGRARGAPKGRDGAVEAIRALMVAKRSARSERIQTVNQARSLIVTGPDDLRAQFTGHAVAALVSELAALRPRPGDVAGYATRIALRELGRRAEFLDGQLGRLDELIVPLVTARAPGLLALHGVGPDTAALLLIAAGDQPARLRSEAAWAHLCAVAPIPASSGKVTRRRLNPGGNREANHALWRIVITRMSSHAPTRAYVQRRTAQGLSKKEIIRCLKRYVARQVYPHLRPAT

SEQ ID NO: 79529 - protein, 391 aa, unidentified
MIYVGIDVAKDKHDCYVSDSDGVELYAPFIIQNTREGFEDLFEKVRAVAPDLSKVKIGLEATGHYGYNILGYLLEKEFRIFLINPLHTNLFRKSLSLRQTKTDKVDARTICMMLHSGMALTPYSKTSYHMEELKSLTRYRFDKVHERGKLKQSVSRLVTILFPELEKLVPSLHMKSVYALLYEFPGAEQVAACHMTHLKKLLYDASGGRYGKDVAETIRNAARSSIGSHIPAKSLELKHTIDLIRKIDDEINETESAIKVIMDDIGSPILTIPGISYRMGAMIIAELGDISRFNSPDKILAYAGMSPSTYQSGQLTSSYAHMEKRGSRYLRYALFNATKFVCIWDESFAKYLAKKQSEGKHYNVAVSHAAKKLVRLMFHLINTGEAYIPAA

SEQ ID NO: 79530 - protein, 569 aa, unidentified
MSRASWQLRDAALGYASRGIPVLPLHYPLPHRSGLQPVASDHPPTLATGCSCRDPSCGQVAKHPLGSLVPHGVKDATTNRARVLAWWTRYPQANIGLATGHRFDVLDVDGPEGTQAIRELAATHSLHSSGPLVHTGGGGWHYCEGEQGRCARRRSRPGLTRGTTGVLPSGRSVDQFPGTPPGATSADGVTSEEPGLGPRRSTVRRLAVGAFPANHRAGRDEMASLPGVAPQVTVGVDSHKDVHVAAAVDHLGRVLGTTWVPTTTRGAAQLLRWATRLGTVQRFGIEGTGSFAAGLSRWLQEQGHEVLEVNRPNRQTRRRRGKSDPVDAEAAARAALAGEATTPKTANGTAEMLRVLRVARRSAIRARSQAANQLHSLLVTAPDQLRQQLRGLPLARLVQVAATFRPGSLTGPLAATKFTLRELARRYQLLTAELDRLDAELAALAPKAAPGLLARRGVGAQVAGALLVVAGDNPGRLRSEAAFSMLCGSSPLEASSGKTVRHRLNRGGDRDANNALWTIAMTRLSCDERTQRYLARRTAEGKSKREIIRCLKRYIAREVYRDIKAAIVT

SEQ ID NO: 79531 - protein, 342 aa, unidentified
MDYYAGIDVSLEASSLCVVDASGKIVKEAKLSSEPEALIAWFKGLPFGLARIGFEAGPLSQWLYAGLKQAGFAVELLETRHVRDAFKAMPVKTDRNDARGIAQLMRLGWFKPVHCKSMPAQETRALLTARKLVQSKLLDVEMSLRGILRGFGLKVGRTTKAGFAGRIEELTEHHPALKAIAKGLLAVHAVLLKELNGFEKQVRKLAKSDARTRLLMTAPGVGPIVGLTYVAAIDDPARFSSSKSVGAHFGMTPKKYQSGETDITGRISKTGDKGVRAVLYEAAHIILTMPIKGGALKSWAAKLAKRVGPQKAKVALARKLAVILHRMLADGASFDAAKAAAV

SEQ ID NO: 79532 - protein, 359 aa, unidentified
MLVERTSVGLDVHARSVVAAAIDGVTGELVRARLTPSPDQIRSWLAERAGPVAVAYEAGPTGFGLYRALRAAGIRCVVVAPSKLQRPAGDRVKTDAKDAVHLARLLRLGEITSVAVPSVDQEAARDLVRAREDCRGDLMRARHRLSKLLLRQGIVYSGGNAWTDAHDRWLRRQRLPTTATTLAFESDYEAVLAVSARRDRLDKAILAMADDSEFTPIVHRLACLRGVATLTGFALAVEIGDWHRFTGNSIGSFIGLVPSEHSSGTSRVQGPITKTGNTHARRLLVEAAWHHRAAYRPSKTLRDRWELAPPTARARADLGNRRLHARWVAFNLRRKRPVIANIAIARELAGWCWSLAVLE

SEQ ID NO: 79533 - protein, 385 aa, unidentified
MMLIGIDPHKSTHTATAIAPDTNQEAASIRIDATLREYRRMLTWARQWPQRRWAVENAEGLGRHLTSWLLARGEDVVDVPTTATARVRQLSRGGGRKNDRIDAGAAACVAALQGDARPLEAESYVDAMAVLDERRVNLAQSRVRAVNQLHALLRALIAGGAPRDLSATTAAALLRTVRPNGAVEQARKAVAKDLVTEIRTLDTQLKANAQAIARLVAATGSTLTEVVGVGPIMAGRLISRTGRASRFLTASAFANYAGAAPVEIASAEKSRHRLSRHGDRQLNSALHTIAITQIRIPSSRGHRYYKSKIAEGKTPREAARCLKRRLADHLWRTMINDERRAVGPGGQLGTTLQSSVAGPTPTTNSSDKSLPGPATHDSTTAEPAA

SEQ ID NO: 79534 - protein, 400 aa, unidentified
MSVAVGIDIGAYKHAVAVCRAGEREADRWTMQISANRAGFRQLAGWMQTLAEPVSVVVMESSGHYWYNLASHLHRAGIRVAVVNPLESKYFGKRRLQRSKSDRADARTLAALGMHDQPRAQTPLAQSELREAARFSMRLVREQAEVCQRIQRLIDLGFPELREVWDDPTCVSALAVLRKAPTAAAVRRLRLDTLAALKRPGEGGRAIGPAKAEQLHALARESVAAPELEAQVGFEMRLLIQQHDFLDRQIAEADAHLASLLDGDTARRLLTIPGVGPATAATLLAEIGDIWRFTDVDQLLAYAGVHPKEQSSGQKGERPETSWTMAKTGNAFLRAAAYRMAVVGIKHNPVIRSHYARKRAAGKSPMNAVGHCMSKALSLIWGVWRSGRDFDPRQPQPRSA

SEQ ID NO: 79535 - protein, 345 aa, unidentified
MKQYAGIDVSLEQSSVCVLDGEGKIIREAKVASEPEALIAWFGSLGLAMTRIGLEAGPLSQWLFAAMKQAGLPVELLETRHVRNAFKTMPVKTDRKDARGIAELMRMGWFRPVHCKSISAQETRAILTTRTLIEAKLRDVEMSLRGVLRGFGLKVGKTTPTNFAERIKQLVSEHSNLQVIADALLAVREVLLREFRSFEKRVRTMARHDERARLLMTTTGVGAVISLTYAAAIDDPARFKNSKQVGAHYGITPKRYQSGEIDYTGRISKIGDKSVRTALYQAAHIILTRPVKASALKSWAMQLAKRIGMAKAKVALARKLAVILHRMLVEGKPFDHKLPNQVAAA

SEQ ID NO: 79536 - protein, 415 aa, unidentified
MESMESIIPRCAGLDVHKESVEADVRRIERDGGMHHETRRWGTMTRDLLAMSDWMAAQGVTHVAMESTGVFWKPIYNILESRFTVLLVNARHLKHVPGRKSDVRDCQWIAQLLQHGLLKGSFIPPRPQRELRDLTRHQRQLTEEKARTVNRIQKVLEDANIKLASVATDILGVSGRAMLHGLIEGEKDPVKLADFAQRKLRGKIPELEKALEGHLTEHHQFMLRLLWKQLTPQEELIAELEGKIDEHVRPFAEAIERLDAVPGVDHRVAVAVLAEVGADMTPFPSDQHLASWAGMCPGNEESAGKRRRRRITPGNRWLKRTLTQAAWAASHTKNTYLASQYRRLAGRRGKKRAVIAVGHSMLVIFYHMLKADTTYADLGGAFLDRLEPQRMTRYYLKRLQALGHKVTLELNVVPA

SEQ ID NO: 79537 - protein, 442 aa, unidentified
MIRETAPRGMTTGFFAGREALRNVDVAIGAVGRPGEDDRRTSVIDVSGIGAFLGLDVGKGEHHATAVTPAGKKAFDKRLPNSEPKLREVFGKLQAKHGTVLVVVDQPASIGALPLAVARDMGCPVAYLPGLTMRRIADLYPGEAKTDARDAFVIADAARVMPHTLRSVDLEDETIAELEMIVGFDDDLAGEATRISNRLRGLLTQIHPSLERVLGPRVQHPAVLKLLDQFGSPAQIRKAGRRRLVTLTRPKAPRMAERLVDDIFTALDEQTVVVPGTDAAALIVPSLASSLQAVLDQRKLLAARIEELLENHPLSKVLTSMPGIGVRTGARILIDVGDGRSFPSAAHLAAYAGLAPATRSSGSSIRGEQPSRKGNKQLKRAFFLSAFAALADPVSRAYYDKKISQGKHHTQALLCLARRRADVLFAMLRDGTFYEPQPAPSA

SEQ ID NO: 79538 - protein, 330 aa, unidentified
MKKINIIGVDISKNTIDFHCHGHQFTPEPVGNNLKGHRQFERWIKLKVSKQKEEVLIVMEYTGIYTYNLERFLGDRGWNYVKRPALDIKRSTGIQRGKSDTADARMISRYGWLNRDVLKPHQPMNDNLVALQQLLSYREKLVSDKASHQVRLKELKEQLSDKLHEKISQSSQFIIDMLTLEIKELDRTINNHVAEDESLQRNFELLTSIRGIGPIIAITLIVVTENFTRFDSHRKFACYCGIAPFTYTSGTSIRGKTRVSQLANKKVKALLTLAVFTAIQHDQDLKIKYEQKRKEGKPAMSVINIIRAKLVERIFTVINRQTPYILKPAA

SEQ ID NO: 79539 - protein, 349 aa, unidentified
MLADQLDYVVGVDTHRDEHVLAVVAAPAGAVVAGKAVRANRRGYREALRFGERYAAGRRAWAIEGTGSYGAGLARYLAEQGETVLELSRTPRAERRLQGKDDALDAARTARAALASETLALPRAGQRREALRLLLVARRSAVDVRREALAQLRGVIVTAPDHIRQELRGLSAGKLLGRCSRLRRSSSADADELAARLVLRSLARRIEAATREADQLERELLGHVRALAPSLLDEPGVGPIVAAQLIVAWSHRGRLRSEACFARLAGVAPVPASSGQTRRQRLSRGGDRQLNRALHTVVLHRRQHDPATRHYLPRRVAEGKSRRDATRLLKRYLARHLYRLLQAQEPLMA

SEQ ID NO: 79540 - protein, 345 aa, unidentified
MKHYAGLDVSVKETSVCIVDEAGKIIREVKVPSHPHDLVDVLRNSAWRLDRIGLEAGPLSQWLFSGLADAGLPVVCIETRHTKAFLKAQVNKSDRNDARGIAQMMRVNLFRPVHVKTLTSQKRRALLTARKILQDKAVAIENDIRGLLRNFGLKVGAIGLRKFEERIRELVEGMPELIAIMEPLLAARQKLREMFTKLHRQLLLAVRDDGVCRRLMTIPGVGPVVSLAFCATIDVPARFKNSRAVGPSLGLTPLLNQSGESRRIGRVSLCGDQMMRALLYEAAQVMITRVKKWSSLKAWAMNVARRRGLKKAIVALARRLAVIMHRIWVDGSVFRWTNKVTPAAA

SEQ ID NO: 79541 - protein, 412 aa, unidentified
MQIVYERCAGLDVHKKSVVACLITPAANGERRKERQTFSTMTPDLVRLREWLKDQQCSQVAMESTGVFWRPIFNILEGHVEVMVVNAQHMKAVPGRKTDIKDAEWIADLLQHGLLRPSFIPPAWQRIVRELTRSRTSLSEERSRVIARLQKGLEDANIKLASVASDLMGKSAQQMLHALIEGELTPEAMAEFARGRMRAKREQLVQALTGHLQAHHRFLLAEHLKHLSELQEAIARLSAEIAERLQPYEELLTRLETIPGVKRRLAEVILAEIGTEMRRFPTAQHLASWAGMCPGNHESGGKRLSGKTRKGSQWLRTALVEAAHAASHCKDSYLSAQYHRLAFRRGKKRAAVALAHTLLIIIYHMLAQEEEYQELGGTYFDELDREKKEQRLVRQLERLGFEVALTPVAPLA

SEQ ID NO: 79542 - protein, 351 aa, unidentified
MAYYAGLDLHKSMSVIVVKDQQGQLVTQGRVPNDPTALEQFLRFREEQPVHVAVEATTNYRWMYDTLEQLGCQVSLAHPLKVRAIASARIKTDRIDAGVLCDLLRGNLLPTSYVPPAAIRDLRELLRHRMRLVRDRVQVKNRLGVLLMKVNQTVPGTDPFGVKGRALFARLPLPPMLAWQREDGLAQLAFLDQQITRIDRQLRSLACEHPDVSRLTVIPGIGIFSALLILAEIGDITRFPSAKHLVGYAGLAPGVYQSAGTRHGRGITHQGSRYLRWILVQDAQHVLRRPGPLRQTYLRLAKGKGHGKALIAVARKLLVGIYAVLHDGKPFCPTASMTITCQRSPHTEAGR

SEQ ID NO: 79543 - protein, 343 aa, unidentified
MAYFVGLDVSLKETSVCIVDDSGKIVREARVASEPEALLQVLTNTIYRFKRIGLEAGPLSQWLYSVLAEAGLPVICVETRHMRAALKAQINKTDRNDARGIAQMMRVGLYRPVHVKTLRSQKLRMLMTHRKLLQSKAIAIENDLRATLRNFGLKVGMVGTVKFEARIKELVESVPDLAVLVEPLLIVRQVIREQVDILHRRLLAIVRDDDVCRRLMTVPGVGPVVALTYRATIDVPARFRNSKAVGAVFGLTPAKYQSGQNDRTGAISRCGDEMMRMVLYEAAQSMLARSAKWSWLKAWAMKIARHRGMKKAIVALARRVAVIMHRIWIDGTAFRWTREVAAA

SEQ ID NO: 79544 - protein, 361 aa, unidentified
MNKSSNRSERGPKYASLGLDVSDRKSCWVALSREGKVVEQGRVATRSPEMEKWAMGMAPTTIALEAGPHSPWISRLLERCGHEVIVGNPAKLPSISRSRSKSDWRDAEQLARLARFDRSMLHEIKHRSERLQQDLQVIRSRDAVVRARSRLISHVRGTVKAHGQVIGRCSTAAFTRRAQGVVSGPLLEIIDPILEAIDKLSATIDSYERKIEQLAAGPYAETRWLTQIKGVGALTALAYVLVLGEATRFRRSRMVGPYLGLVPARDQSGESDPQKGISKEGDRLMRRLLVQSAHYILGPFGIDSDLRRHGEAIAARGGKNATKRAAVAVARKLAVLLHHLWISHDEYVPLFNHKTNDAIAA

SEQ ID NO: 79545 - protein, 500 aa, unidentified
MPCSHLAIPSTRTTSFLAISHVLLVITPIDMPWIATARDIADVQHAPVLVQPHAAGLDIGSEAIVVAVPPDRDLQPIRVFSTFTVDLHALVAWLVACGIDTVAMASTGVFWIPIYEVLEQADITPYLVNARHIKTVPGRKTNWNAAQWLQKLHAFGLLQASFRPDAEIRTLRTLARYRAELIGRRAPHINHMIQALKHMNIQLNLVLTDITGVSGLAILRAIIAGERDPQRLAQFRQPACKHSEAEIVKAVTGTWDDAQLFILTQSVDVFGYSTTKLIACDAQLEQPYQAMESRWEKDAPLPDLPPAKGESKSKNAMSFNARAQIARVIGVDLVAVMGVSAITVQTIISEIGTDMERFPTVKHCCSWLGLAPHNDISGGKVLRSRTMKVHRRANQAFRQAAHSVTRAHSSIGAYYRAMRARLRPKQAIVATAYKIARTVDHLLKTGEPYREESDAEYERKRQEREIKHLARRAQKLGYTLNAIPTTALEVLAEAGGEGSF

SEQ ID NO: 79546 - protein, 427 aa, unidentified
MRFIALDVHRDFCEVAIKDETGLRLAGRVRTSVEKLELFAQSLSPDDEVAMEATGSALAIARILEPHVARVVIANTRKLSAIAESKVKTDKVDASTLCELLAAGFLPAVWAPDEFTRSLRRRLQRRSKLVRSRTRAKNELHAVLARNLKGRPPVSDVFGKKGREWLTTLELPADESETLGCCLREVDFLDSEVGLIERELARQAMSSQEIRRLMTVPGVSLVSAAAFVAVTGDIHRFSSPKKLVSYVGLDPRVRQSGEGPARHGHISKQGSAEARHMLCEAAWVAVRTPGPLRAFYERVRARRGAQIALVATARKLAVLFWHLLTHEEDYAFGRPSLTRRKLRALELKTREGWRRGRYSGPRVHETKKDREREVEFAGQIESAYRRLVEDWQPKPGKSGAGATRGRASSRPTSGKQRGKASVPNPAL

SEQ ID NO: 79547 - protein, 358 aa, unidentified
MQRNKISFKGQKIFIGIDVHAKNWEVAIAPEVGIVRRHSQKPSAKELFDFLKKNYPDGEYQAVYESGFSGYSTCYALREVGIECMVIHAADVPTTQYEEIMKTDRVDAVKLARSLKAGLLKGNYVMEKQYIDDRSVVRIRRTIRKQLGAYKSRVKHMLHCHGVEYPERFSKKQKHWSRAFITWLMKDVCLMSDTRASLDLLIRQVEALRGTLLEATRQLRKMSQTERYKHRYDLLKSIPGIGLIIAMGILTEVCDVKRFHNENQFAAYLGLIPTSHSSGEKTVHGEKTFRGNKQLGPMIVEAAWVTIGRDAGLGAQYFQYKKRMKPQEAIVRIARKLSNIIFSVLKNEKEYVPYQTGN

SEQ ID NO: 79548 - protein, 404 aa, unidentified
MTAEPRCVTGGVDTHADVHVAAALDSATGRLLGVESFLTTAAGYAALLAWLRALGDVERVGVESTGAWGAGLARHLRSEGVEVIEVDRPDRKARRFEGKSDPTDAEAAARAVLSGRATGAAKTKDGLAEAIRALEVVYHGAVKDRTRAINQFKALLVTAPEPLRANLRPLAFSAQLQRARRLAPVEEVVETETRLALRELAGRVKFLDAQCNRLEIRITELTAQASPALVGISGVGPHVAAQLLAAAGDNPHRMTSEAAFAKLCGACPIPASSGKTTRHRLNRGGDRRANNALFTIVLVRMRHDPATRAYAARRTAEGKTGKEIIRCLKRFVAREVYQALTNPPEDLPTGPELRALRQHHGLPLVAVASALGTTPIRLSTLERGLVHDTRLARRCRTWLIERAA

SEQ ID NO: 79549 - protein, 323 aa, unidentified
MNKDINYFGLDISHLVFDVTDSDGNYHQFKNNVSGFKKFAKLLDSNSHCVMEATGYYHYQLAYYLLESGIKVSVENPLAVKRFIQMKLSKIKTDKSDSKLICEYAQQVELKLWEGNSKHQIECLQMTRLLAVYTKQSTMLKNKLHGEAVLGHPSKAVVSSLKRSLKHVEKELNNLEEKLLTLVKEAHQDVLTRLKSIPGIGNKTAVMLVVLTDGFNRFNSGSELCSYAGLTPVIRQSGSSVKGRPHISKIGNQKLRNLLFMCSFNACKYNKACRDLYERIVAKGKSKKLALIAVCNKLLKQAFAIAKSGLIYDDTYRSTLVKN

SEQ ID NO: 79550 - protein, 346 aa, unidentified
MERYVGLDVSLKQTSICVVNQTGSIVQEGVVDSDPEAIAAFVRSKAPGTVRIGLETGPTTTWLWTELKRLGLPVICIDARHAKAVLKMQINKSDRNDAAGIARIMQTGWFKEVRVKDLDSHSVKALLASRALLVKIKRDLENQVRGLLKNLGLVIGRAKFNVFAVRTEALIEDHPELVAAVRPLLEARKAMEQQIDDLDCKVLKLARRDVEVRRFMTVPGVGPITALCFKATIDDPTRFRRSRSVGAYIGLTSRRHASGEIDWSGRISKCGDAMLRMYLFEAAGVLLTRVPKWSGLKAWGAKLTKRNGLRKAKVAVARKLAVILHRMWIDGTEFNWSTKKAASEQA

SEQ ID NO: 79551 - protein, 342 aa, unidentified
MLIIGCDYHPGMQQIAWYDEQSGQRGEQRLEHGSGEAERFYRELKRRGVAVRVGMEACGHARWFERLLAELEIELWIGNPAKIAAQRVRKQKTDRGDAQHLLQLLREDRFPRLWIPSPENRDLRQLLWHRHRLVQMRTRVKNQLQAMALNEGVQRRSRLWSKPGRAQLDSLALPPWTARRRHDLLQLLDQLTPQIAELSQAIEQEAERRPEVQRLMTHPGVGPITALAFVLVLGSPRRFACGKQVGSYLGLIPCEDSSAGQQRLGHLSKQGNTLLRYLLVEAAQSAARCDPEWRRRFVHLALRRQRNIAIAAMARKLAVSLYWLWRNAEDPPAAPPSGSHVG

SEQ ID NO: 79552 - protein, 351 aa, unidentified
MMIIGVDYHPSFQTIAFFVEETGECGEQELNHSDGQAERFYRYLQQRGIRVRVGMEATGYSRWFERLLAELGFEVWMGDPAEIKAKRVKKQKFDREDARLLLRLMRENNFPQVWVPGPENRDLRQLLWHRHRLVQMRTRIMNQLQALAMNEGYRWKKKLFSAQGRALLEKLSLAPWASRRRQELLELLDRMNPTIEELTAAVEREARKRPEAMRLMTHPGVGPLTALAYVLIIGTPTRFQRGKQIGTYVGMIPCEDSSAGKQRLGHISKQGSSLLRFLLVEAAQAAARIQPDWRRRYLHLAMRRHKSIAKVAMGRRLAVRLYWMWRNGCEYSPSLEFGSYVGQLGTGHGVQ

SEQ ID NO: 79553 - protein, 413 aa, unidentified
MNYEPITAVGIDVSKGKSTVAVRRPGGEVVLMPFLVEHDAAGLSSLVKTLRSVGGNIRIVMEHTGMYWRPIALALKEAGFFVSVVNAMLIHDFSDNSLRKVKTDKADSMKIANYALSFWAELRDYSPEDETRQMLKMQNRLYLRTKKSSVVLRNGLISLLDQTFPGVNTLFDIQPKRSNGHFKWVDFVKRFWHKDCVAGISLAAFSDAYRKWCVRSGYRFSQSDAEKLHTAARNAVATFPKNDSTKLLIVQAVDSLNAVYDALYILRGEMLRLASLLPEFDVVMAMQGAGEVTGPQLMAEIGDVRRFTHKGALVAFAGMDAPPFQSGTFDSKSRRISKRGSPHLRKTLFMVASTILQHSDPDNPIFQFMDKKRAEGKHFYVYTVAGAAKFLRIYYARVKAHLMALDAGTSTAA

SEQ ID NO: 79554 - protein, 375 aa, unidentified
MKEKLRFLGLDVQAETIAVAIAESDGEVRSLGTIPNRLESIRKLIKKLGPTEKLRACYEAGPTGYVLYWQLAELGVKCDVVAPTLVPVKAGDRVKTDRRDAEKLARSHRSGDLTAVWVPDEGSEALRDLVRTREAAKQDQLRARHRLSKFLLRSGQRPPTGIRPWTRPYLIWVAQLRFTQMAQEATRLDYLHEVEHMRERVERLEQAITEAVKLASPALQQVINDLQALRGIADISAVTIAAELGQVSRFDGARQLMGYCGAVPSEDSSGKRTRRGSITKTGNAHLRRIVVEAAWSYHRPPCVWYGLRKRQESISEEVKEIAWKAQHRLHKRYMRLAAAGKDKRKITTAVARELLGFIWAIGTRAEATVRQRIAA

SEQ ID NO: 79555 - protein, 333 aa, unidentified
MVEGTEGSHHKEGSKKMSKDSMVCAGIDTGKHKLDIAVEGSAERLQIDNSAESHPALSAWLRRCGVERIGIEASGGYEQAVVSTLRAAGFHVIVFQPVQVRAYAKFVLQHAKNDGIDAALIARCTAAATDIHEPTDVRLAPLAQHLTMIEQLTADVAQLKTRREACRNQRIQAFWKQEIDRLKRLLQTELKQLVLAIREHRDLADRLDLIASVDGVGLRTAVAILVRMPEIGRVSREQAAALAGLAPYDDDSGLRRGPRHIKGGRQRLRQSLYAATLPAVFYWNAQLKAVYKRLIAAGKTHKLALVACARKLLIFVNTVVARGTPWTSPPATT

SEQ ID NO: 79556 - protein, 353 aa, unidentified
MKTKATVLKQSIGNDFSKNEFVVCFWQHLSDNHKRIKSSRTFKNTLKGFQLFIDWVEKHRNPNLEVSIILEPTGVYHENFMYYLEEHTDYKQSLVVGNQTKAFAQSLGIQTKTDKVDAKVLGRLGLEREDLRIWRPFSPNLRVIKQLCRERVYLIEDKTALSNRKHALQNSFDPNGEELDRLLERIETIDQQVKEIESRIQQGVKTDKTLQEPIKKICAIKGLRLITVATIVAEMNGFVLFTNRSQVVSYCGYDIVQRQSGISINGKTRISKRGNRYIRRALYFPAIVAGRHEPTFKALYDRVLDRSGIKMKAAVAVQRKLLVLIYALFTKNEDFDPTYQHQTQKNLVPVATN

SEQ ID NO: 79557 - protein, 360 aa, unidentified
MDVHKDSIAVAYVAQDHGAEVTYLGARGTRQCDIDQLVRKMQSKAKHLLFVYEAGPCGYWLYRYLPRKGSDCWVVAPSLIPHKPGDRVNTDRRDARQLARLARSGDLTVVYVPKVEEEAIRALSRAREDAISDLKDAKFRLKAFLLRQDIRYVGRAHGGPAHLRWLSEVVCPTPAQQIVFQEYVRAVQEHTERLQRLEQELQEQVNAWRLHPVVEALQALRGVQFTVAVTMVAEIGDLTRFDTPRELMQFLGLIPSAYSSGEQRRQGSITKAGNTHARKAVVEGAWAYRYPAKVSRHLQLRLEKQPKMIQDLSWKAQVRLCTRYRRLVSRGKHANVVTVAMARELVGCMWAIATQVPLTA

SEQ ID NO: 79558 - protein, 355 aa, unidentified
MDSKKYIGMDVHKESISIAVMNGVGKIVMECVIETKASVILQFFDGLRGDLQVTFEEGTSAAWLYDLLKPRVTKVVVCDPRKNASMKEGNKSDKIDARRLAELLRLNHLNPVYHGEHGLRSLKELVRSYLTITKDLGRVMSRVKAIYRSWAIPCTGKQVYAPRHRAEWLGKIGEPGVRRRAEFYYQQLDALRTVRQQVRRELLAEGKKHQSWKRLCQIPSIGPIRAAVLLGILQTPHRFRTKRQLWTYSGFGIETHSSADHRNVGGQLQRAKKPISIRGLNRNCNHELKNLFKGAAIVASSKPGPFQEFYTALLTKGIRPEMARLTLARKIATIVLIVWKRGVCFDAQHLKPQTA

SEQ ID NO: 79559 - protein, 363 aa, unidentified
MKKVSKQQLSMETTKDKPGMTMGLDLGDRYSHYCLLNRECEVVEEGRIQSTESAFRRHFEGEPRLRIALECGTHSPWISRLLKELGHQVIVANARKIPAITGSESKNDRNDAELLARFAAHDPKLLSPVQHRSLQRQQDLNLIQVRRTLVRARTMMANALRGLVKSAGGRLPACSTESLPIRAKMAIPPALTAVALPLLQQIALLSRQIDAMDGQIEKLAKKYPEIAVLRSAPGVGPVVAAAYVLTLDRPDAASNRSAGAFLGLRPGQSQSGESDPQRRISKTGDSYLRSLLVQSAQYILGRFGPDSALRRWGLKLASSGGKRGKKRAIVAVARKLAVLLHSMWCSGEHFQPFPQTATAATLA

SEQ ID NO: 79560 - protein, 309 aa, unidentified
MEIVVGIDVSKERLDVAVLPQGEVFAVGNDHAGIEELVARLKAIGADAIGLEATGGYEMLAVAGLSAAGLTVLVVNPAQVRAYAHAIGRRAKTDPIDAAVIAAFILATKPEIRPLRDAETQALSELVARRRQIVQMIVAEENRLRMALAKQAQKSIKRLLVALRRELESLDADLDSHIRKSPVWRVREALLTSVPGVGPTTARTLLAELPELGSLDRRQIASLAGLAPWTRQSGKWKGKSFIGGGRGKVRAVLFMAALVAARYNPALKAFRDRLVAAGKPRIVATVATMRKLLTILNAIIRDGRPWQNA

SEQ ID NO: 79561 - protein, 348 aa, unidentified
MSNPHRKQAPVQQAISGHDEASLFVGIDVSAATLAVALQQEGIAQRSFANSAIGHKALIQWLLQHEGKLRVSLEATGIYSLEVALALDREERIEVAVLNPKTVHRFAETMRRSKTDKADAIALAEYSRRMPFVAWRRTTTSALELRSLARHISTLIQEQTRLKNRMHAAGGSATTSRCVLQDLRRSMKSLTLRIARLRKQAVALVEQNAELKPKFQQLIGIPGIAETSAVQLLAELAGLAPEMTVRQWVAHSGLDPAHRESGSSVHLPSRISRHGNRFLRRALYMPALVAVRFDPHLKAFYQALQTRHKSKLQALMAVARKLLHAIFGIFKTNTPYNGEKLFPNLALA

SEQ ID NO: 79562 - protein, 439 aa, unidentified
MRGHDRGRFTDTPCTTHGEAVHVTEPASYTVYVGIDWATTSHEVCVLSPERAVVATRRVAHTAAGLDELVALLATFGSATAVAIGIEMPRGALIEALLAHGYPVYAINPKQSDRFRDRHTVAGAKDDRLDAFVIADALRTDRPCFRRVQPDEATVLQIREYSRIDAELRDEQSRLTNRLREQLYRYFPQALTLCPAVDEPWVWALLAMASTPAAAARLRRPRLAACLKAHRIRRLTADEVHAALATRAMVESAGTIAAASAHVALLLPRLALVHAQQRTCAAALTHLLETLSAAHDTDPSAPTPSDVQILRSLPGVGLKTVAALFAEAADAIATRDLAALRAHAGIAPVTKRSGTRCVVVMRHACSGRLRTALYHASRVSAQCDAGAKQMYAALRARGHSHGRACRSVADRMLRILMAMLRTGTTYVTPTPAAPVMQPA

SEQ ID NO: 79563 - protein, 370 aa, unidentified
MQNNIFVGLDVHKATLSVAAAEGMRGGEVRAMGNIAHNPTQIAKLAEKLGAGGRRLCFCYEAGPCGYDLYRQLTALGHDCIVVAPSLIPMKAGDRVKTDRRDAVMLAKLHRAGELTAVWVPDRGHEAMRDLVRARATAVQVLGKARQHLQGFLLRHGRVFTGRKGWTFAYRRWLSAVRFDHPAQQIVLQDYIHAVTDAEARVLRLTKQIAELVPQWSMSPVVEAMQAMRGVALIVAVTLVAEVGDFSRFDNPRQLMAYLGLVPSEHSSGATVRRGGITKAGNALARRALIEGAWTYRLPARVSLTLLRRIDHLPQNIRDIAWKAQVRLCARYRRLAAAGKPKTVVNTAIAREMLGFLWDIARQVKVSSAI

SEQ ID NO: 79564 - protein, 344 aa, unidentified
MVTFGVDAHKRTHTIVAVNDRGTPLGQTTVGTTSQDHLVLLRWAARFGAERRWAVEDCRHLSRRLERDLLAAGESIMRVPPKLMAHVRDSARSYGKSDPIDALAVARAAQREPNLPLARLDGPDREVRLLVDHRESLISERTRLICRLRWHLHELDPAWEPKARSLDAQRTLDEVRGRLQDHVGVVARLAVELTERCAELTITIKALEKEITELTTQLAPALLELPGCGALTAAKIIGETAGVDRFKSRDAYARFNGTAPLPVWSSNKARHRLSRTGNRQLNAALHRIALTQARWHAPAKEMIERRKSGGNSGREALRVLKRRLSDAVFQALLHDQTAGLTLAA

SEQ ID NO: 79565 - protein, 347 aa, unidentified
MDKELYIGVDVSKQTLDLAYYDGESIDWKKAHIKVSNNNAGFKKIGSWVAKVSKGFDIVLFCMEYTGLYTQNFRLWLEEKHYIYRMVEPRKMHRFEPDLDDGLRSLDRIKTDELDSFRIAIYCEQNHRKILRNPSKLPPPVYFKLKRLLAERKQTVKQSVLYKQQLHDICAYDTDLSVERKNGQLKTLNDALKGIDNEIDMYIKEDADISKNFSLLTSIPGIGRVVALETIVLTENFMAIDNPRKYACYIGVAPFKKESGTSVRKGSSVSKKGFKQAKADLSIACLVCMQHIPNIRDYWERKRKEKCSGIVFNAIKFKMILRMFAVIKRGTPYVETDNYRNGKNKQP

SEQ ID NO: 79566 - protein, 385 aa, unidentified
MQRNDMSRSLVAFDQNSTVVAVVELSLNTWLVAGVVPGLKRQPLKKLSADADKLVALLERWRAEAIKAGQVINRMVVAFEAGRDGFWLARLLRGRGIEAYVIHASSIAVSREHRRAKSDRIDTQRLMRGLLGWLRGEAEHCRMAAIPTLAQEDAKRPNREHESLVADRTRLVNRMKAALIRLGIRNFNIKLRKAAEGLAALRTPEGEPLPPNTLAELGRELERLALIRAQIRAIEQARLQRLKAAPHQATHPMILMLAKVMGVGVETADMLVHEVLSRPLRDHRAVARYAGLTGSPDESGSKRREQGLAKAGNGRVRRGMLQLAWRWLLHQKDSALTQWYRARTADGRGDTRKTMIVALARKLLIALWRYVTAGEVPAGVRLKAA

SEQ ID NO: 79567 - protein, 396 aa, unidentified
MNDAKSRVVIGMDPHKRSVTIEVMTADETILGGGRFGTDEAGFATMRRYVSQFPERVWAIEGCSGIGHHVAMRLLAAGEEVIDVPPKLSARARVFSTGQGRKTDATDAHSVALVGTRMAGLRKVVNDEQLAVLRVLVDRRRSLGEDHTRMISQLHALLLELIPGGAKKDLSAAQAKALLAKVRPRDFAGKTRRRVAAELIGDLERIYARKKAANKELTELLAATGTTLTELPGIGPSGAARLLVEVGDITRFPDRDHFASWNGTAPIDASSGDQVRHRLSRAGNRQINRVLHIMATVQLRNATEGRAYYDRRKADGKTSMEAMRALKRRLSNIVYKTMIDDAITHATAGSRTGPGGQRGNDSESSAAGSQPPTNSSDKPLPGPAITNPRTPLPAAS

SEQ ID NO: 79568 - protein, 410 aa, unidentified
MRYYLGVDWADQTHAVWVVDESGTKITAHAVAHTAEGLGAWGRELDEWRGQGIDLWAAIERPDGRVVDVLLDHGVVVYPVNPKALDRARDRFRQSGAKSDPFDARVLADFLRTDHAHLRALQPSSDAAQELKLLTEDCQRHIRQQTRLVNQLTATLKAYYPRALEVAELTSALAREFLPAYPTPEALTALTERQWQRWARAHRLTEARTGDLWAVLRQPQLPVPAHVVRAKARLMLALVEQLMPVMAAVTQYRKAIDDFFASLPAAQWARTLPIGKHGITAPTLWARLGDAPGRWESFRHLQAHAGTVPVTKRSGKQQRVVQFRFACDKALRYVVDQVAFLSLLSSAWARAYYDQQRVRGHSHRQALRALGAKWLKIIFVMWDRHVPYDEQYHLATITRQQLQQRQKHIA

SEQ ID NO: 79569 - protein, 356 aa, unidentified
MSRDIKYIGMDVHKEAIVIAVLNSSGKLVMESIVETKASSILQFIHGLRGELHVTWEEGTWAAWLYDLLKPQVQEVLVCNPRRNALLKEGNKSDKIDAQKLANLLRTGMVRPVYHGEHGLRTLRELARSYQTISQDLTRVMNRIKALYRGWGIACGGTQVYAARYREEWLGKIEHIGVRRRAELLYEQLDGLQALRRTLRPELLAESRKHKGSKLLRQIPCIGPIRAARLLALMQTPHRFRSKRQLWTYSGLGIETRDSAQYCFVRGQLQRAKKPQQIRGLNRNHNHEMKEIFKGAATRASCGVGPLRDFYVALLDKGMKPEMARLTLARKIAAIALTLWKKEERFDAEQLNMQAA

SEQ ID NO: 79570 - protein, 420 aa, unidentified
MKAYNVDNFAVLIGIDWADKKHDICEHPTGTNKYHYTVIKHTPEALHEWAMDIKQRYPKQKIAIVCELKKGPLIYALAKYDHLTLFTVNPCAVAKYRQAFKPSGAKDDPSDAFLQVEILTLHMDKLSVIEPESAAMRSLSQLVEYRRSLVQDSVDLSNKITATLKNYYPQALEWFKEKDTYIFCDFIQKWPSLTAVKKARKQTLLDFFESHNSHYCAVNNARLDSIKNAMPLTLDEGVIVPNQMLVGVLITQFKVLLKGIEKLDKAIKSAYKTHQDKKIFDSLPGAGPQLAPRLLVAFGSNRARYNDAAELQKYAGIAPVIERSGQKMWTHWRYSCPTFLRQTFVEWAGFSIRYSFWAKAYYEQQKAKGKPHNSIIRSLAFKWIRIVFRCWKTNTPYDESTYLAALKRRGSPLLKFAINS

SEQ ID NO: 79571 - protein, 342 aa, unidentified
MYYIGLDVHKKTISYCVKDASGRVHREGKLGATRCELDDWMRTLPQPWTVAMEATIFTGWIYDHLHPHAAQVKVAHPLMLRAIAAAKKKNDRVDASKIADCLRCDFLPECHMASTEIRDRRRTLRYRYLLVRQMVQTKNRISGLLMETGVTYNKQRLHKVGYFRELLASNEEVNESIRPLLRLSRDTIVRLQKTERALVSSLQRDPLLSERIKQLRTVPGVGPITALTWALEMGEISRFRSIRQAISYCGLCGDERSSAEKSIRTPISKQRNKNIQFVLIEAAKLAPRQDQDLALLYEKEKQKGNANRATLAVARKMVAYLLAVDRGQRDFVPADDCRCDAA

SEQ ID NO: 79572 - protein, 343 aa, unidentified
MAQQISVLGIDIAKLVFHVVGMDDTGHVVLRKRLARSELRHFIATLPPLRIGMEACGSAHYWARCFREHGHEVRLIAPQFVKAYVKSPKNDTRDAEAICEAVTRPTMRFVPIKQPEQQDLQALHRVRERLIKARTALVNEMRGLLHEYGIVLPQGITKFRTSVVSILQEEQGKLTALSTEVFWQLHDEFLALETRLAYDDEKLAAIGRAHPECQRLQTIPGIGPVTATALIAAISQATQFKNGRQLAAWLGLVPREHSTGGKPRLLGISKRGNVYLRKLLIHGARATLRWVETKHDDRSRWLKALIERRGKNRAAVALANKNARIAWALLAHNQEYRVSTAAA

SEQ ID NO: 79573 - protein, 358 aa, unidentified
MWGLLEAPTILEELAMQSVTTIGLDIAKLVFQVHGVDAAGQVVVRRQLRRRHVLAFFQKLPLCLVGIEACASSHHWSRELQALGHTVRLMPAAYVKPYVKRQKNDATDAEAICEAVMRPTMRFVPTKTTEQQACLMLHRARHLFIRQQTAVINSIRAYLAEFGIIAPVGRRGVERLLEVVADKADQRLPEIARACVAALGEQLRRLKAQILKFDRCIIAWHRSNAMSRQLDDIPGVGPALATALVGSVADPKAFRSGRDFSAWVGLVPRQNSSGGKDKLGSISKQGDRYLRSLFTAGALAVIRYAKIHGTRHRPWLTALLARRPTKVAAIALANKLARMAWAMMARNERYKEPAALAA

SEQ ID NO: 79574 - protein, 319 aa, unidentified
MAQNDLVVAGIDVAKDKVDVCIRSLSLKRMFAGTAEGRRELASWLRRNKVGKAVMEASGGYEREWAKALRDAKIEVRIVDPKRVRSFAQSAGRLAKNDTIDAEMIAWFAETFDEARGQAYDATREQLHQMVHARQALKDMQSKLASQGEHAVPAAVQRVHARISKAIAAELVTIEAAISALIQATPHFTELAEIIESVPGIGRTTSAALIAAMPELGQANNKIVAALLGVAPYDDDSGRRRGERHIKGGRRRTRNVFYMACLGAATQHNPVLKAFYDRLVAKGKLKKVALTACMRKLISILNIMIERRQKWDAKRYAVS

SEQ ID NO: 79575 - protein, 346 aa, unidentified
MGKSITDFSSVTTVGLDLAKHVFQVHGVDASGRVVVAKAIRRNKLLEFFASLPPCLVGLEASGSAHHWARELIKLGHDARMMPPAYVKPYIRRQKNDASDAAAICEAVTRPSMRFVGVRSLENQATLMRHKTREMLVSQRTQLLNALRGHLTEVGVIAAQGPRHGRELAELIEACDETIPFEVCEALAPLVVQLRNLDEAIARLDRTIAKMAQKDETARRLMSIPGFGPITASAMAATIQDASGFAGPREFAAFLGLTPKQNSSGGKQKLGRISKMGNRNLRKLLVVGAHAVLFHRKPHTDPLRMWAKRLLEKKPFKLVAVALANKMARIAFAIMRSKTVYREIPA

SEQ ID NO: 79576 - protein, 421 aa, unidentified
MESIPLIPLAAMIGLDWGDAHHDIALHVPGTATIEAYRLDHEPTALATWLATLAQRFAGGTIGIAIETSRGAIVHALLEAPFVVLYPVNPRSLRRFREAFSPNGAKDDAPDARLLLTLLTQHRAQLKAWTPEDAATRRLSRLVQQRRVLVELRTQLTLQLQAVLKEYYPLALTVTGTDLYAPLACDFLDRWPTLAGLQRARANTVRTFYRAHNCRSEALITDRLAAITTALPLTTDAAIIDPSALYAQTLAHQLRTLHTSLVHLQHAIAEAFAAHPEAALFQSVPGAGAAFAPRLVVAFGTDRTRFPSAADVQQSAGIAPITVRSGKSCTVHWRWATSKFLRQTFHEFAQYSLPHVAWARAYYHTQRQRGKPHHTAIRALAFKWIRILWRCWQDRTPYDDARYVRALEQRRSPLITQLAPT

SEQ ID NO: 79577 - protein, 341 aa, unidentified
MSPSVCHVVGVDIGKETIAVRLVATNPNVEPVGAAQTCSNDAAGYRQMLRWLGEQNDPEVETATTAVVMEATGVYWEACALFVHEQEFLVRVVNPAQTHAFAKTTLQRGKTDTQDADMIARFGATVPTRRWTPPYALSKELKQIMRQREDYVAMRVQEKNRLHALQHQARPSAQLMRMARNHIHFLQQQIDLLERTFKEQASESPSWQQSLSALRTLPGFGFIVAGTLLTETDGLEAFLTAKQLIAYAGLAPAPYESGSSVKRRTHISKVGNQRLRRIAYLAAVSSIRTDSVFREFYTRLRKRGKPPKVALVAVARKLLTVAFAVVRSQTPFDPTYVPKRA

SEQ ID NO: 79578 - protein, 425 aa, unidentified
MKIQTIHSKTIPDNKLTVAFDVGKDKLNAYCEYGQHCFQDSFANNTLRIEQKLVTFSGIAESMGYDGLRIIAEPTGIYHLKLFRTARRLGHQTALVNPESVQKFKVVESNDAGKTDNKDPRVINLLAKYGKTLIDRNIHDEYLLLRQLNTMYIDEEKAYTGTRCKIHRVLTELFCDYSFQKDFLYTNTGRIFMNKYRANPYRIVQYGYSTFYRRMKRSAPRIRQSTLMRLWQDAQSSVRHQMPTDYMQILESRLIYLWEELLLRETRMTEIEDAMISITNELRLKDPDIPAPVKGVIKAFRIAQLLAETGPLDDFKTIEQLMRYAGLNIRERQSGYYRGNNQISKKGRSNLRRVLGYIVLPLVKKKSLYGSVYHAKKDYGMVGNKAMVAMMRKFLRMFYGWYKSGLPFNENRVFTGNVKYVQIIK

SEQ ID NO: 79579 - protein, 383 aa, unidentified
MKAVCGLDVHKDSIFLCILHSDGELFEQVFGVLTFQLEEMRKLLQKHHVFEVCMESTSIYWIPIWRVLSPHFTLRLVNPYFIKQLPGHKSDVKDAQWIAECTMKELVRGSFVPPEIIQQLRQYDRRIFDLNAEIVRKVSKVDGVLQRCNIRLSNYVSNIECKSYRDVVRRLSEGVTNPNELMKLVHGRIVNRHGVETILASLTGVVSQAEIDVLRQLHEEIDIAESHRNECQQRMLEICEKHFPEELERLQKIPGIKERAATSLIAEIGTDMSKFETANHLASWSGLRPRNDESNKKIKSRKITHGNVYLRNTIIQCAWAASRQKDSFFSRFSYHQTIVRRKNKMKVIVAVARKLLIAVWHVLHDKTDYVDFKPDREESANNG

SEQ ID NO: 79580 - protein, 349 aa, unidentified
MLYMGIDLHKRYLFATVIDEAGREVEKARVENKRCSILAYIEQIKKIDEEISAVVEATSNSSKLYDELEEELRSISLANPLKTKAIASARIKSDKIDSRILALLLRSDLIPKAHMPAKTTREIRELTRYHVSLTRVMTSLKNRVHAILVKYEINSPILSSASDIFGKIGTKELRSLSLSPNHSRSLNGYLDLIEFIKNLLAILKKEIAGIANEDETCTLLKSIPGIGDFLAVLIKHEIDDINRFSSAAKLASYAGLIPSTYQSGDKTRHGRITKQGNSNLRWALIEATQVAIVNSPYFRAHYEQIKRRAGVKSAIVATSRRLLEIVYLVWTQKREYVEINRSRSLAVAL

SEQ ID NO: 79581 - protein, 432 aa, unidentified
MDNNPAGVAYLIEQISATARHRKIPKNQIFLGGEDEPAYVANFTAALREAGFLVMRVNAHEAKENRETHAASTDQLDLIGIAKTLLSRRARSSGDSSPENPAYHHLRELARCRRSLVRQQTATANRIHALVDQLFPGFLDDSKTGITAFCEASIELMKDRFSAPEFAKRKPTALAKTLRRSLVHHPDEAAAKIINLARSVLPPAPNRVATLQRTLKATVDLHQCLSRNAGELRTDAALTLATTPYAMLTSIRGIGFVLAAGVAGELGDPAALGTTDSLCCYAGIVPKTLQSGGPDSPPVQGRVSPRCNRILKDWVVQSAQKIHLYGVPEHKDRITRWNAEGRSGLYAGARHYLRLLRSLVKNQVPYLAPAGRARSAAPEDIAAASQDTWKVMQNKWRTIPGGLDLMLDEAHPLGFWRRVIKETHDIQLPTRL

SEQ ID NO: 79582 - protein, 521 aa, unidentified
MVEREGLRLGLRARRRVSSFPSGLSRGLTWCSTPDNHKDDDAWHSDILNKGGNAMKSFYLGIDVSKGYADFVIINQQKQPVVKSFQLDDTFDGHSRLHEIVSRFLTDHPQAVMCAAVESTGGYENNWYNTLIRLHASLNIKTARLNPLGVMHNSKADLKKNTTDKISAQNIAEYLIAHSEKVVYQHQDQLASLRKQWGFVQMLTKQCTQLLNQLHSLLYTANPEILNYCRDGMPAWVLKLLLKYPTAAKLKKARDKTVAKIPYVSLTRAKQLIAGAKHSVASATDPVTAQLVTATAQQILQLKKTMAAQTDLMAAQCDVPELQLLKTFTGIGDISAIGLILEIQSVARFKTVKKLASFWGLHPVYKISGDGSGAFKMSKQGRVNPRKILYTVTLSAIEHNPVIKPIYQYHLQQGKHKMDAIGICMHKILRIIYGMLKNNTAFDPKIDAANRQRSLPDMTAYPKKTKNRRFQSYDSKAPISRRQRKKRLEREQSHSVITDTKSGISAPVPIGDIISDMLSNI

SEQ ID NO: 79583 - protein, 381 aa, unidentified
MKTEVRTFATMTGTLLDLSAWLATEQITHIAMEATGVYWKPIWHILSDGEFELILANAAHVKNVPGRKTDVKDAEWLADLMAHGLIRASFVPDEPTQQMRDLLRTRKQLVRERSSHTQRIQKTLEDANIKLDCVVTDILGLSGRRILEALVKGETVPQALATLAHRRIHASTEELEAALRGRVTTHHRFLVKLHLDQIDAIDAAIQSIDKEVDGNIEPFRAAVELLTEIPGISQLAARVVLSEIGLDMSRFETGGHLVSWAGLCPRNDESAGKRRSTRMKKGAPWLKTTLIQCAWAASRTKGSYFQTQYHRLRARRGSKKAICAVAASLLTTVYHMLKNGSCYQDLGANHFDQQDKVRQIKRLVGRLENLGFEVKILPKAA

SEQ ID NO: 79584 - protein, 341 aa, unidentified
MKITTVGIDLAKNVFQVHGVNEHGKGVLKKQLKRQQVMEFFANLPACLIGMEACGGAHHWARKLQALGHTVKLMAPQFVKPYVKTNKNDAADAEAICEAVARPNMRFVMIKNAEQQAVLALHRVRQGFVKARTAQSNQIRGLLAEFGLIVPQGIAHVTGRVPELLEDASNDLPGSFRLLVQRLLDQLKEVDRQVSEIEAQVVAWHRGDDLSSKLAKVPGIGPITASALVATVGEAKNFGNGRQLAAWLGLVPKQNSSGGKKVLMGISKRGDTYLRTLLIHGARAVINAAQRRKVPIDGWLGAMVQRRHKNVAAVALANKNARIVWALLRHGREFKADYAAA

SEQ ID NO: 79585 - protein, 424 aa, unidentified
MIPVPSLRALRHKLLYLEEILKIKHMDRNRTVPGLDVHKDTIYLCIMGHDEAIIFEKTYGVLTTELRQMCNDMVEHGVTEAAMESTAVYWVPVWNELCESMDLKLVNPYFIKQLPGRKSDVKDAQWIAECLLKNLIKGSFVPKPIVQDMRKLNRRIMDLNEDINYNSNKLDAALQRCGFRLSNYVSGTNSKSYQKVLQAIINGERDPEVLVKMVHGRTTNKHGKGTIKAAVMGSFSQTDITVFRQLKEMLDTINRQIDECQKELTDLCEKHFTEEYKRIQTIPGVKERAATAIIAETGVDMKMFATAAMLVGWCGLKPRNDVSNGRYKSRNVTHGNKYLRRILIEVAWAASRKKNCFFSNFSYVQVTQKHKSKMKIQVAIARKILVAVWHMLSKGEDFIDIYHRRLEQQRQMEEQLKSLASKMA

SEQ ID NO: 79586 - protein, 407 aa, unidentified
MNENEKRYIGLDVHKHYLVALGVDANLNIVLPMRRVELSNLESWMKKNLTKQDEVVLEMTTNTWQLYDELSEYAGSVTVVHPPHVALITRSQVMNDKIAASILARFLAKGLLVGIWVPPQEVQELRGLVAQRQKMTRLATQAKNRLHAVIQRHHLKPPAGNPFAKAKNEWWQALALGKLEKMNLQSDLETLQFAEQQEVRLQEEMTGIAAENEEIGRLLHIAGFGVITAVTVYAAIGDIKRFAEAKKLVGYAGLGTRVHDSGMTTRTGKITKAGRRDLRVALVEAAHVAANSHPHWKAELARLEPRLGRNKAIVAIARELLVTVWHVLARKVADRFAEPEKVSKKMLHFAYEVGKENRAGKSAAQFARERMDTLGLGSELTSIPWGSKKPIPLPPSKLKKESAVPNK

SEQ ID NO: 79587 - protein, 340 aa, unidentified
MSEIKGRNQKLLDKVVESKKMENIAQWVGIDVSKATLDVYIRPMGKAFSVANTEVEISHLVEELKSANLNLIVLEATGGLETELVIQLQAAFLPVALINPRQGRDFAKATGKLAKTDAIDAKILAHFGEAMKPQRLPIESETARQLSELISRRRQLVEMQTAEKNRRSRARGKALADIEAHIEYLEQRLKQLNQEIEELTQNNQQWIDKINLLKTTPGIGQVISTTLVSDLPELGKLTAKQISRLVGVAPINHDSGQHKGKRMINGGRAHVRATLYMGAVVAMRHNPVIKAFYERLVERGKSKKLALTACVHKMLVILNAMVRDNLPWCISDNFQPIVNA

SEQ ID NO: 79588 - protein, 418 aa, unidentified
MNEEGNTRGSRRYVALDIHKHYCVMAAVDREGRVVLNPVRVEHVDLEGWLKKNLCSTDHVVIESTTNAWHVYDLLEPLVERVVVANPIKVKQIAQARVKTDIRDTLILARLLAANLVPDVWVPPAHVREMRQLLSQRRQLVETHTQIVNRMHSVAHRHHLKHERGKRFNEKNTLWQKDKQLSKTEQFQLELEMENRAYTEKQIGRIGKAVAKMSHQKPWAESMTYLMQLPGFGVITAMTVLAAIGDVQRFGSAKHLASYSGLTGGVDQSGTHLVQKGITKEGRKELRWAMVEVAQRAVKSDPRWTRKFQELHQRMHRNQAIVAVARQLLELVWYVLTRRQPYRHFSQERIAYKYLTWSWQMDDEARDGLTRQQFARYYMMRLGIGHDLTRIALNPKYPRRLASETELLALRPELNQTE

SEQ ID NO: 79589 - protein, 329 aa, unidentified
MIFVGIDVAKDKHDCFITNTDGEVLFKSFTITNNLDGFDELYQKIESVMEDVSKVKVGLEATGHYSYNLLGYLLDKGLPTYVINPLHTNLYRKSLSLRQTKTDKVDARTIASMLMSDVNLKSYSDTSYHNEELKSLTRYRFDKVKERAQLKQSISRLVCILFPELEKLVPTLHQNSVYELLYEFPGAKYLANAHLTRLSNLVETASKGHYTKDTAITFREVARTSIGSNMPAKSLELKHTIKLIREIDAEIEEIENEIKIIMDEINSPILSIPGISYRMGAMIIAEIGDFSKFDSPDKILAFAGMSHCPMLQRSSFESYINLNHLVSNT

SEQ ID NO: 79590 - protein, 430 aa, unidentified
MKSNTQNAKIEAITEKTLVLGIDVGSEMHYARAFDYRGIEYSKKPFKFSNTEAGFVTFKEWILDLKERHEKDKVVPGMEPTGHYWFNLGKFLQDNEMKPVLVNPHHVKKSKELDDNNPTKNDRKDPKVIAGLVREGRYMIPYLPDGVYADLRTASNIRFQLQAELTRIQNRISRWFNIYFPEYKTVYGKPDAKSGMLILKAAPLPEDILTLGIDGVNQIWRDAKLRAVGKARAKTLIEAAEHSVGSKEGAVSARMEIRMLLEDYESRNTRLQEVMVLIEELIRKIPMAEKLLEIKGVGIRTVSGFLAEVGDISRFNNPKELQKLAGLALVESSSGKHKGETTISRRGRKRLRYLLFEVAMSLVSKNQEFRELHNYYTTRRLNPLKKMQSLMAIAAKLIRVFYAMLTKGVDYDPKKMVSDIKRPAVYLQAA

SEQ ID NO: 79591 - protein, 343 aa, unidentified
MQAVTTIGLDIAKSVFQVHGVDAEGNIIIRRQLKRRYVLAFFQKLPPCLVGIEACASSHHWSRELRALGHRVRLMPPAYVKPYVKRQKNDATDAEAICEAVGRPNMRFVETKTTEQQGCLMLHRTRHLFIRQQTAVINAIRAHLAEFGIVAPVGRNGVDQLLGVVADANDKRLPSVARACVAALGAQLQMLKAQILQFDRLIRAWHRSSEASKRLDEIPGVGPALATALVASVADPKAFRSGRDFSAWIGLVPKQNSSGGKERLGSISKRGDRYLRSLFTAGALAVIRYAKIHGTKHRPWLTALLARRPTKVAAIALANKIARMAWAMMARGERYKEPAALAA

SEQ ID NO: 79592 - protein, 408 aa, unidentified
MNTLYVGIDVSSKSNVVYLMLPNGDKHSNFSVANSHEGSTLLVKKIYSALTSHSLDTVLIGLEATSVYGDNLVYFLREDATLAPFNRKIHVLNPKQVKKFHDTYNDLPKNDYVDSFVIADCLRFGRINKEVYMGEYRYKALQNLTRARFFAVQNLVKEKQRFMNVLFKKYSTMTQEKVFSDAFSTTALAVYDEFESAEALANMDLHELTDFIIEKGKNRFPDPDAVAKAIQKAARSSYRLPKTVNDSVNQVLSISITSMKALESQIKEFDKAIKALMELLPNVLISIPGIGPVYSAGIMAEIGDINRFDNQASLAKYAGLAWKQHQSGGFEAEVTRLIPSGNRFLKYYLCEAAFSLVRCDKKYSDFYHLKYKEVNRCQHKRALALTARKFVRLVFRLLKDNRLYCPAK

SEQ ID NO: 79593 - protein, 352 aa, unidentified
MLIIGCDFHPGFQQVAIFDNQTGEYQEKRLSHRQEAEQFYRSLAGQKVRVGMEACGHYPWFERLLADLGLELWLGDAAKIRASVVRKQKTDRRDAEHLQVLLREERFPRIWVPTLEERDARQLLVHRHKQVQARTRTKNQLHALALSQGVQKKRKLWTEAGRAELEKLELLPYAAIRRERLLETLDRLEAEIAALNRQVEAEVQQRPAALRLMTHPGVGPVTALAMVLTLGPAERFASGRKVGSYFGLIPSEHSSGGRQQLGHISKQGSSFLRFLLVEAGQSAARYDAELGRFYRRLAVRKHRGLAKVAVARKLATRLYLMLRENWNYAQLCKAVVQVSPSHSVDGRQKPSA

SEQ ID NO: 79594 - protein, 487 aa, unidentified
MAKRKKSTFERLSSGGLNRKQRRDLGRRLAGNDPGLTIVHSNAGGIDVGNASHFVAVPPDRDANPVQEFGCWTADLKRMAAWLTACRIDTVAIQATGVYSIPLYDILTGHGIRVVLVNAHHTKNVPGRKSDVQECQWLMKLHTYGLLRDSFRLEEKMESVRTIWRLRDRHVKDASRAVQHMQKALTKMNIQLANVISDITGVSGQAIIGAILKGERDPWKLADLKHEMVRASQEEVARSLEGNWRDDLLFELRQAVDGYHFAHQQMRECDRQLESFLASLPARTLDIPCQPVGAPAATAQKAKKARKTKKPKRNEPALDLKAELKRICGVDLTSIDGIEVITAQTIISEIGTDMSGFRTENHFASWLGLTPSKDISGGKIIGPGQKKVQNRVAMALRMAATTLLNSKSYLGGRYRHLRKQLPSHAAAVKAMARYLAVLVYRMLTHGEAWVDRGAAKFEQRRTALELASLNSKARAKGFKLIPIAEGI

SEQ ID NO: 79595 - protein, 347 aa, unidentified
MNFYNNTHPYYCGIDLHARSLYVCIIDQAGETCVHKEISANPDKLARLLEPYHSQVVVGVECMHCWYWVADFCDDIGVDFILGHALYMKAIHGGKAKNDRIDSFKIANLIRGGNFPVAYVYPKAMRATRDLLRRRMKIVRHGADLKAHVANTTSQYNLPPNKVNLKNVSAREHIRSAFPDPVVQRNMDLNMSILECYAKELSKLEWFIEQQAKQHNPVHFHILKSIHGIGRILALTIIYEIGDINRFKSVQDFASYSRLVKCKAESAGKSYGAQGNKIGNAHLKWAFGEAAVIYLRGNDKAQAYLLKLQKRMSKAKALSALAHKLGRCVYFMLKNETVFDERKFLNG

SEQ ID NO: 79596 - protein, 419 aa, unidentified
MEERVNDREQWYAGVDWASESHYVWLADRDGRRLGERSFKHAGDGLAEMVGWLLKTSGAADCSQIDVAIEVPHGPVVETLIERSFNVWVLNPKQMDRFRDRYSVAGAKDDSRDAKVMASALRTDPHCFRRLAVSDPIIIELREWSRIAEDLAAERTSLVNRLRQQLWRYFPAFLELEGDLSAAWAIELWQAVPTPQAAKRARKASIETILKRHRIRRLSPEQVLDILRQRPLTVAAGTTQAARAHCATLIARLKLIGRQIADAHQQLDTLTAKVGATEQADPGQNKQRDAVILASLPGIGRINLATLLAEASEALQRRDYHALRTLTGVAPVTRRSGKSCTVSRRYAHHSRLANAAYHWARTAAQHDAISRAKYAALRARGHSHGRALRSVADRLLNVACSMLRSGTTFNPSLPNQNAA

SEQ ID NO: 79597 - protein, 345 aa, unidentified
MSIVGGLDIHRKQITFDYLDTVTGQVRRGQVSPADREHLRAWLARFAGCEDVAFAAEGCTGWRYVAEELAAAGVAVHLAEPADTAFARGRKRHAKTDKTDCRHLRVLLAEGRLPECWIPPGHILECRALLETYHDLRAEHTAWVQRIHAVLFHQGAPALGEGALRTEQGLAALRAAAAAHLSPAGQLQVATALEVLEALETRLHVLRHELLDAARHLTGAKVLAARLYGVGPVTALAMTCWLAGAGRFSSSRKAVRFAGLDVTVHSSDRKGPPGRLSRQGPPVLRWAVYEAGKTHARSSAPDHRYYAAVKDRCNGKRAALSEARKILRQACHILAELGDDALAVA

SEQ ID NO: 79598 - protein, 428 aa, unidentified
MDEVDRNRLEEFRQLRQEVRHSEEYLIVGIDIAKDRHHAFLGTATGKTLLRRLVFSNDHEGFRKLLDQAEALRAQHGLKKVVYGMEPTANYHKPLGEYLITLGRTVVLVSGVTVKRNRESLDGRWDKHDTKDAANVADLISQGKCLYYEYPSAELRGLRGLLSLKRRLKKQEHGYKVRIRNHLIAQYFPEMDRDYERLGTVGLSIVRWCFPASQITELDVEPFIQRVTSRRIRVETRRRLEEVWEKAGASIGCEGVPGMEHEAKVMVEGLRQIREVIKETEDKIQQLCEQFPEYPYVLTIPGFGPDVSAKVLGAIGDPNRFQNGKQVLKMGGLDLSADRSGKDSDKAIPEISKRGKADLRYALYQAALIASVKNRDFMIYYTNKLRGREREKGIHVKMRVKLAAKLLVIAWTLMKKKEKFNPAYLNAE

SEQ ID NO: 79599 - protein, 474 aa, unidentified
MSTELNPKKQAKRRRKNKASATQHQINTGTNPHAAGIDIGADELVVAIPPDRCPENVRTFRSFTANLYQLRDWLLEHKITTVAMESTSNYWVNCYDLLAEAGIDCYLVNARHVKGVPGKKTDVCDAQWLQQLHAAGLLKKSFRPDQEILSLRYLTRYRDSLIREAGNHLRRMQKVLTEMNLKLHHVFSDIDGVSAQTIIQAILAGERDPKTLAALRNGRCLSSETDILAALQGQYRPELLFVLGQLQKNWLEQQKHIADLDDQIHNLLQKIAPAEKAPQAPGDQAPKSQKRRQLGKNALNLDYCQESQHYFGIDLTEVDGLGPSVILALLSEIGNRQQLLDSFKSADSFCAWLGLCPCNAISGGKVLRSATRKTKNPLNEALRLAAFGISRARSRLGEYCRRMKGRLGKAQGITATAHKLARILYALIQSGSPYSENTAFPPKPQNESKQRRQLEILAQKLGLQVTPIPATILT

SEQ ID NO: 79600 - protein, 409 aa, unidentified
MEVVHERCCGLDVHKETVVACVVVPSAGKQPHKEIRTFNTMTADLLQLADWLTAQGVTHVALESTGVYWKAPWNILESSFTLLLVNAQHIKQVPGRKTDVRDCEWIADLLRHGLLRASFVPDLPQRELRELTRYRTTLIRERAAERNRIHKTLEGAGIKLGSVASDVLGSSGRLMLEALVEGTTDAATMADLAKGSLRTKLPQLERALTGKVGAHQRFLIAHQLAHLDGLDELIDQLSQEIAERLRPFQNKLERLDGITGVGLRSVEVFLAEIGTDVARFPSAAHLASWVGICPGNNESAGKRKSGKTGKGDVWLRTALTEAAQAASHTKDTYLASQYQHLAARRGKKKAIVAVAHSILRIVWHLLDHDCEYVDLGSRFLEERDRQQIERRLVRRLEGFGYTVKLEPAA

SEQ ID NO: 79601 - protein, 342 aa, unidentified
MFVIGIDPHRGSHTATVLDDKEVVVDELHLVADRQQIDRLLSFAAPYAPRLWAVEGARGTGALLAQQLVAVGETVVDVPPKLSARVRVLDSGHSDKNDRHDARSAAVVALGHHDLRVVEREDHLAVLRLLAKRHHDLTAARTRAVCRLHTTLCYLTEGHFPKRMSAGQAAAILARIRPVDAVGVERKAMARALLAEVKRVDQDLKELGARIAVEVVRSATTLTDVHGVGPIVAAYLIGYTGDARRFATVGHYARSNGTAPIEASSGPNPRHRLNPRGNRQLNHAIHMIAITQVRNETPGRAYYRRKQAEGQSKKEALRASPRSVEASPMRSGDVRDTKEVRP

SEQ ID NO: 79602 - protein, 344 aa, unidentified
MKLTTVGIDLAKQVFQVHGIDEHGKVLVKKQLRRDQMATFFANLPPCLIGMEACGSAHHWARKLQAMGHIVRLMAPQFVKPYVKANKNDAADAEAICEAVGRPNMRFVPIKNVEQQAVLALHRVRQGFVKARTAQANQIRGLLGEFGLIVPQGIGHIASRVPELIEDADNELPGSFRILIQRLLDHLKGLDGQVEELEAQIQAWHRASDLSTRLAQVPGIGPITASALVASIGNAKNFDGGRQLAAWLGLVPRQHSSGGKSNLLGMSKRGDSYLRTLLIHGARSVIYRAGRKADPCSWVNAVVQRRNKNVAAVALANKNARIVWALLAHDRRYDTGYRKAAEVV

SEQ ID NO: 79603 - protein, 410 aa, unidentified
MNIVCERVCGLDVHRDTVVACVRVPGEGRARQQTIATFGTKTADLLALRDWLEQWQVTEVAMESTGEYWKPVYWILEEGFKVLLVNAAHVKNVPGRKTDAKDGSWIAQLLECGLLRGSFVPPRPIREIRDLTRYRKKLIEQRTEEVLRLHGILQRAGIKLSAVASNIMGVSGRAILDALVEGKQDATAISELARGKLRGKIPLLQKALQGQFTPHHGMMVSHMLGHIDYLDETIVSLSEEVEKRLEPFRRERELLKTIPGFQDRTVEMVIGEIGVDMEQFPTCGHLASLMGLSPGNNRSAGKRKPEKIRRGGRWLKPALQEAAWAAVKRNDSYLAARYHRLVPHKGKKKAIIAVCHTMLIAVYYVLKKQVPYQDLGADYFARRNQNAIERRCLRQLNQLGYEVQLSRTAA

SEQ ID NO: 79604 - protein, 336 aa, unidentified
MKVTTISIDLAKNVFQVMGFTSTGKVVFNKRLNRAQLSHFSCRVVMEACYSSHYWGRTFESMGHTVDLIPAQHVTPFVRGNKNDSNDTLAIFEASSRAFIRFVPIKTQAQQEILILHRLRERLLSARTAASNQLRGLLADFGIIFPLGKVAFNEKIQALSVDESLSVTLNWLVKDVYTEYKTLSVRIKAIEKQLKTDIEANPLGQILLSIPGIGYLNASAFVASIGSGQAFASAKDFAVWLGITPKQFASGNKSVMGGISKRGDQYLRKQLIHGARAIISHAGKKQDALSLWITQLRARKTFNCTAVATAHKLARIMWTLLQKQCHYTPQVVRVVA

SEQ ID NO: 79605 - protein, 437 aa, unidentified
MNHLRFQTNRQMLQGKIVIGIDPAKLNHQAAVVDMTGTQQGNSFAFPASAAGYGETLWRHLARIVTVHRPEDVVFAIETSCNLWETLAFYLHSRAYTVALVSPLSTHHARPVMNLEFSHTDPKDAFLVATIAQRGAFHRYESFNPHTNAMHQLAITYDKLRQDLAHNRARIRSLLDRVFPEFLHILKPDTQTAMHLLKNSLFPDEFLHLDLCAESLRIEQISRRQLGRSTLEALQQQARRTIGVARQSHERLADRLTLDAYLALVETLQTQLDRVLDELIARANELPQFARITSLSGVGNRLGALFLAEVRDLSRYSHYKHIEKLAGLNLRLHQSGRYTGNRRLSRIGNPRLRWIIYKMTEETAKRVPEVRIKYLRRQLKRRRHVKNVVAATPQLLQLIVSMERHQHAYELRNDTLEELQQLENQYAQLKAARKSAA

SEQ ID NO: 79606 - protein, 394 aa, unidentified
MKLVGIDVGKNSHHFCVMDKETGEFNVTPTSFSNNKEGFDFLINSLKPYSKKSILIGMEDTGHYHVALLKFLLSNGYTVALINPKTTDLTRKMEGGITKNDKLDTITICDVLDTPERKKQYRITKVDRFDLYEQRQLTRHHHNLKEELNVYCNRLQKSIDLVFPEFNTLFSSKYSIVYMNLLKTFGSAEAIASTDIRTIRKCFEIKGRGNRISLTPEKLKECAKYSIGIFSEVETIQIKHLVSQITLIKEQIAEIDKKIEEFSITNNSPILSIPGISHFSGTSILAELGDIGNYSKPSQIIKFAGVAPYHYESSQYNAQHTGITKKGSKYLRKTLYQIILTVINNNPVFKKYYRLKISQGKGHRCAQGHCIRKLLRIIYHLLETGQSFDPALLR

SEQ ID NO: 79607 - protein, 352 aa, unidentified
MPEIAHSAVAVVGIDIGKYSFHVVGLDRRGAIVLRQKWSRGQVEARFANMPPCLVGMEACVGAHHLSRQLKALGHDARLMPAKYVRPYSKGQKNDFRDAEAIAEAVQRPTMKFVATKTAEQLDLQALHRVRERLVSQRTGIINQIRAFLLERGIAVRQGQRYLRSALPGILATPTDALSPRMVRIVEDLAGDWRRLDERIEGLSEEIEALACNDCGCERLMTVPGIGPIISSAVVAAIGTGDVFSKGRDFAAWLGLVPRQISTGDRTILGKISKRGNRYLRVLFVQAAWVVLIKPKSWERHGLKAWIEAARKRLHRNVLAIALANKLARIAWSVLARGRSFEVRSAAATQPV

SEQ ID NO: 79608 - protein, 337 aa, unidentified
MKLTTIGLDLAKSVFHVVCFNEKHQEVSKKMLRRSHVLEYFAQLEPCLVAMEACAGAQYWGRELKKLGHTVKLIPPQFVKPYVKGNKNDYNDARAIAEAATRPGMRFVGVKTEEQQDIQALHRLRQQRVKERTALCNQMRALVAEYGIVMNKGVAAVRRGIPELLEDAENGLSDRFRALLAQGYEQLGELEKHIDYYTRQVELHSRQNEQMRRLQALPGFGPIVSSVFASAIGDGSAFKRGRDVSASLGLVPRQHSSGGKDVLLGISKRGDKYLRSLLIHGARSVVIYAKNKDDSLSRWINRIRERRGTNKAAVALANKLARMGWALLRNKTEYCPA

SEQ ID NO: 79609 - protein, 331 aa, unidentified
MRYIGFDIHKQFIYAVVKDKEGNVLEEDRFDNNKEQISQFLINSNPTETKIVMESTGVWEWIYEFLEDQKYNVILANPIRTRAIASAKVKTDKIDASILADLLRANLVAQSYVPPKEIRIMRQLTRQRKTLVKGRTEISNKIHALLAQRGINLPWTTFCKKALLWLKELSKEQPLIKSYLHLRDQFTQEIIKVNGEIFDYVEQDEHAQLLMTIPGIGPRRALELLAEIGEWDRFPDSDKLCCYAGLVPSVRQSGSTLKFGGLIKQANTSIKYVLVEASWNIVRTKESNSLQEFYKKLAKKKGKQKAICATARKLCCVVYAMLRKQQPFMFL

SEQ ID NO: 79610 - protein, 318 aa, unidentified
MIAKDAPLARAQVAGIDVAKDWLDVFFAGRVERIANRTADIVRLARRLLKAGVMVVGLEPTGGFERLAAELLYAAGLDVRMVDSWRLRQFAKSRGTRTKTDPIDARMIAEFVLAGLSRAFPRPSARQAALACWAREASRADADLLRLKARVKSCALAEIGRLLQLQIQALKQTIVEAEQAIARIIAADEDFARKARRLGSIPGVGAKTIRVLLAEMPELGAIEPKSAAGLAGLAPYQRQSGKRRARGAVEGGRAAVKRAAYLAACAMRLHNPWARAIHDQLLARGKPFRLATVALARRFILIANAIVRDDRDWAPASH

SEQ ID NO: 79611 - protein, 341 aa, unidentified
MDKFIRVGIDLGKGYFQVHGLRVEDGWAVNRKLSRSKMRPFFASIAPCRVGMEACGSAHYWARELVAMGHEVVLMPPGYIKPYVKRGKNDAVDAAAICEAMSRPDMRFVPIKSAAQQAVLMQHKTRELLVKQRTMSVNALRSHLAEFGLVVAKGIGRIDELSELAENDPSLPPEAREMAKLLTLHIEALTRSIDATERKIAKAAAGSKSTRLLDRIPGVGPLTASAIAASVPDPGVFKSGRDFAAWLGLAPKQNSSGGKAKLGAITKQGNPYIRRLLVVGSTSVLRHAGKRKGALAEWIAALRARKPERLVAVALANKLARTCWAIMITGEFFRHEAFAKA

SEQ ID NO: 79612 - protein, 333 aa, unidentified
MYYSGIDLHSDNCYMTTIDDSGAVIKQQRVENISELILDYFHSIPGSHQAVVESTTGWYWLNDLLSDNGIELTLAHAKYLKAISYAKVKTDKVDSQTLAILLRQGLIPRAHKISRDLRGLRDTMRVRLRLVQQRGNCLRRIYSIQAKFNGSVPDPYRFQLAVLEHMRDTFTSQILALEKSLHPVLIPNDDIQRLLNIPGIGKLSAFTIYLEIDGIERFDSDKKFVSYCRLVPAADNSNRSVHHRSSKDGNKYLKITFSDTAVHAIQYYPEYKRFYQKLARRSSEPTARTVVAKELAKIVYYILKNKSQYKGFKGQPLSRIKSMQWPRVQSPDA

SEQ ID NO: 79613 - protein, 394 aa, unidentified
MKLIGIDIGKNKHFFCIMDQQTGEIISQPVSFSNDKEGFDFLIQKIKSYPKDSILIGMEDTGHYHFALLKYLLDLQYTVALINPKTTDFNRKMQGGITKNDKLDTINICDVLDTPERKKQYRITKVNSFDLYEQKQLTRHHHSLKEEENVYKNRLQKCIDIVFPEFNKLFNSKYGTVYMNILKTFGSAENVANTDIRTIRKCFEIEGRGNRISLTPERLKECAGSSIGISSSAEVIQIKHLTAQIELIEEQLTEIDKKIEEFSIQNNSPILSIPGISHFSGTSILAELGDISNYSKPSQIIKFAGVAPLHYESSQFNAQHTAITKKGSKYLRKTLYQIILPVIRHNQVFYKYYQLKISQGKGHRCAQGHCVRKLLRIIYHLLKTNQQFDPQLLR

SEQ ID NO: 79614 - protein, 429 aa, unidentified
MTKTYILKTQTVPAERSAVETYLAPPPPSKGKIIGLDCHPDTFTAAVFVGQTPHDARKIGSRENLSLEALLKWATAELTPQDIILMEAGSNSFELCKRLGNLGLKACVLESCHVGKHAKTYADNDKMAAARIALVYLAGNAPCVWVPDEQTHERRELLHAYGKAVGDHTAATNSIKAYLNGRGLRLGKHSLEEKTTSQWILEQANWSALQKNILAEHLANITESKERRKRLYRLIAAEIATDPKMMRCMKILGVGIVSAFALLAVIGDIGRFHSPEKLVAYIGLNPGQRQSGKGKDIRLGVGRRGRGDIRHLLIQGAQAIMRSGRNNPLAQWGWKLFARKGNRNVAVAAIARKLLVQVWHLLHGNPLLGLESDTSFRVKLQKLAVALGATLRTGIGLGKTLQESIKTLLSRCQNHPEPSASQYETPQPT

SEQ ID NO: 79615 - protein, 339 aa, unidentified
MAYYAGLDVSLEQTSVCVVDEAGAVVLESRMATEPEAIVAGLAALPAAPARLLLETGGLTPWLWHELSARGLVVHCIDARRAKAQLALRPAKTDRNDARGLAEIARMGWYANVRVKSLDHHALRAKLAARAHLVATGRDLGNQLRGLLRAFGLRVGKGKGQAFEQRVLALVADCPALQPVADGLLAARRAVRAEVERLDRVLVSAARRDATCQRLMTVPGVGAITALAYQSTIETPSRFRRARAVGAYVGLVPRRHQSGQLDRSGRISKQRDALLRGYLYEAATVLLTRLQRPCALRSWGRALAGRIGIKKARVAVARKLAVLLHQLWTRAEDFRWTAA

SEQ ID NO: 79616 - protein, 340 aa, unidentified
MSKKIMANPAEIRKSEEGASADASAENKPETFVGIDVSKGWIDVHFLPSKQTEHVDTDGKSLEAWVKTLPDNITLVVMEATGGLEIPVFSALAARQIPVAVVNPFQTRNFAKSLNLRKKTDEVDAYALALFAERMRPTARPFPTEQQRELDEILARRGQITGMIASEKNRKKQARNSQVLARIEAHIAWMEGEVDDCDKKISGLIAANPAWNELDQLLQTMPGVGSGSAHALICHLPELGTLGRRALASLTGVAPFEHQSGQWHGKRFCAGGRAVLRSMLFMAASSASRHNPPIRDFYERLRARGKAHKVAIIACVRKMLNILNTMVKTGQEWQSVQKNA

SEQ ID NO: 79617 - protein, 377 aa, unidentified
MKRIKFVGLDVHAETIAVAVAEQEGEIRSLGVIPNREESVRKLVKKLGPVEQLRFCYEAGPTGYVLYWQLTKMGAACAVVAPTLVPVKAGDRVKTDRRDALKLARNYRAGELTAVWVPDAEHEALRDLVRAREAAKKDQLRARHRLSKFLLRHGRRPPVGVTPWTVKYLEWVKRDVHFAVKAQEATLLDYLHQVEHMTARITRLDDAIEEAVKVAPAKMRAVIKGLQALRGIAQISAVTIVAELGEVTRFTKARELMGYGGIVASENSSGERQRRGSITKAGNAHLRRVVVEAAWAYRHRPAIGFTLRKRQENLSEEVKEIAWKAQHRLHARYGKLMAKGKNKGVVVTAVGRELLGFIWAIGVQVEAQQKESLRQAA

SEQ ID NO: 79618 - protein, 404 aa, unidentified
MLSRYISRRILLGWARPYGLTRRLARKLARVAVGMGPAVEPQLREAPVMGEGSWVGLDVHARSVVAGVIDQGSGEVRSLRLPPGGEATVAWLRTLPAPVRVVYEAGPTGYGLARACTAAGISCVVAAPSRVRAAADRVKTDRRDAERLARLLRLGEITPVRVPAPEEEAARDLVRAREDARSDLMRARHRLSKLLLRHGYVYDATAWTRTHDAWLRRQRFQGGPLAIVFDECYGRMLDAKTRRDTLDKAIAELAAAPPYLDVVERLVCLRGVSTLTAFALTVELGDWHRFRPESLGPFLGLTPSEHSSGERRRQGGITKTGNSHVRRLLIEAAWHQRSPSRRSVTLERRRDGKPLAVQAQAERSGRRLHGRWHALEARGKPRSIVVVAVARELAGHCWALATME

SEQ ID NO: 79619 - protein, 431 aa, unidentified
MREVEDEPLFAERAAGIDIAKAGIEVTIRVPSEARAGRRQQETRSFATTRRDLLAVADWLRSWGVAKVGMEATGDYWKPVYFVLESQGFDCVLYHAAAVKALPGRPKTDRADSVWLARITERGSLPSSFVPPAPIRALRTHTRYRRHLTQARTAEKQRVEKLLEDGHLKLSSVISDIHGVSGRAMLEAIIAGQRNPAVLAQLARGTMRGKITQLEQALDCSFLTPEHVAILAMMLAAIDSFTAQIEALTAKIEILTQPWLHQIHQLDAVPGTGILSAQDVIAEIGVDMTVFPTAAHLVSWAKWCPQVRQSGGKRLGSNAAGRGNAYLSSALGEIAISAGRTQTFPGAKYRRLVKRMPKKKALVATGNSILAIFHALLSDPAATYHDLGHDYYQQHTNVRRQARNHLRSLEHLGYHITIQAINPDTGELLTA

SEQ ID NO: 79620 - protein, 358 aa, unidentified
MYKFMKKFFIGVDVSKDTVDVSFFDDDRMKSPEYLAQYSNSPKGFREMVKDLRMCCHGVSSGQWLFCCETTGRYDHPLCHWLVDHGMVVWRESALQIKWSSGIQRGKNDRVDSLRIAEYAWRHQDKMQKFVKPSESLSNLKAAFTHRRRLVEKRTATRCQLKSMSSEKGLSASVARMIVRDLSREIERLSASIATMDESIQEIIRSDSELDRNYRHIIFVKGVGPITAVALIVCSGNFKAITSAKKMACYCGVASFRSQSGTSINRKASVSNLSNRQIKSLLSMAARSASRSNPVFAEYFNRILSRGKPVALVYNNLRNKIITVVYKLIERDCDFDVDYKRMHSTGQRANEPAIREAV

SEQ ID NO: 79621 - protein, 362 aa, unidentified
MRIIGCDLHARQQVVAMLDTETGEVVSMTLKHEGNNVREFYSQLPRPVRVGIEATGSLQWFVNLMEELGIECLVGHPAEIRAAEPRKQKHDRRDADLILKLLAENRFPAIWLPSKELQDLRALLRHRHQWVRMRTRIQNALQSIALANGLRRGTALWSHDGQNTIAALPLAPHSAYRRNELQALYAKFEAEIEKLNQRVEEQACGRAGARLLMTHPGVGPVTALATEVFLGDPARFADSKALASYVGMIPREYSSGGRQRLGGLTKQGNPLLRFLWGEAGAHAVRRDPELQRFYRRKVIQKGFGKASVAVARKLGIRLWIMLRDEIEYNEFCRRGQKQQKSSDACAGMPETRYGAKSHRPVD

SEQ ID NO: 79622 - protein, 342 aa, unidentified
MSEITVIGLDLAKNTFHAVCCDQYGKIQKRKKLRRMQVMQFFTQSTPCLVGMEGCGSAHYWARQIAALGHEVRIVPAQHVKPFLRGNKHDFNDALAIAQAAQHPEIHAVTIKSQYQQDIQAIHRFTRGLVKERSALSSRMRGLLAEYGITIPERISSVRAEIPLILEDAENGLGDLFRAALERSYQQLLHLDEELAWHNRSLKALVVASTPCQNLLTVPGFGEVVATAFYAAIGDGTAYRKGRDVAAALGLVPAQYSTGGRERLLGISKRGDSELRGLLIHGARAVVAKVGNKTDALSLWIKRVIERRGYNKAVVALANKMARMGWAILRNNTQYKVTAAAA

SEQ ID NO: 79623 - protein, 340 aa, unidentified
MEYFAAIDVSMEESKLCVRDTAGRIVCEGRALSRPAAIGAVLRSWGLAYARVGLEAGPLSQWLHAGLTGEGFRVVLLETRQAHAVLKTMRNKTDRKDAQGLAHLLRTGWYQEVHAKSAAAQDIRALLTARRQVLGSLVQIENNIRGLLKGVGARLPRGRRREFATRARAAATMPLLAAAVASLLAVHAALEREAAGLTKRVVALAGRTPAARRLATVPGVGAITALAFVATIDDPGRFARSRSVGAHLGLTPRRYQSGEIDRGGRISKCGDGLMRALLFEAATVLLTRVRRWSGLKAWGMAIAKRRGLWRARVAVARKLAVILHRMLVDGTEFRWSAEAA

SEQ ID NO: 79624 - protein, 462 aa, unidentified
MPGKEEKETSDKSRRQLEGLPVIRQSVAGIDLGSERHWVCAPTLDRSAREVANFGATTAELIRLAEWLKTRQVESVAMESTGVYWIAPHEVLEAQGLQVLLVDTRQLARVPGRDKKSDPTDCEWIQRLHSCGLLRGSFRPAEAICMLRTLVRDKANLVAERSDWLRRMQKSLDQMNVRVHRAVSDIDGATGMAILRALANGERDAQKLAKFRDPRCNKTEQEIAEQLRGHWREDHVFSLQQALKMYDAVEERIAAYEKEILRKLGEMEHDGQQGQSPPPLNNTNKAKGIKRRGQESMRQALYRMSGVDITQIDAIAVQTVEVLLSEYGPDLSRFPTEKQFVAHLTLAPRVATSGGKPVKKKKRNSASTRVAAALRMAALSLRHSQTALGAYYRRIAQRRGANIAVFAAARKLATLIYRLLRWGQPYVDEGVTAYENRHRQLRIGRLTATAKQLGYQLTPLPD

SEQ ID NO: 79625 - protein, 355 aa, unidentified
MTASYDYHIGVDYHKSYSHLVVQDSGGKTLRSGRVKNDRQSLGGFLERYRQNSHAVVEATRNWMVMYDWLDDICDDVVLAHPLKVKAIADAKIKTDKIDATVLAHLLRADLVPEAWAPGERARELRVALRERMFYVRLRTMTKNRIVTVFDRYPEQTTQLKKLGDLFGKAGRVQLAQVKVSEIDRIQIDRGLAFIGDIDGRIKQSEATIRAMTKANANVRLLKTIPGIGEFFARLIDAEIDDIGRFRNPKKLAAYAGLVPSTYSSGGKTFHGKIIKQGNKWLRWAFVEAVTPAIVTDPQLRAQYEHLKIRGVNKARVAIARKLLTIAFQILRDQRAYEPRGASPTEGASTISRLS

SEQ ID NO: 79626 - protein, 345 aa, unidentified
MENMYYIGLDVHKKTISYCVKDGSGRIHAEGKIPATRFDLDRWMKTLPQPWTVAMEATIFTGWIYDHLRPHAAAVKVAHPLMLRAIAAAKKKNDRMDAKKIADGLRCNFLPECYMAPTAIRERRRTLRYRNLLVRQTVQLKNRISGLLMEAGVNYNKEKLHKVGYFRELLKSNPDIDESLRPLLQLCRETLVRLQKTESALIRSLARDRFLVERVEHLMTIPAVGPITALTWALEVGEVSRFSSIKKAISYCGLCGAEQSSGEHVKRTPISKQRNKHLQCVLVEAAHRAPRRSPELALLYDREKQKGNANRATLAVARKLVAYLVAIDRSQRDFLLVEKENQAAA

SEQ ID NO: 79627 - protein, 349 aa, unidentified
MNVNQYIGFDVHKLTVSYCVKTADGAIVEEGTLRATHASLRQWAGKRQEPWRGAMEATLFSAWIYDTLLPFAAELQMGHPAMMKAIGAAKKKNDRLDARKIADLVRCNLLPACYVAPPEIRDLRRMLRYRNLVVGQAVRMKNKMSGLLMEVGAEYSKRRLHGKQYFTTLLETLAETPESVKDLLRYSRSALEMFEATQRQLLVRLQTDPRLARRVALLTSIRGVGEVTALTWALEVGDPHRFSSVDCAVSYCGLTSALLSSADKQQRAPISKQRNAHLQSVLVEAAKLAPRWNPQLAALHERERARGHRNRATLAVARKLVAYLLAVDKAGQPFQVRISETAAAPEQAA

SEQ ID NO: 79628 - protein, 664 aa, unidentified
MSRSCQNRRRAAARTATNQDAGCAVHTAAMPTEGPVPSTTDPRTSRSSAAPGDTPAATPVAIGIGIDTSRYGHHAIFLDADLQPAAPELKFVESAQGYQQLQSRLAALRHKHGPVHFHFRLDVAGSYADNLLAFLHGLPEPRTISCGDPQRNKNYRAAIFGHKKSDATEANATARYALTEKPKPMPVVAPAVQQLCQIASRLESQARQCTRVVNQLHNLLGRTFPELALLVKDLSAGWVLTLLDRYPTAAKLAAARPSSLEKIPYLPHEHIASLLEQARTSIASLTGPVTEELVRELVGQLQDAHVRHQALEKLLVSAYRQLPEPNHLDSIIGFGEVTAAILTAKMVTTGRFVEPAKLTGYFGIYPVEASSGIDRDGQSRLPLRMVMSRRGNDLVRRYLWMAALSAAQHNPAVRPLYQRVRAKHPDKPGIAIGHAMRKLLHLALAVWQTGKPFDPEHYPWDQAAHLPGSQQPATAEPVAPSPTHEHTGPHAQAAGHKNPVTTPVRSVVTAACVPTSVTEAASAGNDSTRSVASEHPEATACDMPMSQDAQAEATALAWIDFAHLKTQLPLQRVLEHLNLLTDLRGRSRQRKGPCPVHAASGKSRTFSVNLDKNLFQCFDPHCGSKGDVIDLWAALHKLSLRDAAADLIQTFNLEPASRTEKRHG

SEQ ID NO: 79629 - protein, 322 aa, unidentified
MNKVIGIDISKQKFDVCFLEGQSKTSEVFTNDLAGFRKLAKCISNLDLVVMEATGPYFLKLATYLVDSGHRVSVVNPLVIKHYSRMRMSRAKTDKKDAYLIACYGQGENPPLWNKQEDYIMQINQGLTLLQGFEKQMTMNKNQMEALSVLPYCDKQALNALRSVIACLEKQVLKVEKHLQEVVREHYQETNTALQTIPGIGPKASLLLIAITGNFEKFTNSRQLISYLGLSPRIYESGTSVKGKAHICKMGMSKARRTLYMCSWTAKFNNPQCVELYQRLKEKGKPEKVIKIAIANKLVRMAFAVGKNLSAYDKNYRANVCF

SEQ ID NO: 79630 - protein, 326 aa, unidentified
MQVKSVSKQGTGVQSTAGIDVSQECLDAHVHPQGISLQVPNTPAGIGKLKRFLQKHGVGLIVLEPTGRWHRTVHRNLHDSGMCVALANPYQVRSFARACLQFAKNDKLDAKILAKFAAAMEPAVRPPAPKVMEILGELTRARASALAERTALQNQIHAASYKLIQQNLERLIRHVDDYVEALEQEIEGIIADNPALARRFAILTSIPGVGKATAMTFIANLAELGSISHKAVAKLVGLAPLDWESGKQQGRRAIFGGRADVRHMAYMSALSAAQHNPSLKAFYQRLRDAGKAYKQAAVAVARKLVILANTLIAEDRLWQPQAPKTA

SEQ ID NO: 79631 - protein, 343 aa, unidentified
MECYVGLDVSLKQTSICVVSGTGSVVREGVVASDPDAIAAFVRSKAPGAIRIGLETGPTSTWLWTELKRLGVPVICIDARHAKAVLKMQINKSDRNDAAGIARIMQTGWFKEVRVKDLDSHTLKALLVSRALLVKIKRDLENQIRGLLKNVGLVIGRAKFNVFAVRAAELIEDRPELIAVVGPLLKARKAIEQQTDDLDRKVLKLARYDAQVRRFMTVPGVGPITALCFKATIDDPTRFKRSRSVGAYVGLTTRRHASGEIDWMGRISKCGDAMLRSYLFEAAGVLLTRVPKWSALKAWGMRLAKRNGLRKATVAVARKLAVILHRMWIDRTEFNWSKQEVAA

SEQ ID NO: 79632 - protein, 342 aa, unidentified
MNITTIGLDIAKNVFQVHGVDENGKNAFRKQLKRTQVLSFSANLTPCLIGLEACGGANYWARELIKVGHDARLISPQFVKPYVKGNKNDTNDAEAICEAVSRPSMRFVPLKSIEQQDIQMLHRVRSGLIKERTSHANRLRGLLAEYGIIVGQGLTQLRKRLPEILEDGENQLTAAARQIFADLYQQLVYQDQQVSIYSEKIIGLHRTSPVSKTLGAVPGIGPITATALLAALGDGKAFEKARQVPAWLGLVPKQASSGGKQKLLGISKRGDTYLRTLLIHGARSVVKAAAKKDDAQSRWINDLVKRRNANIAAVAVANKNARIVWALLTRIESYHSPISIDA

SEQ ID NO: 79633 - protein, 422 aa, unidentified
MLEETNDSEEIIARVAALDIGKAELVCCVRAPSPDTPGKRLQEVTTYATMTRSLLVLAERLGVLGVTRVVMEATSDYWKSPFYLLEAHGLEVWLVNAKDVKHLPGRPKTDKLDAVWLAKLAERQMLRPSFVPPPAIRRLRDLTRYRADLVAVRTAEKQRVEKLLEDAQIKLSVVASDIFGVSGRAMLAALVAGERDPKRLAQLARTRMRAKLGQLEEAFTGHFSDHHAFLLARMLGRIDQASADIAELEARIDQEVAPFAQAVDRLDEITGVGRTAAQVIIAEVGTDMGRFPTAGHLASWAKFAPGVKQSAGKPKGKATTGHGNSYLARVLGEAAVAAGRTNTFLGERYRRLAKRRGTKKAIVAVGRSILIIIWHLLADPTARFHDLGAGFYDTRINAERTKRNHVRQLEALGYKVTLEPAA

SEQ ID NO: 79634 - protein, 361 aa, unidentified
MRILALDLGKSKSVAYTVDTATGECGFKTVRTEPAVLGRLFAEGRPDRLVFEIGPLAGWVHDAAREAGVRQIEVANVAHEAWRWRHTRRKSDRVDAVRLADLSAAGQLPMVHVPQAATRQWRGLIAYRARLVARRTAVKNRIRAILASVGEPGLPRGAGGWTRQAVASLAALARPLAEVGSEDLWRGELALELEALAHLEAQVATVEAKLDTLAEADERVARLRTIPGVGPRLAELLVALFDDPHRFGSGRQVGSYLGLVPRQFQSGAMDRHGRITRHGNPLARALLVEVAWLGLRWNGRLRAIYQRVHRGSRARRKVAIVAVARRLAVFAWAMLRDGTVWRPERPEEKPTQHPAEAGVLA

SEQ ID NO: 79635 - protein, 343 aa, unidentified
MGLYVGLDVSLKRTSVCVIDGAGKVVWRGTASTSVEALAAVLHKQAAQAERIGLESGSMTPFLWHGLRMQGFPVVCLDARWAKKALSSNPVKTDANDAEGLAQLVRVGWYKEVQVKGLEAHRLRALLTGRQQLVQAKVSLINQVRGLLRPFGLVVQSGSGQSFSARVAELVAGDEVLTMVTQTLVAAMADLEKRIEVLDKRLRVQARGMTEVRRLMTVPGIGPITALAYRAAIDDPTRFTHSRDVGAYLGLTPKRYQSGEIDRDGGISKCGDHMARHLLYEAANVLLTSVSAWSSLKAWGMKLARKVGPKRARAAVARKLAVILHRMWIEGMDFRHGKPPVAA

SEQ ID NO: 79636 - protein, 338 aa, unidentified
MAIVMGLDQHRAQITADWLDTETGEVSRARVMPADRAGVRRFLARFAGQQLEVALEATTGWRFVVEELVAVGAEPHLAEPAEASALKGNKKRAKTDRGDARHLRELLMTGRLPESYIAPEHLLDLRARVRLRHALVDQRGEWQQRIHAVLFHHGHPQKAGLLTTANREWLQGLALPDAAREQVTVALAMIDALDSQSAVITAELRRYARRQAGCRALMGLYGIGELTAVAILAELGDTRRFSSSRQAVRYAGLDITVHQSDQRRSPGHLSRQGPPALRWALYEAAQAARRPGSPDRAYYDQAAERLGGNRACLALARKLLKRSFHVLRELGDHALQPA

SEQ ID NO: 79637 - protein, 339 aa, unidentified
MNSQVAGLDLHKNQSYITVMGKDGQILDEVNLKSEADSILTYLDKFEDPEVVFEATRNWYWLYEALQRDGYDVTMAHPKKTKAIGEARIKTDRIDSHTLAHLKRADLIPESYLAPLETRELRELLRHRVFLVRQRAKVKSKIRTLLSKLNLTCPKSDVLGKEAIIWLRENQKKMPEVFSDKLDDFLAVGGKLTEVIERTNAVIKREAEEDEIVRLLKTIPGIGRFSAMVIKAEIGTISRFPDADHLASYCGLVPSTHSSGNYTHRGNITKEGNPWLRWVLVEAAGKLKGKSKHFEDFYYRVLAKKTKKVARVATARKLAVALYYMWKRREPFKEPKING

SEQ ID NO: 79638 - protein, 347 aa, unidentified
MVAQSPVVSTQSAAAARSRGTAGGKRIPAKPLSSERAAHDPAPVKPRFVGVDVSKSWIDIADASGGKERVANQARAIAAAFRGRWSDCTSIVCEATGGYERALMDVASAQGLPLRRAHPNRVHAFARASCGLAKTDALDAKMLAKFAAFTADEPAQPLPSAKTRELAAMVARIVQLTDLHQSETCRSKMEPVAAVKASLAGQIKAMQKAIDAFVAADPILKENAAILRSCKGVGPKSAQAILAMLPEIGTLDRRKIAALVGVAPITRSSGSSINAASITGGRKALRDILFMAALSASSHNPTFKAFYDRLRADGKPHKLALVAVIRKLIVTLNAMVKTRQTFKNALT

SEQ ID NO: 79639 - protein, 337 aa, unidentified
MNFVGIDLHKKTISLCVVNQEREVLERRRFYCSDTERILGFFRTIEAFRAVVEATASYEWLAALIEPLAERVVLAHPKKMRVIAESTRKSDKLDAQILAEFLALDMIPEAYRPSKRQRAHRVLVRQRSYVSRRLTSVRNKIRRILSNYNADREDLFTEAGLAYLNKTAVIEADRFVLDQLLREWRTYTEQLKEVDKRLDTFAREAPVQEAEAREILDSIPTVGPVTIDVVLSELGDIRRFRSQKKVCAYVGLAPGQRESAGRTRELSITKEGSRLLRWVLVQAAWRLVNRTVRWRCIFEGIRKRRGKKRAIVAVARRLLCVMVSMLQTGQSYRAAMV

SEQ ID NO: 79640 - protein, 358 aa, unidentified
MVRESVTEKKDLQWVGVDVAKQTFQAALARPGQRFGLTKLGELPTESFPRTREGVERFVDWLALLLPAKREALNTRVVMETTGKYSIELAALMDAVGCGLRPAIVHARQTNAFIKSMNVRGKTDALEARALAFYGIERSPVAYEPLTEEQSTLRELVRHRRTLVEQKCNADNRGGEGSTSEYVRKARVREHNFLNKEIARVDKEIRECIAKSEALKKDYALLTTIHGVAFVTASVILAELGDLRRFERARQLSAFVGLSPREVQSGTSVFKKAHMCKQGNASVRQALYLAALTAVRDGGYLQENYRRACAQGKPKMVALGMIMRKLIVLMRTMLINNQEYDRNRRPNVQQNDIQEARA

SEQ ID NO: 79641 - protein, 429 aa, unidentified
MIMGFTKPIEHFNSQRKKVITMNTLYVGIDVSSKSNVVYLMLPNGDKHSNFSVANSHEGSTQLVKRILSALTSHSLDTVLIGLEATSVYGDNLVYFLREDATLAPFNRKIHVLNPKQVKKFHDTYNDLPKNDYVDSFVIADCLRFGRINKEVYMGDYRYKALQNLTRARFFAVQNLVKEKQRFMNVLFKKYSTMTQEKVFSDTFSTTALAVYDEFESAEALANMDLHELTDFIIEKGKNRFPDPDAVAKAIQKAARSSYRLPKTVNDSVNQVLSISITSMKALESQIKEFDKAIKSQMELLPNVLISIPGIGPVYSAGIMAEIGDINRFNSQAALAKYAGLAWKQHQSGGFESEVTRLIPSGNRFLKYYLCEAAFSLVRCDKEYSNFYHLKYKEVNRCQHKRALALTARKFVRLVFRLLKDNRLYCPAK

SEQ ID NO: 79642 - protein, 320 aa, unidentified
MSESQVVVGIDVAKAHVDCAVLGADFGARQFANDIDGHSALAAALQPLSVALVVMEATGGYESALACALQAAGLAVAVVHPKRARDFAKGIGRLAKTDRIDAEALAELAATLARRRDLARFIRPLPDAQQQELAALVTRRRQLLTMLGAERLRLQLATVKVRPSIDALIEAIRAQLEDIDAQMQAHLQEHFAALDDLLRSARGIGPIASATLIATLPELGRLSRREISALVGVAPMANDSGTSHGRRRITGGRFQVRRVLYMATLTATIHNPTIKAHYQRLLAAGKLPKVALVACMRKLLTMLNAMVRTQRRWSDEFHRA

SEQ ID NO: 79643 - protein, 374 aa, unidentified
MSHHSEAFVGFDTSKLRNAVAIADGGRTGEVRFFGEIDNTEAATAKLVKKLAARYQRVTFCYEAGPTGYGLYRQIKGLGHECIVAAPSLIPKRPGDKVKTNRRDAVSLAKLLRAGELTAVWVPDRHHEAMRDLVRTREAAMLDLRSKRQRVSAFLLRQSRPYAGRTPWTKAHMNWLASQTFDYPEQRIAFEEMMLAIRQAQERLDRLEQAIRDAVPDWSLAEAATALMAMRGIDLIAATTFLTEVGDLSRFRTPHQLMAYLGLVPSEASTGNTIKRGPITKAGNRRARRMLVECAWSYQHPPRVGRNKQQKVDAASPAVREIAWKAQYRLHRRYRALIRRGKLKTIAITAVARELAGFIWAVGRELTTVRATPK

SEQ ID NO: 79644 - protein, 342 aa, unidentified
MKHYVGLDVSQRETSVCVVNDTGSTVYEGRVKSDPGALTELLRKRAPHSERIGFETGAMASWLWHELRRVDLPVVCIDARRAHAALSVRMNKSDQNDAKGLAELVRVGWYREVKVKSEESQKIRAILVARSRLVGIRRDIENQVRSMIKEYGLLFRRAVGLQFRNKVIELLGEDHQLRAVVDPLLFVHETVCHQQVKFDDEVRRLARSDETTRRLMTVPGVGVVTALTFRHTIDDPSRFRSASAVGAYPGLTPRRNQSGETDTNGRISRWGDRLLRTYLFEAATVLLYRTKKWSTLKAWGMKLARRIGMKKAKVAIARKIAVILHCIWVDGTSFEWGQAKTA

SEQ ID NO: 79645 - protein, 344 aa, unidentified
MEQYAGIDVSLEFSSVCVVDAAGKIIREARVVSEPASLIAWFAALGMDVARIGLEAGPLSQWLYAEMKTAGLAVELLETRHVRDAFKAMPVKTDRKDARGIAQLMRLGWFRPVHCKSLPAQEVRALLTTRKLLQGKRHDIEMSIRGVLRGFGLKVGPTTPKTFEHRIRELVENHGTLSLVADALLKARAALGLEFRAIEKRLLTIARADKRVRRLMTTPGVGALVALTFSAAIDDPDRFRSSRMVGAHLGLTPRKYQSGETDVTGRISKIGDHEVRVVLYEAANVMLTRPVKGSTLKRWALAVAKRAGMRKAKVALARKLAVVLHQMMRSGTAFSPTGQPVAAV

SEQ ID NO: 79646 - protein, 347 aa, unidentified
MKRIVRQVVGIDVAQKELVVCLGRMYDDWTPELYAHKTFANTAKGFAALILWVKKMTEESTAVRYVMEATGVYHESLAYFLEGKGFEVSIVLPNKISNYFRTLEVKTITDKTASEAIARFGLERKLDSWKRPSEIFRKLKQITRERDQLVEERTLVKNQLHAEQTEAYPIKESIARMKARITLLNKQVTQIKEEINAIVKQDKTVAKSVELISSIPGVGLLTAVTVLAETNGFALIRNKRQLTSYAGLDVKEKLSGTSVKGKPRISKKGNRHLRKAMYMPALAAIRNDGRFKVLFTRLVSKHGIKMKAAVAVQRKLLEMIYTLYKTNTVFDKDYLKEEVIALSTQAA

SEQ ID NO: 79647 - protein, 402 aa, unidentified
MNSVGIDISKGRSTVAVMRPFGEVVISPFEVRHTDSELSELARQLKSLDGETRVVMEATGNYHAPVAKLLHDAGLYVSVVNAKLVHGYGNNDLRRVKTDKKDAVKLANYGLDRWLTLPRYVPEEDTRLLLKNCYRQYRQDSKVQTVLKNNLISLLDTVFPNVNRLFSSPIRGDGSEKWVDFVAEFWHCRCVSEKSEKAFTNKYQRWCKTHGYNFSEAKAHTIHAEASGHIGIMPKSETTKLLVEQAVVQLRATSAALIALKREMLTLAAQLPEYPVVMGMFGVGPTLGPQLIAEIGDVRRFYSKKALVAYAGLDAPPNDSGDVTGRHKSMSKIGASSLRRTLFLVMGIYLQNAPLDEPVYQFMDRKRAEGKPFRVYMMASANKFLRIYYATVKAYLESLEQV

SEQ ID NO: 79648 - protein, 370 aa, unidentified
MSVYVGIDVHRKRSQVAVVTEDGKVQLNKNTVNGTEPILRLIGDLPAGTPVAFEAAFGWSWLADLLEAYGFEAHLVHPLRCKAIASARLKNDKVDAATLAQLLRADLLPEAWIAPLPVRQLRALLRHRAGLVRLRTMLGNRIHAVVADFGYDRSGSYLSGPGRGWLAGLELPAISRELVTDYLAVIDGLAPLIDRIDGELRQHAKADPRVKTLTTLPGVGQFTALVMLAEIGDITRFASARKLASWAGLTPTVRGSDLHVRHGHISKQGSAWLRWVLNQAAQSAKRSPEFAATYAAIAKRRGTKIATIAIARKLLTRAWHLLTTAQAPGPAAQDASTATAAHPQTGRVTKPRASSLSRHEPATGRARSSD

SEQ ID NO: 79649 - protein, 333 aa, unidentified
MVAGTLGSLNKAGSTKMTKTIMTTAGIDTSKATLDIAVHGRPERWQFANDLPGWRALATTLAKAGVARVGIEATGGYERGVARHLRAAGFTVLVLQPIQVRAYARFRLRRAKNDALDAALIAACAANLDPPEIETDPRLADLAGPLTFVEQIEEDIARFKVRLEHIDDRRLRRLVTNDIARLKARRKAELRRIVERLRAHDALALRLDLVLSVPGIGERTAIALIVRMPELGRISREQAAALAGLAPFDDDSGKHKGQRHIIGGRARLRRSLFAAALPAAFRWNKALNALYARLTGSGKPHKLALIACARKLLIYANTVVQRGTPWTENAAPS

SEQ ID NO: 79650 - protein, 424 aa, unidentified
MKVTYQTCCGVDVHKSFLVATIVKTSGGIEPSYQKKRFSTFNNSILAFKQWLLDNDCHDVCMESTGKYWVPVFNLLEDEINVVIANPKWVKAVKGNKDDTKDSKWIGDLFRLGLVKGSYIPCKAVRVLREYTRYRYKLVSCRSSEKNRYQNAHTVCNVALDSVVSDIFGKSSTSIIDYLLEQSGTSINHEEIASKLLRSLKSKEDAVIESIEGYQMTDAQKYRMRLIRAHMDYITAEINDVDKMIENMISSNPDFENAVQFLCTIPGVKHDSAITIISEIGTDMSQFSSSKRLCCWAGLTPGSNESAGKKKSVRITRAGVYLKPALVQCAHAAVKSDKSPYYKKKYDSLVKRRGKKRAIIAIARMILTAIYQMLSTGEQWNPSDLYKIDMPAPLLEKQKAKAIKQAKKLLQREGLLPPDEPLAS

SEQ ID NO: 79651 - protein, 341 aa, unidentified
MELKRIAIDTSKHVFTVHGADHQDRVVLRRDLKRAQLEPFFRKLPPTEVVLEACGSSHHWGRLLSALGHTVKLIPPQYVKPFVKRGKNDRNDAEAINEAASRPAMRFVPVKTAVQQAGIMILKTRDLLVRQRTQLINAMRGHAGEFGVIAAKGTAKVEALLDRVAGDETLPVEAREMIALLGEQIKDLDIRITALETRMKQAHKANPISQLLEGIPGIGPISALSLALTVDPGHFHSGRHFAAWVGLTPKERSTGGKQRMGGISRAGDERLRHLLVIGATAVIRHVKPGSRNASAWLMSLLERRPRKVAAVALANKMARVVWAMMTSGEAYRGARSAPLVS

SEQ ID NO: 79652 - protein, 391 aa, unidentified
MIYIGIDVAKDKHDCFITNSDSEVLFKAFTIANNLDGFNDLYQKIESVMDDVTKVKVGLEATGHYSYNLLGYLIDKGLPTYVINPLHTNLYRKSLSLRQTKTDKVDARTIASMLMSDVNLKSYSDTSYHNEELKSLTRYRFDKVKERAKLKTSVSRLVCILFPELEKLVPTLHMASVYALLSEFPSAKHVATAHLTRLTNLLSESSKGRYGKDTAITFRDSARASIGSNMPAKSLELKHTIKLIQELDSEIDEIENEIKIIMDEINSPILSIPGINYRMGSMIIAEIGDFNRFDSPDKILAYAGFSPSTYQSGQLDGAYAHMEKRGSRYLRYALYNATKYVCHWDPTFAAYLAKKRAEGKHYNVAISHAVKKLVRVIYHLEKTKQQYIKAA

SEQ ID NO: 79653 - protein, 365 aa, unidentified
MKKSSTAVAQSKRNFERKLTIGLDLGDRSSWYCVLDEAGEVIHEQKLSTTPKAMQEVFAAMPRSRIALETGTHSPWVSRLLEELGHEVIVAHARNVRLIGESRRKDDRLDARTLARLARIDPQLLAPVKHRSAEAQAHLMVIRARASLVRARTALVNTARGLTKSYGERIRGCNPRNLDTEKAQALSPELQAALGPLLQALESLSERITEYNQQIEEIAKQSYPQTSLLKQVKGVGTLIALTYMLTLEDPHRFRKSRDAGCYAGLQPGRRNSGQSAPQLHISKEGDPYLRTLLVQGAHHILGPFGVDSDLRRWGLKLAERGGKNGKKRAIVATARKLAVLLHRLWVSGEVYEPFHNSHSTMLATA

SEQ ID NO: 79654 - protein, 316 aa, unidentified
MKIQTNQNINVGVDTGKFQLDIYIRPLDIYFTVPNDEKGIKEAVKTIKKYTPERVIVEATGRLEAPFIMACAKANLPFVVANPIHIKRFAGAIGQRAKTDKLDAKLIAHFGEAIKPKLSTLKPEVMQDMSDLVARRNQLLVMQTMEKNRLQILPKSLAMTIKPVLTLFKNQIKKIEDKLVKLIESCPDYQAKNTILQSMKGIGKIAAASLISNLPELGYMTNKQASALVGVAPINRESGRFKGMRKIQGGRHQVRTVLYMAMMSAIQSNPVFKAHYQKLVAAGKPKKVALIACVRKMIVILNSMLRDGVLWEAPKV

SEQ ID NO: 79655 - protein, 344 aa, unidentified
MYFIGVDHHKQVSVMTVLDEDGRELKNGRVANLRSHVDRFLEGCRPFTAVLEAGRASYVMADLLRELGGEVKMANPLQVKAIAHARIKTDKRDSRTLAQLLRADLIPEVYQRDEWNRRAQRVMRMRAYWVRKQTEIRNKIRVLLAQQREEIRLEVERREGKLFSLSGQEFLSRLALEGQDKLILDDLLQGHLEVQAHVQLSDGLVKALYGELEEAARIDTIPGFATTLSVLVAVEIADVRRFPRPADLHSYAGVIPSTYSSGERTTHGHITKQGSVWLRWAVVEAVHPAVRKDLALGALYKRLARRKGPNVAKIAVARRLLTIIYRVLTERRDYIPGIMKTSAA

SEQ ID NO: 79656 - protein, 344 aa, unidentified
MDHFAGLDVSVKETSVCIVDDTGRIVREVKVASEPEALLVVLTNPTYHFKRIGLEAGPLSQWLFSALAEAGLPVICVETRHMRAVLKAQINKTDRNDARGIAQMMRVGLYRPVHVKTLRSQKLRMLLTHRQLLLSKAIALENDLRGTLRNFGLKVGMVGKVKFEARIRELVESLPDLAVLVEPMLIVRRVLREQIVILHRGLLAIVRDDEVCQRLMTTPGVGPVVSLTYRATVDIPARFRKSKSVGAVFGLTCAKHQSGEVDWDGRISRCGDEMMRTMLYEAAQAMMRSKKWSWLKAWAMQIARRRGMKKAIVALARRLAVIMHRIWVDGTEFRWKREQAAVAA

SEQ ID NO: 79657 - protein, 320 aa, unidentified
MGTEKVYVGIDVSKETLDMAVHDSDQRWRFANSDEGITETLSCLEELCPTLVVLEATGGFQDPLAAALAVASVPMVVVNPRQVRDFARATGRLAKTDAIDARVLAHFAAAVHPPSRLLPDAQGQELKAILTRRRQLIEMLTAERNRLHSAHSRFVKAHIQSHISWLEEEMAHIDHDLGHSIRQSPIWREKDDLLKSVPGVGPVLSTTLLADLPELGLLNRRQIAALVGVAPFNRDSGHFRGQRTIWGGRAVVRSALYMATLVATRYNPIIRDFYRHLLSAGKPKKLALTACMRKLLTILNAMLKHKTPWQYPITEMLKTS

SEQ ID NO: 79658 - protein, 319 aa, unidentified
MAQNDLIVAGIDVAKDKVDVCIRSLSLRRTFANTAEGRRELASWLRRQKVGKAVMEASGGYEREWAKALREARIEVRIVDPKRVRSFAQSAGRLAKNDTIDAEMIAWFAETFDQARGQACDAAREELVQIVNARQALLEQQTQMQNRCEHTVPVPVRKMHERLLKAIALEVDRLEAAIAAMIKATPHFAEIAAIIESVPGLGKITSAGLIAAMPELGQVSNEAVSALLGVAPYDDDSGKRRGERQIKGGRRKVRNLFYMACLGAATRHNPVLKTFYRRLIAKGKKAKVALVACMRKLIVILNVMIARGEKWDANRYAVD

SEQ ID NO: 79659 - protein, 371 aa, unidentified
MNSILYVGMDVHKENYTLCCYTIDKDEVQYKQKISADYKIILKYLERMRKYHPEGIEIVCGYEAGCLGYTLYHQLMDHGVKCIILAPTTMGITNNNRIKTDKRDAENIAKCLAFHTYSEVHVPTVEDEAVKDYIRMRDDHKKALKINKQQILAFILRHGYRYTASKNYWTLKHIKWLKSLDLGGVLQESLNEYLITFDYLIDKLERFDKRIEGLACDERYRESVKKLMCLIGVKTHTALATIVEIGDFKRFANAEKLAAFLGLVPSEDSSGDKQSRGRITKAGNSHVRRLLVESAQSYTRGAVGYKSKDLKCRQSGNKPQVIAYADKANERLRRKFYRMVLNNGTKRNVATTAIARELACFMWGLMTDNIA

SEQ ID NO: 79660 - protein, 357 aa, unidentified
MVHKHTILDWLGQHIFIGLDIHKRSWIVAIVTEYADFKTFTQPPDVSLLVSYLHRHFAGATCHCVYEAGYCGYWICEQLRAYGIDCIMINPADVPTTDKEKKHKTNKVDAYKLARSLRNGELVPLYLPSRIALEDRTLVRTRQMLVSKQTRCKNQIKALLSFYGIALPEDITERYWSRRYVGWLESLSMQSASGTTALKILLEELAHLRKSILETTRAVCTLACTPPHAANVTYLTSISGISTLVAMILLTEIMTLDRFGRLDRLASFVGLIPGEKSSGEDRTITGMTERKNRYLRWILIECAWVAIRYDESLALSFNTLSRRMPKNQAIVRIARKILNRVRFVLKNQEPCIVLKAA

SEQ ID NO: 79661 - protein, 372 aa, unidentified
MEERIKFHVGLDVHKDSITVAAAEQGRAPGRLIGKVAHDVGKLLKVLAKIGSAEELHIVYEAGPTGFGLQRALAAKGYVCEIIAPSQIPRRSGDRVKTDGRDSIQLAESSRAGQLSAVWIPDPEDEAIRDLSRAREDAVNSRVQARHQLKGFLLRHDVRYTGKTSWSLAYYRWLTTLNFGAGAAQTAFTEYSLAVKAADDRVERLTKALVASITGWRFEPVVDALQALRGVAAITAIGLVAEIGDLARFSHPRKLMGYLGLVPSEHSSGERTSRGSITKTGNAHARRLLTEAAWNYRFKARIGRDALARQEALSESIRTTAWKAQLRLTQRFSALRERGVQINKACVAVARELAGFIWAIGLQAQQEKAQKT

SEQ ID NO: 79662 - protein, 348 aa, unidentified
MKVTRIGLDLAKNVFQVHGVDRNERAVLRRQLSRSQVAGFFEKLPPCLVGMEACGGAHHWARVLQQMGHTVRLMAPQFVKPYIKSQKNDANDAEGICEAVGRPNMRFVTVKAIEQQDMQAMHRIRNELVCQRTAKANQIRGLLAEYGIVVAVRVEQLRRALPQICEDMGHGLSATFRRLLDELRQDLSWLDGRIEELDGEIKQLARDDERAARLQTIPGIGPITATALVADLGDARQFRRGREVSAFLGLVPRQMSSGGKERLLGISKRGDAYLRTLLIHGARSALRVAANKGDARSRWAVSVSGRRHRNIAAVALANKNARIAWALLTRGGHYDSQHGYRVQLAEAA

SEQ ID NO: 79663 - protein, 412 aa, unidentified
MNSVYERCAGIDVHKRNVVVCAITPDQQGQRRKEQATFSTMMPDLLRMRQWFQRLGVTHVAMESTGSFWKPIFNVLEGQMEVLVVNAQHLKAVPGRKTDLKDAEWIADLLQHGLLRSSFVPPAFQRELRELTRYRTSVVEERSRTINRLQKILEDTNLKLSAVATDLMGLSAREMLAALLAGETNPTVLAEFARGKMRAKRDLLVQALQGQFKPHHRLLIGEQVAHIDALDEEIERLSTDIAQRLRPYEAQLKRLETIPGIKRRLAEVILAEIGPDMQRFPSARHLASWAGMCPGNRESAGKRLSGKTRKGDPWLRTALVEAAHAATHCKDSYLSAQYHRLVLRRGGKKATIAVGHTLLVIVYHVLADEKDYQELGGNYFDEQDRQAVQKRLVHRLEKLGYEVILAPTSPAP

SEQ ID NO: 79664 - protein, 372 aa, unidentified
MSAAFKPTKKNEGEEGMAVYVGIDVHKKFCQAALMNNNGRILHEFRFDNTSEGASSLLNLARSIDPHVKAVVEPSANYWVRIYDKLEDEGAEVKLSNPLRTKAIAEAKVKTDKLDAKTLAYLLRGDLVAESYVPTRKNRDRRALIRHRASLMQMRVEVKNRIHALLDKHELSYKYTDLFGKQGLEWLRSLQLPTPDQQILHSSLQVLDTLSEQVQSMDIQIAKDATTEDKAKLLMTMPGVDYYAAMVLLSEIGDVKRFSSDEKLVSWVGLAPQVHQSGETHWTGHITRKGSKRARWILGQCAQSARQHDPRLREFYERIERKHGSSKAIVAVARKMLAIIYVMLTRNEPYHGENRELTQQKHKRLEHLANTT

SEQ ID NO: 79665 - protein, 391 aa, unidentified
MIYVGIDVSKHKHDCYIVNSDGVVLADVFSVENNLDGFDLLLQKLKSVAPDLVNVKVGLEATGHYSYNILAFLLDKGLATFVLNPLHTNLFRKSTSLRRTKTDRVDARTIAAMMSSGIVLKSYTAISYHNEELKSLSRYRFDKVRQRAKLKQAVSRLVTILFPELEKLVPSLHIASVYALLAELPGAKQVASCHLTHLTNLLSAASKGRYDRSKAVEVRNAARRSIGSTMPAKSLELQHTIRLIRELDAEINEIEAAIKLFMDQIASPILTIPGISYRMGAMILAEIGDFSRFDSPDKILAYAGLSPSTYQSGKLDNAYAHMEKRGSRYLRYALYNAAKYVCHWDASFCAYLAKKRAEGKHYNVALSHAAKKLVRLIFALQRSGQPYCPTA

SEQ ID NO: 79666 - protein, 441 aa, unidentified
MAVRKVFELMYPNAAGIDIGSASHYVAVPADRDEQPVREFKSFTEDLLAMADWLSGCGIDTVVMESTGVYWIPVFELLESRGFAVHLVNARHVKNVSGRKSDVLDCQWLQQLMSFGLLSGAFRPTEEICVLRALSRQRDMLLGAQGRHVQHMQKALTQMNVQLANVITDIVGKTGQAIIRAIVAGERDPGKLAQFRDRRIHASEEQIAKSLRGNWREEHLFSLAQALKLFDAYQQLIGECDERLQQLLLQLARHAGEPEPNRNKGRQKNAPKFAMRTALFRVCGVDLTRIDAIDVSTAFKVIAEVGPDLSKFKTVKHFCSWLALCPGTKISGGKRLSGASKPCANRLAQALKLAATGLLRSHSALGAYFRRMAARMDKPKAIKAAAHKLARLIYTMLTKGTEYVDQGQDYYEQQYQQRVVANLQRRATALGYQLMPSAQPA

SEQ ID NO: 79667 - protein, 386 aa, unidentified
MHHATTLPVPEQTCSRGDCATLFVSLELSRSTWVATALAPGSRKMSKHTLAGGDGRELLDLLARLKTRAGQRIAAPVKVMTIQEVGLDGFWIHRLLEANGVESHVVDPASIAVPRRHRRAKTDAIDGETLLRTLMAWQRGEPRVCAMTVPPSPSEEDRRRISRERATLLRERIQHTNRIRGLLFGQGITNYNPLHKNRRECLEELRTGDGCSVPAHLKLEILREIDRLELVVRQISEVEAERDEMLQPAQASSPAALLMRLKGIGAEFAAVLYLEGLFRHFENRRQLAAYAGLAPSPWKSGSIDQEQGISKAGNPRLRTTMVELAWMWVRYQPASALSCWFRQRVGSERGRTRRISIVALARKLLIALSRYINHGEIPAGAVMKPV

SEQ ID NO: 79668 - protein, 414 aa, unidentified
MEQVHDRVAGLDVHRDVVAACVRVAGPRGGVATEKERFQTTTVALERLGGWLADRQVSLVAMEATGVYWKPVYYALESRFEVWLCNAHHVKNVPGRKTDMSDAEWLADVAAHGMIRPSFVPPPPIRELRELTRYRKTQTDARAAEIQRLEKVLQDAGVKLTSVASKVLTQSGRLMVQALIDGQRDPAELANLAKGKLRPKIPELTEALAGHFGAHHAVAACRILDHVDFLNATIAALTEQIDARTEPFQAAKQLLSSVPGFDRLVIDTVIAETGADMSRFPSPGHLAKWAGVCPGNHESAGKRRRVGITPGNSWLRRALIEAARAAARTRGSYFGAQYRQIAKRRGPNKAAVAVAHSLSDLIWHQLTTGECFHDLGDDYFQRRRDPERETRRLVAQLEQLGFHVALTPSRDPAA

SEQ ID NO: 79669 - protein, 371 aa, unidentified
MMNVTTFAGLDVHARSIKAVALDVVTGEVRSATFGYDACAVAEWIRSIDPAARCVYESGVTGFDLQKKLSSLGVDCVIGAVSKMIKPAADRRRKNDRNDAEFLARMLSVGNIVEVWVPDDECEAARDLARALDDAREDPRRQKQRLSKFLLRHGLVFDERTPSGQRKSNWTGAYWIWIKGISFREKADNDTLAFYVDAVRQAEEDKRRLEKLVADEASRPRWRKRVDSLRCLKGIDVMTAADIVFEAGEFARFRNARSFAAWLGLTPSEHSSGEKVAQGGITKAGNKHLRRVMVEAAWHYLNASPHSKGPAPGQAPDPAARRHASKGVRRLVGRRAALLERGVHKNKANVATARELACWCWAVGSMAEGAR

SEQ ID NO: 79670 - protein, 351 aa, unidentified
MKYYTSTTEFNCGIDLHSRQMYACVMDRQGKKRVHTNIKGNDFEYFLKRVEPYRHDLTVVCECIFNWYWLSDACFDADIEFVLAHALYLRHIHGGKNKNDRIDSEKLAHLLRANLIPPSYVYPSERRPVRALLRQRMSYVWERATLKTKLSMAQTAEGLVPARKCGHNRDVWEERIVAQYTNPLHRFAASCDMNMIRAYDVQIEKLEEEIVRQAKRDMGRQMHLLLSVPGIGRVLAMTILYEIDTIERFPTVKDFLSYCRLVKGSVASAGKVKGLSGGKMGNAYLRWAFGEAAVIMKRNHPLLTPYAEKLVAKHGKFKGNAILADKIARAVYSMLQKGTAFDAERLIATSI

SEQ ID NO: 79671 - protein, 341 aa, unidentified
MDKLGRIGVDLGKGYFQVHCLPLEGGPAMNRKLSRAKMRAFFAGIAPCRVGMEACGSAHYWARELVAMGHEVVLMPPAYIKPYVKRGKNDAADAAAICEAMSRPDMRFVPVKSADQQAALMLHKTRELLVKQRTMSVNALRSHLAELGLVVAKGIGRVDELSALAENDASLPQEAREAAKLLALHIEALTRSIDAMERKIAKACASNKTSRLLDRVPGVGPLTASAIAASVPDPGVFKSGRDFAAWLGLTPRQNSSGGKAKLGAVTKKGNRYIRKLLVVGATAVLRFAGKRRGPLADSIAALRARKPERLVAVALANKLARICWAIMTTGELFREQAFAKA

SEQ ID NO: 79672 - protein, 387 aa, unidentified
MGEVAKPKTQNGDKHMKKLDKYVGLDVHKDTSVIAVADGGRSGEVRLYGEISADLGALEKALRKLGGAGVTLHVVYEAGPTGFVIYRRLRQLGIDCIVVAPTKTPQEKGPRQKTDRRDALLLARLHRAGELTAIHVPDAVDESVRDLTRARADAVHDLTRAKQRLKSFLLRQGYRYTGKANWSEAHQRYLRELVLPLPALKAVLEESLLAVEQATQRVVRLEELLAVQVPLWRMFPAVEALMTLRGFQLTAAAVLVAELGDVRRFAHPRHLMAFLGLIPREKSTGNSRRLGAITKAGNAHARWILVEAVQHAFLPPKVSAPLALRQQGQPAAYRALSWKVQVRLHKRGWHLLHRGVMKAKVTVALARELSGFVWDLLRQVPPPAPTG

SEQ ID NO: 79673 - protein, 435 aa, unidentified
MLPTLNPHAGGIDAGSTHFFVATPDGKVTSFESCTPELYRLREHLVCAGVTTVAMEATGVYWLCLFEILEAAGIEVCLVNGAHVKNLPGRKSDVQDCQWLQELHAHGLLRKSFVPPEQIRALRSYTRLRDDHIRTSAMYVQLMQKALDQLNVKLHTVISQINGVSGLSVVRAILSGEREPAKLAELCDVRILKTKRVAVERSLHGRWKGEHLFALKQALAGWEFCEAQVKECDAAIAEQLALLTRDLTLPAVKGRREKTGRHHVPAVPQLHAHLLALSGGQDAAALPGFTDTSWLKLLSEVGTDLARWPNEKAFCSWLGLSPGKAQSGKSSRRARHRPKTTAGQIFRLAAQSVGRSSYLALGGFYRRLKARTNAAVATVATARKLAVLFYYAMRHGMAYVERGLEAYEKADRERQQRRLEKRAAEMGFSLTPLNA

SEQ ID NO: 79674 - protein, 359 aa, unidentified
MGKYSAEIFVGMDVSDKNVEIFVLKGAREDGEGAKIVNSHESLSEFARIFHEPSKVKIALETGAHSTWMAEQLIEDGFSVVVADARQLRMIWKSEKKSDARDAEMLARILRADPKLLGAVSLKDKTSRASLALIKARDCLVKTRTKIINTVRGVLKSEGILSSAITVDNFGKNVLEIVPEELFSALAGLVAEVRNIESLIRDYDKKTAALCRDSEPCKRVSQIKGVGPLTSAIFVLTIEDAERFKSGQRLASYLGLVPRRDQSGETDKQLPITKSGSKILRWTLIQAANYILGPFGDKDCDLRKFGERIASRGGKNSRKKAKVAVARKLAVLMLKLWKTGEKYDPQHSQRKKSAAKKAA

SEQ ID NO: 79675 - protein, 433 aa, unidentified
MQDVQDEPLFCERVAGLDIAKAEVEVTIRVPSDTTAGRRQQETRTFGTTRRELESLGDWLACWGVTRIGMEATGDYWKPVFFLLESRGFDCHLYNAAQVKALPGRPKTDRADSIWLARITERGSVCSSFVPPEPIRALRTHTRYRRHLTQARTAEKQRVEKLLEDGHLKLSSIISDIHGVSGREMLNAIAAGQRDPRVLAQLARGTMRAKIKRLEEALDCAFFTGEHAAVLAMMLATIDHYTTQIDNLTAKIEVLAEPYLHQIRQLDEIDGVGPVCAQDIIAEIGTDMTVFPTAPHLVSWAKWSPQVKQSAGKRKGSNATGRGNPYLSAALGEVSISAGRTQSFLGAKYRRLARRMPKKKALVATGNSALTIIHALLSDPAARYTDLGPDYYEQRMHARRQARNHVRSLERLGYKVTIQAINPDTGELLAAAG

SEQ ID NO: 79676 - protein, 316 aa, unidentified
MGKMIIGVDVAKEWIDVSIAGDGRVKRIVNSEQAIAAWIVQTGAGSIGLVAFEPTGGYERHLRRCLLRAKVTSKQVHPNEVVAYRRRRGIKAKTDRIDAKLLADFAAEELARRELEPVPQADEVLRELASRRRQLQAMLHAETCRCDVADSASVRKSLQAVIATLERSLAAVDRAIAERIANSAHAETSRRLQTFCGVGPAIAETLIADVPELGHLSGKKIAALCGLAPHTRESGNQRGHASTGHGRPGVRKVLFNGARSAIQHNPVMTAFYRRLVDQNHRLGKVALTAVMRKMLVILNAMIRDGSDWKHAARPAA

SEQ ID NO: 79677 - protein, 375 aa, unidentified
MTNAAARSNNLFVGIELSKTSWRLAFSDGAKIRQRTLPAGDQAALQQELAWSKQKLGLSADCAVRSCYETGRDGFWVHRLLSGWGIENVVVDAASIETARRGRRAKTDRLDAEKLVRKLMAWAGGEQTVWRIARVPSVEAEAQRRPMRERQRLTGERTAHRARIASLVALHGVRAKLNGRQEFGVVVEQLRDWQGQPLPAQTVVELQRELQRLALVHQQILGLEKQQATALANPQTAAERAAAKLMGLSGVGPISAMLLAVEFFGWRQFRNRREVGALAGLCATPYASGDSAQEQGISKAGNKRVRWVEVELAWSWLRFQPESALTKWFWRRFGLGSSRVRRIGIVALARKLLVALWKYLEWDELPAGAKLRVAR

SEQ ID NO: 79678 - protein, 403 aa, unidentified
MNRNAVGIDVSKGKSMAAILRPYGEIVSSPFEIKHTSGNIQSLIQQIKSIEGESRIVMEHTGHYYEPLARELSLAGLFVTAINPKLIKDFGDNSLRKVKSDKADAVKIARYTLDSWTELKQYSLMDEIRNQLKTMNRQFGFYMKHKTAMKNNLIGILDQTYPGVNTYFDSPAREDGSQKWVDFAAAYWHVDCVRKMSLNAFVDHYQKWCKRKKYNFSRDKAEEIYGAARELVPVLPKDDLTKLIVKQAIEQLNTASKTVEELRTLMNETAAKLPEYPVVMGMKGVGPSLGPQLMAEIGDVTRFSHKGAITAFAGVDPDVNESGTYEQKSVPTSKRGSSSLRKTLFQVMDCLIKTKPQDDPVYAFIDKKRAQGKPYYVYMTAGANKFLRIYYGRVKEYLMSLPE

SEQ ID NO: 79679 - protein, 349 aa, unidentified
MYYVGADLHKEQTWFYIMDQNGTKIDSKSISNSPDSLKSYFATIPTPFTLAVEATYNWYFFIDMAEQFAQTAYLANSYELKAFAKRHKKTDKIDARLIADILRKGFLPTVFIPDQSIRSLKELLHYRINLVRDRCRNIFRLKNTLDKLGADSSGDFTTKKRLWEIPVDSFAERCHYIISGYIGRIVALNQHIHNMKTYLKNELLEDKEIQNLITIDGLDYFSAALIKSEIADINRFASFNRLCAYAGLAPRVSQSGDKEAHHGALMVNRRKNLQWILLETVFHFIKATPERQARYEELKGRKGANTAKVIMARQYLKIIYHVLKEQRPYYREEVKRPKDFCQIQSVAAA

SEQ ID NO: 79680 - protein, 354 aa, unidentified
MSPLISRIATVGIDIGKNSFHVVGQDERGAIMLRQKWSRGQVEARLANLPPCLVGMEACTGAHHLSRKLQALGHDARLMPAKYVRAYSKGQKNDFRDAEAIAEAVQRPTMKFVATKTTEQLDLQALHRVRERLVCQRTGIINQIRAFLLERSIAVRQGLRFLQAELPTILGTRSDALSPRMLRLIEDLAGDWRRLDARIEAISGEIEELARKDQACERLMTVPGIGPIISSAMVAAIGTGDAFAKGRDFGAWLGLVPKQISTGDRTILGGISKRGNRYLRALFVQAAWVVLVKLGKKWERYGLRSWIEAAKKRLHHNVLAIALANKLARIAWAVLYQGRAFEYVKTDATASRSA

SEQ ID NO: 79681 - protein, 347 aa, unidentified
MRFYTQSHRYYCGIDLHARWMYLCILDPQGEVLLHRNLRACPEAFLKAVEPYRQDLVVAVECIFSWYWLADLCAQEGIEFILGHALYMKAIHGGKAKNDRIDSQKIAVLLRGGMIPVAYVYPPEMRSTRDLLRRRTYLMRKRAELLVHVQNTNSQYNLPEIGKKIAYRANRSGVAERFSDPAVQTSITADLSLIDFYDTLLNRLELFITSQAKQQDHHSFYLLRSVPGIGKILALTILYEIHDISRFPRVQEFISYCRLVKCSRQSAGKNYGFAGKKIGNVHLKWAFSEAAVLFLRHNPEGQKLLARLERKHGKAKALTILAHKLARAVYFILRREKAFDLTQFLAA

SEQ ID NO: 79682 - protein, 355 aa, unidentified
MLHNKIVDKVSTNKQMLQPQMDGYDHYIALDWSKVNMAIARMTKLGRGNPNVIDVPTSLKELKIYLSNLKGKKILTIEETTTAQWLYVELSDYVDKLLICDPYRNKLLSDGPKNDKIDATKLCLLLKSGMLKEVYHSTDNLYKLRKYVSSYEDIIKAGVRLLNQRTAIYQSCGQNSKKAKLQMDKTEKFIMNQFDKGVEIYEQNKSQYKEYFKKLCKKEATLKALTSIPGIGEVSAVKILSRVVNAHRFRNAGKYLAYCGLVKHKKDSGGRNYGIRNPRYNRIMKSVYKTAAIVAIGLENPIREYYDYLIGKGTAEHNARNAVARYIARVSYGIMKTNKKYEPSKWRKSSRTNKE

SEQ ID NO: 79683 - protein, 344 aa, unidentified
MTIIRIGLDTSKHVFHVHGVDGDEQPALRRRLRRSQVEKFFAKLPPTRIGLEACGASHHWARVLRSLGHEVVLIPPQYIKPYVKRGKNDAIDAEAICEAMSRPGMHFVPIKSRDEQAALMLLKVRDLLMKQRTMLTNAIRGHAAEFGVIATKGPQNLAELLERLGEDANVPAPARELLNSLAGQIAALEVRLEALEAKLKAHHKADPRSRLLATIPGVGPITALSLTLKVPDATVFRSGRHFAAWLGITPREHSTAGRQRLGKISRQGDEGLRQSLVLGATAVIQQVKRRFKAQRVSRTDSPWLLQLLARKPEKVAAVALANKMARIIWAMLVSGELYRQPQAV

SEQ ID NO: 79684 - protein, 333 aa, unidentified
MVAGTNGSLDKAGTTKMTQTNTLTAGIDTSKAKLDIAVHGRAECWQVANTPQGWRRLVAALVQIGVERVGIEATGGYECGVVAQLRAAGIMVLLLQPVQVRSYARVHLRRAKNDRLDAMLIAACAAGLDPPSIEPDARLAKLAGYLTFLEQIEEDIARSKVRLEHIKEIRLRRIVLADIARLRKRRRVELARIVAALRSHDDLACRLDLVGSVPGIGERTAVAIVVRMPEIGRISREQAAALAGLAPFDRDSGVHKGQRRIEGGRARLRRSLFAAALPAAFRWNKALIALYARLIARGKAHNAALVACARKLLVYANTVVQRGTPWTERPATT

SEQ ID NO: 79685 - protein, 334 aa, unidentified
MKQVNQVGVDVDSEALVCMMKRVGQPLPQATFANTAAGHKKFIRWVTKGARPAQICLEATGIYSLEFALALHEAKNVAVMVVNPRAIKDFGRACMQRAKTDAVDASGILEYLERMPFTAWQPPAPEILELQAINRRIVQLNTELTREKNRRHAVEFAGASANAIANDIEVNMHHLERRIERMHNSGLNLVRGVPALATKLAHLVSTKGIGEASAMRLLAELLVLPDDLAAPQWVAHAGLDPRPYESGTSVHRPRRISKVGNRHLRAALYMPALVAIQHEPNVKAFYDKLLAAGKKPMQAVVAVMRKLLHAIWGMLKHDQDFDGNKFFNIAAKTA

SEQ ID NO: 79686 - protein, 432 aa, unidentified
MTTHRLQVGIDFSQKKADFCLLSPDGRPLEQHRSFDNSLPGYSLAKALMIDALETYQFDGLDVSGEATGFLWLPFFNQLAADPDLEAYDLNLFLLNPRWVKWFKKCFPQDDKTDQKDSFYIADRTRTRRPDVTWSPQLDTLPLRFYTRLRFHLVQNLAREKCYFSAFLFLKASSYRRLKAFSNVFGVTSRQVLTQYTTLDELAAIPVEELTLLLHEMSGHHLRDPFDNAHKLHRVATESFPLPDALVLPVHRILDLTLEHIRFLEGQIDQVEGWITAEVQSHPTIRKLATIPGVGPVFSSGNGAEIGDTQRFLQGQKWDKKRKRYRPRNLRDAEDAVAKLAGLWWPRVASGDFEAEDRRMAKTGNRYLRYYLIQAANLMRQYIPEYAQFYHRKHREASKHHHKRALVLTARKSVGLVVGLLHRNEAYRPREV

SEQ ID NO: 79687 - protein, 338 aa, unidentified
MGEQYVGIDLHRRRSVIVRLTGEGEVLETIRVDNDPVALSLELAKAGPDPEVVLEATYGWYWAADLLQACGAKVHLAHPLGVKMFGYQRVKTDARDSTNLAELLRMGRLPEAWLAPPAVRELRELVRYRAKLVALRSGLKAQIHAVLAKEGVRVPMSDLFGVGGTRLLDQLQLGRAYGLRVASLRSLIDAYDQEITTLQRQVAAALAGDVGYLAIQAIPGVGPVLAAVFVAEIGDIHRFAAAPQLCSWAGLTPRHRESDTTVRRGPITNQGPRLVRWAAVEATQRLPRASKQAADFHRIADRRGTGIGRVAAARRLLTLVFYGLRDGQVRCLAPREAM

SEQ ID NO: 79688 - protein, 364 aa, unidentified
MNKCHLNTELSSHEGTRCQFNGSKCVIKLGIDVHQDFYVVVMQEGGTNPKPPQRFQKEAFLYWAAKLKSQGGQVHAVYEACGFGFGLQRKLMALGIQCQVVCPQKLDEQNRRVKTDGLDAKALCLKLDRFVQGNRSALALVRVPTEEEEQLRAIHRQREQLVKARKQLEAQGRSLMVNHGIEPVKNWWKPHIFAALKVPAWIKELLANTQPILFALQQKIAALTVQLQAAATPNQPRGLGAMSSVIIDREVGDWSRFSNRRQIASYTGLCPGEYSSGSTRLQSCVTKHGNPRLRAALVELAWRLVRFQPNYKPIIKWNQVLRRGALATGAARKKAIVAVARQLAVDLWRIRTGRLNGEKLGLIN

SEQ ID NO: 79689 - protein, 425 aa, unidentified
MNYKQNEKINQVKESTLVVGIDIGSTTQYARAFDWRGIELGKVFTFSNSREGFESFKAWMQRLQDKYKKSDVIVGIEPTGHYWFDLGAYLEDEGILLVMVNPYAVKQTKELDDNSQSKNDRKDPKVIAKLVTEGRYSAPYTPDGVYADLRIMVTNRKRLIREMTQIKNRFARWFAIYFPEYTDVFGDYEAQSSMLLLKKVCTPEAIVELGAEKINQIWRDAKLRAVGMKRATTLCETAKRSIGLKKGSLAARYEMKLLLEDYEYKKAQLDAVMEEIEKLCRKIPESEQMLAIKGIGVITVAGFLAEVGDVRRFESPRQIQKLSGLSLRENSSGKHKGQTTISKRGRSNLRAVLFNAAIPLIATNPEFKSLHEYYTTRANNPLKKKQSVIAISCKLIRVFYAILANGVTYDAQKMLSDIHRQPQAA

SEQ ID NO: 79690 - protein, 408 aa, unidentified
MLFVGDDWAEDHHDVEVQDEHGRAMRTARLSEGVDGMARFHELVGRFLPDDADPSQVLVGIETDRGPWVRALIAAGYQVYGVNPKQAARHRELVSLSGAKSDKADAHTLADMVRTRRHQLRQVAADSDIAEAVKVVARAHQTLIWERTRHTLRLRAALRDYFPAALAAYQPLTLTGSDALELLAKAPTPAAAARLTLTQISAALKKARRRDIPAKAAAIQQALRAEHLGQAEAVNTAYAATVRATIAVLQTLNAEIRTLDGEVEAHFGQHPDAEVYLSQPGIGVILGARVLAEFGDAAGRYADAKSRKNYAGTAPITRQSGKSKTVHARFVHNDRLVDALHMQAGAAILHDPGVRAYYHELRAREIGHNAALRQVGNRLVGILHGCLKTTKHYNQTTAWSHRSQPAAA

SEQ ID NO: 79691 - protein, 390 aa, unidentified
MDVLYQSCAGIDVHQANIVVCILHGPLTSTRPKRETATFDTTTKGLRACHDFLSQFHVEAVGMESTGVYWRPVWHALCDDFELILAQPAHMKAIPGQKTDKKDAHWIAKLTRIGLLPRSFVPDETIQELRELTRQRKHYVESRNRETNRIHKILQSGDIKLTTYIEDIMGLSGRNLLRLLVDGTPITPRIVHQSVYTSLKKKVPQLLEALDGYFSDHHRFMLKQSLEIYDFYQKQIEMLEERINGYLSQYKNHVEILDSIPGIDVITASVIISEVGVDMSQFPTAGHLASWAGLCPSNNESAGKKRSTKIRHGNSYLKKCLCQAAFAVKKQKGSPLADRFYQIQSRRGSQKATIALAHQLLKMAYILLKEQITYPEFLAQKKTTRDELVA

SEQ ID NO: 79692 - protein, 420 aa, unidentified
MEEVTEEPAEMVERVAALDIGKASLVCCVRVPHESRPGARRQEVRTYDTVTPALLELRDWLICQGVTRVVMEATSAYWKPPFYLLEDDTECWVVNARDVKNVPGRPKTDKIDSVWLCKLAERGMLRPSFIPARPQRQLRDLTRYRRTLTQERSREKQRAEKLLEDAQVKLSSVISDIFGASGRDMLAALIAGQRDPYALADLARKSMRAKISVLRRALTGHFTDHHAFLLGMMLDRVDALTGQIDALTARIEDAIAPLAARVAQLDEIPGIGVTTAQEIIAEIGADMSRFPTPGHLVSWAKFAPKARQSAGRSKAATTGQGNPWLGGTIGEAATSAARTSTFLAARYKRIVKRRGKKRALVAVGNSILTICWHLLSDPGAHFTDLGPDWHDRIAPQRRKHQLIAELERLSGKKVTLNDAA

SEQ ID NO: 79693 - protein, 396 aa, unidentified
MFYCGIDVAKHKHAAVILDDRGRVKRKVFTVDNTQAGLQSLINALKPYENNVQIGLEATGHYWLSLDDRLTEYDHPVSVVNPLQVSAYRRSGLRKVKNDSADAVWIADFVRISNAPTTSRDTPVLLQLKELGRFRYHLSDQIGDCKRKLLTILDRVFPEYEQLFSSVFVTSSRAMLGKATSAQDFADFDLQELTDLISKTSRGQFGAAKARQIQEQARQSVGVSFLADAAKVEIRCLLAQLELLEAQREEVARALEKLMADIPQHITTIPGIGLATGAAMLGEIGDIHRFESPSKLIAYAGIDATVYQSGQFKASEAHMSKRGSPYLRLALWQAALMSTRYDEELKAYYHKKRAEGKAHGVAIGAVCRKLLIRVYVILKENRPYEIRKLTPNTLDS

SEQ ID NO: 79694 - protein, 386 aa, unidentified
MQKLNDLNRSLAALEPDGTLIAVIEMSLSSWLVAGIVPGVERQPLKKLVVDESALLKLLHRWREEAEKAGRRIERIAVAFEAGRDGFWLARWLKARGIEAYVIHASSVAVSREHRRAKTDRLDTELLKRSFLGWLRGERDHCKMVEIPTMKDEDAKRPNREHDSLIGERRRIVNRMKAALVRLGIRGFNPKLKRATTRLDNLRTPEGEPIPPNALAELRRDMERRRLVNNQIRQIEEERLERIEKTPCDGPHVMVRLLARVMGVGIETADMLVHEVLSRNLRDRRAIARYAGLTGSPDESGRKRRQKGLARSGNVRVRRGMIQLAWRFLLHQKNSALTRWFRSRTENARRTRKPMIVALARKLLIALWRLVREGIVPDGVVLRAVQ

SEQ ID NO: 79695 - protein, 401 aa, unidentified
MKQLYAGIDWATRTHAVGVVDDHGGIRARFEVPNTGKGFGGLIRRLTKLQVAGVAIERPDGPLVEAMLDAGLRVVVITPRQVKALRSRYRATGAKSDTADALLLADVLRTDGHRLQPLIPDSDATIVLRALGRTRKDLQKARVALCNQLTAQLERCFPGAVGLFADLHSATAIVFLRRYPTSQAAATLTQATLTAFLRRIHYSGRTPVAVLLARLKTAPLAAISPDQATGRAVCVQALLDAIQACHSRERELEAEIIERLEVHADQQIFTSLPKAGHGVRAAALLSEIGDVRTRFPDEEALAALAGVAPVTRASGKLRSVGFRWACDKKLRNAIIDFADDSRHASPWAASIYAQALQRTRRHPQAVRILARAWIRVIWRIWQDHTTYDPTKHGGAVRLLTA

SEQ ID NO: 79696 - protein, 407 aa, unidentified
MLFVGDDWAEDHHDVCLQDGAGRVLAARRLPEGVAGIARLHELVAGHLDGDDPGQVVLAIETDRGPWVRALVAAGYRVFAVNPKQAARHREVVAVSGKKDDTFDAAALADMARTRRHQLREIAADSDEAEAVKVAARAHQKLVWERTRHALRMRSALREYFPAALEAYAELTLTGPDTLELLAKAPDPAAAARLTIPQISAALKRARRRGVAGKAQRIQAALRERHLGQSEIVTEAYAASVTAAAAVIAVLNEQIKTMEARVESLFRRHPDAGTYLSQPGIGVITGARMLGEFGDAPGRYADAKARRNYASTSPLTIASGKKKTVHARYIHNDHLVNAMHDQAFAAISTSPGARACYDELRARDIDHADALRRLANRQAGILHGCLKTGTAYDEHTAWGHRSQPAAA

SEQ ID NO: 79697 - protein, 355 aa, unidentified
MKKHSTGSMTMGIDLGDRISHVAVVDESGEVTERFRVSTTRAGFDESFGQRAAVRVVMEATTHSRWVSSLLGALGHEVVVANPRSLALIYKQQRKNDKRDAELLARVGRLDPQLLSPIEHRSDDAHADLSMVTTRDSLVRARTSLISCVRGMVKAFGERLPSCSADSFHHKAAPHIPQPLLPAVQSLLRSIAKLTEEVHLLDRKITQLSKTKYPDTALLQQVAGVGPITALTFVLTLESPQRVSQSRQVGAYLGLVPRQDQSGAVDKQLRITKAGNGYLRRLLVQCAHHILGRFGPDTDLQRWGNRLSERGGKNARKRAVVAVARKLAVLLHTLWSTGEQYVPVGYGKRPVAHAA

SEQ ID NO: 79698 - protein, 410 aa, unidentified
MQVKYARCAALDLGKDTLVAAIRLQEGRDVKQDCRTYGMTTTRLLELRDWLISCGVTHVLMEATGSYWKSVWRSLEGSFHLTLANPAQIRSLPGGKSDVKDARRMVELHAHGLIRGSFVPPADIDGLRELTRTRKQFVREISRHTQRIQKILDIANIKITGVITDVLGVSGRAMIKALIAGETDPHKLVSLAHPRLAASRAKLLEALDGRLTDNQRSLLGMHLRQVESLEKDIAQLDGEIGKAVEPFRQVVDRLKQIPGMSDVSVPAVLGEIGVDMSKFPTDGHLVSWARLCPRNDGSAGKIHSTRILKGAAWIKTLMTQAAWAASRKKDSYFRAQFLRLSRTTEKKKAIVAVAASMLTVIYHMIRDGTSYRDLGFNHFDTYDRAKSTKRLVTRLEKLGYNVQLTEVPAA

SEQ ID NO: 79699 - protein, 346 aa, unidentified
MSKHAVQAGNIAGLLKRFAQLKAKARARTDRDFPIIVIQEAGLDGFWIHRVLQSEGIESHVVDAASILTSRRRRRAKTDRIDGETLVRTLMAFKRGEPRVCSMARAPTPQEEDHRRVCRERRTLVGERVRHVNRIKGLLFAQEVFSYEPLRKGRRERLEELRTGDGRPLPVHLKAQIIRELDRLEVVLEQLKAVEAERDALLKPGTEEASPTAMLTRLKGIGPEAAAVLWSEGLFRQFDNRRQVAAYAGLAPTPWQSGSIDHEQGVSKAGNPRLRTTMVELAWLWLQNQPTSALSLWFHERVRRLGGRMRKTTIVALARKLLVALWRYTTAGVVIEGAMMKAAATI

SEQ ID NO: 79700 - protein, 321 aa, unidentified
MTPPTDTYVGIDVAKRHLDVSVLPAGQRWRAEYTEAGVADLVTRVQALTPQLIVIEASGGYESVVATVLAAAALPVAVVNPRQVRDFAKAIGRLAKNDRLDADVLALFGERVRPEIHPLPDRALQDLTALVTRRRQLIEMLTAERHRLVLATGTVRTSVQRHIRWLERQITDSDDNILRAIQRSPVWRVQDDLLRSVPGIAHRVSAALLAHIPELGHVSRRKIAALVGVAPFDDDSGQHRGRRHIRGGRAAARQALYMATLVATRHNPVIRAHYQHLCTVGKEKKSALVACMHKLLTIINAMLKYQQSWRAATAAAAPLDL

SEQ ID NO: 79701 - protein, 347 aa, unidentified
MSNVTLLAIDLAKNVFQLHGTDASGKAVIKKRIGRDKLLQFVANLNPCDIYMEGCGSANYWSRRFKTFGHKVRLINPKYVKPYVKRSKNDKNDAIAIASAARDPNMSFGEAKTEEQQDIQSTHRIRSQLIGQRTALANQTRGLLAEYGIIVAKGISHVRKYLPIILGNNEYNLSYLMMRNIQELYKSLLSLDEKIKRYDDMIEELFKGNETCKRLVGIPGIGKLGATILAAVLGNGSGFKNGRHFAAFLGLVPKQHSSGNKEKLLGISKGGDTYIRTILIHGARAVLICVSKKTDNPSLWLKGLKARSGSNVAAVAMANKMARTAWALVRGNCSYDSSYKPSLYMTA

SEQ ID NO: 79702 - protein, 341 aa, unidentified
MTIVMGMDQHRAQISAEWIDTITGEISRARIAPADRAGVRRFLAQFKNADLEVALEATTGWRFVVEELDRIGADAHLAEPAETSGLKGKKQRAKTDWADARHLRELLLIGRLPESWIAPAHLLDLRARVRCRHTLVEQRTEWQRRMHSVLYHHGCPQTRKLLTLAKRDWIAGLTLPAAAHEQLTIALEMIDAIEIQLGPFDLALREYARKQPGCRTLIEELYGIGELTSVTILAELGDTRRFQNSREAVRYSGLDITVHQSDARSSPGHLSRQGPPALRWALYEAAQAARRPSSPDRAYYLKTAERIGGNRACIAIARKLLKRSYHILRGLGDQALEPVTS

SEQ ID NO: 79703 - protein, 341 aa, unidentified
MYPTTIGLDLAKHIFQVHGVDAAGKVIIRKKLRRADLVEFFKKIPACLVGMEACGTAHYWGRELASLGHDVRLMPPAYVKPYVKRGKNDEVDAEAICEAVTRPTMRFVPIKSAEQQSILMLHRTRDLFVRQRTMLVNSLRGQLAEFGLIAPQGIWRIPELHALAQDTDNSVLPEPARACAELIMMQIEDLQAKIKAIERALMARHRANEMSLRLATIPGIGLITATAMVATVVDASAFKSGRHFAAWIGLVPQQNGTGGKVHLGRISKKGEPYLRRLLVLGATAVVRYARDKPEFAGWVNALLARRPARVVTVAVANKLARIVWAIMRRGGSFRQRPLGIA

SEQ ID NO: 79704 - protein, 393 aa, unidentified
MICVGIDVAKDKHDCFILSSEGEVLADVFTIPNNAEGFDTLLQTIHRCACPEDKIKVGLEATGHYSYNILGFLLDKGLHTFVINPLHTNLYRKSLSLRKTKTDRVDARTIAAMLMSDVDLKSYTDTAYHNEELKSLTRYRFDKVKERAKLKQSVSRLVTILFPELEKLVPTLHMASVYALLSEFPGAKQIARAHLTHLKALLNDASKGRYGRDMATELRDAARCSVGSVMPAKSLELQHTIRLIRELNTEIEDIESAIQTIMEEMQSPITTIPGIGIRMGAMILAEIGDFSRFDSPDKILAYAGMSPSTYQSGQLSLSGAYSHMEKRGSRYLRYALYNATKYVCLWDPTFEAYLAKKRAEGKHYNVALSHAAKKLVRLIYAMEKSRQPYNSVA

SEQ ID NO: 79705 - protein, 302 aa, unidentified
MQAVTTIGLDIAKSVFQIHGVDAAGNVIVRRQLKRRYVLPFFQKLPPCLVGIEACASSHHWSRELQALGHTVRLMPPAYVKPYVKRHKNDAADAEAICEAVTRANMRFVATKTPEQQSCLMLHRTRHLFIRHQTSVINAIRAHLAEFGIVAPVGRNGVEQLLDVAADASDKRLPEAARACLLALGAQLRTLKAQILNFDRQIMAWHRSSEASKRLDEIPGVGPALATALVASVADPKAFRSGRNFSAWIGLVPKQHSSGGKDKLGSISKQGDRYLRSLFTAGALSVIRYAKIPKSALAKRLP

SEQ ID NO: 79706 - protein, 343 aa, unidentified
MMNDSELNSTELLTSVIKRSDGAPLGFAGIDVSKATLELALCDGGKTIVFDNDARGIRALLARLKAVEPLGAIVLEATGGLEREAALALCADGFAVMVVNPRQAHDFAKSLGYLAKTDAIDARALAQFARTLYQSDKREVLLMRMPEPQQLNLMVLVVRRDQLVGMRVAEGNRLSGAGKVAQKSIRVVIALLNREIAKLDREIGNSLGGHFAEKMKLLKGLKGVAQGTQAALMAGLPELGKLTRRAIGKIVGVAPLNRDSGTMRAKRTTWGGRALVRSALYMATLTAVRHNAVLRAFHHRLREKGKPKKVVLVACMHKLLSIMNAIFKSNTPWDPNFHNPTNA

SEQ ID NO: 79707 - protein, 337 aa, unidentified
MDDITTIGIDLAKSVFQLHGVDADGRVLLRRQLRRSQMLEFFQRQPPCLIGMEACASAHYWARELRKLGHDVRLMQPSYVKGYVKRGKTDQADAEAICEAVSRPSMRFVPVKSEETQALLMIHKAREFLVRQQTQIVNAMRAHLGEFGIVVPKGIHNVERLIMACEQTDLPAAAHKALSLLADQLVDTQKKIEALTADIRADARANEAAQRLQTIPGIGPITASALVSALPDVADFKSGRDLSAWLGLTPKPHSTGGKERLGRISKMGNRYLRRLLYLGASAQVSVRRRGEAGEDWLWKIIQRKKPKQAAIALANRMARTAYALMKNRTEFRAAQAA

SEQ ID NO: 79708 - protein, 401 aa, unidentified
MDGPQRHRRARMRSLLIPQTREPSVSKITRIGIDTSKSVFVLHGVDAAEQPVLRRKLRRSQVLDFFRKLEPTKIGMEACGGAHYWARELQALSHEVVLLPPQYVKPYVKRNKNDAADAEAICEAMSRPTMRFVPVKTTEQQAALMLVGRRDGLIVRRTQLSNTIRGYAAEFGLTSAKGLDKIEPLLARIAASAELPKLAKELFAGYRREYAQLERQIMQVEARLMAWHKNNELSRRLVQVPGIGPIGATLLAMKVTNPRAFRCGRDFSAWIGLTPKDHSTAGRTRLGVITRAGDEALRSVLVVGATALIQQAQKGRGYCPPWLVELLKRKPPKLAAVALANKTARVAWKLMVSGERYNPACIKAQSATSGGRDAALCGGSASRPPLAPRNTSRKVVAMTRG

SEQ ID NO: 79709 - protein, 418 aa, unidentified
MFKIFRRNCCGLDVHKTWIYACIGITDRNNRTSYKEARFSSFSSGLRNLADWLALHSCTDVCMESAGKYWIPVFNVLEKTCNVVLAHPKYTKPQKGNKTDRKDAKWICDLFMCDMIRPSFIPPLDIRQLRDLVRYREKLTYCLVGEKNRAQNCLTVSNLKLDDVFSDVFGKSARSITEYILSHPGETFDVTPFVDHRCKHPIEEIQAAVDGAVSKEQAVKLRECLDHIDELICHKAHIEKQIFAIAESYAFPLELIRSVPGFSANPLTAIALISEIGVDMSVFPTAKHLSSWAGCCPRNDQSGGKIKSTRISRAGSFLKPLLVQIANSLVRSDKHPEFSERFRRIKARRGHKKAIIAICRMILTAIWHILSKLEPYSSDGFVTVRPAEPNKVLSTAQALNLLKSRGYIIKDDVPLTVS

SEQ ID NO: 79710 - protein, 337 aa, unidentified
MQDQPGALHVGVDLALEKNVVIVINEKAQRLDHFSFPQERGGYDYFLQRLEGLRQKHQASEVVVAMEPSNYFWKLLARELEEKRIPYRLVNAYTVKKHREGNQLDRSKDDQRDAGQIAELSRNGHYTQTRLQKGVYEELRQYATLYDQLMQAIVREKNVLWGLVGQVFPELFQVFKDLSKETAEALLGSCVPAANIRKLSLESFIALVRASYSGKKLCVAKLRRVHQLAATSIGVTEGLLAIQQANQVHLAELQTFQEQLKRVISAMAACLAPMPETPYLLSMKSLNTVSAALFLAEVGDPYRYHSSAQWVKLAGIQPAPNNSGKKQRSQTPMSHQG

SEQ ID NO: 79711 - protein, 343 aa, unidentified
MWSIHYVGLDVHKKMVAFCVKTADGTIVEQGMVAATREALTEWALRRTTPWIGVLETTLFAGWIYDHLEPYAVELKMAQSRRLEAIASAKKKNDHVDAAMLADLLRCNLVPECYVLPRELRDLRVQLRVRNFLLQQAVRLKNRLAGLLMESGEPYNKQKLHQRRYFGELLDRLEHVPEPVLDLLKTVRGLIELFDRAQAELLRGLVAHPDLQERVRRLMTIPGVGQVTALTWALEVGEPERFASVRKAISYCGLCSAQDESGGHSRRGPLSKQRNAHLQTVLIEAAKLAPRWNPWLAQVHQEELARGSANRATVAVARKLVALLLAIDKRGTDYEDRASAVAA

SEQ ID NO: 79712 - protein, 400 aa, unidentified
MMTPDDIDVWVGLDVGKSAHHAHALDHDGNTLYDKPLKQDEKAIRTMLGKLSKHGRVLLVVDQPNTIGSLPLTVARNMGIAVAYLPGTAMRRTAQLLPGDAKTDRRDAHVIAWAALKLPETLRDAGPDDETLAALKLLAGHDEDLAHESTRHVNRLRSLLLQTHPAFERALKGERITRDATLALLERYGGPMGVKRAGIEDVKDWAKSNGLRAGRIIDDMFKAIGEQTVTVPGTLMAETIIPSIAHDIKTTRARRRQVGRQVEKLLEDHPLLTVLTSMPGIGVRTASNILLGIGGDIANFKSSAHLAAYAGISPVTGQSGTSIKGERPSRRGNKRLKNALWQTAFVASTKHPPSVAYYKRKREQGKHHNAAIICLARRRCDVIYSMLKNGTLYQEPALVA

SEQ ID NO: 79713 - protein, 345 aa, unidentified
MELHTIGIDLGKTVFHLVGLNLRGEVAVRKKFSRIQLLRFTANIHVELIGMEACGGAHFLGRALREQGHEVRLIPAQYVKPYVKTNKSDYIDAEAIAEAVARPTMRFVPIKTDDQLDLQSLHRVRERWVMRRTAVINQIRGLLLERGITLRKGRHHVHAALPLILEDADANLSGAVRMLLAQLKLDLDQLAVRIDEADAVIQKTAYENEACRRLVAIPGIGPVTATALIAAIGNGGAFHKGREFAAWMGVVPGEHSTGGQQKLLGISKRGNSYLRRLFVQGARAVLQQRTKQSSGLSTWLAQLTSRTHRNVAAVALANKLARIAWAVLAKGEQYRPSVLADVAAA

SEQ ID NO: 79714 - protein, 373 aa, unidentified
MRIIGMDIHRMAAEVVSLLDGDIVKLGRVQMLRDKLEEFARKELTHDDHVVIEATGNAAAVAEVLSPYVDRIVIANPKQVHMIAHAKVNTNTIDATVLARLYASGFLPEVWVPDPGTLALRRQLTRRTQLVRQRSRLKNLIQSILHAHLIPPCPHGNLVGISGRKWLMRQILPADERAAIERHLGLINQVNEALTVVEADIAVHALQDPTIRRLMTLPGLDVTVAASVAAAIGDIRRFSDPQRLVAYLGLNPSVRQSGEGPAYHGRITKQGRGHARGMLVEAAWAAARSPGPLRAFYKRIASRRGKHIAAVATARKLVMIIWHMLSKDADYIWARPALLARKFRSVELRAGLPMRIPTMARIYSDLMPRSVPI

SEQ ID NO: 79715 - protein, 352 aa, unidentified
MKQLFVGCDAHKHYSQLEVQDSTAQVLRRIRIDHSRGAITSFFSKLPRGTSVALESVGNWYWIADEIEAAGCLPLLTNPGKAKSMMGNVNKTDKLDASGLTTLLRLGSLPSVWLPPAELRDQRELPRTRMALCAWRTRIKNRIHSTLAKYALSPEDGSTLFSQRGRTWLDTALSSLPPETGRCLTQELQLLDSLSEQISQLEDRIRAQISLTATMQLLKSVPGIGDMLAIVVERELGTISRFFSPQRFSSYSGTTPRVSSSGGKTHYGKMRTESNQYLKWAFIEAANVVAAHHAQSGWTNRHCCRLYVRVRARKGSSVAIGAVARHLAESVYWVLKKNEPYKEPSKVSPRQE

SEQ ID NO: 79716 - protein, 343 aa, unidentified
MKLQVLGIDLGKTVFHLVGLDSTGRVVIRKRCSRTQLLAFTANLQVQLIGMEACSGAHFLGRALREQGHEVRLMPAQYVKPYVQTNKSDYLDAEAIAEAVQRPRMRFVPIKTEEQLDLQALHRVRERWVMRRTAVVNQIRSLLLERGLTLPKGRSHLDEQLPRILEDAELNLSDSFRVLLAQLKLELEQLAARIEQMDRVIQKTAKENEACQRLTEIPGVGPVTATALIGAIGNGSAFGKGRALSAWMGIVPGEYSSGGKQKLLGISKRGNKYLRRLFVQGARSVLQQRHKQAPGLRDWLTQLLGRTHQNVVVVALANKMVRMAWAVLCKNERYRAPVLAVTT

SEQ ID NO: 79717 - protein, 417 aa, unidentified
MKEEFTFYVGVDWGVEFHQACILDAHGEKICQRRIEHSGPGMLEFCDFLQALTNGEASALAVAIEVPRGPIVEALLEHNYAVFSINPKQLDRFRDRHTVAGAKDDRRDALVAADSLRTDQHCFRRVRPEHPDVIRLRELSRTEETLGIDLRRCVNQLSQLLLRYFPQLLRLCSTPDEPWLWALLELAPTPQQAAKLTEKRLKQLLAKYRIRRWTAEKVGEILTAPPLPLAAGSAEAISEHALLLLPQLRLLHLQRKQVADRTQQLLDQMATSTNDFPMSQEHRDIPVLLSLPGVGRIITATMLAEGSHILSLRDYHAMRAHAGIAPVTKQSGKSRQVLMRYRCNQRLRNAFYHWARASIQHDPRSKHHYARLRQVGHDHGRALRGVADRLLAMLIAMLKSGQTYDPNRRSTANLTAA

SEQ ID NO: 79718 - protein, 412 aa, unidentified
MDLVHERCAGIDIGKADCKVCIRVPGRNGRRHTEIRTFSTMTEGLLALREWLLSEQITLVGMEATGAYWKPVYYLLEEQTETWLLNAQHMRNVPGRKTDVRDCQWICQLIEHGLVRPSFVPPKPIRQLRDLTRYRTEVTRERTREIQRLEKLLEDPGIKRSSVVSDLGGKSARTMVEALIGGERDPQVLARLAVGALKDKEAQLVQALTGFFTDHHAFLARTMLDRIDAATATVKGLTAEIDSRLEPYRRQLELLVTIPGISLTAAQVVVAEIGVDMQRFPTAGHLASWAGVCPGNHESAGKVTSGRTRHGDAWLKGVLGNAAAAAARSKNTYLAAQFRRLVGHRGKKRALVAVEHSILVAVWHILTRDTPYQDLGADHFINRIRKSRQTRRLVGQLTQLGYDVTLEPRTDG

SEQ ID NO: 79719 - protein, 415 aa, unidentified
MLKIVYPICCGLDVHRDFVYACIAATEDGVTTYKSYRFSTFTKGLRELLSWLLQNNCRDVCMESTGKYWIPVYNILESDCKIVLAHPKYVKAIRGKKTDKKDAKWISDIFKHDLVSGSFIPPADIRQLRDLMRYNVKLTSYTTGEKNRAQNCLTVSNLKLDSVFSDVFGKASSNIIGRILANPSEKISDVSVFRTKGMKATDEEVLDAVDGEMCPEQAEKLRIIRSHMDGLELCKANLMSLILTTAEKYIPEINLVSTAPGLTAYSAIAVIGELGVDMSVFPTSKNLCSWAGLAPQNDQSAGKKKTTRISRAGVYIKPLLVQCALAAIKSKNKHPEIVKRYNALKKRRGHKKAVIAIARMLLTAIYNILKKHEPYNPELYRKSDTPPEHRNVTIEEAVFILQRQGYIVSSPIPVG

SEQ ID NO: 79720 - protein, 343 aa, unidentified
MHSVTTIGLDIAKSVFQVHGVDAHGKVVVRRQLKRRYVLPFFKKLPSCLVGVEACATSHHWSRELQALGHTVRLMPPAYVKPYLKRQKNDAADAEAICEAVLRPSMRFVETKTPAQQSCLMLHRTRHLFIRQQTAVINAIRAHLAEFGIVAPVGRNGVEELLDVVADPNDKRVPEIARECLAALGAQLRMLKTQVLQFDRRILAWHRSNETSKRLDEIPGVGPALATALVASIANPRAFRSGRDFSAWVGLVPKQNSSGGKERLGSITKRGDRYLRSLFTAGALAVIRYAKIHGAKHRPWLTRLLARRPTKVAAIALANKIARMAWAMMAKGERYREPVALAA

SEQ ID NO: 79721 - protein, 379 aa, unidentified
MTVYIGVDLHVRTQTVCWVDTADGEQHEVPLDHQRDDVRAFYAQFAAPAVVGVEASGYSLWFHRLLEELGHRLLVGDALAIRQCARRRQKNDRRDARLLLDLLLHEEFPAIHIPAPASREVLALLRYRHRLVRIRTMLRNGLQAVALSHRLRLGPKLFTVGGLQQFAALPLTGAFAVQRQHSLALLASLAEQVLAVEAQLQDRAQQDPRVLRLRTHPGVGLLTSLAVVHTLEPVSRFDRARRVAAYCGLDPKEHSSGDTQRWGHISKQGNRLLRFLLIEAAHTAIRGDDDLCRFFFHLQARKNASIAIVAVARKLVLRLYRMLRDETDYTQFRRRGRDARRAREDTSQAASGLPSDGAVRLSGLAPDRAKLSSGATRLE

SEQ ID NO: 79722 - protein, 363 aa, unidentified
MSKQGAVLATKKSARRVLVGATTVGVDLGDQWSHYCILDEDGEITEEGRFRTSESGVAKRFEEMDHARVAMEAGTHSIWISEQLKEYGHEVIVANVTELHAISRNDSKSDRTDAEKLARYARLDPRILRPITHRTVEQQQALTMIRARDVLVRLRTSVVNAARGLAKPCGHRLPASSTRSFPARCAGLLPEGLAAALEPLFEQIAHMNAQIKLYDRAILKMATVTYPETQALTQVHGVGPLTAVTYVLTLGSKERFERSRDVGCYLGLRPKRSQSGDRDPQLRITKAGNEYLRRLLTECANFILGRFGKDSSLRRWGLHLAERGGRNARKKAIVAVARKLAVLLHRLWVTEQPYVPLYEAQAA

SEQ ID NO: 79723 - protein, 400 aa, unidentified
MKGNCIAIDVSKDKSHIQGFKSWDEPISKAIEISHDKEGFEKILEMAEKFGGKEEEKAKVLFEATGIYHRGLQNYLEQNNLRYYIVNPLQSAKCRKQDLRTKKTDIRDCKNLAKMYYTMELRETTLEDEKYYTMRQLSRYYEDLLGHLRKTKVSFNETLDIVYPKYKDVFEHIYTTSSMSILKKYPHPNQLARKHPETLVKQLLKTREHLEPWCMTKAEGLIRYAKGCVSGCKETDINVQIMIEKLEDVEHYLNLSAKTLESMIQIAETIPNYKVIQTIPGIGKNLSARIVAEIGDINRFSGSKQLIAYAGIDPIIYQSGQIDGLHLRISKKGNKRLRCLLYLAVAGNLRYKNEMNIIRDFYNKKTQQAPPLCAKAASIACANKLLRIIYGMCKTGTVFK

SEQ ID NO: 79724 - protein, 343 aa, unidentified
MDEYDGRQFVGIDLHRQRSVIVRQSESGELLSAVRIVNDPGALRLQLEQAGSDPEVVLEATYGCYWAVDVLHECGAHVHLAHPLGVKGFCYRRVKNDVRDAADLADLLRMGRLPEAWIAPPQTRELRELVRYRAKLVAIRSGLKAQVHAVLAKAGVLIAASDFFGVTGRQRLAKVPLGAAYAQRISSLLELIDILDGHEARFSAMIAEPLRAHRGYQAIQQLPGVGSVLAAVFVAEIGEVHRFSGPTHLCSWAGLTPTHRESDKVVRRGHITKQGSKLVRWAAVEAIQRQPDTAKITRDRKRIEARRGRNIAKVAAARKLLTLVYYGLRDGHIRALAPRQVAA

SEQ ID NO: 79725 - protein, 386 aa, unidentified
MKRNDLSRSLVAFDQASTMVAVVELSFRSWLVAGLVPGLTRQPLKKLGPDAQALLTLLRRWQGEATKAGSTINRIVVAFEAGRDGFWLARWLRARGIEAYVIHPTSIPVPREHRRAKTDRLDTGLLMRAVLGWLRGEPKHCSMAAIPTIAEEDARRPNREHQTLVQERTRIVNRMKATLIRFGIRTFNVKLRKASDRLAVLRSPEEEPLPPNTGAELRRDMARLQLIRDQIKVIEEARLQQLKHAPRKGTHPMLLMLAEIIGVGVETADMLVHEVLSRKLRDQRAVARYGGLTGAPDESGTKRREKGLARAGNARVRRGMIQLAWRWLTHQKNSELAQWYQTRTTGAKPAARKTMIVALARKLLIALWRYVTTGEMPAGVTLHPAT

SEQ ID NO: 79726 - protein, 461 aa, unidentified
MQSESSAFRELKADLRTRRDRLRVGIDIAKRQHVAQVRLAHTRILEQRFDVANTGADFERLWRHLQQRQAETGVTEIVCAVEPTGTYHEALAQFLEAHGVDVVLVANQVAHHNRRTLDGTWGKSDPKDAHNLCDLLERGVVLFYSLPDERIATLRRLVRLLRAARVELGACKARFRNTLLPRLGPAGDAVPPALLAVLPAPLRRLCPVPAETPRRRGRPRTADPGGEGGAPAGPLPPGLAGECTDLVARLTAVQARLATIEAELVRVAQPLPAYTLLRTIPGIGPTLGAILLAELGDIAWYTHFGQLRKLAGLDIQRVASGQWAGTGRISRCGRPLLRWALYQAALGAARTPCWRARREVLIAKRQGDRFAFLKANVELAAKLLRLVWGVWRSGQPYDPARVDGAPAARPAIASPKARAGRRGAPPLDKGQAEIVEPRGNQAGRSSGRRALRPRSGTSRRA

SEQ ID NO: 79727 - protein, 428 aa, unidentified
MTQSPNPTPPTFAAFVGIDWADQEHAVCLSPADTLKPEQFTIHHTPEAIAEFVAMLRCRFGGQPVAIALEQARGALLYALMGHEFVRLYPIHPATSKRYRDAFAPSGAKDDPVDARLIWELLVKHRDQLRPWQPQDATSRQLALLCEHRRDLINQRTRLVQQLQAALKTYFPQALDWTGEDLASVMATDWLVRWPTLEQLQRVPPKTVRAFYYAHHCRRPDLVQQRLHQIKTAQPLATDAAVIAAHSLRVQSLAHQLRPLLASLAAYDQQIQALFATHPDAAIFTSFPGAGECLAPRLAAAFGTDRDRFPDADSMLRWSGIAPVTRRSGKFQTVHRRYACAKFLRQTFHEFARCSIKFCEWARLYYETQRAKGKGHHAAVRALAFKWIRILWRCWRDRRPYDDSRYTAALRRSGSPLAKLLPLPSQQP

SEQ ID NO: 79728 - protein, 346 aa, unidentified
MQNDTLVAVDIAKEVFEVGVSDRPGHVARRRRLARYEFLEFFAQLPQATVVMEACGSAHYWARRIEEFGHVVVLLPPQYVRPYVVRNKTDRTDVDGLLEAFRNEQIRPVPIKTVTQQVLGTLHRLRSGWLADRTRAINSLRGLLRELGFFIPEGRKHVLPEAWEIIQDPKHGLPDALKPSLSSLCQEIVSHSTRIEEIEAQLEALAKQIPVVARLLSVPGIGLLTATALYAFIGDVSRFPSGRHLASFIGLTPREYSSGLRRRLGRISKRGDTYLRMLLIHGARSILWHAKRMKNRDRLRAWALRLERKLGHNKAAVALANKLARITWAVWKNDRNFEPAPELQAA

SEQ ID NO: 79729 - protein, 313 aa, unidentified
MEEFPATAAGYAGLLGWLGGFGTVALVGIEGTGSYGAGLARHITAAGVRVVEVDRSDRQDRRRQGKSDPLDAVSAARAAQSGRARGAPKGRDGAVEAIRALMVAKRSAAGERTRTINQARALILTGPDDLRARFAGHTAAALVTAIASLRPRPGDAAGHATRVALRELGRRAVFLDGQLERLDELIVPLVTARAPGLLALYGIGPNTAALLLIAAGDHPERLRSEAAWAHLCAAAPIPASSGKVTRHRLNPGGDRQANHALWRIVFTRMGSDPATRAYVERRTKEGKSKAEIIRCLKRYVARQVYPHLRPAAD

SEQ ID NO: 79730 - protein, 355 aa, unidentified
MDREKYIAMDVHQASISVAVRDAAGKLIVESIIETKAAAILAFIRGIQGSLWITFEEGTSAAWLYDLLKPHVTKVIVCDPRKNALLNAGNKNDRVDARKLSDLLRAGLLTPVYHGESGVRTLRELCRGYLTINKDLTRVMNRLKALYRSWAIPCAGDKVYSPRHRNTWLEKLSEAGVRRRAEQLYQQLDALVQIRREARRELLAESQKHSATPLLRQIPRLGPIRVALLIALIQTPQRFRTKRQLWAYCGLALQTRASGEYRFTGGELQHSKRVPAMRGLNVNHNHDLKNVFKSAAMHVSTSTDPLGDFYRGLLAKGMKPTMARLTLARKMAAIVLSVWKKGARFDPGKLKQQAA

SEQ ID NO: 79731 - protein, 355 aa, unidentified
MKYYTSTTQFNCGIDLHARQMYVCVMDRDGKKLVHTNVRNNDFAFFLKLVAPYRHDLTVCCECMFGWYWLADACQAAGIHFVLAHALYVKAIHGGKNKNDRIDSEKLTHLLRTNLIPPGYVYPAQKRPLRALLRQRILYVWNRSELLSRIQSHQLAYNRPTFRQTPYNREPWAEQLLAQEDHPARQFALQNDLALIGHYDTQLATLEKELLKLTQQTASRDFTLLQTTPGIGDYLGLTILHEIGDIARFPTVKDFLSYCRLVKGTVASAGKIKGLRGAKLGNPYLRWAFGEAAVIAKRDHVVLGPLAQRLEARMKGNKFKANTVLAIKLARAVYFMLKNKTAFDPDRLTAVLSRN

SEQ ID NO: 79732 - protein, 456 aa, unidentified
MRKKKMPGNKIVRLDALKHINLNAAGIDVGDSQMYVAVPEDRDEQFVRVFGTFTRNLLSLAQWLKDCHITTVAMESTGVYWIPLFEILVEHGFDVLLVDARKIKNVSGRKTDIQDCQWIQQLHTYGLLHGSFIPEQNMRALRDMVRHRANLLRYRASHVQHIQKILQQMNLKLTNVISDITGTTGMHILRAIVEGKTDPAYLASFRDPHCKKSQTEIELSLQGNYRAEYIFQLKQILDLYDYYSSLVTQLDAHSETMYAQLPSLINPKEHPLKPLKRNVHKKTKNAPAFDLRTQLYRICGVDLVQVDGLNTSTVQDIITDIGTDMSKWKTSKHFCAWLRLAPNNKITGGKVFLSHTPTSKNKANKALRLAAFSLANAKCALGAFYRRIRAKYGAPMANIATAHKLARIIYKMLKDKVEYRDPGEDYYYEKFKVRLIRTLKDKASSLGLQLIPAPTQ

SEQ ID NO: 79733 - protein, 396 aa, unidentified
MAAAVQVVGGVDPHADTIHAAVITVVGRVLGDAEFPTTADGYRDAITFLTSSGEVERIGVEGAAGYGAGITRALAAAGLAVVEVERPTRSARRRAGKSDPLDAYHAARSVLAHRTSPVKDPAIDGLRALHLARNSAVKARTAASNQMKAILIMAPEPVRARFRDLSTDELVPAVLRCRGHYADPTTANTLVALKILAERHRDLRAQITTLTDRIDPLVTAANPALRAAFGVGPQVAAQLLVTAGLNPNRLTSEPSFAALCGVAPVPASSGKTRRYRLSRGGDRHANSAVHRIALVRMAHHQPTIDYVHRQTARGRSTKEILRMLKRAICREIYRHLTRPLPIPDWTDLRLIREAKNLTLTAAAAHFGVWPTVLSRLERGLHRNDELAQHYRTWLAA

SEQ ID NO: 79734 - protein, 332 aa, unidentified
MRYIGLDIHKKHTQACVRNEHGNILSSERFRTESEDIAEFFAKQEVHGPLSVAMEATGFYFWIHDRIVARGHHVMVVHPARIKPLMKAKAKNDRNDASMLAELLRSGCLEGIYVPPPEIREMRDLTRHRESLVRKKGDLKREIISVLDQRGVKAPSDYRVNFTKKYIEWLRSLNDFVINEKLDLLEATVGKIGNVERLIEERWGEDEDVQIIRSVPGVGLVTATVIKAEIGDVARFPSAENLAAYVGVSPTTFQSGEKEWSGPARHGNNRVKHVLIEAALVHTRSCPDSKISRYHLRKRDSIGRKKANVATGRKLVEAIYFMLTRRQTFHAH

SEQ ID NO: 79735 - protein, 354 aa, unidentified
MACHGPQRRGRPPVDEYGGRQYVGVDLHRRRSVIVRMTPEGERLGPPVRIDNDPFVLAAQVASWGESPEVVLEATYGWYWAADVLAEAGAVVHLAHPLGVKGFAYRRGKNDERDAADLADLLRMGRLPEAWIAPPAVRGLREAIRHRCKLVAIRSGLKAQVHSVLAKQGVRVPVSDLFGVGGQQLLDRLRLDAAYAARVDSLRRLIDTFTFEIDVLAARTAADLRGHEGWQAIQTIPGVGPVLAAVFVAEIRDVHRFRRPEQLCSWAGMTPRHRESDTKVHRGRITKQGNHLLRWAAVEAVQRLRGEPLGSARARIAERRGTNIAKVAAARKLLTLVYYGLRDGHIRCLQPHPA

SEQ ID NO: 79736 - protein, 497 aa, unidentified
MVMRVLPFVGRSARRFAFEKSYSDLICAIFSRSGAPNRNQTDGVAAQRVDNYEYMASASSAGGHESLLALSVWINAMHRKRVHKHAFCVRKRHAVLTQIPRRLGRIKFKVHWLVTVCMLCIRVKASLLERLTNVRDFPDVARHWSAKIEVCVHVQSQPRRGSLVSNVTTVGIDLAKNVFSLHGVDARGVVVLRKTVSRARLASFVAQLPASVIGMEACSGAHEWARRFAQHGHTVKLMAPKFVVPYRKSGKNDGNDAAAICEAVSRPSMRFVPVKSVEQQTMLTLHRVRLGFVEERTATINRIRGLLAEFGVVLPQRAMEVRRGAAASLEQLPAAAARALSDLLAHVRVLDERVNEYECELEQHARRDERAQRIQSLSGVGPISASAIVASVADAHEFKNGRQFAAWLGLTPKQYSTGGKTRLGHITAHGDPYLRTLLIMGARSMLQTALRRTDRLARWALGVRARRGYHRACIAVAAKHARIIWAMLAKNEVLQLS

SEQ ID NO: 79737 - protein, 449 aa, unidentified
MMEPQEIEDEEHEQVLERVAAVDVAKASGMVCTRVPHQARAGKRRTRVWQVDATTNAILELGGHLAAEGIEKVTLESTSDYWRIWFYLLEAAGLDVQLVRARDVKQAPGRPKTDKLDAVWLAKLTERGMLRPSFVPPAEIRQLRDYTRLRTGLTRERTRHYSRLEKLLEDALIKVSAVASKLDTKPVRDMLEALIAGERDPQVLASLARGRMRSKHDRLVQALTGKFDDHHAELARMLLDQIDALSAQTGTLTTRIGELIAAIPAAQGIDADGSTGPGAGRGPGAPVLPAVDRLDEVTGIGREAAQAIIAGIGLHMSIFPTPGHLVSWARISPQTVQSGAKNRPGKTGKGNPYLKGVPGEAAAAAGKTGTFLGERYRRLARRRGKLKALVATARSILVIVWHLLTDRAARYRDLGASYHASRIDQNRKMRNHVRQLEALGYTVNLTQAA

SEQ ID NO: 79738 - protein, 338 aa, unidentified
MQAYAGIDLHSSNSYIGVIDDQDQRLYGKRMANSINQILVALEPFKENLEAVVVESTYNWYWLVDGLEQEGYKVNLANPSAIKQYEGLKHTDDKWDSFWLAHMKRLNILPEGYIYPKQERPIRDLLRRRLLFVRHRTSQILSLQSAIARNLSLKMSGGDIKKLKEEDAEALFDSPYLVLTAKSNIAVIQFLTKTIREIEKALMSQIKLRKEFRLLKTLPGIGDILGFTIMLEVGDISRFSKVGNYSSYCRCVKSEKLSNGKKKGENNRKNGNRYLSWAYVEAANFAIRFSQEAQRFYQRKMAKTNKIVAIKALSNKLARASYYVMRDQVAYNEGKLFG

SEQ ID NO: 79739 - protein, 339 aa, unidentified
MQVTTIRLDLAKNVFQVHGITANGEIAFNRAIRRAQVLAYFERLDPCLIGIEACSTSHYWARELLKLGHKVKLIPPVYVKPYVKRGKSDATDAAAICEAVTRPTMRFVEVKTPDQQAILALHRTRDLVVRQRTQTNNMLRGQLAEFGIAFAQGVGHATQSEKRMLGGDGPDLPEVADAVIAELYEQLLFLQGKITGYTRRMMRTAQREERVALLQTIPGVGPITASAIVATVGTGRQFGNGREFAAWLGLTPLNRSSGGKERLGRISKMGNQYIRRLLVIGMMSRMRQIIQNPERYDPWFADILARKPGKVAAVAMANKTARMIWAVLTRNEPYRVRTI

SEQ ID NO: 79740 - protein, 405 aa, unidentified
MAKPPDIQRWIGLDIHKSYFVAVGVDAEKQPVFGPHKIMNGQLEEWGSSHLQSTDAIVMEMTTNTYLFYDTLLPLVGSVIAVHPPNVRLVTGVKVKTDKKAALSLAQLHAAGLLTGVWIPPAEVRELRAVIAQRAKMVRMATQAKNRLSSLLIRIHQERPARAFKPQTRAWWESLPLSAIEKSILRTNLDTLEFAEKQIKLIEDGLRQEAAREERVPLLVQLPGIALLNALTILAAIGPIERFEDAKHLVGYAGLGASVHDSGQTHATGHITKAGRRDLRYAMTEAANIAVLHHPYWKKEFERLEFRLGRSKAIVAIARHLLIAVWHILKKETLDRHAEVNTVAASMLTLAYAMKKRNLPKGMSGRAFARAQLDRLRIGQDLQAVTVGKKKLPLPPSSLLLAKKK

SEQ ID NO: 79741 - protein, 356 aa, unidentified
MNVRRVQYFVVDGKEIFVGLEDSKKTWKLAVRSEGMLIHQASMEAKYSVLIRYLRNNFPNCTIHLIYEAGFKGFNLYDRLTDDGIDCVVIPPHVVTEPKVNRVKTDKRDARRLALILENHDFRDACHVPDRERREDRQISRTLIAMQKDVIRTRNRIRKLLDFHGIEASFPDRWGRDEFRALKKLSLPEPLKISLDALLTQLEELWNHQVTLRTALRKLCRKERYEKAYTIARSLPGIGWFTAIRLVLELGEDLSHFTSGKKIASFVGLTCSEYSSGQTEWKGHITGMGSRFIRATLIENSWAAIRKDPVLLAKFSRIWRASGSKKKAIVAVARMLIVRLRACVILGTPYSLGVVR

SEQ ID NO: 79742 - protein, 343 aa, unidentified
MKYALGPRPGVPSGGLAAGIDWASADHAVCVVDAAGEVVSRFTVAHTAEGLRALVRGLARAGAAEVAIERGDGPVVDALLAAGVRVVVITPRQIKNLRSRYGSAGNKDDRFDAYVLADTLRTDGHRWKPLRPDTEPTRALRAACRSRKDLVETRVQVLGQLRANLELAFPGTIGLFTKLHSAVSLAFLQRFPTTDKAAWLSPKRLASWLSSVGYTGGVSAGILYDRLAAAAPGLTGAEGEARGQITVALVRVIGALNAQIAALDAEIGRLLAAHPDRHIFASLPRSGTIRAANLLAEMGDCRQRFPTDDALAALAGACPSTRQSGKRTQAVFRWSCSKSSAPR

SEQ ID NO: 79743 - protein, 403 aa, unidentified
MKPKQDSENGRKARRRNPALAGETLPPAGQRPPAASRRHLPLAAAGAADQRGRFATGGSTSHRSTLAPDLPLVQLEPLKEPMSSHCKKECTMPAKANPTYVGLDISKARLDYTLDETRASDVTNDAAGHASLIHWLQSQPNVRVVCEASGGYERTILGRLLEKGIEVCVVQPGRARAFAHAAGLMAKTDRIDAQMLRHYGQAVKLRLAQATDPSVAKLRDLMDQRRDLVERTVEVRNQLEQASAVRAPWLEREKRFLENELEKLAKAIAEHIDQDPTLRQKHTRLQQLDGVGPILASTLLAYVPELGSVGDNTVSALVGVAPFAKDSGKTCAPRHVRGGRAAVRHVLYMAAVAAVRSNRILTAFYQRLRAAGKPPLVCLVAVMRKMITVLNRLIANPNFVLAE

SEQ ID NO: 79744 - protein, 484 aa, unidentified
MAKRKRSTFERINLERMNRRQRRELGQRLEKSDPGLEIVHPHAAGIDVGNQSHFVAVPGDRDAQPVREFGCWTNDLVKMAQWLKACGIQTVLVQATGVYWIALKDIVEQHGIEVVVANAQHTKNLPGRKSDVQECQWLMKLHTYGLVRGSFQLAEDMQGVRAVWRLRGRHVEEAARAVQHMQKALTQMNVQLANVLSDISGKSGQAIIGAILAGERDPGKLAELCDRRVQASATEVAESLRGNWRDEMLFELGQAVESYRFAQQQIQSSDRKLESYLQVLPTRQMEITLPPPGPSPATAVKVRKAPRQQGHPPDIPGLRDELVRIFGVDLTTIDGISVITAQTILAEIGTDMSRFPSEHAFVSWLGLTPSRDISGGKVVRVVRRKVPSRAAVALRMAATALRCSNSYLGARYRHLQKQLPSKASSVKAMARYLGVLVYRLLTKGQAWVDRGAARFEQKRKALNLAALQARALASGYRLVPVTAA

SEQ ID NO: 79745 - protein, 344 aa, unidentified
MEPMYYIGLDVHKRKISYCVKDSGGKVYSEGSLTATRLDLDVWMKTLPQPWSAAMEATMFTGWIYDYLKPHAAALKVAHPLMLRAIAAAKKKNDRIDASKICDCLRCDFLPECYMASTVIRERRRTLRYRNLLVRQMVQMKNKISGLLMEAGVSYNKQRLHRAGYFRELLATNSDIDEGLCSLLRLCRETVVRLQKTESAMVLSLERDSLLMDRVERLMTIPAVGPITALTWALEVGDAQRFSSIKKAISYCGLCGAEKSSANTVQRTPLSKQRNKHLQTTLIEAAKMAPRYSPNLAMLYDKEKQKGNANRATLAVARKLVAYLMAIDRGQRNFQAVETNCIAA

SEQ ID NO: 79746 - protein, 423 aa, unidentified
MSEPLTTLYVGIDVSKNSNQVCALNFESKKLINSSFKNNQEGAQELESKLVELCIKNDLKDIIIVLESTGVFSYHIANYLSTSHALLKFDVIVYVVNAKMVKNYAKSYIDTSKTDPKDAFILADFARVGRCKELTPYRGSQRLALQRLTRHRKHIVDMLNKEKQYVISNIFIKFSEFNNKEHDYDTFLNCFTNTAVEVLLKYKTIEQIVKTPIDKLTDFIIKSSKNRFGDPKEVAATLKAAARASYRLDKAAYKPVNLAIASSLRLIDTFEKEIDEIDKQIEYLVLGLDNSNEYKSLLSIPGIGPIFASGILAEVGSFKDFDDDSALAKYIGLSWKKDQSGKYDSENTPMQKAGNTYLRYYVIEAANMVKLYVPEYKEYYQKKYIEVKIHQHPRALVLTARKLVRLIYTLASKEQLFNPNKSN

SEQ ID NO: 79747 - protein, 317 aa, unidentified
MKDIMAGVDLHSNNLMLALVDQDGQRLMHQRLACDLKGVERALAPYRKRINTIGVESTFNWYWLVDGLQALHYHTVLANPAAIQQYEGIKQTDDKHDAYWIAEMLRLKILPTGYICDPMLRPVRDLLRRRLGLVRKRVALILSLKSLHLRVHGRPLSLAEVKRMEVDEIWRLFEHPADQLFAREELRLIRELDVSIERLEKQALQRAVKMPEYESLLSIPGIGQILGMTIALETGDPKRFASAGDFASYCRTVRSERSSNGKKKGENNAKCGNKYLAWAFIEAANFAQRYDPQAQAFYQPRKHKPTPWWRPKRWLVN

SEQ ID NO: 79748 - protein, 354 aa, unidentified
MNDAKYIGMDVHQATISVAVRDSIGNLVMEATLETKAETILQFIRGLGGSLHVTFEEGTWAAWLHDLLKPLVTKVLVCDPRKNALLKVGNHNDREDARKLSELLYLNKIHPVYHGETEIRTLRELARSYLTITRDLTRVNRLKAIYRGWGIACSGQQVYAPRYRAEWLAKISEAGVHRRAEIYYQQFDVLARLRQEVRRELLAEGRKHFATRLLQQIPSIGPIRAALLIALLQTPHRFRTKRQLWAYCGLALKTYTSGEYRFVGGQLKRSKKAVTIRGLNKNHNHDLKNIFKGAATRAAATAGPFQEFYEARIVSGMKPSMARLTLARKIAAITLLIWKKGVRFDAEQLKQQAA

SEQ ID NO: 79749 - protein, 413 aa, unidentified
MDTLVERCAGLDVHKDSVTACVRVPDGHGGRQVETRRFTTTTAGLGLLAEWLGSFGVTRVGMESTGCYWKPVWQLLEGQVECWLLNAAHLHNVPGRKTDVADAAWIAQLVEHGLVRPSFVPPRPVRELRELTRYRKTQIQERSREVQRLDKVLQDAGIKLSSVATDVLGVSGRAMLEALVAGTHDPQVLAGLAKGRLRAKLPALREALAGRFRTDHHGLLVGQILAHIDYLDEAIALLSERIEQVIAPFAEQVALLDTIPGIDRRAAEVIVAEIGPDMGQFPTAAHLASWAGVCPGNNESAGKHRSGRTRKGSKWLGGCLSEVAKAASRTKGTYLNAQYHRLRGRRGPGKATMAVAHSVLVIAYHVLDQGVPYQELGEDYFQRRHSAEHYQRQLVRQLERLGHKVTLEPIEAA

SEQ ID NO: 79750 - protein, 349 aa, unidentified
MIVIGIDPHKQTLTAVAVDGGTGQALGELTVPARAPGFERLVEWARSLDAKRSFAVEDGRHVSGALERSLIDRGERSVRVPPRMMGESRRTDRISGKSDPVDATAVARAALRHPDLPEATLAGIEREIGLLVAHREMLVNERTDRICKLRWLLHDLDPDLAPPLRTLDRFKTLDALATTLRALEPSVVKELCLELLNRCREITVRANELERRIRAVMKTHAPALLEIPGCAALTAGKIVAETAQVCRFPTEGHFARYAGTAPIPASSGARHRQRFNRRGNRQLNAAMHRIAVTQIRMHEPARVYLATKRAEGKTKTEAIRALKRHLTRVVFKTLTSMDRPTDRLTAAAA

SEQ ID NO: 79751 - protein, 373 aa, unidentified
MYYTTLFVGMDVHKENFTVCCYDMIQDKIFYTQKLEPDYNQILKYLTFVRKAFRKDVDFVCGYEAGCLGFTLHHQLTQHGVSCVILAPTTMMKPAGKKKIKTDKRDAALIARCLASNNFSPVHVPTTQDEEVKEFLRMRDDHRLALKKVKQQILAFCLRHGYSYTATKNHWTVAHIAWLRSLKPEGLYSEILSEYLLTFQALSDKLERLDWRIEELAAMKAYSEGVKKLSCFLGIKTHTALATMVEVGDFHRLASANQFASYIGLVPGEDSSSESVNRLGITKAGNAHIRTLLVEAAQSYTKGQVGYKSAALKKRQAGNTSEVIAYADRANERLRRKYYKMILSKGKRTNVAKTAVARELACFIWGMMTDRIA

SEQ ID NO: 79752 - protein, 271 aa, unidentified
MSKNKEFFGIDISKDVFDVVDASEKHHQFKNDPSGFKEFSKLLCEKSHCVMEATGSYYQGLATWLYDSFINVSVVNPLSVKRFIQMRLKTSKTDKLDAQMIRMYGESEQPKLWSPPSKLIIEASELHKLIELLVRQRAGLKNRLHALESKGITRSLVLTQGFEKFESSRQLISYLGLNPTIRESGSSVRGKSRISKTGDKQVRKLLFLCAFTAGKHNKACREIYQRLTTKGKSKKLALIAVANKLLKQSLAIAKSGLYYDENYRSVNVNIG

SEQ ID NO: 79753 - protein, 378 aa, unidentified
MSQSTTTEATIYVGLDVHKDSIDIALAEAGRDGEVRHLGAVAGGVNAVSKALRRLVSQGHCVHVVYEAGPCGFVLQRHLTALGYHCEVVAPSSIPKRSGDRVKTDRRDALMLARLARAGELSAVRVPDAVDEALRDLVRAREDAVREQRNARHRLKALLLRNGVAYAGRTAWTAAHLRWLASLALPHAAQQIAFQEYLHAVSESGARIARLEQSLRDALAGWSLAPVVAALQALRGVQLIAAVTLVAEIQDFHRFANPRQLMAYLGLVPSEDSSGQRRRQGAITKAGNSAARRMLVEVAHLYRYPARVSADMAKRQSDLPKAVTDIAWTAQLRLCARFKRLAARHVPHNKIVVAIARELSGFVWAIACEVTPPPAASR

SEQ ID NO: 79754 - protein, 401 aa, unidentified
MQVLYPRCCALDVHKATVVACLRLVIDGKVVKEVRTFETTTASLMALSDWLADNKCTHIAMEATGVYWKPVWHILAAGEFELVLANAAHVKNVPGRKTDVSDAEWLADLLAHGLIRASFVPDTPTQELRALLRTRKQLVREQSSHVLRVQKTLEDANIKLDSVISDVMGKSGRAMLKALIAGVTDPAKLALLADGRLKASPAQLREALRGRVTKNHRFLLRLHLRQIDALDDAIAAIDRQVEADIEPFRAAVKRLITAPGVKALGAQVILSEIGLDMSRFPSAAHLISWACICPRSDESAGKRRSTRITLVQAAWAAVNKKDSYLRAQFHRIKARRGAKKAIIAVAASILTAIYHMLKNGTTYQDLGPQHFDRRSKAQQADRLLKRLADLGYAVPLQPRTA

SEQ ID NO: 79755 - protein, 346 aa, unidentified
MNETRLYWVGIDVSAPTFDAAVASPGQHANTATFKELPAATFDRTPEGVRAFMGWLRKHVPSERPLPVRAVMEATGMYSIELTALLCKACPEMRPAIANPERTTAFRKSLGLRNKTDRIDARALALFGLERQPDPYEPLSPVQAELRNLSRCRDDLIETQKAHQNQLIQSGPSPLVRKTLKHVIATIRTALKKIEEDMKRVIESDEGLRHDYNLLTSIPGVGFVTACVVLAEFGDLRRFGCARQIGAHAGLTAFHYDSGNQRPPAHMSKKGNAYVRKVLYMSAISASRHNPPLRVTYRRMIAVGKEPMVALGALMRKLLVLMRALVVTGNPFDPCGKPRRRVGQHA

SEQ ID NO: 79756 - protein, 387 aa, unidentified
MTVPAQRFKLIPRHYDIFGGLDVAKKNMAVTFTDHEELMRSLRLPYSSAHLLHYVRKHFPDQRVAFVYEAGPTGFGLHDELVTAGYRCLVVAPSMVPTAPGDKVKTNRLDSRKLSVQLRGGQLRSIHVPAPRYRELRHLVQLRDTQVGQLRATKCRIKSLLLCEGLAFPPAPESSQWSARVLSELLELPCSEAVRFELDQLIGTLHFHFNSAAAAQKQIRYFCQNDPELRQSIRLLASLPGIGVIVATHLVARLGDWREISNVRQIAAFLGIVSSEHSTGEKANRGRITRAGDSRLRNKLIQSAWTAIRKDAELRAFYLRIYHRHPKKIAARKAIVAVARKLTTRIYAVLKAQRPYVLRPENLPTPLTAEETVGPRGRLVGPQNEQP

SEQ ID NO: 79757 - protein, 363 aa, unidentified
MQDYTRDAGRVNVQECDLFVGLDVDKSSMSVSVRDKEAIIKSVTMPYDSRNLLSFIDNSYVGKRVAFAYEAGPTGFGLYDAIAGAGHDCLVVSPGSVPDAPNNRVKTNRLDAKKLANLLGGGQLKGIRVPSEPIRQLRSLVHLRYVYMQDIRAYKCRIKAELLKEWIPFPKAPKGSQWSSSVIAALRNLDCSAVTDWKINSILDHLEHLSRQMHLAEVSLKSLVNGNEDLKRSVGYLMSCPGIGWRIACYTLARIGDWRCLGVSKEAGAFFGLVPRENSTGDRTDRGSITKCGDPRLRSMLIQGAWAAIRKDDELKAFYERICASHPKRLAARVAIVAVARKLAERMHCVLRQQRRYEMRAAA

SEQ ID NO: 79758 - protein, 414 aa, unidentified
MSNPLIVGVDVHRKTNTFCLMDASGQEVRPRFTLDNNRPGTQAFVQRVAELMEADGFSELQVAAEATGWYWFHFFQSLQQEALLASWPVDLHALNPRLTANFKKSYVDVDKSDLIDAFVIADRLRWGRDIGTPFEYDETYLGLRFLTRYRYHLVHNLAREKAYCTALLYLKASEYSREGKQPFADLFGAASRAVIQEFTSIEEIAAMPFAELVEFIDVKGKRRFPDPSQNARLLQQVAQDSYLLPQALQPPINLVLSLSLKQISALEHQAEQLNTAITERLAAIPNTLQTIPGFGPIFTAGILAELGNPQRFNFDQAKVAKFAGFKWRKTASADFTADETRMTRTGNPYLRYYFCEAAFSVQRCDREYGAYFQRKLNEVRKHAHKRATVLTARKLVRLVMRLLATNQPYQPRRL

SEQ ID NO: 79759 - protein, 377 aa, unidentified
MKKNIRFIGLDVHGETIAVGVAEPSSEVRSLGVIPNRPESVRKLVKKLGPASSLRACYEAGPCGYVLYWQLTQMGVHCDVIAPTLVPTKSGERVKTDRRDAQKLARSSRSGDLTPVWVPDPEHEALRDLVRAREAAKKDQLRARHRLQKLLLRRGLRPPEQMKPWTTGYLAWIKSLRLQPPALEATLLDYLSEVDHAGERIKRLERTIDQAIEAAPAAIRAVIDGLQALRGIARISAATIVAEVGMLSRFSRPKQLMGYTGVVSREHSSGDRIRRGAITKTGNAHLRRILVEAAWSYRYRPAVGPQLRARQARQSAEVKEISWKAQHRLHYRYARLVGRGKPKQQVVTAVARELAGFIWAVGVQVEKQLPIGNVRAA

SEQ ID NO: 79760 - protein, 372 aa, unidentified
MRPTFGGRRRPFAVVRQLTGPLKRPVTSRNAAKLARHNSNSHVGLEPVSQVREVYPMNSKTQEEINIGIDTSQSQLDIYVRPTGEYFSVENSPEGARKAARKLRDYHPTRVLIEATGRLEMLFVCAAHDVGLPVVVCNAGQVRQFARSTGRLAKTDRLDAQDIAHFGEALHPPLTLLKPEKLREISDLITVRRQCLDMSTMQKNRLLRMPKHVQPSIQRILKAIQKEVERIDLKLDTLVDAIPQWRDQRDLLMSAKGVGRVVAYTLMSELPELGKLNRKEIASLVDVAPMNRDSGSYRGKRRVSGGRSKVRTVLYMSMWSTIQYDPKIKAMYERLLAAGKPKKVALVACMRKQLTILNTMMKNGTHWDEKLA

SEQ ID NO: 79761 - protein, 371 aa, unidentified
MSKCTRFVGLDDSKHSIDVAVASEGREGEIRAYGTIPNTTEALKKLVRSLGRPKDLYFVYEAGPCGYGTYRDLMALGANCMVAAPSKTPRRPGDRIKTDRRDAITLARLHRAGELQPVWVPDEETEAMRDLTRAREDAKYAQTKARQRLGSFMLRHGRRFPGRSHWTKTHLRWLAEQRFARPSQQICLEEYVGAVEQTTDRVHRLEAELRELVSVWSMGPVVSAMTAHRGVSLVVAATVCAELGDLTRFDRVRELMGFVGLVPSLHATGLGRRVGAITKTGNGHVRRVLVEAAWSYRHPARRTLYMRRKLDGQSEEIQTLSWKGQVRLCRRFRRMIARGKHPNKVTVAIARELLAFLWATARMVEPMSPAA

SEQ ID NO: 79762 - protein, 342 aa, unidentified
MLYVGIDVAKNKHDVTALNVPGKTVLKPLTFSNNKAGFELLDLSLRQLNQDCLIALEDTGHYAFNLLNFLHEQGYEVYTYTPLLIKEFAKSLSLRKTKTDKKDAHGIALKLLSDPNREQFQHDNRQVELKILARHIHRLKKKQSDWKVQYTRCLDIIFPELDKIVGKHSEYTYQLLTRYPNPQKRIEAGFYKLIEIKRLTASKIQDILSVAPRSIGTTSPAREFEIIEIIKHYKRLIDKVEKCVNDLMAEFNSVITTVTGIENRLGAVILAEIRNIHAFDNPAQLQAFAGLDSSIYQSGQIDLAGRMIKRGSPHLRWALIQAAKACARFSPAFKAYLKTKLE

SEQ ID NO: 79763 - protein, 380 aa, unidentified
MKTNSDTTTKLYIGLDVHKEQTSIALAEPGSKGEIRSYGSVATSQIMLERVVRRIAKAHKIGLAELHVCYEAGGCGMWIARLFVRLKVPCTVVAPSLIPSKAGDQVKTDKKDAIKLARLLRAGELVSVHIPDETDEAIRDLCRARVDACDDLRRAKTRLLAMLRRLGFSYTGKSHWTDAHKRYLRDLKLPFKAHCLIMEELISQIDQLEARIARLETHMELMCADWGRKPVVDAMMALRGFRLIASMMVVSEIGDFVRFTHPKQLMSYLGLTPGEYSSGGKQNQSGITKCGNSHLRWLLVECATHYRPEPKISSALSLRQEGQPRWVKEISWKAQNRLYARFTKLRQRLMHHNKIKVSVARELTGVLWEIGVKMQASSKP

SEQ ID NO: 79764 - protein, 337 aa, unidentified
MNYSGIDLHSNNSVVSVIDEMDRVVAEKRLPNDLVRVLAFLAPWRAELAGIVVESTYNWYWLVDGLQAAGFVVHLANTTAIKKYDGLKHSGDETDARYLAHLLRLGILPTGTILPAKHREVRDLARKRMQLVRSRTTHILAVENITARQCGTRITSNRVKQLDEAAVDQLHLPEDVALAVRANVAVITTLSAQIAIVEKRLQEKVTTHADYALLTTVPGIGQALATVIVLETGTIERFASAGNFASYARCVDSQRMSNGKKKGEGNTRNGNPYLCWAFIEAANFAMRFSAEARQFYERKKAKTNPVIARKALAHKLARACFHMLKERKPFDVTRCFA

SEQ ID NO: 79765 - protein, 354 aa, unidentified
MSQTPSTAIAVIGIDIGKNSFHVVGHDTRGTIVLRQKWSRGQVEARLANMPPCLIGMEACVGAHHLSRKLASLGHDARLMPAKYVRPYSKGPKNDFNDAEAIAEAVQRPTMKFVATKTAEQLDLQALHRVRERLVSQRTGIINQIRAFMLERGIAVRQGIGFLRTELPTILATRTDALSPRMLRVIEELTGDWRQLDQRIDSLSGEIEALARQDQACSRLMTVPGIGPIISSAMVAAIGTGDVFSKGRDFGAWLGLVPKQISTGDRTILGKISRRGNRYLRVLFVQAAWVVLVKIKDWERYGLKSWIEAAKKRLHHNVLAIALANKLARIAWAVLAKGRAFELTRTDDASVRPA

SEQ ID NO: 79766 - protein, 400 aa, unidentified
MTTQTTAWAGIDIGKTHHWICAVDADGRALVSIKVANVEAAIVAALATVTDLADQVVWAVDIVGAPSALILALLARAESPVFYASGRVVNTMSAAYTGEGKTDAKDAYVIAETLRLRRDLPMVDTVTDLTRELALLTAHRSDLIADRVRMINRLRDVMTSVFPTLEQQFDYSSHKGALILLTEYASPKRLRRLGETRLIQWLRRRQVRDAARVAARALAAARGQDIELPGQHVAEMIIAELAASLLQLDQRVHGLDQQIAATFRRHHQAMTIESMPGFGPILGAQLLVAAGDLRAYPSAGHLAAAAGLVPVPNDSGRRSGNLHKPRRYSRPLRHVFYLSAQTSMMRAGPNRAYYLKKRAGGHTHAQAVITLARRRIDVLWALLRDDRTFSIDPPSHAAAA

SEQ ID NO: 79767 - protein, 408 aa, unidentified
MSQNIIFGIDVSSRSSTVCVVIDRVKQGNPFTITNDSFGYQDLLDHLNQYLITPLVVFEATGVYSLSLQAFLEDHHIKYLRLNPLQAKKLMDNNLRHNKTDKLDAYHLALIQFSAPQKLQAPQSREYHELQAASRYYEELTRALIVNKNQLHRNLQSTFPQIEHILSNPSGKIYWTIVSLFPHAQYVLDMNEDQVKQRLLSISGIGRQRAQYLTARLYAFARQAYPYDRKDGITVRAIQRTISNLLSLSNERDQVINYMEKLTKVVNARALTIYLSIPGIARTTALRLIAELGDLRRFNTSAQVDAFVGIDPGRSQSGDKDSRLGITKHGNHIARKILYRVITQMETVRATQPCHITDYYDKKKQSSHSPGYKKIAIASVHKLICTLFALIKHNQLYDYNIATKNQRL

SEQ ID NO: 79768 - protein, 313 aa, unidentified
MAGEAGIFVGIDVSKAWLDIAVHERETCWRAGNNDQGIADLVVELKKLVPALVLLEATGGFEMLLVAELADAGLPVVVTNPRRVRAFARSTGRLAKTDKLDAKLLAHFAAAVRPPVRSLPSDEEEQLTGLLTRRRQIVDMLTVEKNRLHTVRPALRSDIEEHITWLQEKLSKLDEEVDRFVQATPLWKEKDAILRSVPGVGRVTSSTLLAMLPELGKLNRQQIAALVGVAPVNKDSGRKQGKRRVYGGRADVRCVLYMAALAAKKFNPVIRNFYERLIKQGKEKKVALTACMRKLLVILNAMMRTNLPWRTPA

SEQ ID NO: 79769 - protein, 398 aa, unidentified
MNSVGIDISKGRSTVAVMRPFGEVVISPFEVRHTDSELSELARQLKSLNGETRVVMEATGNYHAPVAKLLHDAGLYVSVVNAKLVHVYGNNDLRRVKTDRKDAVKLANYGLDRWLTLPRYVPEEDTRLLLKNCYRQYRQYSKVQTVLKNNLISLLDTVFPNVNRLFSSPIRGDGSEKWVDFVAEFWHCRCVSEKSQKAFTSKYQRWCRKHGYNFSEEKAHTIHAEASGYIGVMPKSETTKLLVEQAVAQLRATSAALTALKHEMLALAAQLPEYPVVMGMFGGPQLIAEIGDVRRFYSKKALVAYAGLDAPPNDSGDVTGKHKSMSKIGASSLRRTLFLVMSVYLQNAPLDEPIFRFMDKKRAEGKPYRVYMMASANKFLRIYYATVKAYLESLEHTA

SEQ ID NO: 79770 - protein, 353 aa, unidentified
MKYVGIDWAYRKAQWCALSPGGQIASEGQIPADRDGLARLVLELGDEVKACLEMMSGALWVRDQLVDCGWQVEVADARKVKTVAPLAAKTNKVDARLLAELSRRELVPALWLPSLDERALRERLRRRMHLVRLRTSAKARIAGLQTQWGVRVSLQRLRRADGMALLERAGVPEVWRRSVSECLSVIGFLDARIAPLDAELRPLAHADPRAVLLDTIPGVAELLALTIAVEIGEVSRFSSPARLVSYGRLAPRVHQSGQARPHSGPLSKSGSRLLAWAAVEAAQQAWRETNPWHDLYADVARRSGNKNSAKAAVARKILIAAWYMLSRNQPFKPAPRCTRGTSVPASSRLALAA

SEQ ID NO: 79771 - protein, 336 aa, unidentified
MRAIGVDLHTTQITVCYLTDEGESRESWKLSEMINFCEQLTGEDEIAVEATGNTRWFCEQVKDLVKRVWVVNPREFQVIRQSVKKTDERDAESLARFLRAGLLPEVRLKSELAERVQSLQQTREKLVGTRTALLNKAHSLLVGGGRKAKKESLASAVGKQRILAMEWSASERVELEIIFEQIESLTKSVKRLEAEIGVLGKEFAGFENLVSIKGIGERSAALLLAVIGEVEDFADENKLASYFGIVPRVSNSADSVNHGRITKRGSKLGRTTLVQCTLVAIRYSPYLKSYYERLKARRGSGKAVIATARKFLGIIYHTLKNNWVFEDFPNFVLAET

SEQ ID NO: 79772 - protein, 523 aa, unidentified
MSHSRTRRRPRSRRPDTVQKPRGTFHPRVQKVGPEHFGIVAIDCAKARSRWMLADFFGNLLIPPTTLAHNRTALDTAINQLRQAVHEHDLKDLLVAVERTGRYHHTPRRAFAAAGFETRIVHPFATSRLRQPSDPGNKTDDTDLNAIHRAAVNGFALAEQDLDETWTTFRLLIRHRRDLVTKAAALRTQIREHRDAALPGFAACFANLWERDCAWHLVRTYATPADLLAAGRDGLARNLAAAGVRFQHPTLDTVLAWAAQAAAPDLGAAAHRRFALALDADRLQKAREIQALERDSAAYLCRTPYVLLLSFPGVNVVSAADFAAEMGPIEHYANARTITGRAGLRPSRYQSDEVDNANGPLVRCGNRKLRAAILRVADNLIKCNQHFNALAHTWQGRGKDPRHTRVKVGLRFCRIAYQIVAGRQVFRHPGLQGRHYVLDKLAAFHREHETGVAEQLRDLQAALAQVPEREHRAEAVPLAEELEKIRQGRRRGPQLLGDILPIVLARLGVGGLQSTASGEGDLP

SEQ ID NO: 79773 - protein, 352 aa, unidentified
MLPGIERQPRKKLEPSPERLLAVLHRWRDEAVKAGRTITRIAVAFEAGRDGFWLARWLEARGVEAHVIHPSSVAVSREHRRAKTDRLDTELLKRGFLGWLRGERGHCNMARVPTIAEEDAKRPNRERDCLVGERTRIVNRIKSTLARLGIRNFKPTLRKAADRLATVHTPEGMPLPPNTFAELQREIARLGFVVSQIREIEEARQRRLGQQHETGPHAMVRLLARIVGVGVETADMLVHEVLSRQMRDRRAVARYAGLTGSPDESGAQRREQGLARAGNARVRRGMIQLAWRFLMFQKDSALALWYRARTADSRIGTRKTMIVALARKLIIALWRLVTTGEPLEGVVLRPAS

SEQ ID NO: 79774 - protein, 340 aa, unidentified
MKIIGCDVHAAQQTIAMLDPETGEIVEQTLKHEAGTVREFYAALPAPVVVGLEATGSMGWFLQLLDELGITYRVGHPATIRKAATRKQKHDRRDAALLLQLLTENRFPAIWIPSTDLRDLRALLLHRHQWVRLRTRVQNALHAIVLGYGVQRGHALWNRDGQAMLAALPLSPHAAHRRDELQALYQQLDEQVDRLDERVKVAATQRPRATELMTHPGVGHVTALATEVFLGDPSRFADGKALASYVGMIPSEYSSGPRQRLGGLSKQGNPLLRFLWGEAAMHAVRRDLELQRFYRRKLHQKGLGKARMAAARKLGIRLWIMLRDQIDYLEFCRRSPRRQS

SEQ ID NO: 79775 - protein, 338 aa, unidentified
MNLSRIGLDLAKQVFQVHGVDRHEHVVCRRQLKRAQVRDFFRQLPPCLVAMEACGSAHYWARELRELGHTVRLIAPQFVKPYVKGDKHDAHDAEAICEAASRPSMRYVPVKSAEQQAVQSMHRVRSRLVRARTALCNEVRGLLGEFGLIATRRGRAATMALLETVMATEPAPLPAPMGELLRELKDELQTLEARIARLERQIQAHVRGDARIQRLLAVEGIGPIRASAVAASAGDARQFRTGRQFAAWLGLVPRQHSTGGQQRLGNISKRGDTYLRTLLIHGARAVVGCCANKTDARSRWLQGLLQRRPANVVAVALANKNARILWALLSRETCYRPG

SEQ ID NO: 79776 - protein, 346 aa, unidentified
MEYYAGIDVSLECSSVCVVDGNGKIFRESKVASEPAALIGWFTSLGIGLGRIGLEAGPLSQWLYAVMKQAGLAVELLETRHVHDAFKAMPVKSDRNDARGIAQLMRLGWFRPVHCKSVAAQEVRAMLTARKLVQSKLLDVENSLRGILRGFGLKVGKTTGTDFAGRINELVKGHPNLEVIAEALLKVRTVLLSEFKAFEKRAGWMSLMNAKARLLMSTPAVGPIISLTYAAAIDDPARFTSSKQAGSHFGLTPKKHQSGETDRSGRISKIGDASVREALYQAAHIMLTKPIKGCSQLKSWAMRIAKRAGMNKAKVALARKLAVIMHRILKDGAPFNPATKANAATA

SEQ ID NO: 79777 - protein, 392 aa, unidentified
MYIVGIDIGKNHHEASIVSPKGKQIGRSLRFATTHKGADSLMSFIFKNIGNSPCVFGMEATGHYWYPIYSFLKAKGYTIYVINPIQSDSLRKMYIRQTKNDSIDSFLIAEVIRFGQFGTTSMADENILAMRQLCRYRDSVISSRTEIKLRIGTIMEQIFPEYEKQFSSLWVSTSMGILEKYLTPENIENTPIDELFEIIKDKSHNRLTKAKAISIKEAAADTFGIKIAQDAFSFQLKQLIDRMNFLDKQIEALDIEIMKYYEQFDCYLHTIPGIGIIGAATILAEIGDISRFKNSSSLIAFAGIDPTVRQSGEFNSTHNHMSKRGSPYLRHAIFLAATTCSFHNSPLNAYYKKKRDQGKHHLTATGAVARKLTTVICAVLRDSKPYEPKKFC

SEQ ID NO: 79778 - protein, 419 aa, unidentified
MSFKILKNNCCGLDVHKTWIYACIGITDSLKRTEYKEARFSSFTKGLNELCDWLSKYNCTDVCMESTGKYWIPVFNVLEKNNIWVTLSHPKYTKPQKGNKTDRKDAKWICDLYMCGMVKPSFIPPADIRELRDLVRYRFKLTCMITGEKNRAHNCLTVSNLKLDDVFSDIFGKSSRSITEQILQHPGETFDVAPFVDGRCKTPVEEIQAAVDGAISKEQAVKLRQCLNHIDELEMHKAEIEREIFRLSDKYESVLSLIRTVPGFDKTPMTAIQVLSEIGGDMSVFPTAKNLVSWAGCCPRNDQSNYKIKSTRISRAGSYFKPVLVQVANALIKSKKHPEFTTRYRRIKARRGHKKAIIAICRMILTAIWHILTDLKPYTPEGSLESRPVNESKILTTSQALNLMKQRGYIIKDDVVPVT

SEQ ID NO: 79779 - protein, 446 aa, unidentified
MHNRNQKLTMINHNAAGIDIGSREHYVCVPADRDKKNVQKFGAFTRDLKNLAVWLKGCGVTTIAMESTGVYWIPVFQILESSGFEVILVNAKQIKNVPGRKTDVKDCEWIQRVHSYGLLSGSFRPDDQTCKLRALVRQRDRLIKSGTIHINRMQKALNEMNIQLHHVISDITGVTGMSIIKAIIDGERDAQKLAEFRNNNIKSDTKTIVKALEGDYREELLFVLKQELESYEFYLNKIKECDRAIEECLKEFDKRGDAELKNKKPTKTKNAPDFDLKQSLYDTTGIELTIVPGLGELSIQTIISEVGLDMSKWKSEKHFTSWLGLSPNNKITGGKVFNTRTRKVNNKASNAFRMAALNLARGRSALAGFYRRIRGRAGAPKAITATARKLACMFYRLLKYGQDYVEQGIEAYEKKYNETMVKNLKKHAARLGFEVVKIELMSNTVS

SEQ ID NO: 79780 - protein, 344 aa, unidentified
MIYYAGIDVSLRTVNICLINDDGKLVAETKLASDVQDIVAYLDDLEFDVESIGLEAGTLTQYLTYGLQAAGFDVVVMEARQVKGALSAMRNKTDKHDARGIAQILRSGWYSRVHVKSMASHHIRMLLSSRKAVLSKCVDLENEVRGLFKIFGIKLPPKLGHGAFDPAVRDIIEVDETLSHALLPLLDARLVLYHTFRELDNRTRKMAHADPVCVRLMSVPGVGFITALTFKAGVDDPHRFKRSRTVGAYFGLTARRFQSGEMDIDGHISKCGDANVRATLYTAANALLTRSSRWSPLKAWGMKLAKTRGHRRAVIAVARKLAVILHRVWIDDTQFRWGTEGARS

SEQ ID NO: 79781 - protein, 361 aa, unidentified
MTQTMTWAGLDVHARSAHAVAVDARSGELARARFGGGIESVVEWLASLTGPVHAVYEAGPTGYGLARAGGELGLRIDVIAPGKTPRAAADRIKTDRRDAELLVRQLMAGTLHPIHVPSPALEAARDLVRAREDVRCDLSRARHRVSKLLLRHGEVYPKDRSTWTREHRRWLSSRRFDEPNTQLAYIDALAAVDGLTHRRDALAERLSHVAADSELWPVVSRLRAFRGIDTLTALALVCEVGDWHRFQRPDQLAAWIGLVPSLSQSGESRTSGGITKTGSRHARRLLVEAAWHYQRPPRIGATLRNRQHGQPDHILQIAWRAQHRLYRVHQRLRQRGKHPNLATAAAARELACFCWAAVTAP

SEQ ID NO: 79782 - protein, 356 aa, unidentified
MSEKLNSAIAVIGIDIGKNSFHVVGQDSRGAIVLRQKWSRGQVEARLANLSQCLIGMEACVGAHHLSRKLQALGHDARLMPAKYVRPYSKGEKNDYRDAEAIAEAVQRPTMKFVATKTADQLDLQALHRVRERLVGQRTGIINQIRAFLLERGIAVRQGLHFLRAELPAILAKRTDVLSPRMLRIIEDLASDWRRLDDRIEGMTGEIGTLARQDKACERLMTVPGIGPIISSAIVAAIGAGDAFSKGRDFGAWLGLVPKQMSTGDRTILGSISKRGNRYLRCLFVQAAWVVLVKIGPEGWERYGLNSWIEAAKKRLHRNVLAIALANKLARIAWAVLNKGRAFECVKTNATASQSA

SEQ ID NO: 79783 - protein, 387 aa, unidentified
MLGTQIKAKFLPKDYDVFAGLDVDKKHIDVTFVDHEGRMKSMQLPYNADHLLAYSRRHFPGKRMAFVYEAGGTGFGLYDQLTVAGHPCLVVAPSMVPTAPGQRVKTNRLDSKKLSLALRGGELKSIYIPSAPYRALRQLVQLRDTFVRQAMQSQVRIKALLLLEDIAFPEPRERWTTAAWAALQSLNCGPAVRFKLDRLLSMATFAKEQVRQTTRELRRFCKAEPPLAHTLELLCSAPGIGGITATHLLARIGDGSFIHNIHQLPAFLGLVPSESSTGDDVNRGPITRIGDRRLRAKLNQAAWVAIRQDPELKEFYDRIYGRHPKPVAAKKAITAVADKLCRRIACMLKNQKPYVAREASRTTEKEKTAMPQGITRSPAETSVLCVP

SEQ ID NO: 79784 - protein, 375 aa, unidentified
MGKHRLAFVAFDSAKNKHAAAIADDGRDGEVRYLGEIDNSPDAVRKLVAKLSRQYERLHFCYEAGPTGYGLHRQLTELGHVCDVVAPTMIPKRSGDRVKTNRRDSVTLVKLLRAGELRAIWVPDSVHEAVRDLTRARETAMVDLKTKRQQLLSFLLRHGRSFPDGRNWTKMYERWLAKQTFGHPAQQIVFQDQLEAITTAQARLAALEQQLREIVPTWTMASVVAAYQALRGVSFLVAATFVAEVGDVRRFATPQKLMAFLGLVPSERTTGDTVRRGSITKTGNYRARRVLIEGAWTYRFSARVSETLRTRLKDLPLSVRAIAWKAQVRLCARYRRLIARGKKPPVVTSAIARELAAFLWAIGQQVAPQTGVLRN

SEQ ID NO: 79785 - protein, 348 aa, unidentified
MTEIYYAGLDVSARSVNLCVVDEDGRVTHERKLGIEPEAISAHLVSLEVRFARIGLEAGMLSQHLYAGLAAAGLPVICVETRHMKAALSAQLNKTDRHDARGIAQMMRVGLFKPVHVKTPTSQRLRTVLTARQLLRNKLQDVENEIRGLIRNFGYHLGKVTARDFEPRVRELIAESDLHVVADALLLARRSLREQFGRLDDLLVRLAREDEISRRFMTVPGVGPLVALTFRATVDVPARFTRSRTVGAHFGLTPRKQQSGEVDRTGRISRWGDAMMRSALYEAAQVLLTRVKRWSALKAWAAQVSRRRGHKKAIVALARRIGVILHRMWIDGTEFDWGKRPEAAAQSA

SEQ ID NO: 79786 - protein, 342 aa, unidentified
MTSFQSFVGVDIASTTFMACIGTAPWKLTVKPVHFDNQEEGFVSFLGWLREHNLSAEQTVVCMEATGVYSEGLAYFLSASGYPVAVEPPLNIQRKFPANASKTDALDCQYIAEYACRYVDKLSFWQPRAEILEQVKVLLTTRAHFSVQLTGHKNALHAVNRKKVSSMLAKQAHQTMIEQIAKQIKAIDQEIRRLIDSDPTFKQTLLLLLSVPGIGLQLAAHLLIHMQETLNPRVLAAFIGICPICHESGSSVFSTPTSRHYGPSVLRKLLYLAACSVRTHKQPFRLYFFRKVAEGKHKKLILNNIQNKILKIACAVVRSNQPYIPSYVSVNPLVLQHPLTGS

SEQ ID NO: 79787 - protein, 415 aa, unidentified
MAANLKLIGQRGIKEMNAVGIDVSKGKSTVAIMRPFGEVVAEPFEVSHTDVELRKLACFLEKLPGETRIVMEYTGSYWQPIAKVLHDSGLFVSVVNALLIYKYGNNSIRKGKTDKLDAVKIANYCLDRWTDLERYAPADQIRQTLKTCRRQYDQYIRLKVNLKNNLIALLDGTFPGLNTLFKSAPRDTDGHEKWIDFAAKFWHIECIYGSSEKAFTNQYQKWCARAGYRFSEEKAASIYAYAGSQVNTLPMTDAVKCLVTLAVSQLNTIIETISVIQHEMLSLAAQLPEYPVVMRMFGVGPVLGPQLMAEIGDVRRFDRKQSLVAFAGVDAPPCQSGTFESKNRHISKRGSPRLRKTLFQVMSTIIQHAPADDPVFQFLDRKRQEGKHYYVYMTAAANKFLRIYYGTVMAYLEKL

SEQ ID NO: 79788 - protein, 423 aa, unidentified
MLEETQDRDEIVGRVAALDIGKAEVVCCVRVPSPTGSGRRAQEVKTYPTMTRSLIALGEWLAGLGVTRVVMEATSDYWKPPFYVLEAAGFDQVWLVNARDVKHLPGRPKTDKLDAVWLCKVAERGMLRPSFVPPTPIRQLRDLTRYRVDLVGERNREKNRVEKLLEDAGIKLSVVASDIFGVSGRAMLDALVAGQRDPTVLAQLARSRMRIKLPALQEAFLGRFSQHHAFLLARMLAHIDAVNADITTVEDRIETLIAPFAAAVARLDDIPGVAATAAHAMIAEIGVDMTRFPTTGHLASWAKFAPGVKESAGKNKGTGATGHGNPYLARVLGEAAVGAARTDTFLGERYRRIARRRGKKKAIVAVGRSILIIVWHLLSDEQARFHDLGPDHYDTRAGTQRAVRNHIRGLHALGYQVTLQPAA

SEQ ID NO: 79789 - protein, 356 aa, unidentified
MANPKQNKKLDFSGQVFYIGIDVHKRSWKVTIRSNHMVLKTFSMNPSPIALAGHLRRNYPGAEFRSVYEAGFCGFWIQRRLTALGILNIIVNPADVPTTNKERSNKSDPIDSRKLAGELEDGSLVGIYIPNEEQQSIRSLSRLRFQIAKRRIQIKNRIKGFLDFHGIKTPERDEISHWSGCFIQWLKSIEFQEQLDRQTLYYLIMDLEYQRMRMKDVLKTIRRLFQQIPVLNYIRSITGIGTITAFTIYAELMDMRRFKDLNHVAAFIGLVPSVESSGEKEVIKGLTYRQSRYLRYLLVEAAWVAARQGPAPVMSYARLIKRTSKQKAIIRIAKKLLNRVRYVWLNETQYVTAVVS

SEQ ID NO: 79790 - protein, 343 aa, unidentified
MQAITTIGLDIAKSVFQVHGIDASGQVILRRQLKRRYVLAFFQKLPPCLIGMEACASSHHWSRELQALGHTVRLMPPAYVKPYVKRQKNDATDAEAICEAVGRANMRFVPTKAPEQQSALVLHRTRHLFVRQQTSVINAIRAHLAEFGIVAPVGRRGVEELLNIIADPNDKRVPEIARACLLALGAQLRRIKEQVLEFDRMIVAWHRSNEMSKRLDDCPGVGPALATALVASVADPRAFQSGRNFSAWIGLVPKQHSSGGKDRLGSISKQGDRYLRGLFVAGALAVIRYAKIHGTKHRPWLTALLARRPTKVAAIALANKIARMAWAMMAKGERYKEPVALAA

SEQ ID NO: 79791 - protein, 372 aa, unidentified
MNYNTVYVGMDVHKESFSLCAYTIEAEKASHYQRTEADYKKVLNYLEFLRTIYGDDANFICGYEAGCFGYTLYHQLTANNVKCIILAPTTMLEQRSKKRIKTDKRDAEIIAKCLAQHNYSPVHIPTAKDEETKEFLRMRDDHKLALKKVKQQILAFCLRHNYRYDGKSHWTAAHLKWLKALTPEALYKEILDEYLLTYQTLSDKLERLDKRIEELSAQDEYKEAVKKLRCFIGVKTHTALSVLVEVGDFKRFASAQHFASYLGLVPGEDSSGDDQNRLGITKAGNRHVRLLLTEASQCYARGQVGFKSKELKARQSGNTPAVIAYADKANERLRRRYYKMVLNKCKKHNVAKTAIARELACFMWGMMTDNIA

SEQ ID NO: 79792 - protein, 391 aa, unidentified
MIFVGIDVAKDKHDCFITNSDGEVLFNAFTISNNLEGFDNLYLKIKSVMKDVSKVKVGLEATGHYSYNLLGYLIDKGLAAYVINPLHTNLYRKSLSLRQTKTDKVDARTIASMLMSDVNLKSYSDTSYHNEELKSLTRYRFDKVKERSALKVSISRLVCILFPELEKLVPTLHMVSVYALLYEYPGAKHVSSAHLTRLSNLLEDASKGHYRKDVAITIRDVARRSIGSNIPAKSLELKHTIRLIQELDSEIDEIEDQIKIIMDNINSPILGIPGISYRMGAMIIAEIGDFSRFDSPDKILAYAGLSPTTYQSGQLNSSHSRMEKRGSRYLRYALFNATKYVCHWDPTFALYLAKKRAEGKHYNVAMSHAAKKLVRVIYQLEKSKQQYIKAV

SEQ ID NO: 79793 - protein, 343 aa, unidentified
MAVIIGVDPHKATHMAVAISSGECELARMKVRSGGQQAHKLLAWAEPFEARTWAIESAGGLGYLLAQQLVAAGETVVDVPATLASRVRVLATGRSNKNDPNDATSIAVAALRSRSLRQVEPAGHSEVLRLLAKRNTDIGNQRTRVVCRMHALLIELAGGGIAKEINASDVDRFLAGVTPATPVEQTRYDLAVELLDDIRRLDAQLKASHKRIRVAVRASGTSVTDLFGIGPIIAAALIGYTGDVSRFRSRDRFAAYNGTAPVEFSSGGRTVHRVSERGNRQLNHAIHMAAICQLRQPHSDGRAYFERKVAEGKTKKEAVRALKRQISNAVYRQLVADARRARR

SEQ ID NO: 79794 - protein, 401 aa, unidentified
MKRLSGGIDVGSESHHIIILDEEDNVLYNQKVAHKLNEFTESIKLFKQIEKKEGGKISFALEGKNGYSNPLDQILLDKGFILYNVDNLKLKRFREAFAGEWRDDERDSLMLSKMLKLKDYINSKREKVFIKIEKPSLVTESLKLLSRHQQTLIDEKIRLVNRLGKKLLEVCPQILELGKLKNKKIIAILAKYPDFSKYKRITLKSLLKIRGIGKRQAPFLLKRLNNIEYMSGLTDIYKTIILSYAKRILELREEIEDIDKKLDETGEKNKEVNHLKTIPGVATKLASRLVGEIGNIDRFPSEKQLAIYCGVACVDNNSGKVTKARAVYKANKICKQTLTTMAGCSIRFSLQCKAYYLKKRTEGKSHNHALRCLARQLIKVIYRMLTEDREYIVRKELKKVA

SEQ ID NO: 79795 - protein, 330 aa, unidentified
MSNLYWHGIDLSKATFHAALAPVGGAPDDWPSLPNKCFPNSKEGIATLCAWLLEHGFDKQSTAGVCLEATGRLAWTFVAHLEDRLGPISIVNPARPVAYARSLGLRDKTDRIDACILALYGVANRPVPRDLPSPRLRELKELATHYCNERAELLACRNRLQEAYQSSFIRKQLAAKRRTLERRLEAIEAEMDKLIEQDPQMKADAQLIQTIPGVAEKTTRILLAQFGDLRQYTRNEIVALAGLYPKQFRSGTSVHRKPRLAKAGGARTRAALYMAALSARRYCPQLKRFNTRLLDTGKHNALVHGAIMRKLLLLIRTIVITQQPYDPNYA

SEQ ID NO: 79796 - protein, 394 aa, unidentified
MDRVFVGVDISKDSFSAAGLDARGNECFSRSYSMDYDGFSQFLEIVTTHSPDLQKVLVGMESTGCYHINLFSFVTSRGIQALVINPLLIANFAKRSLRKAKTDKKDAKTIAKFLMENQEEISQLSISQDLQDLRDLARERESVSHLITATKAEIKRVLRTIFPELESVGDPFTRSMLRFLKEYPSARRVKMARLKDLAKVLNQPQVGNKLSFSVEDILRAAHRSVATVSPAKEVILQGKIATLLHLQERLAELTKLLVDLCQATRVEDWKILRSIKGVGPKTAVPFLAEMGSVENFSSHKKLIAFAGMDPSVCQSGKYIGKSKLSKRGNRHLRRAIYLMTAAVVSKNAFFKAYFVRRKREGLKPQRALLATAHKLIRVIFAMLSHRTYFQPRMA

SEQ ID NO: 79797 - protein, 410 aa, unidentified
MERVIERGAGLDIHKKSVTACVRGPGPDGGRRQERRSFATTAAGLLVLRDWLSAHGVTHVAMESTGVYWKPVYYVLEERFTCLLVNAAHVSKVPGRKTDLLDCEWLAQLLEHGLLRGSFVPPEPIRELRDLTRYRAVLVQDRTREANRLHKVLTDAGIQLASVAADVLGKSGRAMLTALVEGTTDPQVLAELAQGKLRRKLPALREALAGRFRKHHALLVSQLLAHLDYLDEALEDLAVQIEEALAPFAREAARLDAIPGVGSRTTAVLIAELGVDMRHFPTARHVASWAGLCPGTHESAGKRRAVRTRKGNRWLRAALIEAALAAINVRDSAFAARYRRVARHRGHKKAIVAVAHKLLTTAYLLLADGRTYQDPGAGYYDGRRKDRDVRRALHLLERHGYRVTLEAAAA

SEQ ID NO: 79798 - protein, 407 aa, unidentified
MLFVGNDWAEAHHDIEIEDDQGRVLVRRRLPEGVAGLATLHALIGDHLGEDEEPEQVLVGIETDRGPWVQALIAAGYTVYPINPLQASRYRERHAVSGAKSDPGDAHVLAEIVRLDRAHHRPAAGDSLLAEHVRLAARAHQSMIWMRQRATNTLRSLLRECYPAALAAFGTDLAGRDALAVLAAAPDPAAGRRLTAARVAGLLRKAGRQRNLDQRAGEIVAALRAEQLPVRVELAAVHAASVSALVAVLTTMVAQTGVLEEQVRLGFGQHPDAQIYLSQPGLGTILGARVLAEMGDDPDRYADARARKNYAGMAPITRASGTKRVVLARYARNRRLADALYQQAFSALKTSPGARACYDRHRAAGATHHQALRTLANRLVGILHGCLTHHSRYQEATAWPQEHQLAA

SEQ ID NO: 79799 - protein, 350 aa, unidentified
MSEISIIGLDLAKEVFQVHAADKDGRCVLRKQLKRSEVLRFFAQLNPCIVAMEACGSAHYWAREIAKLGHAVRLVPPSYAKAYVKRGKSDSIDAEAICEAASRPTMRFVPVKTIEQQSLATLHRCRDLLVKNRTMLINALRGHLAEFGFVAAKGIGNLPELTKIVSEAPAEALPELARAPLSGFLDAIALINQQLGGIAKKLQDWHKRNAQSQRLESIPGVGLIGATALCALVPDPKLFRNGRHFAAWIGITPRLDGTGGKTRLGRISKAGDGALRRLLVLGATSLLRSLENKTTPLALWVQDLLSRRSRRAATVALANKLARIAWAIMAKDEAFKPLAAAQLATQAGRP

SEQ ID NO: 79800 - protein, 407 aa, unidentified
MPEQVVTTHVVGIDIGMESCTMSCLTMDKRQVIKATPFANTLEGFDWLFERLKGLGVAPKEMLVGLEATSRYGENLLQALLRRGYQVCLLHPAQMHAFAQQRGLRAKTDQLDATTIARALLSGEARFGYVPSEQVATYRELMRLQKQLSDDVVRYKNEIHALLVVLFPEFTQVFVDPTRPTALAVLKRYPSAQAIAQTEVETLGKFLHELAPRHYGRPTAQELVGLAKASISSGVAVAARSSSLRILCDQLDHTQKNLEQLQREIDQLLDQDPKATGMLGVPEFGPTTVAVLRAELGDLARFTRIDQVVAYVGLDLQVKQSGKWKGQTKLSKHGSGRVRRILYLAALRSIHLEASPFGAYYQRLVARGMKKGMAVVAVMRKMLIVAVHLIQTEESYDPGKVAVQAGS

SEQ ID NO: 79801 - protein, 402 aa, unidentified
MNAVGIDVSKSKSMVAIMRPFGEIVSTPFEIKHTASDINSLVELINSVEGESRIVMEHTGRYYEVLAHQLSKANLFVSAINPKLIKDFDNDSLRKVKSDKADAVKIARYALDKWQNLKQYNVMDELRNQLKTMNRQFGFYMKHKTAMKNNLIGILDQTYPGVNTYFDSPARSDGSQKWVDFASTYWHVDCVRKMSLNAFIDHYQNWCKRKKYNFSQSKAEEIYGKAKELVPVLPKDAITKLIIKQAVDQLNSASTTVESLRTLMNETASKLPEYPVVMAMKGVGTSLGPQLMAEIGNVSRFTHKSAITAFAGVDPGVNESGSYEQKSVPTSKRGSSDLRKTLFQVMDVLIKTHPQDDPVYQFLDKKRAQGKPYYVYMTAGANKFLRIYYGRVKEYLSSLPES

SEQ ID NO: 79802 - protein, 348 aa, unidentified
MEWTVAVGVDTHKAAHVAVALDRLGRQLGVCEVEASEEGYERLLRWARSFGACAFAVEGTGSYGAGLARVLARQGVAVFECERPSRGERRRGKNDTLDALRAARRLVAGEGLSERRGSGVRELLRVLLIERRSADQARTVCLNQLHALIVAAPPSLRARLAGSTRARLIAAAARLRARASDDVEQRALIEVLRRLGSRGQLLGEEVKTVERKIDELVRALAPELLAECGVGAICAAQLIVSSGEPSRMRSEAAFAALAGTSPVEASSGPTRRHRLNRGGDRQLNCALHRIALTRKRLHAETAAYYERQLTSGKSKREALRCLKRMLARHFYRQLRSLPALALTEGATI

SEQ ID NO: 79803 - protein, 469 aa, unidentified
MSERRRKMQDTDKRKDKAGSSRRIAGLPVVRPKVAGIDLGSERHWACAPAIEGSGRDVADFGATTSELIRMAKWLQERRVETVAMESTGVYWIAPHEVLEAEGLEMLLVETRQLARVPGRDKKSDSLDCEWIQRLHSCGLLMGSFRPKEAVCMLRTLVRDKSNLVAEASDWLRRMQKSLDQMNVRVHRAVSDIEGATGMAIVRAIVAGERDARKLAQLRDRRCRKSEEEIAEQLSGHWREDHLFSLRQAVKMYDGIQERITDYEKEILRKLAEMEREECRGQAVPKVKNPKKGQAIQKRGEEPMRQALYRMSGVDLTGIDAIGVGTVQVVLSEYGPDLSHFPTEKQFVSHVTLAPHTPTSAGKPVKKKKRNSASTRVAAALRMAATSLRHSETALGAYYRQTARRIGGDVAVFATARKLATIIYRLLRWGQPYMDEGAEAYERRYQISRIKSLTAKAKELGYQVTPVNA

SEQ ID NO: 79804 - protein, 379 aa, unidentified
MVRLALLNGVVMRQNGDFNPINTEAKRTMNDHSENTDIEVVAIDLAKKSFQLHGVDANGHKVMGKKLTRKKLKSFMVQLSPCLVVMESCSGAHYWGRLFQSFGHEVKLIAPQFVKPFVKSNKNDAADAQAIYEASQRPGMRFVAIKSVEQLDMQAIHRVRSQLVKTRTAAVNQIRGLLLEHGIDIPKGRAHVLRKLPGILEDADNGLSGRFRCVLHDLQEELRHIDQRIQRYDTQIQQIVRDSDQAKLLLSIPGIGPQTATALLSSIGDIGQFKNGRELAAFLGLVPRQHSTGGKPTLLGISKRGDIYLRTLLIHGARAVLRYVDNKPDHTSRWAKELMQRRGVNIAAVAMANKMARTVYALLSKGEKYNINHVATTSA

SEQ ID NO: 79805 - protein, 336 aa, unidentified
MTLYCGIDLHSNNHVVCVIDDKDHRVLEKKLDNDPELTIRTLFQYRKRLQAIAIESTFNWYWLADALMEAGHQVKLVNTARVVQYSGLKRTNDRYDAFHLAHLMRLGILPTGYIYPKAERGLRDLLRKRIQLVQERSSHLIRFKFQVQMHTGQSIRSDRIKTRKFQLPVIGDANVQLALQSHLAMIRALTVQIKILEKSILSQVEPVASFNWLKTTPGIGDILAEAILLETGDITRFKAPGNFASYCRCVDSRRESNGKKKGENNRKNGNRYLAWAFIEAANFAIRHNEKAKRFYLKKEKATNAIVARKALAHKLARGCYWVMRKQQAFNQDRVFG

SEQ ID NO: 79806 - protein, 367 aa, unidentified
MKKVSTVGTQQTRNVSQQKLTIGLDLGDRNSWYCVLDEAGQIQLEQRVRTTAKALGEVFGAMPRSRITLEIGTHSPWISRLLSELGHEVIVANARKVRLIGESRKKDDRLDARTLARLARIDPELLCPVKHRSAKAQADLTVIRARAGLVRARTALVNTVRGLAKSYGERLRGCNVRNMNPEKAEGLSPELQAALQPLLAALESLSERIVEYNERIEKLAQQSYPQVALLKQIKGVGTLIALTFLLTLEDPHRFHKSRDVGCYLGLQPGRRNSGQSEPQMHISKEGDPYLRTRLVQGAQHILGPFGVDCDLRRWGLKLAERGGRNGKKRAIVATARKLAVLLHHLWVSGEVYEPLHNSSQTTVAAAA

SEQ ID NO: 79807 - protein, 407 aa, unidentified
MEVQHERCAGLDLAKDSIVACVRVQRGKKVTRFIETFGTVTREVLRLSDWLQQHGCTHVLMEATGVYWTPVWHLLEDVFVVVLANASHVKAVPGRKTDVSDAQWLADLLAHGLIRPSFVPPSPIQQLRDLTRTRKQLVREKTRHVQRLLKTLERCNIKLGSVLTDIVGVSGRAIVRALIDGETDPERLLGLVHHRVQADRQAIRDALEGRLTDHHRFLLRLHLGQVEQLDANIATLDAEVERQLQPFRTEFELLKTIPGIDSVGAAVVLAEIGPDMSRFETAGHLVSWVGLCPRSDKSGGKTRSRRIRHGNPWLKTVLVQGARSASRSRRTYLRAQYHRLASRRGANKAVVAVAASMLAGAYFMLRDKKPWADLGPDFFDRRDPAKTARRLVRRLEALGYNVELTAA

SEQ ID NO: 79808 - protein, 348 aa, unidentified
MRQETMVYVGLDVHKEFCQACVMNEGGEVISNERFSSTHEELDVFLSQFQEAKFVLESTGIWEFIYEGIESRGFEVVLAHPLKVRAIAEARVKTDKVDAETLPHLLRANLIPQSHVPPREMRNLRQLVRQRAYLVRQATSFKNRIHAQLLRQGVHRPKNLKKPFTNKSIRWMRSLSIPTIDSNIDCLERLQEQIEELNSLLLHEFEQRRNAQLIATIPGIGFYGALLVLAEIDDITRFSHPEKLCAYAGLVPTMSQSASSVRYRGINKDGSKYLRWILTESVLIHTRFCPDSKLSKFHARIARRRGKQIAIVATANKLLHVIYWMLLKQEPYHGQGSNPGIKPAPTSA

SEQ ID NO: 79809 - protein, 449 aa, unidentified
MQRYAGVDWASEKHDVLVQEGGGEQVLAATFTHDERGLSALGNTLVRLGVVLVAIERPDGLLIERLLDAGLRVLAIHPNQVAAARPRFRASGGKSDGFDAFVLCELARTDHHRFRVLVADSDQTKALRALSRAREDLVQARVQLANQLRAELERFWPAGAKIFAEVDSPIGLAFLERYPSPSDARGLGEKRLAAFLARHGYSGRKTTAQLLAKLRDAPQGRAGDAEIEARRAIVHALVAALRPIVAKITELTSEIAHRVRAHPDGHVFLSLFRDPKSVVCAAALLSEIGDCRARYRSAEALAADAGMSPVAVESGKRKVACFQRGCDHRLRAAMSTLADATRHWHPWAADRYATARARGQDHQRAIRTLGRAWCRVLWRCWQDGVAYDPDRHHGLQQHIAVTIPDGSSPRLDLKATQRMAGAAVTRRAARSAEREALDGKPTSATNTEG

SEQ ID NO: 79810 - protein, 342 aa, unidentified
METVYVGLDLGSSAFEQVVIRTDGSLKVNRSFSTSEANLRAAFADQRGEIQVHLEAGELAPWVASVIAPLVSRVVCSHPQSNAWIAKDADKCDRIDAYKLAELLRLNRFKEVHYAPDQPRRNFKQLVQHYDELTAQQARLKTKLKARLRMQGVIVTGERLFSATGRKEVLARVEAHDLRTAITQLYSVLDQLVEAQTKARLLMLRAAQAFPEIKLFRTAPGVGPIGSCRFSAYIHTPSRFSSKRKLWKYCRLSVSHRSSNGKPLRRPRLDRSGCGRLKDVSRKAFDVSIRSRHDNGFKRTYQRALETTHDKTHARLTVQRKIVSTLRAMWITRTPYCDELSR

SEQ ID NO: 79811 - protein, 379 aa, unidentified
MNHAITGTPAETILHGALELSKSSWLLALQFPDRAQPSLYPIRGGDTVGLMAKLTAACDRWAKISGKAPSIVLCYEAGYDAFWLARFLKARGIECLVVDAASMQVNRRARRAKTDRIDVGMLLRALIAWGQGDRHVWSVVRVPNVDEEDLRRSHRERDRLVRERTAHINRIKGLLFGQGIRGINVKTKYKALEIDKLITGDGGPLPPRLAREITREIARLALIQEQIATLERERDQAPTPCKATEKKRLQLMCLTGIGPAIAAVMTREVYYRQFDNRRQVAGFLGLATSPHDSGDVERSQGISRAGRGQVRGTMIQAAWLWLKHQPKSAITRWFVQRTAGQSGRIRRIMIVAVARKLAIALWRFLEQGLVPQGAMLANR

SEQ ID NO: 79812 - protein, 388 aa, unidentified
MRYFIGIDISKFKHTAAVIDQDGVVHIEPFDFDNDIIGFNSFFTSVSSFIQDDFIIGMEDTGHYADNLQKFLLSKNLKVAMFNPLATNHIRLAFNLAKNDRLDSLTIASALAMPRLYRIIEDEHFTYHEIRELSRYHQSLSKTMNRYKNRLQKFIDIAFPEFNKLFDTKYSKTYLKILKDFQSAQNIANTDIRTLRKALLSKGRCVSITAEELKSAARDSIGHSHIALDLEIQQTVEMIEKIDSNLDIVDKKIEEFSLQLNSPILAIPGISHISAMSILSELGDFTQYESAKKIIKLSGTNPYIYESGTYSMPRTRLEKKGSKYLRCTLYNIIQTVINNNPVFKDYYDRKISQGKSHRCAQGHCVRKLLRVIYHILTTGCEFDPSLLR

SEQ ID NO: 79813 - protein, 424 aa, unidentified
MKVIYPICCGVDVHKTFFVATIITTTDGILPHYKRQRFSTFNKQILEFKKWLLENNCYDVCMESTGKYWVPVSNLLEDSINVTIANPKWVRAVRGNKDDKKDSKWIGDLFRLGLVPGSFIPSKEIRILREFTRYRFKLVTCKSSEKNRYQNVFTVCNVALDAVVTDMFGVSASSITDYIISSEIFDPEYCVSLLRGRLKKKAEEVVASIEGFQMADSQKIRARMVKEHYDYLLGHIEKLDAIIGQLSAPFMGAIDLLCSIPGVASTSAITVISEIGLNMSQFGSSKRLCCWGGLTPGNNESAGKKKSVKITRAGVYLKPMLVQIAHAAVKDMKHPYYRIKFDQISRRRGNKRAIIAIARMILTAIYHMLSTGEVWGPCDLHHVDMPPDMREKELQKSLRRAAKFLVAQGVVAPESIRLPTAEPA

SEQ ID NO: 79814 - protein, 310 aa, unidentified
MSKDIKKPAGETRRYVGIDLGDKKSRVCILDERGEIVLQEWVVTTPEAFFKRFHGEAKMDIAMEVGAHSRWASDLLGRCGHKVVVADPRQLGLITKNDAKSDKRDARTLAQLLRVDARLLSPIEHRAEELQMDLTVIRMRDNLIETRTRLVTSVRGVVKATGGRLPSSETSSFPQQVSDLIPEPLRPALAPVLEVIDRLNEATYEYDCLLEHWARTRYQESSRLTQVKGVGTLTALTYMLTVGDKARFSRTRDIGPYLGLRPRLGQSGDNEPQLRITKAGGGLLRKTSGGGSGEAPGGATDELVEERAEL

SEQ ID NO: 79815 - protein, 350 aa, unidentified
MQGNGRWIGLDLSKKTYEMCYFDQKGKVGRSGGETTKSGRAKLYAKVKPEDIVAMEANSLAFVMEKEMRAIGCTVVILNASQLSVIYASTKKTDKEDALKLARLVKIYEKEDLPTVDVPTDKEYYRRKLTKECKTLKDDRTQEINRLHALFLQCGITTMKRSNLQTDTNRQKVLPQLFGYEVGQAKRVCERLTLLDAQIKELEQTITKECKADKDIERLKTIPGVGDKTALAFAAYVGDGKRFNNGDEVANYLGLVPRVDCSGSINRYGHITKKGNRIVRALLYQAAWAIVRSKHGGALKAKYFYMTEHGKGKKISITAIARKMAKLMYLIMKNKEEEYQEVPVSALKAG

SEQ ID NO: 79816 - protein, 313 aa, unidentified
MLDAEGCSTPSIEFTNDKHGFNQLVRWVRKESLKGYPLCFVMEPTGVYYEALAMHLTKLGMTVHVVPANRVRDFAKYEGYKTKTDKIDAYILSMLGCENRRLKNWEAPDEQLASIRSLCRLRASLVKHSTMLKNQLGALTASSFSDKKTVRICSAALDDVDKNISKAETEIRNLVDKSEQFKEAVRLSTTVPGIGQTTAAAILAEVGCFANFNNQRQVISFAGLDVVARQSGPQDPKRHISKKGNSTMRSMLYICAMAAIRCNPKMREFYDRIKKSNPSGKVALVAVMRKLLTLMYSVCKSKKSYDPAYSTKG

SEQ ID NO: 79817 - protein, 416 aa, unidentified
MNAVGIDVSSRKSTVAVLRPLGEVVCLPFDVTHDIAGLASLVEKLKALDGETRVVMEHTGRYYEAVAKALHEAGLFVCAVNPLLIKEYGANSLRRVKTDKADAVKIARYALDNWADLRDFTPMDAIRYDLKTLNRQFQLASKQRTASANNLIALLEQSFPGIRKCFDSPVRSDGTQKWVDFAHSFWHVDCVRKQPFPAFCERYRKWCKRHAYFFKLRNAEEVYALAKRAVVLTPKSKVVKVLVQEAANQLISISRSVEVYRAEMDRLAAMLPEYPVVMAMYGVGKSYGPQLMAEIGDVRRFERKQALVAFAGIDPMPNQSGDKNVRSNKSSKRGSPYLRKTLFNVIRTYLQCAPQDEPVFQFLNRKRAEGKPFYVYMLAAANKFLRRYYAKLRDYFASLDTLQPVAPIPTILKATL

SEQ ID NO: 79818 - protein, 345 aa, unidentified
MGSDPVGAHLFVGIDSAAATFTAAWSHTDTPVSPAHTYTQTPHGFAALQTQLAATTVTPVDTLVVLEATGSSWVALAVALHTAGYRVSVINPLQAHHFAKAQLRRAKTDVLDAQDLCRLAAVLRPPVWTPPPAVYHDAAQWAPGQRLLVRDGLVTIRQQARNQQHALTQWPVVVAGAAEQLTAVIAEMDARSAVLEGEIAAVLGASEWAESLGYLTSAPGIGLLTAAWLLIATMNFTVGETPEAVAAYAGLAPVPRQSGTSVRGKMQIGHSGNGRLRTAASLATLSAVRFNPMLRTFYQRLREAGKPVKVARCAAARKLLHLAWALVTKRQHFDPLRHLPTHAVA

SEQ ID NO: 79819 - protein, 424 aa, unidentified
MKRTQNEKILQIKFETLVVGIDIGKDTHYARAFDCRGIELSKLLRFSNTNQGYKALEDWMQEIMKEKGKTEAIVGFEPTGHYWFTLGDHLQRKGHRLAIVNPFHVKCTRELDDNSQTKNDKKDPKTIAMLVKDGRFRDVYIPEDVYQELREAVSERERLVEQMISLSNQVIRWLDIRFPEFNQVFKNWRGEAAWLTLRHFPTPAKVAATGASSIVSTWRKKMKKPSLKKAEKLVNLAIRSIGRTAGNEAAEAALQNLLTQYEMVMRQKQDIEQLMQELLIKVPSASKLVDIKGMGMVAAAVIVSEIGDISRFNDPRQIQKMAGLSLRENSSGKHKGKTTISKRGRRRLREGLFRAMITMLATNSEFRQIHQRNLSREQNPLNKMESIVALCGKLIRVIFAILTKGNDYDADRMLNDMKRSMKAA

SEQ ID NO: 79820 - protein, 344 aa, unidentified
MLYVGLDLSRKRLDWQALEREGERVAIGAVPPDRDGLTKLAQRLGDVSVLAVIESMSGARFVHDQLELVGWDVRMADAVKARGIAPLACKTDKIDTWVLAELGRLDLVPEIWLPDQTIRAERERARFRLHLVKHRSSLKNRIHAILFQHGIPNPSSDLFGVGGRRLLERLRLPEPWASTVHASLVLIDSLDEQIDACERELRSLGAEHRYIPLLMTCPGIGWILAFTIASEIGDIDRFATPRKLAGYTGLCPKVDQSGERDRRGPLRKNGPNYLRWALVEAAHTAFRHPHYSPVRDRMHARHGRKRGTKIAAIDVARRLSEAIWHMLTTNQPFAPAGAPSSLAA

SEQ ID NO: 79821 - protein, 336 aa, unidentified
MDMAHALVGIDVSKKKLDVALLVDGKIKSKVVENTAAGHQLLLDWLAKAKLAKESMHVCMEATGVYYEPVALALHDSGLRVSVINPGCVKGFSQSENLRNKNDSVDAALIARYGAAIKPMPWAPPPLEQRQLSAWSSRVQALKDIRQQEQNRLEVHDITGMTDVAEHVEQHIAWLDTEIKKLEKDIDDHIDRHPKLKRDAELLSSIPGVGNTTVAKILGRLGDIRRFDNAKTFAAFLGVTPKQRTSGASLRGRTMISRTGSKSMRAALYMPSLVAARHNPILKQFSARLLATGMAKKAVIAAVMHKLAHLIYGVIHTGKPFNPNYLAKGLAIQDGI

SEQ ID NO: 79822 - protein, 472 aa, unidentified
MKSKSSRKPNPVDPVAEEIPDAEHELVIERVAAIDVAKASGKVCVRLPGQTGRRFSRVWDVPARTGAVSELAEQLIESGVEKVTVESTSDYWRIWYYLLEAAGLDVQLVNARDVKNVPGRPKTDKLDAVWLAKLTEKGLLRPSFVPPAEIRQLRDYTRLRVDLTRERTRYWQRLEKLLEDALIKISAVASTLDTLSTRDMIEALIAGERDPGRLADLARGKMKAKRSELIAALDGRFDDHHGELARMLLDQIDTLTAQIATLTSRIEQLLAAMPDTRSRGDGGTGGDPDRPSTGHGVEPETAARFTDATLLTPVERLDEITGIGELNAQVVLAEVGLDMTRFPTPAHLVSWAKLCPRTIQSGPVTRGGKTGRGNPYLKGALGEAAAAAARTDTFLGERYRRIVKRRGKLKALVAVARAILVVIWHLLANPEARFRDLGPDYHTQRIHTERKLRNHIAQLTAMGYRVTLEPAA

SEQ ID NO: 79823 - protein, 364 aa, unidentified
MKLYMALELSNTKWKLAFSTGEKIRLITIEARDQLAFQSALKATRDKWQLGEDIEVFSVYEAGRDGFWIHRWLEGLGINNVIVDPASIEVNRRKRRAKTDRLDAKALLRQLIRYHGGEHTLWSVVRVPSVEQEDLRRREREIKRLKKEIGAGTARIKSLLVLHGLRLDSLSKLDTRLDSLLGWDNRPLPEHIRSEIAREYERVEFARTQLKALERARTARIAKPQTKAERQAHKLTRLKAVGVISAMTLSEEFFSWREFRNVRQVGACAGLDGSPYDSGDSKNEQGISKAGNAKVRALMIELAWSWLRNQPQSDLAKWFDNNFARGKRSRRIGIVALARKLLVALWKYLEKDELPAGALLKETA

SEQ ID NO: 79824 - protein, 342 aa, unidentified
MNHYAGIDVSLEYSSVCIVDGSGKIVREAKVASEPEALIAWFGSLGLEPERIGLEAGPLSQWLYAGLKKAGLAAELLETRHVHDAFKAMPVKSDRNDARGIAQLMRLGWFRPVHCKSMEAQEVRVVLTARKLVQAKLRDVENGLRGLLRGFGLKVGKTSTTGFAGRVQELVSDHPSLEAVAAALLSVRAVLLCEFKAFERQVRRMARSDGNARLLMSTPAVGPIVALTYASAIDDPTRFRSSKRVGAHFGLTPKKYQSGETDYTGRITKIGDASVRTALYEAAHIMLTKPVRGCSQLKSWAMRIAKRAGMSKAKVALARRLAVILHRMLATGTLFNAAAAAA

SEQ ID NO: 79825 - protein, 349 aa, unidentified
MTLVGCDLHTRQQQVAVLDTETGEMDERQLSHTGDAVEQFYRALPGPVTVGIESTGYALWFHELMQRLGHTLLVGEAAKIRAMVVRKTKTDRRDALHLLDLLKHERFPLVWIPDPATRDLRALVTHRMRLVRMRTMVKNGLHAIAMNRRLTLGPSLWSQRGLAQLRDLALAPHTTQRRDERVQRLTWLTARIEALDDRVAAAAQADPGARLLLTHPGVGPLTALTTVVVLGPVARFPDSKHVVSYTGLAPAVHASADTCRLGQITKQGSPLLRFVLGQAGLIAAHAEVDLKRHYRTLLRRRGRPKAIVAIARKLLVRLYIMLRDQIDYEEFRRRGRTPRGQEVPPPALA

SEQ ID NO: 79826 - protein, 421 aa, unidentified
MKWLDAKRQIYDEELHAMNNVAGVDVSKGKSMVTVLRPFGEVVAKPFSVGHTGSELKELADYLKSLDGETRVVMEHTGRYYEPVARFLHEEGIFVSAVNPKLIKDYGNNTLRKVKTDKADARKIARYGLDNWAELRQHTLMDTIRTQLKTLNRQQGLYTKTKTMMKNNLIALLDQTYPGVNDLFDSPVREDGSQKWVDFATAFWHVDCVRNMSFAAFTERYRKWCKRNGYNFSQSRAIKIHTEAQDLIAMLPKDALTKTMVRQAADALNAVSKSLERLKAEMRSLASQLPEYPVVMAMRGVGDSLGPQLMAEIGDVTRFAHRGSITAFAGVDPGSDQSGTHEAKSPRTSKSGPPELRKALFLVMDCLLKTMPADDPVYRFMDKKRSEGKPYLVYMTAGANKFLRIYYGRVKEYLASLENAD

SEQ ID NO: 79827 - protein, 357 aa, unidentified
MRIIGCDLHTRQETMAMLDTETGEVVEKTLQHEGEKVREFYSALPRPVQVGIEATGSMLWFLNLMEELGIDSQVGHPAKIRAAEPRKQKHDRRDADLLLKLLMENRFPSIWMPSKELRDLRALLWHRHQWVRTRTRVQNALQAIALTNGLRRGKSLWSQEGQHAIASLPLGPHAAHRRTALQALYRELDADINALDKRVLEQALERPEARRLMTHPGVGPVTALATDVFLGDPVRFENAKALASYVGMIPSEYSSAGRQRLGGLSKQGNPLLRFLWCEAAVHAVRRDPLLQRFYRRKLVQKGMGKARVAVARKLGIRLYIMLRDQIDYEEFCRRGQMRQKNGAARAGIPEVGYGPSL

SEQ ID NO: 79828 - protein, 352 aa, unidentified
MAKIEFNELMSIGIDIGKDTFHLVGFDHDGQRVLRKQIKRLALIATFEKLPRCVVGMEACLSAHFVSRTLRKMGFEPRIIPAIYVKPFNKGQKNDYNDAEAIAEAALRPNLKAVSEKTQDQLDLQALHRVRSRLVSRRTATINQIRAFLIEQGITVRKGLRALKNSFETILEERKDEISPRMQRILIGLYGDWMWMDDRIDKVSKEIEEISRTEENCVNVMTIPGIGPMISTAMVAAVGEGEAFDRGRDFAAWVGLVPRQYSTGGRTILGRISKRGSRYLRMLFVQAAKVIMMRPHRWPDFSFGEWLIRASERMHRNKAAIALANKLARMAWSILRHKTAFDAPRDEVAVDV

SEQ ID NO: 79829 - protein, 359 aa, unidentified
MIKQKLNEKGNKGNVTIAKQKVLQSYDHYIALDWSIINMAIARLTPKTNEPKIIDVPSDIKELKLYLKNLQGTKIMTIEETTTSHWLYVELYDYADKIIICDPYRNRLLSDGPKNDKIDAGKLCLLLKNGMLKEVFHSNDKLYDLRKLVSYYDDEVKAGVRLMNQKSALFRAENKSYKKKETIEATGINKFIVSQLDEKINLYIDKKQNYEDEFYKITKGNKTIKSLMSIPGIGIISSVTILSTVVDARRFKSSNHYLSYCGLANHKKMSGGRNYGKRLPRYSRKLKSVYKSAAVRVISTNNPIKEYYAYLIKEKSVTEQNANNAVARYIARVSLGIIKSGKKFKPYSWRKNKKEKDVA

SEQ ID NO: 79830 - protein, 319 aa, unidentified
MSTQSATQSKASNWVGIDVSKAKLDAYELQSAQAQHFTNDSEGIGQLRQWLMQLPQASVVCESTGGLERLVAETLSADGTPVSIVNAAQMHSFAKATGVLAKTDALDARTIARYGECFKPTPTVFASAQAQELKAWLVRRKQLSNTLTEEKNRLGQLTGKRQAGVRGQVEDHIKWLTEQIKAAEEKIEALAEQPSQWQSDRALLMSVKGIGKVISISLIIHLPELGKANNKQIAALAGLAPFNRDSGNYKGKRTTGGGRAPARTALYMAAMVAARYNPPIKAFYNQLLARGKTKKVALIACARKLLCCLNAMLKHRTEW

SEQ ID NO: 79831 - protein, 371 aa, unidentified
MAVKKSSKKKSEKLSEKTMNDGVAAIGIDLSDRTGRFFAIDDEGKKIAEGTIALRTPELEKWAMSIARTVIAIEAGTHSPWISRLLARCGHEVIVANPVKVALITKNVQKTDPVDAEFLARLARVDRELLFPIQHRGEQAQIDLQVIRTRDIAVKLRSTAISHVRGAVKSFGGRLSQCSTEAFVNTTRKEVPEALKTALDPMFVLIDQLSKTINGYERQVLKLVEQRYPEVERVAQIKGVGALTGLAYVLVLEDAKRFADSRSVGPYLGLTSKKDQSGDSDPQRGITKAGDRLLRRLLVQSAHYIQGPFGVDSDLSRHGEKIAARGGKRAKKRATIAVARKLSVLMHRLWVSGETYEPLRNSINTAATKAA

SEQ ID NO: 79832 - protein, 338 aa, unidentified
MSESALIGIDLGKHTFHLHGQDKSGREVFRKKCSRAHMMQFFASSQSCVVAMEACAGSHCVARQLAAIGHTPKLISPQFVKPFVKGNKNDFVDAEAICEAASRPSMRFVTPKTESQQTLSVLHRMRESLVRDRTRTANQMHGFLLEFGVSLPRGLAIMKRLAVVLAEHELPVRLTVLLQRLHNHLIYLDEQIKAMDKELACQVADDDLGSRLLSIPCVGPITASLLAVEMGDGKQYRCSRDFAASVGLVPKQYSTGGKANLLGISKRGDKHLRQLLVQCSRVYMQRLDHQKGALADWVRSLLSRRHSNVVACALANKLARIAWAIAAHHTQYEAGPGA

SEQ ID NO: 79833 - protein, 283 aa, unidentified
MIIIGVDFHPEFQQIAAVDTDSGELQEKRLGHREEAETFYRELVAAGRQVRVGMEASGHARWFERLLAELQFELWIGDAAEIRTRRVRKQKTDRQDAQLILKLMLKGDFPQIWVPSWENRDLRQLLWHRHRMVQARTRIMNQLQAVALNEGLRCKKRLWREHGRQQLEAFRLAPWASRRRRDLLELMDRLNPTITELSQAIEQEAEKCPEARRLMTHPGVGPLTALAFVLIIGKAERFQCGKQIASYLGLVPLEDSSGNRRRLGHITKQGSSMMRFLLVEAHR

SEQ ID NO: 79834 - protein, 397 aa, unidentified
MYIVGIDIAKRKHEAAVIDGEGTVIIKPFSFTNNCSGYNRLLAMLTKAKLPLDEVSFAMEATGHYWLALFTRLQKEGFRVQVINPVQTNSIRSFYIRQVKTDPRDALLIAEVIRFGHFSESTLHPENIYELRELCRGRHAIVSMQADVKRKVVALLDQVFPEYETAFTNLFGDTSMAILQTCPTPKELSETPLEELCHLIEVSSHKRFRMAKAQELQALVRNSFGFAMAGDVFSTMIRLYAKHLDFLKQQVREMDRKIAEIMETLDTPITTITGIGPTLGAYILSEIGDISRFSSAAKLVAYAGIDPTMRQSGEYNGVRNRMSKRGSPYLRHAIWLAASSAVLHDPALKLYFQKKRDEGKPYMASVGHACRKMVSIIYAVMRDNKAYTPYIPNEISA

SEQ ID NO: 79835 - protein, 350 aa, unidentified
MPKRNVPRPAAVYGIDIGKNIFHVVGLGSDGVPVQKVRFRRDTLLQFFERAAPAIVGMESCAGSQWIARKMQALGHEVRLIPAQFVKPYVKSNKSDIIDAEAIAEAATRPTMRFAALKSEEQADLQALHRVRDQMIGTRTRLINQMRAFCLEYGIALRQGAGLFKLDLPQAVDDQSNDLSSAMRKLLADLFADLRQLEQRIGDVTREIEAVANREDVARRLMTIPGIGALGATALLAAIGNGRQFQKARDLAAWLGLVPREYSTGGKQKLLGISKRGNRYVRKLLVHGARSCFRHLDRTRDRLGNWLDGLQARMHPNKAVVALAAKMARIVWVVLTRPGALYERRDPAFT

SEQ ID NO: 79836 - protein, 437 aa, unidentified
MLSSPRNNLRSLRQLFGRKERIKGKIIERCAGIDVGKRFLLCCVLTGAAHEEPHSKTLRFDTTVLALERLQKWLWEEGVTHVVMESTGSYWIPIFNILEGEFVVVLANPEEVKNRKGHKTDRKDAEHLADLLRHSHVRASYIPTKPVRDLRNLTRRRVQLMEDATRERNRVQKLLEQTNVKIASVLSDIFGVSGQRMLLALLEGESTPEQMAGLARGTAQRKIPHLIEAMQGHRMTDHERFLIRSSLRHLGCLEEELEILDTEILNRMRSTPFQHAFTLLQTMPGVGELAAAAILAETGIDMAPFPTAEQMSSWAGLCPGKLESAGIQKGSHTTHGNAYLRTALVQCAWAATRKRGSVFQARFQRIAPRRGPKRAIVAVAHQMLIILHSMLTARVPFRAAEDEPRQRRRLRRAHHHLRCLRHLGLEVLIANPTGLTP

SEQ ID NO: 79837 - protein, 343 aa, unidentified
MQTITTIGFDIAKSVFQVHGVDAGGQVVIRRQLKRRYVLAFFQKLSPCLVGIEACASAHHWSRELQALGHTVRLIPPAYVKPYVKRQKNDAADAEAICEAVTRANMRFVPTKTPEQQSGLVLHRARHLFVRQQTAVINAIRAHLAEFGIVAPVGRHGVEELLNVVADPNDKRVPEMARACLLAFGAQLRGIKEQILEFDRLIRAWHRSNEMSMRLDEAPGVGPVLATALVAAVADPKSFRSGRNFSAWIGIVPKQHSSGGKNRLGNISKQGDRYLRGLFVAGALSVIRYAKIHGTKHRPWLTALLARRPTKVAAIALANKIARMVWAMMARGERYKEPVALAR

SEQ ID NO: 79838 - protein, 403 aa, unidentified
MYYVGIDVAKEKHYVCILDTSKELAVKPFWIYSDILGLRDLVKRFAELSLNNDDFIIGVESTGAFSENLYEYISDADYKVILLNSYQTAKYRDFSTMKKIKNDSIDAYVIAELLASGKYKESHISNDDYQSLKVLGRLKRSLDDKIKTIKREISTVMATVNPEITKVFPNIFSKTALSIIKAYPTAVDIAQSTPKKLTKIFRHIKGNNFNEEKAKFLIELASSSIYAGRTHEARALMIKTNIKILELLSQEKAEIEQQIESLVYGKIETIDSSIDNLKSIPGVADKTISAILGECGDIKRFDSAKAFIGYLGLYPTQYQSGNSMSVGRLAKRGIPIAKHALYMAAVSSVIHNTELNKLFRDKVSIGKSKKEALIIISKKLATIIYSVFKYNKPYEPKRVFIPR

SEQ ID NO: 79839 - protein, 341 aa, unidentified
MKKNLFFIGLDIAKADFAASIYKTPGQSIVTKEAIPNDPKGFEMLLLWLYDHHIDKKNCRICMEATGVYSQAIAYYFLFQGFPVSVEPPLKVKRAFDPVGHKTDPVDSKQIAEYAYRFQDELTSWKPRDEILEKIRQLLSVREQFTKQKVALDNSIQAYSKQRVQVALIRKAQKETLNQLKKQIARIDKELANLIKQDPEIFQRANNLDSIPGCGMLLAAHLLVITENFTKIQNSKRLAAYIGIVPYQHQSGSSVFKRAKIRYFGPGPSRKLLRLAAQSVATHNVTFRRYYLRKLDQGKAKPLVLNNISNKLLKIACTIIRNNTRYIKDYRSINPMYLKNV

SEQ ID NO: 79840 - protein, 457 aa, unidentified
MCTKIEMDLVNKNAAGIDIGSRSHWVAVGQTDNLIKEFGVYNENLYQLADWLNTHNVKTVAMESTGNYWQNLHAVLISRGFNVTLCNGKFTKNIKGKKTDVKDCQWIQKLHSLGLLSGSFLPDEETEVLRTFMRHRYNLIKQAASATKKMQKYLRLMNIRLDVVVKDVVGLTGLKIIRAIALGETDPKKLASLRHYNCKKSEEEIAKALHTNGRKDFLYALKDELDAYEFLQKKVRACDDQIAEKLDEIIGKDSEKQEHQIDKKPYKRINKNTPKNIDINLKSYQMFKGTDLLAIEGMSYNTVLTIMSEVGYEGIKKFKTAKHFTSWLRLAPNNKVSGGKVLSSKIGKGSSRLKIALRNAANAIGNLKESTPLRDFFHRINFRKGRVSAITATARKLAVIIWNMVVKKTPYENPKGYLYLDQKRKLGLVKRIQKQINKFGLTDEDLQININHCNTET

SEQ ID NO: 79841 - protein, 394 aa, unidentified
MKLIGIDIGKNKHFFCVMDQQTGEIISQPVSFSNDKEGFDFLVQKIKSYPKDSILIGMEDTGHYHFALLKYLLDLQYTVALINPKTTDFNRKMQGGITKNDKLDTINICDVLDTPERKKQYRITKVNSFDLYEQKQLTRHHHNLKEEENVYKNRLQKCIDIVFPEFNKLFNSKYGIVYMNILKMFGSAENIANTDIRTIRKCFEIEGRGNRISLTPERLKECARSSIGISSSAEVIQIKHLTAQIELIEEQLTEIDKKIEEFSIQNNSPILSIPGISHFSGTSILAELGDISNYSKPSQIIKFAGVAPLHHESSQFNAQHTSITKKGSKYLRKTLYQIILPVIRHNPVFNKYYQLKISQGKGHRCAQGHCVRKLLRIIYHLVITNQPFDSTLLK

SEQ ID NO: 79842 - protein, 314 aa, unidentified
MTSKAEFVGVDVSKATLDVASRTSNEYKQFRNDPTGIQELIDWLKFLQPELIVLEATGGLELPFVAELAYVKMPVAVVNPRRIREFARSIGQLAKTDKLDAKVIAHFGEATHPEARKLPTNDEEKLTALITRRKQIVEMLTAEKNRIHSARFSMKERIETHLSWLESELRDLDNEITKFIHQSPIWKEKDKLLRSVAGIGPVTSATILAMLPELGTLNRQKIAALVGVAPVNKDSGRRQKKRRVYGGRANVRSVLYMAALSASKHNPRIKAFYDRLIRMGKERKVALTACMRKLLVLLNAIIRVNQNFDLKTAI

SEQ ID NO: 79843 - protein, 378 aa, unidentified
MATTRSVLRHELTAKSGDLYLSLDLGDKRWHISIGDGRCGLSHYSVGAGQTDELADCIAKARARLHLSRKAIVHSCYEAGRDGWWLHRWLTEVGVDSIVVDPASIEVNRRARRAKTDRLDADKLLAMLVRHHSGERVWSVLREPSPEDEDARRTHRELQRLTHERVAHTNRIGSLLVLHNLRPNVVIGGRYWSVWWERHRAQVPSSLTAELEREVMRLQLVKQQVRAIEATRSQELLEGKQPLVAQLTRLRAIGAKGAWVLVKEMFGWRTFANRRELAGSLGLVPTPYASGDSQLEQGISKAGNRRVRGLLVELAWGWLRLQPSSALAQWFDRRFASGGKRLRRIGIVALARRLAIALWRYLKNGEIPAGAQLKPAGA

SEQ ID NO: 79844 - protein, 453 aa, unidentified
MALPAAFRVVWLSNELPARWGTAVAWLEKGATANQLISEVPATVACACMSNGKGYLPVEAVMIGVDPHKGSHTAVAIDAAEQQLGKLRVRASACQAATLVGWAAEWPERTWAIEGADGLGHLLAVGEQVIDVQPKLGSRVRLLSSGSSNKTDPNDARSVAIAALRSPVRRVVAADDHPVVLKIWAKRHRDLSRLRCQAACRLHATLCEIIPGGVPKAITTPAATALAASLTPAGTVAAARHDLALAQLDDPRRIDDQLRQARAKLTTAVRASGTTLTGIFGVGPVIAATIIGDVADVSRFPSADRFAAYNGTAPIEVSSGNRKVHRLSRRGNRRMNHAIHMAAVTQIRNRHSDGRTYYDRKLKEGKTRLEALRALKRRLSNTIYQRLLADARSAGNAKPQTGPGGQPGNGSISSATGSHPERQLFGAATPRPEPSLRPLERPSSSAMKVREIT

SEQ ID NO: 79845 - protein, 372 aa, unidentified
MSQSSTLYVGMDVHKESIAVAYVAQAHGAEVISLGTIGTRQCDIDKLIRQLRSKSKQLVFVYEAGPCGYWLYRYLMKQGYVCWVVAPSLIPKKPGDRVKTDRRDAMQLARLMRSGDLTPVDVPAVDDEAIRDLSRAREDTLRDLKAAKLRLKAFLLRHDIRYTGRANWSPAHLRWLSEVVCPTPAQQIVFQEYVQTVTEQTERLGRLELELHEQVQTWRLAPVVEALQALRGVQFTVAVTTVAELGDLTRFDNPRQLMNYLGLTPSEYSSGGRRQQGSITKTGNTHARHALVEGAWAYRYPATVSRHLQLRLEKLPTAIQAISWKAQVRLCKRYRQLMAKGKNANQVVVAIARELSAFMWAIAKQVTVPPKA

SEQ ID NO: 79846 - protein, 390 aa, unidentified
MFYAGIDVAMDKHDCVVLDSDGDVVVEVFTFENSRDGFKTLKRVLQSCSKNPKKIKVGLEATGHYSDNLLAFLNKIGYDPILFNPLHTNLFRKGLSLRKTKTDHVDAHTIATMLRTEDLKSYSQPSYHLNELKSLTRYRSNLVSDCSRCKVSLARLCQILFPELKAIVPTLHMSSVYTLLSELPSADKIAKCNLTHLTALLSSASKGHYGRDKAVEIRELARTSIGIKSVVKELELQQTIDRIQVYLQQIEAVEEEINKIMEEMDSPITSIPGIANRMAAVILAETNNFQEFDRAEQVLAFAGLEPSVYQSGQHTSSHSKMVKRGSKYLRYAIFNATKYVCNWDPTFHAYLAKKRAEGKPYNVAVSHAAKKLTRVMFHLVKTNKEFVPQE

SEQ ID NO: 79847 - protein, 335 aa, unidentified
MDRQYVGIDFHRRRSVIVRKNAAGDKLGSVRVENDPLALAAVIADAGPEPEVVIEATYGWYWIVDWLQEQGATVHLANPSGLNWGTRRVKNDERDATDLVDMLRLGRLPRAWIAPPATRELRELVRYRAKLVALRSGLKQQVHAVLAKEGVLPATRDQFGQGGNAQLDALELGDAYALRVQSLRSLIDVYDDQVATLEQTIHDRLRRDRGYRTIQQINGIGPTMAAILVAEIGDVSRFRNAAALCSWAGLTPKHHESDTTVRRGGVTKQGSRLVRWAVIEGTVRYHGGPKLAADWHAIAERRGKHKATVAVARKILTLVYYGLRDGEIRCLAKTA

SEQ ID NO: 79848 - protein, 321 aa, unidentified
MSEITYLGIDVSKAKLDCALLLGEKVRSKVVPNNPIGLDTLRLWLQKNLGSSAWVCMEATGIYWELAAQTLADTGHKVSVINPALAKAHAESLGLRVKTDAVDARVLAGFCKEKQPPAWRPPSGSERALRALVLRHQALVEIQTQEKNRMESARDEIRESLQTHLKWLADELERIEQAIRQTIDDDPDLRGKRELLDSIPGLGERTIAVLLAYVGHAQRFGTAKQFAAFAGLSPRLYESGSSVRGKPRLSKVGHTALRRALYMPAMVALYKTTWGKLFRERLAANGKAPKLIIGAMMRKLAHVAYGVLQSGKTFDPALHGA

SEQ ID NO: 79849 - protein, 341 aa, unidentified
MESQVVMVGVDTHKDGHSAAAVDGLGGVIAAIDIGADRQGYAQLLRWARCRGSERRWVVEGTGSYGAGLTSFLTENGEVVFEGDRPQRRKHDAAGKSDQLDAIKVAREALARAHHAIPRQRGKREAIRVLLTSRQSAVSAYRQGLNQLYALVVTAPTPLHERLIQLKGERLVVACSRLRPGGELETRITGTTMRQIARRLQNLQEEADGYERQLAELVAEVAPVLLAESGVGPITGAQMLVSWSHAGRIRDENAFAAMAGVAPIKASSGRVVRHRLNRFGDRQLNRALHTVALCRSISHSETRAYIARRTAEGKSAREIRRCLKRYLARRFFRLLQRLDRP

SEQ ID NO: 79850 - protein, 408 aa, unidentified
MNAVGIDVSKGKSMVAALRPMGEVAFLPQEFLHTEVGLEQMACAIIALGEDTRVIMESTGRYHEPVAAALHEYGIYVCVLNPLLIKQSGGGSIRKVKTDKADAMKIAKYGLDNWADLREYTPMDTIRQQLKLCSRQYNLYMKTVVSLQNNLISLTDKTFPGVNELFSSPERADGHQKWVDFVMTFWHCDCICRVSEKAFTERYQKWCKRKGYHFSAEKASDLYASSCGHFTTLPKNENTKLLIVTAAQQMLAGKATLAALRTEMTWLASQLPEYETVRAMYGVGEITAAQLMAEIGDVRRFQRRSSIVGFAGVDPGVDESGKHSAKSVPTTKRGSPHLRKTLYQIVCTYLKKSPADEPVYQFLDKKRAEGKPYFVYMTAAQNKFLRIYYARVKECLEAFDAQQDISQG

SEQ ID NO: 79851 - protein, 424 aa, unidentified
MKFKMQDKQNQLIERISDKHLVVGVDIAQQFHVARAVNFRGIVVGDPLTFENNEDGFTILLKWINELKRKNKLNTAIVGMEPTGHYWINLSKWLFEQNIDVVTVNPYHVKRNKENRDNTQSKSDKKDALVIADMVKNGYYAIISPTSESFEQLRVLMSNRDVIVKRLVSSINQINRWVDIVFPELRQVFKDVTGKGAIATLRLFPTPIELRSMQPQSVVIEWKSLMKRQPGLRKAQLLIQLAKRSIGTRQALDAYKFHLQQLLEEYDLATTQLERVEEQVSEVLKQIPYANHLLTIKGISEISLAGILGEAGDLSGFAHGNSLLRHAGLHLAEASSGKWKGQIVISKRGRSRLRRFLYLATMSLVMNNPEFKAIHTLNVKVKKIKKMKSIMKLVGKLARIFVGIAKRNESYCPEKLQPLTSLAA

SEQ ID NO: 79852 - protein, 356 aa, unidentified
MSVYVGIDVHRKRSQVAVINEVGEVLANQNVPNGVQPILGVLGGLPAGTPAAFEAAFGWGWLVELLEDYGFDPHLVHPLQCKAIASARLKNDKVDAAILAQLLRADLLPEAWIAPPPVRQLRALLRHRAQLVRLRTLLRNRIHAVLADHGHDRACGCWSGPGRAWLASLPLPAVSREVIEDDLALIDALQVPIDRLDWEVRQRARAEPAVKILTQLPGVGPFTALVILAEVGDISRFGSARKLAAWAGLTPTVRGSDRTVRHGHISKQGSAWLRWILCEAAQTAKRHPDFATTYQAIARRRGKKIATTAIARRLLTRAYHLLTDAASGVTPTSREGSPAPGELAFLHEPATPRSMT

SEQ ID NO: 79853 - protein, 354 aa, unidentified
MLAELVDHVIGVDPDRDWITAAVVDARTTGVVAKQKFSADTVGYDDAISWAEEFTVEGERAWAVEGTASYGRGLTAALARVGEWVIEFDRPREKASKDGAKSDELDAVRAAREALGRDRLHVPRAHDGHREALRVHTVTRAGVVRARTAAINELKAFVLTAPDDLRQELRHLTTKALVKRCAALRDTPQRPIAERCLRNTMRSIARRIICFNDEVALHDTAMKQLIDDAAPQLVAEPGIGHVTAAMFYIAWSHPGRCRNEAAFARLGGAAPLPATSGQSQDRHRLNRSGDRQLNSALFVVALSRTRNHQPTRDYRDRRRSEGKTDREIRRCVKRYIARRVWRLLEHPPGLEIAT

SEQ ID NO: 79854 - protein, 314 aa, unidentified
MNNVSKVFVGVDVSKKYLDININPLNRAMKIANDEKGIKRLSKELGLYSVGQVVCEASGGYEKMMLKGLSDKGYKTWCVDPRRIKAFIASEGIKAKTDAIDAKMIALFASQKSCAYDQIYKTESTEELSALVKQRDTLVEFISIESKRMLQASNATVKKIIRKHISFMTKQVKQLETVINEFVQTDTALEKKIVLAESVPGIGKTTATALVASVPELGMVTHKEIAAIVGVAPYTRQSGTFRGRAMISGGRSKPRQALFMAALVASRHNPKLKQFYNRLIQAGKKPKVAVIAVIRKLIIILNAMFRKGELWKIA

SEQ ID NO: 79855 - protein, 370 aa, unidentified
MKPNFEPGKWFMQCVGIDIAKGTFTACLCMYEFDQGCSTAPVVFNNDKTGFNQFVKWSRKEALKGYPLRYVMEPTGVYYEQLASHLNKLSLNVCVVLPNKAREFAKYEGILTKTDDMDAYTLGMLGCLDKRLKPWTPPSPIYRELRQMTRFVADINKVKTELRNHLEALAHSETAEKSIVKYYNKLIDEIDKQLVSNQKAIREKIKQEPGLSERIDRITTINGVGFMTVATVVAETNGFALITNRKQLTRYAGLDVPAHQSGPVDPKRHISKQGNVHIRTALYFPAIVSTQCNPQMKDFYRRLCARNTQSKMIGITAAMRKLLLLIYSLWKSGEEYDPKRDKPACSKKKKEAEPPEGQPHGIDVGTSAEE

SEQ ID NO: 79856 - protein, 413 aa, unidentified
MQRLFEVCAGIDVHKRSIYVCLVKAPATGPVTREVRSFGTTTHELLGMLDWLTQAGCQSVAMESTGVYWKPVFNILEGALRVVLANAQHVRGLPGRKSDVRDCEWLADLHLHGLVKPSFIPRPDIRELRDLVRTRTTLKQDRARHVNRIAKVLEDANLKLGSVASDILGVSGRAILEALVAGQTNAAELAHLAVGRLRSKSTELQQALHGFIKPHHRLLIQTHLTLIDALDASLAALSAQIEERLRPFAATCEQLDQITGVGPEVATVFISELGADMTHWPTPAHAASWAGLCPAQHQSAGKHKRAGTRHGNRWIKQAFAQAGWAAARAKGTYMQAHFRRLCSRRGSKKAVMAVAHSLFIRCVRLSASPGECYQELGGDYFDRRNERHVAKRLVTRLQSLGYKVTLERLDPAA

SEQ ID NO: 79857 - protein, 359 aa, unidentified
MSTSKIQQHVVENQEVFVGLEDSKRTWVVCARSGGMIVQETSMPAIYDGLKNYLGNSFPGCRIKIVYEAGFRGFGLHDRLVEDGFECTVTPPHTVTEEKCSRQKNDRVDSRRLAKNLENRDCGRCHVPDKQLREDRQLSRLYEQVQRDITRESNRIRRAIDFHGLDGHFKAGKWTRRDYQAAKKVLERLELSHSMRVTFEMYYSIIETLWEKKKELIKELKTIAQDDRYKKQVRILKSVPGIGIMTAIRLLLEWGDVSRFTRKEEFVNFLGLAPREQSSGDRERRGHITRQGCRWVRAWLVESAWVALRHDPALLAKFNRISSHSGRKKIAIVAVARTLATRCRAILMSGEEYTIGLVA

SEQ ID NO: 79858 - protein, 312 aa, unidentified
MTESIVYVGVDTSKKQLDAFIAGRVKSFENTLKGTNRLAACLEKQTGPYHLVFEATGGYERLAVWDLQSRGFCVSTVNAARVRQFAQSMGTLAKTDRIDARIITEYAQAAQPRVDSLPSEQLRRLAALVGRRRELDQIRVQESNRLDTTADKSMRKEIKAHVAWMEKKLRRINDQIDQTIKEDEQMCRKAQKITLITGLGRVSAFTLLCYLPELGTLSRREIAALAGLAPYNRDSGNSHRKRHIYGGRAHVRACLYMAALAATQHDAYTARYYRHLVEDNHKPKKVALVAVMRKMLIAANSMLKNPEFQLAN

SEQ ID NO: 79859 - protein, 369 aa, unidentified
MEKDTIYVALDDSKRKLVIAILRPGATEPEEQEIPKDPPHIQRLFRRLRREGPVQACYEAGVSGYDLYRQITACDVAGHVIAPALTPRRPGQRIKTDRRDARKLVRLLRAGELTPIRVPDEAEEAARDLVRCREAVRRDVVRWRHRLLKLLDRHGRLWVTEKNWTQRHWTWIRAQHFELAALQRAFEATVFALEQALVRQAELDKEIAILAATAPYRQPVGWLRCFRGIDTLSAMVLLAELVDFHRFRRPRHLMAYLGLVPSEYSSGETHRRGALTKAGNTHARRVLVEAAWHYRHRPTVGRALANRSQAQPDEVVKHAWQAQQRLHRRYRHLVGHGKRPPVAVAAIARELVGFLWAAMTRLEMRTHVA

SEQ ID NO: 79860 - protein, 345 aa, unidentified
MPIVGGLDIHRKQITFDYLDTVTGEVKWGQIAPADRAHVRAWLARFAGHDDVAFAVEGCAGWRYVTEELAAAGIAAHLGEPADTAAARGRKRHAKTDKTDARHLRRLLAEGRLPECWIPPAQILEYRALLETYHDLRAAHTAWVQRIHAVFFHQGAPPLGEGALRTEQGLGTLRAAAAAHLSAAGQLQVATALDMLAATEAQLGPLRHQLRQAAAHLMGAKVLAARLYGVGPVTALALTCWLGGKDRFSSSRKAVRFTGLDITVWSSDRKGPPGRLSRQGPPVLRWAVYEAGKTHARTSAPDHGYYATVKDRKNSKRAALSEARKIVRQACHILTELGDDALTAA

SEQ ID NO: 79861 - protein, 412 aa, unidentified
MDVMYPRCCGLDVHKNTVVACCILSTEGPEPVKEIRTFRTMTTDLLALADWLQEKGCTHVAMESTGVYWRPVYNVLEGQCELLVVNAQHIKAVPGRKTDVKDAAWIAELLRHGLLRGSFIPSKPQRQLRELTRYRSTLVQEHARTLNRLQAVLEDANLKLASVVSDISGVSARARLEAILAGERDVEALADLARGRLRAKRDQLKDALEGRVTAHHSFLLTEHLSALEYLDEAVARVSAEIDQRLTADQEAIALLDTIPGVGLRAAEILIAEIGTDMSRFPSAKHLASWAGMCPGNHESGGKRLSGKTRKGSRWLRQILVEIAHVASKTKNTYLAAQYRRIAARRGKKRALIAVGHTVLTIVYTMLTRKQPYQDLGAAYFDQREQHRVERRLVQRLERLGYEVALHPRALAS

SEQ ID NO: 79862 - protein, 341 aa, unidentified
MTIGIDLGDVWSHYCTLNEDGEVVDRGRFRTSPSGVEKWFTDLPRVRIAMEAGTHSIWISEQLQELGHEVIVANVRVLRAISHSDRKSDPVDAETLARYARLDPKILRPIAHRTVAQQEALTWIRARNLIVRLRTAAVNAVRGLAKPCGYRLPASSTLCFAKRCVAVLPPGLAQALGPVLEQIAEMTKKIKHYDRLIKRLTETEYPETQALIQVYGVGQLTALTYVLTLGNKERFQRSRDVGCYLGLRPKRSQSGDRDPQLGITKAGNIYLRTLLVECANHVLGPHGRDSTLRQWGLHLASRGGKQSRNRAIVAVARKLAVLLHRIWITQEPYIPFYGVAA

SEQ ID NO: 79863 - protein, 296 aa, unidentified
MRYIGIDVSKATFVVAYSSDKGGEIRTFNNTTAGIRQFIGTLPKDGSIHCVMEATGNYSALLLYMLNVAGITVSMENPLKVKNFAKAMLSTIKTDKSDARLITLYGEKMNPRPFKVQGEAILRLRQKRTVIRQLTKQITAMSNLRGSLACLPVPDKGATHTVDETIKFLEKKRDRLQSELTDLVEVEFSRQLALLTTIKGIGITLATALIITTGGFTYFQNAKQVSRYLGICPTYEQSGTSVNIKGHINRNGDAYTRGLLYIAAWPASRFNAQCKDLYEAQAKRKVGKTRYDRCRK

SEQ ID NO: 79864 - protein, 326 aa, unidentified
MNPVVAGIDVSAKTLVVCVLLADGKRKPIQVENTPKGHAELIKLLRKLGMVKVVCEATGVYHLELAFALIAAQLPLMVVNPRQTHAFMQARLRNTKTDKVDAFEIAQFAARMDFVAWGAPTAQAYALFRLARAIHGYTELATAAKNRLHAAEAVRQTPKVVIKTLRMELASYERWIAILTTEALTEIAADARLARRYELLLSVPGIAQSSAVALLGELSVLSDNLSAKAWIKLCGLDPRLEESGSSIHRKTRISKRGNSKLRGAGFMPALSARRFDAGLKAFGDRLIANGKTKMQVILAVERKLFHGIHAMFRTDKPWDSSLLVKA

SEQ ID NO: 79865 - protein, 336 aa, unidentified
MDASNAVLGIDVSKKKLDVALLVGGKTKSKVIDNSAQGHQLLLVWLNKHQVDLATLHACMEATGVYYEQVATALHDAGIRVSVVNPGCVKGFAQSENLRNKNDAVDAGLIARYCVAMQPLQWVPPSLEQRQLRAWAMRIEALKEIVQQEENRLEALTVSGLNDVAAHVRQHIAWLTGEIKKLNSDVDDHIDRHPGLKHDAELMTSIPGIGSTTVMRILGQVGDLRRFESAKAFAAFLGVTPKQRTSGTSVRGRTMISRTGNASLRAALYMPSLVACRHNPILNRFAQRLLANGMAKKAVLGAVMHKLAHLLYGVIHTGLPFDVNYQSKGLAIQDGI

SEQ ID NO: 79866 - protein, 355 aa, unidentified
MDSKKYIGMDVHKESISIAVMNGAGKIVMECVIETKASMILQFFDGLRGDLHVTFEEGTSAAWLYDLLKPHVTKLLVCDPRKNASMKEGNKSDKIDARRLAELLRLNHLNPVYHGEHGLRSLKELVRSYLTITKDLGRVMSRVKAIYRSWAIPCTGKQVYAPRHRAEWLGKIGEPGVRRRAEFYYQQLDALRTVRQEVRRELLAEGKKHQAWKRLCQIPSMGPIRSAVLLGILQTPHRFRTKRQLWTYSGFGIETHSSADHRKVDGQLQRAKKQISIRGLNRNCNHDLKNLFKGAAIVASSKPGPFQEFYTALLTKGIRPEMARLTLARKIATIVLIVWKRGACFDAQHLKPQTA

SEQ ID NO: 79867 - protein, 412 aa, unidentified
MLFVGDDWAEAHHDVEVVDEAGRRLVRRRLLEGVAGLSGLHAMVADHLGDDDDPAGVMVGIETDRGPWVQALIAAGYTVYAVNPLQVARYRERHGTSGAKSDPGDAHTLAELVRLDRAHHRPVAGDSAVAEHVKVLARTHQSMIWSRQRQANALRSMLREFYPGALEAFGQDLADRDALAVLALAPSPETGRALSTSQIASALRRAGRQRNIDTTAARIQDALRREQLSAHPAVVGAYAASVKALVSVIAELAAQVEVLRGQVEAGFGRHPDAEIYLSQPGLGAVLAARVLAEFGDDPHRYGDAKARKNYSGMSPITRASGTRRVVLARYARNRRLADALYQQAFAALTCSPGARAYYDLHRARGATHHQALRALANRLVGILHGCLHHHTNYDEHTAWHTTTEDLPTPAAA

SEQ ID NO: 79868 - protein, 354 aa, unidentified
MAKTIQAERSGFATIGIDIGKDVLHLVGFDHDGRITLRRKIKRLALVSTFEALSPCIVGMEACLSAHFVSRTLRKLGFEPRIIPAKYTKPFIKGQKNDYNDAEAIAEAALRPNLNLVAEKTQAQLDLQALHRVRSRLVSRRTATINQIRAFLIEQGIAVRTGSRALRNSLFAILKNRADEISPRMSAIIIDLHDDWSALDDRIARISTEIEEMSQQEENCRRLMSVPGIGPIISTAMVAAIGTGEAFDRGRDFGAWLGLVPRQFSTGGSTILGRISKRGSRYLRTLFVQAAHIIMMRPKNWERFSFGPWLAEATKRMHKNKAAAALANKLARIAWSILRHGKGFDAHRIEGFAV

SEQ ID NO: 79869 - protein, 348 aa, unidentified
MAHFVGLDVSVKETSVCVVDDAGKVILEQKVPTEPSDIIALLSSLGVAFGRIGIEAGPLSQWLVNALTEADLPVICVETRHMKALLTAQQINKTDRNDARGIAQMMRVGLFKPVHVKTLVAQEQRMLLTSRKLLQRKLLDVESDLRGTLRNFGLKVGVVSSFRYEARVRELVEGFPRLAAIVEPLLSVRRVMRQQFAVLHKMLLDTVRGDPVCRRLMTTPGVGAVVALTYRATVDQPQRFLHSRAVGAHVGLTPKRYQSGEIDYDGGVSKCGDALLRTMLYEAAQVLLTHGSKWSWLKAWGVRVAQRRGMRRAIVAVARRLAVVLHRMWVDGSEFRWCKDSAAVPAVD

SEQ ID NO: 79870 - protein, 417 aa, unidentified
MKLIVGLDVSSTELDVCFLTDNDRFALLKEAKFENDQIGATQIKEIMLHYVNELNINQIVIGMEATSLYSFHPAMFFHEDQELSTLNTSVFIEQPNKIKKYREVFEESKDDRIDAFYIADYFRVNRNGVSILKEEQYVTLQHLTRTRLQLVEGLVRTKQHFTENIHYKCNTLSKELKNNGQKTSIFSATIMTLMTADYTLDDLNGLSLEEFADLVNQLGRGRFKSPEKVAKSISKAIRGSYRLGKIHEESVDCVLSVLVRQIRSFEKSIKEIDRAIEDIVETLPEYQCLTSVPGIGKVYAGGIIAEIGQIERFDNQAQIAKFAGLFWPHKQSGKMKSDNTYLAKRGNRYLRYYLVEAANSVRRYEFDYRSYYHKKYDETPKHKHKRAIVLTARKLVRLVDVLLRNHQLYTPPKERIK

SEQ ID NO: 79871 - protein, 392 aa, unidentified
MDSPPPRHHSATVAFEEANGSEGETMKKHSSKHDSLSSTDVELCTTICVDLAKQVFQVAGEDATGRVIYEDRIKSRQAFHDFLTRLPTTVAVLMECGPGAQAWARLLQTKGNPVRILPAQRVAEHRSGAKNDRNDAHAILRAGRDTSIASVPIKSTTALAIQALHRIRRGNIKRHTALGNQIRGLLLEHGVAMPQGDAAISQQVPRALEDASLPLPDLLRELLDELLTDWLSLGERIAALSGRLEVTAQQDKVAQRLITIRGVGPIIATAIVAKQTEPSRFASGRMYSAFFGIVPDQHSSGNKIRLGRMSKRGDGYIRSLMIQGAHAVLSQLRPDSDQPDDRRLLRWLSRLGRKEAAIRLANRNLRIIWALLQSNQVYQRKPNNNPEAAMSL

SEQ ID NO: 79872 - protein, 352 aa, unidentified
MKKIFIGIDFAKEKFDAAIIEACGLKEFGDRQYGTFPNDKKGYRQFMKWVKTNSGKAVEDEWLFCRKDTGSCSIGLSKWLYGKGVDIWIENAYSIRHSSGIQRVKTDKADASMIAEYAWRHQDKAMLFEPLSESLTQLREVFLYRHKLVQQRVAIEVRKKDKETTQEGSRALSFIKRKSRHLMGEIDKSIKECDELIDRIIAEDPELAENYAIVTSIKGVARQNGACILIYTNNFKRFDMDARKIACYYGVAPFGKESGSSVHSPAHTSHFANKLIKALLGQAAQIARIYNPEIREYYERLRAKGKKHSVAINNVKNKLLRIIVALVRKRTSYDPESYKFYRDRLNDQFVPS

SEQ ID NO: 79873 - protein, 340 aa, unidentified
MTITTVGIDLAKNVFAVHGVDQNGKTVLVKSRVTRTALPGLIADLPPCVIGMEACSGAHYWTRLFRQYGHEPRLMAAKFVSPYCMAGKSGKNDAADAQAICEAVRRPHMRFVPVKDGSQQAMQCLHRTRQGFIEEKTATYNRLRGLISEFGVIAPQSTDALRHMVFSQKDSLPLQVQQCVDDLLEHVARIETNIAEYDRILSRMAKTDHRSQRLMELKGVGPTTACALVASIGNAHNFKNGRQLAAWLGLTPSQYSSGGKSKLGRITKAGDSYLRTLLVQGARSVLIGADKRSDSFSRWVCSLVERRGYWRAVIAIAAKNARLCWASLHYGDDFRLYSAS

SEQ ID NO: 79874 - protein, 340 aa, unidentified
MSLYGGIDLHANNSVIVLINEQDEVIYRKRLPNALPTILEQLAPYHTEMKGLVVESTYNWYWLVDGLMEADYRVHLANPAAIQQYSGLKYTDDHSDARWLAHLLRLGVLPEGYIYPKAERAVRDLLRKRAHLVRQHTANVLSVQNILVRNTGARFSVKRLQELTKQELKSLLAEEPQVLAVTSSLAVLDCLRQQIKTLEKTVHKRLHHTPAYEQLLTVDGIGTILAQTITLETGAISRFPTVGNYASYCRCVDSTKISNGKRKGTGNVKNGNPYLAWAYMEAAQFAMRFQPAAQRFYQRKLAQSRNNTVLARKAVAHKLSRACYYIMRDLVPFEAAKAFG

SEQ ID NO: 79875 - protein, 359 aa, unidentified
MFTERTSVGLDVHARSVVATAIDTKTGELFKQRLVPANEVVLDWLHTLPGPVAVTYEAGPTGFGLARAMATAGIRCEVAAPSKLSRPAGDRVKTDVRDSLQLARLLRVDDITSVRVPTVTQEAARDLVRAREDVRGDLMRARHRVSKLLLRHGHVYYGGQTWSAKHHAWLHRIRFADLGTRCAYEADLEAIDFAVARRDRLDATIAELAADSEFTDLTRRLCCLRGVSTLTGFALAVEIGEWQRFNGNSIGAYLGLVPSEHSSGQSRRQGSITKTGNSHVRRLLIEAAWHHKPRYVVGPVLRARWEQAPEPARARAHIGNQRLHDRWNSYTRRHKKHTVANTAIARELAGWCWSLATLE

SEQ ID NO: 79876 - protein, 346 aa, unidentified
MSHKTAATVAHTIGIDTGKNTLHLIGLDDKGAIVLREKIARGRITARLANVPRCLIGIEAGMATHYVARELSALGHDVKQVPPAYAKPFRQGHKNDFRDAHAIAEAVQRPSTRCVPVKTDDQLDLQALHRVRSRLVGQRTAVINQIRGFLLEHGIAVRQGLRFLRQQLPDILAKRSDVLSPRMIRIMEDLSGDWRRLDERIEHVTKEIEVLAHGSKSCHQLMTVPGIGPLIASAMVAAIGNGAAFAKGRDFAAWLGLVLKQMSTGDRTILGRISKRGNRYLRTLLMQGARVILLRPANWAKHSFGPWLTATANRLHHNVLATALANKLARIAWTVLMQARSYEARV

SEQ ID NO: 79877 - protein, 333 aa, unidentified
MYYSGIDLHSDNSYITTVDDSGAVVKQKRVENNNELVLDYFQSLPGSHQAVVESTTGWYWLNDLLGENGIELVLAHAKYLKAISYAKVKTDKVDSQTLAILLRQGLIPRAHKISRELRGLRDTMRVRLRLVQQRSDTLRRLHSIHAKFNGSVPDPYRFQLAVLEHTRDTLSKEILALEKSLHPVLIPNDDIQRLLNIPGIGKLSAFTIYLEIDGIQRFNSDKHFVSYCRLVPAADNSNRTLHHRSSKDGNKYLKIAFSDAAVHAIQFYPEYKRLCQKLVRRSGEATARTVVAKELAKIVYYVLKNKTAYTGLKGQPMSRQKSQQWPRLSSPLF

SEQ ID NO: 79878 - protein, 404 aa, unidentified
MKYVGVDLHKHIIVLCVAVLVAGRPKVVRRARFRCDQSEAVRAFFEALGPFQVVVEATAAYEWFFVLIEDLADRLVLAHPKKLRVIAESTRKSDKIDAEVLAVFLALDMIPQAYRPTPRVRQHRVLVRHRCWLQRRITSLKCKVRNVLGHYNADIAGLFTRQGEQYLEAVPLSPADRFAVQALREQLRLFQRQLREADRQLEQFGQTAPCAEQEARALLDTIPRIGPVTIDVVLSELGDWRRFRSQNAAVAFAGLDPGFRKSAGKCLELHISKEGSRLLRWALIQAAWRLTVHSPRWRQMLERLHANTGSKKKAIVGVARHLLCVMFAMLQSSRPYELLGVPNGNERPPKCQKAARASARARQKGLAGTPFKENPGDRIRSDQAWDPAATPSVVPVGDLIGRPR

SEQ ID NO: 79879 - protein, 342 aa, unidentified
MDITVLGIDLGKTVCSLAGLDASGAVIFRKRIQRFRLLDFLAELPACIVAMEACGGAHHIGRFCLQHGHEPRLMSPLYVRPYVKVHKNDDRDAEAIAEAATRPTMSFVAIKSEEQLDLQALHRARERLVSDRTRLINQGRGFLMERGIRVGTGRHVFQKELTRLAAGGTVDLSHRIVLMLSDMATELADINRRVAAIDAEIKELAKTNADMRRLMEIPGVGPTIASALVAAVGTGSSFGKGRDLAAWLGLVPRQITTAGKAKLIGISKHGNRYLRKLFIHGARTVLHLVRDRTSPITRWADGLKERAHVNVATVAMANKLARIAWAVLTKGERYRAAALVGS

SEQ ID NO: 79880 - protein, 455 aa, unidentified
MSNRSRRGLSRGDRRRNEKLARLREIITRETAVLAFDLAADKQVCALTDPDSRVLARRTARVRAWQLAQTLDWGLAAAAEAGFTSVVVACEPTGHRWRVLDQLAAERGVVLVCVQPLLVARAREAEDFTRNKNDDTDAMIIARLVTELRCYLPERADPAWARLRHLGARRARLVVEVGAARQQVRDLLECAWPAVLDAAGKPLDSANWLTAVATGLDRIGATGELSELGQRGWEDFAAAVRAELAPTRWYSAIVRAVFDAATDPAAAAVGVVDQRAGALERVRFALADLAHLRARIAEVETRMTRVLDTLGVTELVTGIPGVSAVGAATILAEAGDPTRFSSARALVKHAGLCPRANESGKYTGTTSISGRGRPELRLAAWRAVFTALQHNPVLAARHAHLTGRAENPLTDTQARIAIAASLLRQLHAVIVTRTAWDPAIAAGLDRREDGAACAA

SEQ ID NO: 79881 - protein, 361 aa, unidentified
MTKSSKEVSEIVGLDLGDRFSQFCVVSRQGEVMERGRVATTATAMRKQFERMARARIALEAGTHSPWVSRLLEELGHEVLVANPRKLRMIYESDSKNDRADAETLARVARMDAKLLGAIRHRKEQTQVDLAVVRSRDALIKARTQLINHVRGVMKSVGSRLPKSSTPSFHKKATAGGIPEQLQSALAPILETLEKISEQIKNYDRQIEQLSREKYPETELLTQVSGIGNLTALTYVLTLEDPNRFGRSRAVGSFLGLRPRQGDSGKQEPQLRITKAGDPLLRRLLVNSAQYLLGHFGTDCALRRWGLELAKRGGKNAKKRAAVAVARKLAVLLHRLWSRGEVYDPFYQSQSQAAVPVLPLN

SEQ ID NO: 79882 - protein, 338 aa, unidentified
MENFVGIDLHKYVSQLAVLRESKSPSQLRFANDVVTVERVLKKLPEGSKIAVEAMGSWWWLVEVAQKSGHEVFLSHPKQTKAIASARLKSDKVDALMLAKLLKADLLPTVWIPPAAQRHIRELLSHRGRLVRQRTAVINELRAVYAKRNIDPAAKLQRARPIVSGAEDLSGYGPRIVEEDLKLLEFINRQIGGLDKELIKIALEDAQAKRLMTIEGVGPVSAVAISCWIGEIGRFSNAKKLASYFGLAPRVRQSGDTERHGHITKEGNRMVRMLLIQAALVHTRRGKGPSRKHYLGVVKRRGKQIARVAVANKLIGAIFHMMKEGIDYPDFIRRSGAQ

SEQ ID NO: 79883 - protein, 371 aa, unidentified
MEDYATCIGLDVHARSVSAFALDPMTGECEAASFGYDPASIAEWALGFERPRAVYESGPTGFHLARALGALGLDCRVGAVSRMQRPSADRARKTDRRDAEFLARLLSTRNVVEVRVPDERTEAARDLSRALDDAREDLQRARQRLTKFLLRHGLVFDERTPAGRRRGNWTRAFWAWVEGVEMPEPDAAAALEHYVDEVRSREEAKGALARKVAESAGRPEWKPVVDALRQVKGIDVVTAHALAAEAGDFSRFRSAPAFAAWCGLVPSEHSSGESVSRGGVTKCGNRHARRLLVEAAWHVPMSSRSPKPLSPGQEVSPAVRRHALKCNRRLSERREALEAAGKRPCVANCATAREMACWVWALGSMAQAGAA

SEQ ID NO: 79884 - protein, 403 aa, unidentified
MRVPAAADKAWAGIDVGKRHHWVCVVDRDGRQLLSARVANDEAGIAAVIGSVTGLAAEITWAVDIIGAPSALLLAVLSESGQHVRYASGRLVAAMSGAYTGEGKTDPKDAFVIAETARIRRNLPVTGHKGELVCNLSLLTAHRADLIADRVRMINRLRDVLTSVFPALEREFDYSSCKGALVLLTGYACPARIRRIGQARLASWLRQRRVRGYASVAARAITAAQAQRITLPGQDIAADIIAELARNLLALDERVTELDTQIAALFAEHPQAEIIQSMPGFGPVLGATLLVTAGDLAAFPSPGHLAAAAGLVPVPNDSGRRSGNLHKPRRYSRPLRRVFYLSAQTSMMREGPSRDYYLKKRQHARPHNQAVIALARRRIDVLWALLRDNRTYAATPPAPAKAA

SEQ ID NO: 79885 - protein, 332 aa, unidentified
MYLGIDIHKRYAQVAVMDEAGEIVDEIRVENANLDDLAKRYAGAEAAIEATSNHYHIHDTLSEHLDVTVAHPKELNQIADTDKKTDRVDAKELARMVRLNAVPESYVPTDEVREARALVRGRQTLVENRTKYANKIHGLLSDHGITEDVKPLTIEGREFLRELSIPSPWDSLLESYIELIETLTEEIQNLEETIEERAGSLKETQLLMTIPGVSYYTALSIYAELGEISRFDGDKSVVSYVGLNPVIRESGDSRIEGSISKRGSGRVRWLLVQAANTAVHTCSDEYLSRFYERLASRKNSQKAIVACARKMLVSIYHMLDRGEVYDPPDVSA

SEQ ID NO: 79886 - protein, 412 aa, unidentified
MEVIFGCCCGLDVHKRMVTACHRVQGVDGRGHKEIQTFGTMTADLLVLHDWLVSRGVTHVAMESTGVYWKPIYNILEASFTILLVNAAHIKAVPGRKTDVKDCEWIADLLAHGLLKGGFIPPEPIRDLRDLTRYRKSLIDERVREVNRLHKLLESSNVKLASVATDVMGVSGRLMLDAILGGHADPAVLAELARGRLRKKLPDLRKALEARFRPHHRFMLEQILGHLDFLDEWIARISEEVANRMDPFCRQIDLLRTIPGVDRKTAEVILSEIGPDMDHFPSARHLASWAGLCPGNNESAGKRKSGKTRKGNQWLRRALVEGAWAASHTKDTYLGSQYRRLVSRRGKKKAIVAVAHSTLVIAFHVLKNDVPYREIGADFLDKLNATMIQRHHIRRLESLGFKVTIEPQAKAA

SEQ ID NO: 79887 - protein, 357 aa, unidentified
MEKRLKQSLGIDVSKLNLSLSLGFLTGKLEKEFISHEDVSNDLSGYRTLLKWLKKSVDSSVDFLIVMEATGVYHQGIAHYLHSNGYAVCVMQSGRVKRYAQSLDQCSKTDALDSRMLSMLGLERTIRLWHPPSEELRQLKGLSRERSSLLKDRTTENNRQGAIDSGVYKNSKALKRHKNRLKLLNAQIELIEQEMQELVSKNKELKRKMDFLTSIPGISFKSAATVVGETLGFESIVNAKQLTSYAGYDIILRESGNFKGKTKISKRGNSHIRAALHMPSMTCVRCNPTLKQFYNRLKPNKAKPLVALIAVQRKLLILMYTLWKNEQVYDAKFETKKQQKHEAPAARDNKLIAQFVS

SEQ ID NO: 79888 - protein, 425 aa, unidentified
MNSDGTDEPRFGAFVAIDWGDKKHAWSLQPADSDRRERGEIEHSPEAVAAWAAMLSTRFVNQPVALAVEQSRGPLVFMLSKYEQLHIYPIQPRASAQFRTALVPSGVKDDPSDAELLLDLLVHHRARLRCLRPDSEQTRLIQHLVEGRRKLVNERTRQTNRLTAQLKLYFPQLLDWYDAVDSPLVGALLERWPTLEALQRARPDTVRSFFTAHNCRSQELIQRRLEKIRQAVPAVSDKALIEASKAMTKVLVGLIATLQLGIDGFDHQIAQAVEAHPDFAIFDSLPGAGPVLAPRLLAAFGSQRDRYQSAADLQTFCGIAPVTERSGKSKWVHVRWACPRFLRQTFHEWAAHSIGFCDWARAYYQLQRNRGKDHHAAVRALAFKWIRIAFRCWKDAVPYDDTRYLDSLRRRGSPVIAALASQILA

SEQ ID NO: 79889 - protein, 386 aa, unidentified
MKKDNIAKLQVTKSQIRRMAAKQRLTVGLDLGDRSSRYCILNEAGGKESEDQLATTKAGLEWLFGKMAACRIALEVGTHSPWVSRHLAGMGHEVIVANPRKVRLITQSVKKNDRMDAEQLARLARVDPQLLAPIRHRGVEAQGDLAVIRARAELVDCRTALINTARGLAKPMGERLKSCDADYVKESLAEGLSEATQNAIRPLLKSVEEISKQIGVYDKKIQEIEKRYPETKVLKQVNGVGTLIALTYILTLEDAERFVHSRDVGPYLGLTRKLRDSGESQPEMGISKAGDVLLRRLLVQAAHCILRDGAPDSDLKVWGLTKVQAGAKTGSGKKGSKRRKKKAVVAVARKLAVLLHKLWVTGEVYDPQYNRKAVEAAQGKEKAAAA

SEQ ID NO: 79890 - protein, 351 aa, unidentified
MVVVGADVHKRTHTFVAVDDVGRKLAEITVPTTTVGHQKAIRWARSAFGTGLTWGIEDCRQMSARLERDLLTADQHVVRVPAKLMAHARASARTRGKSDPIDALAVARAVLREPDLPVASHDEQSRELKLLTDRREDLVKIRTGMINRLRWRIHELEPGREPKPRSMDQANHRAALRAWLTGQPGTVAEFALDELTDIDRLTEQINQLAKRIGKATAAAAPTLLEIPGCGELTAAKIVGETAGIARFRSEAAYARHTGVAPIPVWSGSTNGRVRMTRTGNRQLNCALHRIAITQIRMPDNRGQIYYRKRLAAGDTKREALRCLKRRLARTVFNTLKTDHATTTGGELPAAA

SEQ ID NO: 79891 - protein, 344 aa, unidentified
MMIEASSKLYAGLDLHSNNTFCAVINQTGEAVFQKRLPNDLPSIAQALQPYQVPLQAVAVESTFNWYWLVDGLQAAGFPMQLANPAKIQQYSGLKRTGDPSDALWLAEMLRLGILPTGYIYPKEQRATRDMARRRMLVVQQATRTLLSLQSMVTRHTGQTVRGRGLEDLTLAEIREAFPAVASQETAAALLELLHEQRRIEQTLAKNVVARVKLDGAWKRLLSLPGVGNILGVTIMLETGPIERFASAGDYASYCRAVDSRCDSNGTKKGENNRKNGNKYLAWAFVEAANYAARYNAKAQAWLARKTARTLRVVAVKALACKLAKAAYYVLRDDVEFSEQKMFG

SEQ ID NO: 79892 - protein, 343 aa, unidentified
MEYYVGLDVSLKQTSICVVDQSGSVVREGVVDSDPEAISVYVRSKAPGAVRIGLETGPTSTWLWTELKRLGLPVICIDARHAKAVLKMQINKSDRNDAIGIARIMQTGWFKEVHVKDIDSHTVRALLASRALLVKIKRDLENHVRGLLKNLGLVIGRAKFNVFAVRVEELIEGRPELIAAIRPLLEARNAVEQQVSELDRKVMKLARGDAQVQRFMTVPGVGPITALAFKATIDDPARFARSRSVGAYVGLTCRRHASGEVDWSGRISKCGDAMLRSYLFEAAGVLLTRVPKWSAVKAWGVKLVKRNGLRKAKVAVARKLAVILHRMWIDGTEFNWSKKEIAA

SEQ ID NO: 79893 - protein, 340 aa, unidentified
MEKRHIGIDLHRNRFTCCIRLENERTYVTEWALEDLARFVKKLRPSDEVAVEITSNTRLFHDAVASHVARVVVVDTNQFRVISQSVKKTDPNDARLLSLYLSKGLLPEVRMKNKDLAQLASLTQTRDTLVKQRTALKNKVNNILSARGLNLAKEALSSEKKLAEVLELPFDEIVQIELRVIVEQIRSLNKSIAELGKTIGDEGSKLEGHKGLSTIKGIGKITGAILLSVIGDVNDFADEGRLASYFGIVPRVSNSNETERSGRIHKRGTKLGRTALVQSALIAANYSPYLKRFYEQVKARRGAGKAIIALARKFLGIIYRTLKNKWVFDDFPNFVLAEES

SEQ ID NO: 79894 - protein, 350 aa, unidentified
MTTMTPEPGFVTGGVDTHLDVHVAAAVDHLGGLLGTQSFPTTASGYRQLSRWLSSFGPVHAVGVEGTGSYGSALAGHLAAAGIEVIEVSRPNRQVRRRHGKTDVVDAIAAARAVLSGQASATAKAHNGPVEALRLLKIVQRSATKSRTQAVNQLRTIVATAPDDLRSKLRALKTPGLVETCAAFRIRIDDDGLAAVTRLAMRELAQRIQLLDEQLARTKVRLHRITTAVAPDLVARKGVGPDTASTILVSAGDNPHRLRNERAFASLAGANPIPASSGKTTRHRLNRGGDRQLNSALWRITVVRLATDDGTRAYLERRVSEGKTKIEAVRCIKRYLAREIFAALPQTAAG

SEQ ID NO: 79895 - protein, 311 aa, unidentified
MDYRLRFSPTLPTDCSHEGKEATIFYESLPSGALIGMEATCTAQWFERLLERCGHTLRVGDAAQIRASVVRKQKTDTRDARHVLDLLVSDRFPSVWIPTPAERDARQLLLHRHTLVRWRTMVQNQLHALARNQGILPHTTFWTRTGRQQLESLALDPWAARRRQDLLAQLDQLNPQIEELTRQVQQEARRRAESTALMNQPGVGPIVSLAFVLTLGTAKRFPRGKQVASYLGLNPTEHSSGGTQRLGHISKQGNRMMRWLLVEAAYIAVRKDPQLARVYKRLAFRRGGCVKYKSNKTYRRLRCRAARAQGW

SEQ ID NO: 79896 - protein, 368 aa, unidentified
MGQKSSKLYIGLDVHKESIDIAVAEEGGEVRHYGQIAGDTNALARTVRKLESSGRRLVFIYEAGPCGFGIYRGLIARGHVCWVVAPSNTPRRVRDRIKTDRRDSVKLAGLARAGELTPIYVPDVCDEAMRDLVRAREDAVVMQRQARQRLAALLLRNDVRYPGKTAWTAAHRRWIADVRLPQPAQRLAFEEYVQAVEEATVRVERLTGYIAQEVAQWRWQPVVHALQACRGIQLIHAVRIVAELGDLSRFNHPRQLMSYLGLIPSEDSSGERRRQGSITKAGNGSARRALVEAAWAYQYMAKVSGLIARRQVKVPKAALDIAWKAQVRLCARFRRLAARGVSRNKIVVAIARELAGFVWAIGQQVKPV

SEQ ID NO: 79897 - protein, 433 aa, unidentified
MIKINYLSTLFVGIDVSSKSNAVYAMDFEENTYISSTFGNNQPGADELAAMIVSCMEKHNNLDTIVVVLEATSVYSVHISNFLATSEILMPYKPYVFCVNPKATANYRKSYIGMEKTDPSDAFLIADFARVGRTKKLEPWRGGQFIALKRLTRHRMHLAECIAREKTYMVSNLYLKFSELQLLDGDSRPFSNMYGATASAVLTEFLSPQEIIELPEEELLLFLARKSRNRISDISKTSELLRKAARDSYRLDKCMYEPLNISLASSFNCIHAYQKEIKLIEQAIDKTICGMNPNGLTILQSIPGIGPVWASGILSEIGDITAFHSSDALAKYVGLFWPKGDSGDFTSEDNKMSRSGNPYLRYYLGEAANSVRKYIPEYAEYYARKYAEVPKHQHKRALALTSRKLVRLVFGLLVKNQLYTGEKLGTEFNTNPN

SEQ ID NO: 79898 - protein, 366 aa, unidentified
MQKLSTRRVMGNKILEGHQLTIGLDLGDRWSFYCVLNELGEVVREEKLPTTPDAMKRTFEKLPASRIVLETGTHSPWISRLLTELRHEVIVAHAQKVQLITKSSRKDDRHDARTLARLARIDPQLLGPVRHRSAQAQIHLTVIRARAELVKARTALINAARGLAKSYGERLPKRGTQQVSQKLAAALSTPLGEVLEPLLREVESLNERIQEYDQRIEQIAKEVYPEVALLKQVKGVGTQIALTYLLTIDDPYRFPKSREVGCFLGLRPGRRNSGQSEPQKKISKEGDRYLRTMLVQGAHYILGPFGEDSDLRRWGLKLAERGGKNAKKRAVVAVARKLAVLLHRLWVGGEVYEPLRNTNRAMGAAA

SEQ ID NO: 79899 - protein, 427 aa, unidentified
MTASTQLTPDTVCVAIDIAKRYHDVLIRWPDGREKVLKMPNTRAGHDDLIRFLQQQKAPVLAVLEPTADFHRPLAYRLAHAGIPVHLASSLAGARVREALYTSWDKHDRKDARVLMYLLTQGMTHPFHDPLREGYFDLQEISNTYQQIARARTRCQHSLVNHYLALYFPEMERYLSASRAHWFCHFLLAFPTPASITALTREAFVEAAWESVGRKVAKQQFLESIYEAAQTSMGLPVVPDSPAVHTFQLQVKQYLSLTEQRQALEAMATTCMRDNKDFARLQTLPGVGPIIALMILAESGDLRRFSHHRQYLKFCGFNLAASQSGNTCSRYRLAKRGNARLRYAYWLAATVAVRMRDNSFRTKFDRYIGKDPTDGDLKRKALTAVAVKMARVAHSLIKHEVDYRGYHEYCIPGGGTSLQSRRAARTS

SEQ ID NO: 79900 - protein, 378 aa, unidentified
MNRIIKIGMDVHTTNYTLCIFEPSFEHDGTVHCITQVKPEIKKIIHVIETFKKKHVNEELNIVCGYEAGCLGYSLYHELKEKGVECVILAPTTMKTEKGGRKLKNDYRDAKMIAECLAYGGYSAVHVPTELDNSVKEFIRMRDDIKENLKSIKQQIIAFLTRNGKQFEGKSFWTRKHIDWINTVSFSEPLLQDTLKEYMIEYNHLCDRVETLDKQIEEVSLEEEYVEKVQQLQCLIGIKTHTALSLIVETSDFNRFKKGKMYSAYLGLIPGDDSSGGHENKLGITKAGNSHLRRLLVEAAQGYTRGKVGFKSKDLKSRQEKCSSEVVAYADRANERLRRKYYRMTLRGKKYNVAKTAIARELACFVWGIMTDHIDLCS

SEQ ID NO: 79901 - protein, 350 aa, unidentified
MMIIGCDYHPGFQQIAFVDTETGELQERRLQHREEAETFYRDLGAQGVKVRVGMEASGQARWFERLLTELKFDLWIGDAAEIRTKRVRKQKTDRQDAQLILRLLMEDRFPQIWVPSWENRDLRQLLWHRHRMVQARTRIMNQLQAVALNEGLRCKKRLWRDKGREQLESFRLAPWASRRRRDLLALLDRLTPTIAELTQAVEQEAEKCPEARRLQTHPGVGALTALAFVLIIGRADRFQCGKQIASYLGLVPLEESSGQRRRLGHITKQGNSLLRFLLVEAAQVTVRSDQEWRNRYFHLALRRGRKIAKVAMARRLAVRLYWMWRKGWDYEQLKKFGSHAGQPGYRDGVK

SEQ ID NO: 79902 - protein, 339 aa, unidentified
MSDLVVTVGPDLAKNVFQVHGVDAEGRVCVRRKLRRAEITPFFAGLSPCLVGMEACASSHFWAREIARLGHEVRLMPPSYVKPYVKRGKTDASDAEAICEAVTRPMMRFVAVKSEGQQAVLMLHKTRELLVRQRTMQTNALRAHLAELGIVAAQGVEGLSSLKTHFHKVRGSLPEHATAALQALIRMADCLVDEIERLESRILDWHRANDASRRLATIPGIGPITASAIAANVPDASLFRTARQFAAWLGLTPSANSSGGKDRQMGISKQGDGCIRRLLVSGASAVMRFARQGDPGKAWLVGLKERKRPKVAAVAQADKTARIAWAILRRNEVFAARTA

SEQ ID NO: 79903 - protein, 424 aa, unidentified
MRQRGAHRVCELDIGVRSEGDKRVAAAQETAWVGVDIGKTHHWVCVLDADGKRLLSVKVANDEAEILALIATVQGLAEQPIWAVDIIGAPAALLLALLAQAGQSLRYASGRVVAAMSSAFAGEGKTDAKDAYVIAETARLRRDLAVVDQDTDLVRNLAMLTGHRADLVADRVRMINRLRDLMTSVFPGLERAFDYASRKGALVLLTGYASPHRIRRIGHTRLAAWLRQRKVRDSAGVAARAITAARAQMTVLPGQDLATSIIAELATNILALDQRLRSLDAQIAETFDQHPQAAVIQSMPGFGPLLGACLLVGAGDLHAFPSAGHLAAAAGLVPVPNDSGRRTANLHRPKRYSRPLRHVFYLSAQTSMLRAGPNRDYYLKKREQGRTHSQAIIALARRRVDVLWALLRENRTWTTSPPVVAQAA

SEQ ID NO: 79904 - protein, 339 aa, unidentified
MIAVGVDTHKASHYAVALDHLGQLLGELSFTASTAGYAKLRAWALRLVASQQVVFGVEGIGSWGAGLCDYLQAAGQHVVEVERPRRRDRRAGKSDRIDALAAAKSVLSGEHLSTPRRRGVLSVIRALLIARRSAVGERTRVLNQLQAVLATGPVALRERVGSGTGKQLERRIIAMRVPANSDSQARAIFGVMRDLALRSRALASDAQRYQRDLAALVRSLDATLLDEPGIGPISAAKLLACDPSRFTHEAAFARCNGTAPLPASSGQTVRHRLNRGGDRQANNAIHTIAIIRAKHQPETRAYLARRISEGKTKREALRALKRHISRDIYKRLNDLPLTS

SEQ ID NO: 79905 - protein, 339 aa, unidentified
MLYLGLDVHKKQTTLCALDENGKKLFTRNIKGYWDTVVEEVMKVKKEHQQQIAITFESSCGYGPLHDGLAGIASRIEVAHPGHLRIIFRSKKKHDKIDSFKLAKLLYLDAVPTIHVPDADVRAWREMINFRSGLVSKRTGVKNEIRSLLRGRGVAPPKKLWTKAGIKWLRLLEFDLDLVSFRRDVLLEELASLESQLARVQRLLAQRARRHPGVQLLMTIPGVGIRTAEALVAFIDDPHRFGKVNKIGAYFGLIPSQDQTGDKNHLGHITKEGCPEVRRLATEAGWQAIRRSPTVAAKFEHWMRGDPDRKKIAIIAVAHYLVRVSLAMLKTGEVWREAA

SEQ ID NO: 79906 - protein, 402 aa, unidentified
MMQDTPQPQSIDVFIGVDVGKGQHHAVALDRNGKRLYNKALPNDEARLRALLAELRAHGQILFVVDQPATIGALPVTVARAEGVLVAYLPGLAMRRIADLHAGEAKTDARDAAIIADAARTMPHTLRTLRIDDEQLAELNMLCGFDDDLSAQVTQTSNRIRGLLTQIHPALERVLGPRLDHPAVLDLLVRYPSPAALASAGQRRLANRLSKLAPRLATRLATEITEALRQQTVVVPGTSAATIVLPRLAQQLAGLRKQRNDLSVEIEQRVLAHPLCPVLTSMPGVGIRTAARLLTEVAHKAFCSAAHLAAYAGLAPVTRRSGSSIRGEHPSRRGNRVLKRALFLSAFSALRDPISRAYYDRKVQQGKRHNQALIALARRRCDVLFAMMRDGTLHQSKDASLA

SEQ ID NO: 79907 - protein, 341 aa, unidentified
MQITTIGLDIAKNVFQVHGIDAAEKVIVRKQIRRGQIIAFFEALAPCLVGMEACATSHHWARELTKLGHEVRLMPAKDVKAYVKRNKNDAADAEAICEAVRRPTMRFVRIKSAEQQGQLMLHRARDLLMRQRTQLINALRAHLAEVGITAAQGREGIKELLAIIAQDEGSRLPVDAHASLTVLAAQLQAVQTTIGSIEKRIVAQHRSNEASKRLETIPGIGVIGATTITAVVTDPKAFRSGRDFAAWIGIVPRQDSTGGKQKLGPISKQGDQYLRRILIVGAHSVLRRARQQPQKYPWLTQLLARRPFKVVAVALANKMARIAWALLARGGTYRAPQLVAV

SEQ ID NO: 79908 - protein, 346 aa, unidentified
MQAIRFGIDLAKSVIQVHGVDATGQVVVQRQLRRGQVLKFFDRQPPALIGMEACGSAHYWARELVKLGHEVRLMAPVYVKPYVKRGKNDARDADGCCEAVDRPTMRFVPIKTEAQQGQRALHRARELLVRQRTQCGNAIRAMLYEMGLISSKGRAGICELIRRIEAGETDIAPGLLVPLRPLARQWRSLEREIGVLDDQLQAEARAHPDMRRLMTIPNVGPVSAHAVVAAVGDGRQFASARDFAAWVGLTRLNHDSGGKTRLTGHISKAGDRSLRRLLVLGASSGLRHARTRPDKASPWITGLLARRPVKVAVVAQAAKTARIIWAVLTCGEEYRTQDLRAQPHRA

SEQ ID NO: 79909 - protein, 376 aa, unidentified
MNEKLRFLGLDVHAETIAVAVAEPNGEVRSLGMIANREDSIRKFIRKLGSPDHLRACSEAGRTGFVLYWQLTQLGVKCDVVAPSLVPKKPGDRVKTDRRDALKLARSHRSDDLTAVWVPDEGSEALRDLVRAREAAKQDQLRAKHRLTKFLLRTGQRPPLGVKAWTEKYVEWVQQVRDTHPAQEATLLDCLNEVQHMEERVKRLEQSIVEVIQLAPAPMQEVVRGLQALRGIAHISAVTIAVELGNITSRFESARDLMGYSGAFPSEDSTGQRIRRGGITKSGNAHLRRIVVESAWSYRHRPAIGARLRRRQEGLPAEITEIAWKAQNRLHKRYMTLMARGKEQRKAMTAIARELLGFIWAIGIKAEAACRQQMAA

SEQ ID NO: 79910 - protein, 415 aa, unidentified
MEKVYDICCGVDVHKKLIVACLRSGRKNEIRQFGATTRELLEMAAWLNEAQCEMTAMESTASYWKPLYNVLETWGLPVMVVNAHHMKAVPGRKTDVQDAEWIADLLQHGLLKASYIPNKEQRELRELVQYRKSLIEDRGRELNRLQKMLEGGNIKLSGTVTQINGKSARNILNFITDGGYFDDAKYDEMLANKEIASNLKASKEQIIDDLNGVLSPIQRRVMKELLSHLDELNEHIRNLDDDIDRFMKQEDRDAVQAIQEIPGIGANSAQAIISVIGNDMSRFPSDRHISKWAGLCPGNNESASKRKSGKTTKGNKLLRTTLVNCAHSAVKVKTSYFSALFARISAHRGKKRAYVAVAHSMLVAIFHVLNDNVAFKDLGADYYNQFNRERKANGMLKKLKALGYEVTIAAVPALA

SEQ ID NO: 79911 - protein, 342 aa, unidentified
MRIVVLGIDLGKNVCSLAGLDETGAVVLRRRMKRASVLPFTAQLEICTVAMEACCGAHHLGRQLVAQGHVVRLMSPAYVQPYVKAQKNDERDAEAIAEAATRPTMRYVEIKSEAQLEVQSLHRVRGRLVAERTALINQLRALMLERGIAVPQGRCKLARYLPAILADERNGLGPRLRRLIEDMREEWRSIDRRIKGFNDELAERVRNEDTAKRLIRIPGIGVLTATALVAAVGNAQTFTSGRDLAAWLGLVPRQATTGGKPRLLHISKRGNGYLRMLLIHGARTALPGLAKKDTPLGRWVKALLARAHRNVVTVALANKLARIAWAVLARDRQYLTVQAIGK

SEQ ID NO: 79912 - protein, 426 aa, unidentified
MTYRIAGIDVHKRMLAVVIADVAVEGEYQFERRKVGTSPSELCRLADWLVAQHVEEVVMESTAQYWRPVWATLEQRWRLQRLQESDGARSGQLHLAQAQSNRGAAGRKKDFPDAERLVKRLVAQELKLSFVPDVEQRLWRTIMRRKHQLTRNRVQFQNRLECLLEEAHIKLSSLVSDLLGKSARYMLQAVAEGETNPETIAALADHRLRATASQLRDALGACRDLHPVYRQLLKMALEELKLMEEQIDKLEQEMANLLSAQQDVVQRLAEVPGLGVDSAQQIIAEVGPEAAAFPSAKHLASWVGVCPGEEESAGINYSHRSPKGNRQMKGLLNQASNAAVKTKGSIFEFIYRRLVVRLGHAQAIGAIAHRLCRLIWMILHQAIRYEERGPAVSRSTTERRAAKMIRELRRLGYRIEPVECKAEGSV

SEQ ID NO: 79913 - protein, 367 aa, unidentified
MHVNTIGVDLAKNVFQIHGVDSAGKVVITRQLRRKQVLEFFSKLPGCLVGMEACGTGHHWAREISKLGHTVRLMPPSYVKGYVKRSKNDAADAAAICEAVTRPSMRFVPIKSTDQQALLMLHRTRDLLIRQRTQLINALRAHLAEFGLVAETGREGVAQLGAIITDEGNHEALPSAMKQALQAIVDQLAALELQVGALDRAIHAHHRANESCRLETVPGIGVIGATAIASTVADPSGFKSGRDFAAWIGLVPRQHSTGGKERLGGISKQGDRYLRRLLVIGATAVVRQARLHPQKACLDHEAAGQETSQARRRCGGQQDGAHRLGDHGQRRILSSAGTCCSHLKRLGKWEHEATAEQDNRIARVMMA

SEQ ID NO: 79914 - protein, 418 aa, unidentified
MHETQSWFAGVDWASQKHDVWLTDASGKRLGKRTFAHNGEGLAQMCDWLIATSGGKPEDIHVAIEVPHGAVVETLLDRGFKVYSINPRQLDRFRDRFSPAGAKDDSRDAETLSSSLRTDRRAFHQVSLAGPAIIQLREWSRMADDLRADQIRHANRLREQLQRYYPQMLQFDSDLAEEWVLKLWEAAPTPAKAARLRQAEVEKLLKRHRIRRIGAAKVLAILKEQALIVAPGVTEAAVAHIRVLIESIRLFTQQLKEAHRQLDKLCKLLAEPIASENEQTGPEPEQTLGAILQSLPGAGRIVISTLLAEAFETLQRADYPILRKLCGVAPVTRRSGKSRAVTRRLACNPRLRNAIHYLADAARRCDEKSKAKYLALKARGCSHARALRTIGDRLLYVACTMLKNGTLFDPCLESQKCA

SEQ ID NO: 79915 - protein, 374 aa, unidentified
MIIQQQHFNLNPFEFDIFAGMDVDKRSISVTFVSHEAVLRSIKIPYDSKNLMRYVEKQFPEKRIAFVYEAGPTGFGLYDDLVAADRVCLVVSPSQTPRTAAERIKTNRVDSRKLAMALRGGELRGIHVPSVACRQLRHLTHLREVFLHQVTSTKLRIKGMLLLEGIGFPADGNHRNQWSGEIIDRLKNLSLPEVLRFKLDQYLETLQFGKTHLLESTRQTACFCKKDPELRECMELLMTIPGIGSTVGFYLLSRIGDWRLLTHPSQVGALLGLVPTENSTGDRTRRGSISRMGDSVTRNKLIETSWTAIRHDPELKEFYERIRLRHPAPVAARKAIVAVARKLSTRIYAVLKYQRAYVIRITKSEPQAQGTTRG

SEQ ID NO: 79916 - protein, 417 aa, unidentified
MFNLIRQRCCGLDVHQATVWACLMIVQADGSIAKTIRRFTTMTNDLLQLRDWLEENQCQHVVMESTGVYWKPLYNILEDIAEITLANAHQVKNLPGRKTDVKDCEWLAQMHLCGLVRASFVPPRPIRDLRELTRRRRKLVDNANSEKNRIQKILEDANIKLSAVVSRIWGVSCREMLEALISGGYTPEEMANFARARMRKKLPELKEALTGKVTDEHRFILTQCMEHIQFLEKQIAAIEEQIDEKLKAYSEVYECLMSIPFFAKISTAGFIAEMGADMSPFLTGAHAASWAGLCPGNYESAGKRKSGKTRHGNKYLESLAVEVAWAAIRRKDTYLRAKFQRLAYRRGPRKAILAIAHSIIKIVYHIIKERVCYMEPEIKEPPEPQKRKMMEKHLNALERLGYKVEIALATDMQLQVA

SEQ ID NO: 79917 - protein, 405 aa, unidentified
MGKVFVGHDWAEDHHDVFVEDDTGCRLAGGRLPEGVDGIARFHELVAGRVEDPADVVIAAETDRGLFVNALVAAGYTVLAVNPMSTSRYRQRHSTSGAKSDPGDAKVLADLARTDAHNHRTVAGDSELGEAIKVLARAHQSMIWTRQRQTNQLRSTLREFYPAALEAFDELAGRDALAVLTIASTPTAGSHLSLSKIASALGRAGRQRRLAQRAAEIQTALRSEQLAAPALIAEAMGATVTALAAVIVELNTQIASLETRLADHFEQHPDAKIIRSLPGLAMTLGARVLGEFGDAPNRYVDAKSRKNYSGMSPITKASGKHHVVLARHARNKRLSDACYLWAFAALTASPGARAFYDQHRANGNTHNRALRALANRLVGILHGCLRHDALYDEHTAWAHRHQHAA

SEQ ID NO: 79918 - protein, 301 aa, unidentified
MKLIRVGVDLAKSVFQIHGVDRSERTTWRRRLRREDWIDALRERLEPGGEVGMEACGGAHHWARELQKLGYRVKLIAPQFVKPYVKSNKHDAADAEAICEAMARPGMRFVPVKSVEQQDIQAMHRVRASLVEQRSAKANQIRGLVAEYGLVAPRELLHLRRALPRWLEDEGNGLTTRFRWLLRGLQEELIGLDQRIAELDREIEEIARSEPAAKRLMQLRGVGPIIAIAMIATVGDARQFRNGRQMSASIGLTPKQHSSGARSGCWASAREATPTYAACSFTAHEPSSAPPGQRTTRSVGG

SEQ ID NO: 79919 - protein, 318 aa, unidentified
MAQQGRIVGIDVSKLKADACIRALQQWLSQPSTREGEQQLIAWLRDNRVGLAVMEASGGYERGWAAALREAGIAVRIVDPKRVRYFAKSAGRLAKNDPIDAEMIAWFAETFATEVPLAHDPDRELLDRLVTARRLLVRLSIPIRQLAEHRPPRIVMTAQRAILKAIDAQRAKLEVTIAAKIRSNAKLAARAAIIDSVPGLGAQFVAGAIAWLPELGHITNKAAAALVGIAPYDADSGEHRGERHIKGGRREIRDLLYMATLGAATRHNPVIQAYYQRLRAKGKKAKVALVAGMRKLIVILNTMLARGQMWNPPAAGVP

SEQ ID NO: 79920 - protein, 387 aa, unidentified
MKVRMVNTPSADSNNEPVACYVAIELSKSGWLVGFLTPLSDKTGRYQVKAGDAQALLDLIERVHTRVARQLNRPVEVMSCYEAGYDGFWLHRVLEAHGIHNHVLDPASLQVNRRARRAKTDRIDVDRMLRALIRYLRGEPEACSVAQVPRVEEEDAKRLHRERKRLVVERVQHVNRIKGLCAAQGIYNYAPLRPDRWSQLEKLRTGDGRSLPARLKSEIVRELKRLELVLEMIETVEAERDAIIKDPRSRHLNADKIKMLARLRAIGPEFATSLTGEVFYRKFANRRKLGRYVGLDGSPFRSGSVERDQGISKAGNPVARSMMVELAWTWLRYQPDSALSIWFRERVGNLKGRPRRIAIVAMARKLLVALWRYLETGVIPTGAVLKA

SEQ ID NO: 79921 - protein, 403 aa, unidentified
MITCGIDWAEDHHDIALMDDSGFIIERRRITHDPNGFAELLAMVADHGGTADDVPIAIETDKNLLVVALAGAGFTVYPINPRAVARYRERHGQAGNKSDSRDAAVLADIVRTDRHQHRRLPANSEQQQAIKALARQHQEAIWAQNQTISRLRSVLLEFYPQALQAFPKLKHRAAMEVLSIAPTPTDAAKLTRPRISNALKRVGRRNDPALVTQIHSDLHAPGLRQPDAVEVALGHTVASLVAIIVAMLDAVAVLERELVTAFAEHPQADIIDSVPGLGGVLGARILAEIGDDPTRFSSPTGLRSFAGTAPVTIASGRSHYVKARKVRNRRLADACHWWAFAALTWSAPAREYYDHRRAVGDHHNAALRALANKLLGRLWWCLQHDQSWDDTAAWPRAATPAAA

SEQ ID NO: 79922 - protein, 352 aa, unidentified
MKVVVGVDTHKESRAIVVLDSVGAVLHDTTVPATEEGYARAIAAVVEYEDVAWGIEGAGSYGRGLVDALLRRGAVVYEVPGALTKRHRKHASRRGKSDAQDARAIAEVVLRERERLPRCQQMDEQEALRLLYDRRDRLVRTRTEAINRLRGAALRLDLHDLPTKLTGRAALQTVRRTSASFRGASYTADALVDEIEEAAADVERLGVRIAAIEKQLVPFVERLAPSLLALRGVSSVVAAGLIGHAGLLNNCRNAAAFAMRAGAAPVPCSSGRNQAVRVNTGGDRQLNRCLHTIAIVQVRAPSHAGRIYYDRKRAEGKTHRQALRSLKRQLATVVFYRLATTLRTRSIEKFAA

SEQ ID NO: 79923 - protein, 430 aa, unidentified
MNPPQKIDPSSSSPTPFAAWIGLDWGDKEHAFCLVASGSAQSETGKLTHSAETLHRWFKDLEQRFGGRPVALGVESNRGAVLPVLAQYAWLTIFPINPVTSARYRKAFIPSGAKDDLPDAAIVLDLVRLHQDKLRPLAWEDANTRQLSALVLARRDTVDRRTQTLNQLTRLLKTYYPQAFDLAGEDLKAPMALEFLRRWPDLISLKAARPSAIRNFYYRQNVRRPELVEKRLAQIQEMVALTTEEAVVSVALLQLKLLLEVIAAFNKHIACFEAQIATTFAAHADASLFKELPGAGRALAPRLAVAFGTDRTRYPDAASFQKYVGVAPVREKSGAQLWTHWRWQAPVFTRQSLVEWAGQTVIWCQWAKCYYERMTAKGKKHHVILRALAFKWVRILWKCWKTNTPYDEAVYLKALERKQSPNLPRPETSV

SEQ ID NO: 79924 - protein, 468 aa, unidentified
MREKLHSPLEVLLGCPVDSRLDGKERQSESVCITHCPTIHAPTSNQGECSMSEERNARPSRRYVALDIHKHYCVIAGVDREGRVLLQPMRVEHADLEGWLKRNLRASDQVVIESTTNAWHVHDLLEPLVERVLVANPIKVKQIACARVKTDIRDTLILARLLAANLVPVVWVPPLHVRQLRQLLSQRRQLVETHTQIVNRMHSVAHRHHLSHPAGKRFNEKNTGWQKDKILSRVEQFQLGLEMENRAYIEKQIHKIGKEIAKLSHQKPWAQSMTYLMQLPGFGVITAMTVLAAIGEIGRFETPKKLASYSGLTPGLEQSGTKKRGKGITKEGRKELRWAMVEVAQRAVKSDPLWKRRFQELQRRMHRNQAIVAIAHRLLELVWYVLTRRQPYRHFTHERIAYKYLTWAWQMDEAARDGLTRQQFARYYLMRLGIGHDLARVALNPKYPRKLASEAELLALRPELKHIE

SEQ ID NO: 79925 - protein, 425 aa, unidentified
MTRPQLTPPAGVLVAIDIAKARNEVLIEVPGSGRRRRLSVLNTRAEHDRLIALLSDLGQPVTCGFEATGNYHRPIAWRLLQAGFAVRLISSVGLARTREALHNGWDKNDPKDAQVMLHMIRIGASQVYHDPLAAGINDVQELSKTHDAVSKAKTEVLHRILTHYLPLYFPEVDRFRHNSRSDWFFAFLDRFPTPACITALSKEAFIAAAWDVVGRKVAKAQLLGDIYETARSSIGLPVPPDAPAVSMFRLVIGEVRGLIQQRDAIEATADALLTDSSDYKLLRRIPGIGPINALTILAEAGDLRRFGHHRQFLKFCGLDLATQQSGTFRGQTKLSKYGNARLRRTLWLAGQVAIRQRENGFRDKFERYIARDRHNADLRRKALTAITAKMARVVHAVIKTGADYRPFVEGPVPGGRTPLSRAVRA

SEQ ID NO: 79926 - protein, 361 aa, unidentified
MKCVQSNKLDFSGQNIYVGIDVHLKSWSVAILSEHSVLKRFSQSPEPEALHKYLVSNYPGANYFSVYEAGFCGFWIHERLTDLGITNIVVNPADVPTMSKEKLRKTDAVDCNKLARELRSGSLVGIYVPGVETLELRSLIRMRNLIVKDSTRAKNRIKSLLRFHGVEIPEEFTRCSVGCWSKRFLSWLQALELSTEYGKKTLELHLEQFIRLRKMLLQETRAIREISRKAPFEKPIRLLTSVPGIGVTTAATLMVELDDIVRFKNADHLASFIGLVPMCHSSGESNGTGDITIRRHFMLRCLLIEAAWIAIRKDPAMTVSYTEYRKRMNPQKSIVKIARRLVNRIYYVLKHEKEYIPCVVK

SEQ ID NO: 79927 - protein, 486 aa, unidentified
MPSPILDGKGQSSLTLHRYGVGVDCHSRFFQVCILIPKGTELVKFERKVSAVWPALEAAKTWVLDTLREQGIPVDASDLRYTCESTGQYHMPLCLAWKGHPAIINPSDTSHVRRKTDRLDAQKLAQHSLCGLWRESWMAPDEIQELRVLANQRSKLVGERSRLTNRINSDLLRFGHVVGQLGKINGSRVRALIEDFCAHGSVAVHRDYFSEIRIPAGVIHVLEERWKRVDALEREIKTVEDLCLERVDAMTWRIGGGRTVSGGELRSHLESIPGVGTQTAITWLAEVGDITRFGTVNRLLAYAGLDPSDGISAGKVTAKKPRKGNARLHCALRNAARAMLAHAPTSKFARWARGYQGRHARAGKSKAIHALARRIGKALYYCHLKNAPFDDSGYHALLEESSYPLCSVEEMGLSPGVVRKLKANGLRTSRQVVDAFYSDLGRLPGCGKITVQAVATWIDSHRNRSRDRSRKSRSPEPSGNPPPTEG

SEQ ID NO: 79928 - protein, 451 aa, unidentified
MKQKVSMEIINPNAAGIDVGSRSHFVAVGQGKDDIREFGVYNEDLHALAQWLLTKDVKTVAMESTGTYWQSLFAVLQNAGLQVILCNGKFTKNIKGKKTDVQDCQWIQKLHTIGLLSGSFLPDEATEQLRTYCRHRTNLLDQAADTTRKMQKYLRLLNLRLDVVVKDVTGLTGLAIIEAICKGETNAEVLASLRHGNCKKSEEEIAKALQTNGRKDYLFALKHEYKMYQNIQSAIKDCDIEIEKMLGEQINKNDEKRQHFIDKKVHKKVNKNSPKNIDINLMSYQYFEGVDLLAIEGVSHSTALTLMSEVGLEGLKKFETAKQFASWLRLAPNNKISGGKVLSHKVPKGSNRLKIALRNAANAIGNLKDTPLSNFFNRINFRKGRVSAISATARKLAVIIWNMVVKNQPYNNDHGYEFLDQKRKRKVQEMKKLIHKFDIKTDELGLQLNGA

SEQ ID NO: 79929 - protein, 330 aa, unidentified
MNTAGIDVAHKTLALAVRTEEKLGKVREFANTPNGHAALIKVLQGARVERVCLEATGSYHLDLALAIDAAGLALMVLNPKAAKRFAEALQTRNKSDAVDAGVLAQFAQRMPFEPWRRPATEALELRACARRLEALVVDRTRAKNQLHALLQSTTTPAVVLDDVRLSIHQYTAQIDALRDWVDARISADEELAQVYRLLTGIPGIAAASAIQLMGELLVLPEDMRAKQWVALAGLDPRQSTSGTSVNKPPRLSKAGNAHLRKALFMPALSAARHEPHINNYYRHLIDARGLKKIQAVCAVMRKLLHAIHAMLKHRQAFDGSRFCLLREAAA

SEQ ID NO: 79930 - protein, 346 aa, unidentified
MLHAGLDLSRKRLDFHLLDERGETVEVGEAPPDTDGLRGLAVRVGRHRQPLRAAIESMTGARFVHDQLELHGWEVEIADAVKVKGLAPLACKTDRIDAWVLAELSRRELVPAIWLPDPTVRAERERARFRLHLVRHRSSLKQRVHATLLTHGKPCPVSDLFGVSGRELLARLRLPDPWAGDVEASLRLIDELEREIEACEAELRLLGAKHRYVPLLTSIPGIAWVLAYTIAAEIGDIARFPSPAKLVGYTGLCPRVYQSGESDRRGPLSKKGPRYLRWALIEATSHASRHPAYHDRYQRTKLRLGKQRGPNVAQVDLARRLAAAIWHMLTRNRPFAPAGATTPMTA

SEQ ID NO: 79931 - protein, 328 aa, unidentified
MTTRISVLAIDLAKGSFQVCAVGPDGAVLYNRVLSRARLATLLAEQPACIVAMEACATSHHWGRVAQRHGHEVRLVPAAYVKPFVKRQKNDRADAEAIAEAALRPTMRFVAVKSVETQGRAVAFRTHQCLVRQRTQLINALRGHLAEFGLVAPKGPASLKVLEIALADETGELPGPVREMGAVYLEQISRLTEVIERLADDLEKATRTDATLRRLRTIPGVGPVTAGAVAAFAPDLGTFDSGRNFAAWLGLVPRQRSTGGKVRLGAISKMGQTDIRRLLIVGAMSVIRWVVRKGGSSNRWLAALVARKPKMVAAVALANKMARMIRAV

SEQ ID NO: 79932 - protein, 354 aa, unidentified
MMSHHDHPAQTFASIGIDIGKDVFHIVGFDTSGRVVLRKKFKRLALETELGKLPPSIVGLEACLSAHFVSRMLRRLGHIPRIIPAIYVKPFTKGQKNDYNDAEAIAEAALRPNLRVVREKTQDQLDLQALHRVRARLVSRRTATINQIRAFLIEHGIAIRTGAHALRNSLFAILENRADELSPRMSDLIVGLYEDWLWLDERIETLTGEIEQISHREANCKRLMSIPGIGPMISTAVVAAIGTGEAFERGRDFGAWLGLVPRQYSTGGKSILGRISKRGSRYLRTLFIQAANVILMRPQNWEQFSFGPWLKAAEPRLHRNKLATALANKLARIAWSVLRHNIAFDAHRNEVVAI

SEQ ID NO: 79933 - protein, 312 aa, unidentified
MDAMVIGIDVSKDWLDVAVRPTGESFAFKRTAAGIEDLVERLKDLSPALVAIEATGGFEAVVAAALAGAGLPVVVVNPAQVRAFAVALGKRAKTDPIDAAVIAHFAEATKPQLRQLPDEKTRFLADLIARRRQIVEMLAAESQRARRISDHRLTRSITRLRKALEEELAELERLIADHMRRSTVWVEKEKLLASVPGVGKTIARTLIAELPELGSLDRRQIAALVGLAPWTRQSGQWRGKSFIGGGRKTVRSALFVGAMVAARYNPQLKQFRDKLVAAGKPKLLALVAVARKLITILNAILRDRRPWHPNPA

SEQ ID NO: 79934 - protein, 334 aa, unidentified
MKYQHVVGMDIAKDSVQASCFDGTTFLDFSFPNQEKSFLKKVQKSIPKSDPSHILFVMEATGVYHLKLATALYKEGYSVAVVNPFIIKKYAEMLLKRAKTDRNDARLIAQFGFYQEVTLFAPKENLAEEITQVLKGLDQLKKERTNLKNYQEALTHHNEINSVVRDIYQKQLKEVEKAIKTLEAEAKRLVCQYAPKEYQLLLSIKGIGKCSATALLGFLQKMDRFSRGKEVASFLGLAPQISQSGKDKGKAWLSKKGNGYLRRLLYLAALSASRSNVQCRELYQRLLAKGKPKKVALIAVANKLLRQAFAVLKSGCPYDPHYLKLKSNLEVVLT

SEQ ID NO: 79935 - protein, 400 aa, unidentified
MKVSGLDVHKDTIFCAVHDGKMTGEVREYSTLTGSIREMGANLVETGVSKIAMESTGMYWIPVWNILEDMGFDLILVNPYLIKQMPGRKSDVKDAQWIATLLQKGLLRSSLVPGKQIRELRTYCRRYMKIQQRQTSVLQDMERTLEMCSIRITSFVSNISGKSVLNVIGKIIRGEVNPDVLLECIHGRIVNAHTKQKVKESLNGHITEHHRFILELALQEYELLASQENQCLSKMEHLCKEHYAREMKLLMTVPGISNISAMIVLAETGADMKAFENSGKFSGWTGLRPRNDESAGKFKSTATTKGNRYLRCVLVQVAWAASRTKGTFFKENFTRLAVRKSRKKALVAIARKMGVVIWNVLYYNQAYKPQRLIVHDPGKLRAMKEYHQREATRLGLLMQI

SEQ ID NO: 79936 - protein, 432 aa, unidentified
MGNCAGVDWASEKHDLLIENPAGEELLAATFSHTEAGIAGLCRALVRHEVGLVAIERPDGLLVDRILDAGVRILPLHPNQVAASRDRFRASGGKSDRFDRFVLCELARTDAHRFRVLEPESDETKALRALTRAREDLVTARVAMSNQLRAELDRFWPGPVRMFSAIDTPVSLAFLAKYPSPSDAKALGVKRLTAFLKAHGSSKATAAAELLGRLRDAPSGRVGQAEAARRRTIVLSLVSALSVMVEQINRLETEIADALDAHPDGPVFRSFFVSQSAVLCPATLLAEIGDSRGRYPHRDAIAAQAGHAPVADESGKRKNAKFRWACNHRLRNALSTLAQSIRRWNPWAADLYNAARARGHNHRRALRTLGRSLARIIWKCWQTRTPYNPDRHPALQRHITVTIPDPSGPRPDHAATQLMINSLTKPQIPTTA

SEQ ID NO: 79937 - protein, 334 aa, unidentified
MKFSFFIGVDISKKTLDFAVRDHYKLIFHLKVENSAAGLKEFKAECKAHEVELKHSLLCCEHTGLYSQCLLSLLSGDDCSLWLESSLRIKRSIGLQRGKNDKVDAIRISEYAFRYADKALLWQPEREVLLEIKQLVSLRKRLLNAKNALKVPLGELAGFQNKKLLKELEKLNKKPVEALEKQITTIEKKIRSLIKEDETLSQLFAWVTSVDGVGEVIFWEVITTTNEFKIFKCPRKFACYAGVSPFEHSSGTSIRGKTRVSQFANKKMKKLFHMGAMAAICKDGELANYYFRKVEEGKSKMAVLNAIRNKIIHRIFACVRDNRKYEKIYTTALV

SEQ ID NO: 79938 - protein, 450 aa, unidentified
MWRKGKIKKTGTPTFQCMNPNAAGVDVGAMEIYIAVPADRDPQPVRCFSTFTEDLHAAADWLKASKIETVAMESTGVYWIPLFQILEDRGFTVLLVNARDVKNVPGRKSDVSDCQWLQYLHSVGLLRGSFRPDQEVCTVRSILRHRDSLVQMAATHVQHMQKALDQMNLQLHHVIADITGFTGLAIIEAILAGERDPHALAALRDGRIKASADTIAKSLVGDYRREHLFTLGQSLKAFRHYQELIGACDREIEKSLETFESKVDPESPLPKSLTDVKRLKGDPRFELRTHLYRVFGVDLTQIPGVNVLTAQTLLAEIGPDLSRFASAPTFTSWLGLCPDNRVSGGKVLSVKTRKVKNRAATALRIAATGLYRSQSYFGHYFRGMRAKLGAPKAITAAAHKIARIVYLMLTTRRPYEETIWVKNEAANRVRVEARVRKQARDLGFQLVAAS

SEQ ID NO: 79939 - protein, 380 aa, unidentified
MKNVRFIGLDVHAETIAVAVAEPGGEVRSLGTIRNRAESVGRLIRKLGKPEQLRVCYEAGPTGYVLYWQLSELGVKCEVIAPTLVPEKAGDRVKTDRRDAEKLARCYRAGDLTAVWVPDAAHEALRDLVRARLAAKRDQLRARNRLGKFLLRHGRRAPEGSTAWSTKHLAWVKCQSFEQAAQQATLVDYLHEVQHEAERIVRLERSIDTAIETLPEKMRAVIEALQSLRGIAKISAVSIMAEVGELSRFERARQLMGYSGAVSWEDSSGPRVHRGGISKAGNAHLRRIVIEAAWAYRHRPGLGATLLARRRDQSEDIKAIAWKAQHRLHARYAKLLAKGKAKQQVITAVGRELLGFIWAIGVAAERAQAAAPRRTLQQAA

SEQ ID NO: 79940 - protein, 370 aa, unidentified
MEKSSTIYVGLDVHKDSIAVAYAPEDRGADVVSLGTIGTRQCDIDKLIRRLQSKGAALVFVYEAGPCGYWLYRYLTRKGLPCHVVAPSLIPRKPGDRVKTDRRDAITLARLMRSGDLTSIYVPQVQDEAIRDLSRAREDALEDLKTAKHRLKAFLLRQDIRSEGRATWNAAHLHWLAEVVCPTPAQQIVFQEYLRAVTEQHERRGRLEGELHDQVKSWRLFPVVEAIQALRGVELTGAVILMAELGDLTGFDHPSPLMNYLGLTPSESTTGQRRRQGGITKAGNTHARRALVEGAWAYRYPAKISRHLQLRLEKLPAEVQAISWKAQVRLCKRYRQMTARGKHVNQVIVAIAREMAAFAWAIARIVPLAN

SEQ ID NO: 79941 - protein, 356 aa, unidentified
MGNSNKLDFTGQPIYIGLDVHKKSWSVSISTEHGQYKSFSQPPEVEKLVHYLHQHFPGAQYASAYEAGYCGFWIHDRLKEKGVGCLVVNPADVPTKNKERRMKRDPIDCRKLSRSLRNGELEGIYVPPRGKVEDRSLIRTRLNMVRKQTRCKNQIKSMLLFYGVVIPEKREMGHWSRRFIRWIEGIRMERASGDTALQIHLEELCHLRQIIAKLNRAVLVLSRTEEYRSWVLLLRTVPGISTLTAMILLTEISEITRFPSIDELTSYVGLIPDTQGSGEKEHVGGVTQRSHSQLRWMLIEASWKAVQKDPALMMAFNQYCKRMRKTKAIVKIARKLLNRIRYVLKNRSEYVPAVLE

SEQ ID NO: 79942 - protein, 347 aa, unidentified
MEEEYHYVGFDIHKKTIAICVMDERGHIKEQRSIRSTPAGLKSWLTHEAPRRWKGGMEATLFTDWVYDVMHEYNEDIEVGNPMALKYISSMKRKNDRLDAKKMANLLRCDMFPGIHMLSKEMRMLRRLVRYRNFVVREITRFKNYTTTQLMGLGIEYNSRKIHGKKYFARLLKEVEIPEEALHILTMDRHAIDFLQGVERGIKRRLLSNEALCARLHRLLTIPGVGLITALSWSLEVGDPHRFPSLNKAVSYCGLCSAERESGGKVRRGPLSKHRNKHLQWVLLEASKLGVQHNPRLAEVYEKTYRHHNHNAATIAVARRMAAFLLALDKRNTVYDPAHSCSPPIKG

SEQ ID NO: 79943 - protein, 321 aa, unidentified
MQSQNTVVYAGVDVAKATLQLHLQGQQSEFSNTPKGLLQLVAQLQTVPSVQVVCEATGGYERAMVKVLHQEQITVSVTNPARVRAAAQAQGQRAKTDRIDAQVLTDYGQRYQPKATPPTSATQDQLVALTQWLKQLIHGQALAKTQAEHHQDPFVRRQHAKLMTHLEAQVEAVEKQIEALLEQDAALQERVTCLDKIQGVGPRTAWMVLAHMPELGRLNRHEVAALAGLAPWIRESGTMKGMRCIGGGRPEVRLALYMAALSAARCNPVLSILYKRLRAKGKLPKVALTAVMRRLLTYMNHCIKALPSETAGARTEELKAA

SEQ ID NO: 79944 - protein, 359 aa, unidentified
MKTQSNKLDFTGQNIYAGFDVHLKSWNVTIMTDHLTHKTFSQPPSPEVLFQYLQKNFPSGNYFSAYEAGFCGYWIHNKLKEMGINSIVVNPADVPTTDKERDQKNDPVDSRKLARSLRNGELKAIHVPTLKTLEDRTLLRTRALLVKDITRYKNRIKSFLYFHGIEMPESFLKNKSHWSKRFIDWLDNVEMSEKSGKESLIVIVTVVKDLRSLLLETTRNIKTLSKTDAYRKNVELLKSIPGIGLITSMILLTELGYIERFSNIDQLCRFIGFVPSMHQSGENDKSRKITKRGHSILRSAIIESSWMATRSDPALMKSYIDYCKRMEPNEAIIRIAKKLLKRIKFVLKNQKNYEFRIVK

SEQ ID NO: 79945 - protein, 343 aa, unidentified
MDHFAGLDVSVKDTSICIVDDTGRITREVKVASEPGALLAVLMNASHRFKRIGLEAGPLSQWLFSALAEAGLPVICVETRHMRAVLKAQINKTDRNDARGIAQMMRVGLYRPVHVKTLRSQKLRMLLTHRKLLQSKAIAVENDLRATLRNFGLKVGMVGTARFEARIKELVENVADLVVLVEPLLVVRRTLREQIGVLHRRLLAIVRDDAACRRLMTVPGVGPVVALTYRATVDVPARFRKSKSVGAVFGLTCSRDQSGERDRPGAISRCGDEMMRAMLYEAAQAMLLRSAKWSWLKAWAMQIARRRGMKRAIVALARRLAVIMHRIWTDGTEFRWTREAAAA

SEQ ID NO: 79946 - protein, 443 aa, unidentified
MSTLTAPPVEPVFAAFAAIDWASKEHVVASVPAAGGRIEISKLKNTPEAVELWAASLHQRFPGAPAAVAVEQKRGAVIYMLSKYDHLVLYPVPPTMSSSYRHAFFPSGAKDDNGDTLLLLDLLRHHRDRLLPLQQDTPDTRLLRFLTEDRRGLVEQKVSVVQQLTDCVAQYFPQVRTWFGPLDTPLPEALLERWPSLQQLQHSHPGTLKRFFAEHRSWDNDRIVEQIRQIYDAVPATRDEVVLEACSRKTAACLAQLRVLRDQVAAYDKRIAAVTADHPDAPIFSSLPGAGAALTPRLIAAFGTDRKQWRDAEDLQRFSGIAPILVRSGNCSRVAMRRACPKFVRQTFHDFAAHSIRFCPWAKLLYEHHLKGDKKNHHPAVRVVAFQWIRIAYRCWVNREPYDERIYLAAQRRRNSPFGGKNAANAGIEFQNHAGFQKLTAKA

SEQ ID NO: 79947 - protein, 384 aa, unidentified
MAGTEPHSWETGRMNSITYVGLDVHKATVAVAVAEGGRGGEVRQLGVFENRPEVLSKLAARLSNNKNCRISFCYEAGPCGYGLHRLLTSYGHDCVVVAPSLIPMKAGDRVKTDRRDALMLAKLHRAGELTPIWIPDAGHEAMRDLVRARATAGRVLSKARQHLQSFLLRHDRIYRGLRAWTSAYRRWLTTVRFDHPAQQIVLQDYIHAVQDAEARRDRLTRQINELLPSWSMAPVAMALQAMRGVALVVAVTVVAEVGDFRRFANPRQLMAYLGLVPSEHSSGGSIRRGAITKAGNALARRVLIEGAWTYRMPARVSRKLHDRLEPLPAAIRDIAWKAQIRLCARYRRLAAAGKPKVVVTTAIAREMTGFIWAIAQIAPPPLSA

SEQ ID NO: 79948 - protein, 372 aa, unidentified
MEERIKFFVGLDVHKDAIAVAVAEAGRTPARLIGSITHDVVKLLKLLARYSEPSTVQIIYEAGPTGYGLQRALAQRGYACQVIAPSLIPKRAGERIKTDRRDCLRLAELARAGELRAVWIPDPADEAIRDLARAREDAVNARTQVRQQLKGFLLRHDVRYPRRTSWSKGFYGWLATLNFGRAEAQTAFTEYWQAVTSADERVARLTSALANSIQGWRFESVVGALQALRGIDQISAIGLVAEIGDIGRFAHPRQLMAYLGLVPCEHSSGERVARGSITKTGNAHARRLLTEAAWNYRFKPRIGYRAQQRAEELPQTIRDIAWKAQLRLTTRFARLQARGVQINKVCVAVARELAGFVWAIASVHPQLPMPQK

SEQ ID NO: 79949 - protein, 421 aa, unidentified
MASTVEIVYPVCCGMDVHKNFLVACIAVTNEHSRTEHHIRRFSTFTGDLRKLSAWLESYNCRDVCMESCGKYWIPVFNTLENAGINVCLTHPKYVKAIKGKKTDKKDAKWISELFKCDLVRSSFIPPPDIRQLRDLCRYYVKLTGFASGEKNRAQNCLTMCNFKLDDVFTDVFGKSATRVLNALLEHGNGNFELDGLVDGRCKASPEKIRAALDGELDPMQTEKLNLIRQHIYDINALKSALETLIYNLAAKYQSQIDLLMTVPGISTKLTAIRIIAEIGVDMTVFETAKQLTSWAGLTPQNQESAGKKKTTRIGRAGAYLKPLLVQIALAVSKSDKHPELKNKYLALKKRRGGKKAVIAIARKLLTAMWHILTKNETYNAELYRIADKPPVTREFTTAQAVAFLRNKGFVIVDEETGEVA

SEQ ID NO: 79950 - protein, 331 aa, unidentified
MRAGRLPVLDDEIARARQRFGLAADCPVRSCYEAGRDGFWLHRALLARGIDNVVVDASSIEVNRRARRAKSDRLDAEKLNEMLLRHHAGGRRVWHVVRVPSEADEDRRHLERERQTLIQDRTRLRNRIQGLLATHGVTLRLAGGGAAALGTARRWDGTPLPTGLVARLRREWARLEAVGAAVAALEAERTTAMTRPNATAQCSRRLAQLRAIGPTFAWTLASEVFGWRAFRNRREVGGLLGLTPTPSQSGAERRELGIAKSGDPICGRWPWNWRGSGCATSRGARSVGGTKPATPAVGRACGGSASWRSPASSSLHSGATSRSTNCRREPC

SEQ ID NO: 79951 - protein, 441 aa, unidentified
MHYKRLLTWIDGSSSYLSVGLDVGADFTWMSIALPNGAFIGKPFKIVHSDPRSRDLAVTKIKEAQETYSLKSRCFLESTGIYHIPLLCFLRDKGFDCSVINPIITKNSTNINIRKVHNDRFDSKKAALVGLKPDLKVSLMPSDLALNCRNLCREYYDLMDNRSAYVNKLQGELRMAFPQYLGIFSKVTINTSLTLLETYTSPSAFLKADKQEIIDIIKSTARFGLTYAQNKYNAIIQAATDANQFGYIIDSNIKRIRLYISFIRKYDEEINSILELLHELVDANEDADFVKQIHLIETFKGAGFLSAVSIMGEIGDFSAFSKPKQLFAYFGLDPAVKQSGKFEGTKVQMSKRGSAIARRVIHTLTLQSISISRNREAKNPVLREYYLKKCDSKPKLVAMGAVSHKVCNMIFAILRDNKPFKIIAPQEHIKQYNSAKCDIAA

SEQ ID NO: 79952 - protein, 334 aa, unidentified
MENIALIGIDLGKNSFHIHCQDRRGKAVYRKKFTRPKLIEFLATCPATTIAMEACGGSHFMARKLEELGHFPKLISPQFVRPFVKSNKNDFVDAEAICEAASRPSMRFVQPRTESQQAMRALHRVRESLVQDKVKTTNQMHAFLLEFGISVLRGSAVISRLSTILEDNSLPLYPSQLLLKLQQHYHYLVEQIKDLESQLKRKLDEDEIGQRLLSIPCVGTLTASTISTEIGDGKQYASSRDFAAATGLVPRQYSTGGRTTLLGISKRGNKKIRTLLVQCARVFIQKLEHQSGKLADWVRDLLCRKSNFVVTCALANKLARIAWALTARQQTYVA

SEQ ID NO: 79953 - protein, 372 aa, unidentified
MQYALIQVLPDVPAGGVCAGIDWATADHVACVVDMAGRVRDRFSAAHDKAGLGGMITRLRRAGAREVAIERGDGVLVDALLAAGLTVVVITSRQVKNLRSRYGSSGAKDDRFDSFVLADTLRTDRARLRPLVPDTAATIALRAAVRARRDLVAHRVAACNQLRAHLAVAFPAAAGLFYELDSPISLAFLARFGCHDAAAGVGEQQMSAWLHTVPARGNTAPASVLCARLQAAAPGATGADGAAQAAVTAALAATLTALAAQVKTLETRIAAQLAGHPDAHIFTSLPRAGTLRAARLLAEIGDCRPKFPDPESLAGLAGIAPVTRQSGKHASIEFRWQDGTAYDPAKHTALQRVLDQQASQPADPVPEPGHAR

SEQ ID NO: 79954 - protein, 429 aa, unidentified
MTPLQNSNHHPPPASQAEPTPEAWIGLDWGNRQHAFALEDRSGRRERGTLEHSSENLHHWLGQIGQRYGGRPVLLAIEASRGAVIHALLNYAWLTIYPINPLTSARYRQAFTPSGAKDDLPDADVLLELGRDHTAKLRPLEVQDDLTVKLAELVHARRDIVDRRTQTINQTTSLLKTYYPQSLTLTGDLKHEMALDFLKRWPDLISLKAAKPATLKRFYFQHNVRSTELVQERLQFIRQAVALTTQEARVSVAVLQLQHLLEQLCTFRKHIAIFDHEIKNAFRQHPEAELFRDLPGAGAQMAPRLCVAFGTLRTVYPDPASLQKYAGVAPVREKSGNQLWTHWRWQASGFLRQTFVEWAGLTVVYCPWSGAYYERMKKKGKKHAAILRALAFKWIRILWKCWMDRKPYNQVLYLKQLIHRKSPNAVPVD

SEQ ID NO: 79955 - protein, 414 aa, unidentified
MEQKMIYVGIDWADDHHDILITDDSAKTLDQFRIDHTCDGFALLHSHLANHQTSPGLVLIAIETSRGLLVHELLQKGYTVYAINPKAVNRYKDRHVLSKAKSDALDALSLGHLLRTDRHLFQPIKPLPEDYRLLDRLCSDLRKVVDEKSRVTNQVISCLKEFYPKALETFSLNSQIFIDFLKAFPDHGTLSACTKKTFLAFLKKHRYPYPTKAEELWKVIQSPTLQPDKVIARSGKLRLGMLLGQLENLKEHITHYEQEIRAILDNLPETNPIKSLPGVGERLAPELVATLGPNSKDGHHRFQAAEEIAKLSGCVPVVRESGKWRNVSLRYACVKSLRRTFHDWAFASINYSSWARAFYDYHKEKNQSHCTILRNLGKKWIKILFAVWSKGTSYDEALHIQNLKAKNVPWAMAL

SEQ ID NO: 79956 - protein, 323 aa, unidentified
MPIIGIDVSKDKLDVLWLKDPTHRKVKTKIFANTSQGFDHIIKWATDNTGVAQDQCCFVMEATGVYHEALALMLHNSGCQVIVANPQHVRNYGKGLGVKTKTDKRDSFVIAHYAFAVTPALWQPEPIEIRQLKALIARLEAIVKDLQRERNRLEKARVANVQEIVITSLKHSIEHLSNEKKAFEQQINDHIDQHPTLKKDKQLLESIPGVGPVIASRMIALMRGRTFNSAAQAAAFCGLVPIEKESGSSLRKRPRLSKAGNAQFRAKLYIASVSAIKCNPVIQRHYLQLVARGKTKMAALGATMRKMVHICFGVLKHQQPFHA

SEQ ID NO: 79957 - protein, 340 aa, unidentified
MSKVTVFVGLDYHKDSIQVCVMNPTGQILVNRRCKNQVEALVALVAPLGNDVHAAIESCSGASALADELVTRHGWSVNLAHPGYVARMKQTPDKTDWGDARVIADLVRVGYLPKVWLAPEDVRQLRTLVRYRQQLVDRRRTAKLRIGAILRDARVAEPRSRWSKTWLAWLRRGEGLGTEARWVIEHHLNEFHCVVQLIFEAERRIAAVTAGDRVVEQLIRQKGVGLITAAVLRAEIGRFDRFTTGKQLARFCGLSPRNASSGQRQADAGLIKAGNPYLRATIMEAAHRLVRYDQRWRELACTLRTSGKPICVVVAAVANRWVRWLFHQVEGGVITLNAVA

SEQ ID NO: 79958 - protein, 408 aa, unidentified
MKRYYIGVDWGDRLHQVYVGDEEGKKVREVKVQESPEGLAEIGRWLDERRAEGIELWAAIEKPQGRIVDFLLDHGVEVYPVNPKALDRVRDRYRMSDSKSDAFDAYVLAEFLRTDQAHLRVLRPSSEKAQELKMLSRDQRRVGRHKTRLLNQLTTTLKEYYARPLEAFADLETEIALDFLQHYPTPAHLSALKRKEFNRFATKHHHLSTQRCEELWEKLNQPQLAVPEHVVRTKAQLLEVLIEQLRASIKAVKIYNHKVESFFASSPAAQFAKTLPGAKSGTLVAAIWAELGDAPGRWQSSRHLQAEAGAVPVTKASGKSRVVHFRFACNKHLRHAMYWFSFVSVNHSEWAKLYYRGQRDKGHSHHQALRALGAKWLKIIFVMWRDHKPYDENYHLANIARQKMRQAA

SEQ ID NO: 79959 - protein, 367 aa, unidentified
MKKVSTVAAKQTMNFPQPKLTIGLDLGDRSSWYCVLDETGSVLLEQRLSTTPKAMREVFVAMPRCRIALETGMHSPWVSRLLSAVGHEVIVAHARNVRLIGESRKKDDRIDAQTLARLARIDPQLLCPVKHRSAKAQADLTVIRARAGLVRARTALVNTARGLAKSYGERLRGCNVRNMNPEKAEGLSPELQRALEPMLAGIESLSERICECNERIEKLATESYPQVALLKQVKGVGTLIALTFLLTLEDAHRFRKSRDVGCYLGLQPGRRNSGQSEPQMHISKEGDPYLRTLLVQGAHHILGPFGADSDLRRWGLKLAERGGKSGKKRAVIAVARKLAVLLHRLWVSGEVYQPLRNSQQRPLVIAA

SEQ ID NO: 79960 - protein, 302 aa, unidentified
MEQIIGIDLAKRVFQVHIVSIQGEKKANKMITREKLMAFIAQQPSSRIVMEACGSANYWSRQFKTFGHDVRQISPQYVSPFRMGNKNDKNDATAIVEADSRPGMRYVPGKSIEQQDIQCLHRVRQRLMKNRTALINQIRGLSLEYGIAIPEAAHKVMACLPDYLEDAENELTTLSRELFQEMLLELQDCQQRIKTLDVRLKQMSAQNEDTRRLENIPGIGSLGASALTIALGDSRDFTNVRHFASYLGLVPGEHSSGGKTRLLGITKRGDGYLRGLLIHGAAPWFIVRLIFQMNGVVQSRGG

SEQ ID NO: 79961 - protein, 350 aa, unidentified
MRKYIGLDVHLASTTLVVIDERGKLILTLVMRTDGQELRSQIASIHGPKELVFEEGPMSDWLYVLLKPVVDRLVVCDPSRNRRLWSESKSDAKDATDLAERLRNGDLKEVFHETTAMDTLRGHLRTYLQVNQDLTRTKNRLKALYRSRGIGTGTDLYHCVCRPRHIDLLDRRIERQRSAYLFEQLDLLTDQKQRAHKALIRQAQRHRGYRILKTAPGIGPIHAAKMLAVVVTPFRFRTKRLFWSYCGLAVVKRSSSDWIFGDKGLEHRRREQTLGLNNRRNPIMKDVFKQAALAAIRKPPFEEWYSFHIQRGLKPALARVTVARKLAAVTLSMWKKGVCFDPDQIQASLN

SEQ ID NO: 79962 - protein, 320 aa, unidentified
MDAVLGIDIAKAKFTAALLRPDGKIRHKSCANTPTGFADLAAWLQRQQVTRVHATLEATGTYGEALAIWLHDAGHVVSVVNPSIIHAYARTQLARSKTDRIDAELIARFTASHQPAPWTPPAVEIRQLQALVRRLDALQGMRTQELNRRAAGVTVADVRASIETVLASLDAQIAHVQQLMRDHLDRHPGLRAQRELLTTIPGIGEATAAVLIAELCDKHYASARQAAAFAGLVPRLVESGTLRGRSRLSKIGPGRVRKALYMPAVAALRWNPTIRAVRARLHAAGKPPMVIIGAAMRKLIHLAYGVLKSGRAYEPTCAHP

SEQ ID NO: 79963 - protein, 368 aa, unidentified
MAKRSTFVGLDVHKESIAVALAEGGRCGEVRTYGTVGGDLDALDQVRRTLARPARTLHFVYEAGPCGFTIFRHLTAQGEDCAVVSPSMIPKRPGDRVKTDRRDAVTLARLHRAGELRPIYVPNDSDEALRDLVRAREDAVEIAREAKQRLKAFVLRHGLRYRGRAGWTIPYRRWLAGLTMPDPAPQVALQEYLATVEEAEHRVDRLTEQLRQLVPLWRWAPVVDALQALRGVSFITATGLVAEIGDIRRFTRARELMAYLGLVPSERSSGPLTRRGRITKAGNAHARRLLAEAAWAYRSVPRIGRQMQQRQEQLPATIRALAWKAQLRLCGRFRRLNARGKPRSVIATAIARELTGFVWAVAKEVPAP

SEQ ID NO: 79964 - protein, 321 aa, unidentified
MEEPTPEVFVGIDVAGDELVAATQPAGEVRRWANDEAGHDGLVAALRERRPALVVLEATGGLEQGIAAALTEAGLPTAVANPAQIRAFARGIGRLAKTDPIDAAVLARFAAVVRPAPRPDAGETGRALRALVVRRRQVRDARVAERQRLSRAEAIVRPSLERLIAAYTAELTELEAAIAARLTAEPALRGKRAVLQCVPGVGPVVAASVLAELPELGTLSGKQAAALAGLAPRTRESGKRRAPAAIGGGRRGVRCALYLAAVTAVRWNPPLRAFYDRLLAAGKPKKLALVAAARRLLGILNAMLRDGTLWHPPATEDAQTP

SEQ ID NO: 79965 - protein, 448 aa, unidentified
MSEPLTPTPSEPEWAAFAAIDWADQKNFWRLLSAGSRQSEVGELDNTPEAVEVWAANLQQRFGGRPIAVILEQSRGALVYMLTKYPHLVLFAVHPTTAARYRETFAPSGAKSDPSDTDSLLDLLLRHRKQLRPLQPDTAETRLLHFLVEERRQTVDERTRESHRLTDCLKLYFPQVLQWFDDVASPLVGDLLDRWPTLEQLQRAHPGTLRRFLQEHNCRSQERNAERVAAIQQAVSATQDQAVLEACVLITRSLVAMLATLRVQIAMFDRRIAELVADHPDAAVFSSLPGAGAALVPRLIVAFGTQRERYQSAYEMQCYSGIAPVTEASGNSQWVHIRLACPKFLRQTFHEFAASSIQHSEWARAFYEHQRNEKQKSHHVAVRSLAFKWVRIIYRCWKDGKTYDEEIYLQSLRRRGSLLGGVLGLTTGVGWKSVAGFQKPSERNYLTE

SEQ ID NO: 79966 - protein, 353 aa, unidentified
MTEYVGIDWAYRRAAWCAMSAGGVIGAEGFTPADEEGLAKLVLRLGSEVKACLEMMSGAVWVRDRLRAAGWQVEVADARRVKAVAPLACKTDRVDARVLAELCRRDLVPALWIPSLEERELRERLRRRMHLVRLRTSAMNRIFGLGTQWGLRLSAGRLRRQGALELLERRGVPAVWQRSIEEALAVIDLLEARIAPLEAELAPIARADRDVALLVTIPGVGELLALTLAAEIADVSRFPSPGKLVGYAGMAPGVKQSGQSSRSGLPLSKAGSRTLRWATVEAAQHAWRESNPWHQLYSDVAQRSGKNAAKSAVARKVLIASWHMLSRRQPFKPSRPRGGARTVPASSISVLAA

SEQ ID NO: 79967 - protein, 350 aa, unidentified
MSTGQPFALIAGVDLGDKTSHVCVLDAASGAVVERSTVRTGVTSFERHFAMEAPMRVALETGTHSPWASRTIAEFGHDVIVANSRELQLVYNARRKSDRIDAEKLARLARLDVKLLAPVQHRTAHAQQGLALLRSRSALVRARTMLINHVRGVFKSFGHRTPPGSAAHFPVLARKVMPEELAGSMLPALTVLDGITAQISALDDEIKELAAHEYPEVALLTQVPGVGLITALTFILTLEDPRRFESSRIVGAYLGLVPGRRQSGARDEKKGITKQGDSALRVLLVQCAQYILRRSSPDSDLKRHGLKIAGSNRTGGKQAAVIAVARKLAVLLHALWATGEVYEPLRNQAA

SEQ ID NO: 79968 - protein, 350 aa, unidentified
MRTEYIITMDTHCSTTDVCIKTAGGKLVKRAHLTTGIPQLRELIGSVPRPRRVIFEEGSLAGWLYRNLKGHADEVIVCDPRRNAHVAKDGDKDDAIDAQKLNDLYRGGFIKVVHQQESAAKAAAKQVVGMYHDRVARRISEGNQLLALAKRWGVMLRSQSLLDGKGEQWLKSQLEAAEVAAEVVEIAQDLWKMFERALEQEHKLHGQLCQMVRGDKVMSRVAELPGYGPVRAATLVTYLDTPWRFKSKAALWKYVGIGLRRKKSGDGLDVLGVEQECNRLLRNVVIGAAQSAIGQQENVFARRYARWMMSGLSSRNARRNVAREQVSAIWGMWKSDKAFDAGLLHDPSEK

SEQ ID NO: 79969 - protein, 358 aa, unidentified
MVDKVTEAAVVGGVDTHKDLHVAAVVDQNNKVLGTQYFSTTRQGYRQMLAWMTSFGTLKRIGVECTGTYGSGLLRYFQNAGLEVLEVTAPDRMERRKRGKSDTIDAECAAHAAFSGIRTVTPKTLDGMIESLRVLKTCRKTAISARRVALQIIHSNIISAPDELREQLRNMTRMQLIRTLGSWRPDASEYRNVTNVYRISLKSLARRYLELHDEIADLDVMIAAIVDELAPELIKRNAIGYESASQLLITAGDNPQRLRSESGFAALCGVSPVPVSSGKTNRYRLNRGGDRAANSALHIIAIGRLRTDAKTKEYVARRVAEGHTKMEAIRCLKRYISREVYTLLRNQNRRINSIPITA

SEQ ID NO: 79970 - protein, 447 aa, unidentified
MKKRTQTMDVIHPNAAGIDVGSASHYVAIGQSKKMVREFGVYACDHQKMAKWLIENNIKEVAMESTGNYWQNLYTYLQEYGFDITLTNGKFTKNIKGKKTDVLDCQWIQKLHTLGLLSGSFLPNEVTEKLRTYTRHRENLIKIAASTSNKMQKYLRLMNIRLDVVVKDICGLTGLRIINQICKGESNPQKLAKLRHGNCRKSEEEIAKALQSNKRADYLFALQQELQIYQETQEKIDICDQHIKKFFDDHLCENQKSKELKASKKPHKRINKNTPKSIDINQIAFQYFDGVDLMEIEGISHNTVLSIMSEIGPCGFKKFKTAKQFASWLRLAPNNKISGGKVLSNKIPKGSNRLKKALRQAANAIGNLKNANLYNFFIRISIRKGRTAAITATARKLAIIIWNMVVKKQPYNPPNNYEFLDQKRKRLVKEMRKKMAKFDIKTTELTI

SEQ ID NO: 79971 - protein, 338 aa, unidentified
MTCYSGIDLHSNNSVVLVSDAADRVLYQRRLPNDLPTILAALEPHRGELAGVVVESTYNWYWLVDGLQAAGYRVHLANTTAMKRYEGIKHSGDETDAAYLAHLLRLGILPTGYICPPQERAVRDLARKRLQLVRTRNSQVLAVENIVARHTGAGISANVVKRLERETVAALNLPEDVTCAVAANVAVIQTLNAEIGKLEARLRERVRLRAPFRLITTTPGIGEVLGTTIMLEAGAIERFAAVGNFASYARCVDSKRLSNGKKKGVGNVKNGNKYLAWAFIEAANFARRYCPEAKRFYERKKARTNNIVATKALAHKLARACYHMLKEGKAFDVKRCFA

SEQ ID NO: 79972 - protein, 290 aa, unidentified
MRRSRHRQNDFKVAFATKGEDNKLSCTTAKKFDNAKTGFNQLVRWATSEMDKNAPLVFLMEATGVYHEKLAHHLHRAGKQVHVVLPNKFKHFAASLNSKSKTDAIDAKLLARFGVEREHRPWNPAELVIKRMRDFSRYRVQLQEQKTAITNILHSKDYAHGVPADIKKSSKKVIAVLEKEIAILSKEMEKVVKSDPEIEAKVNKLRTIPGCGITTVAAIVAETNGFKEFKSAKQLTSYAGYDIVHNESGTSVLSKTRISKKGNRYMRHHMHARLERIQAHSRVQSVERAH

SEQ ID NO: 79973 - protein, 355 aa, unidentified
MIIIGVDFHPEFQQIASLDTDTGEFQEKRLLHPEEAEKFYRALATAGQKVRIGMEASGHARWFERLLGELQLELWIGDATEIQSRRARKQKTDRQDAQHILKLMLKDDFPRIWVPNWENRDLRQLLWHRHRLVQARTRIMNQLQAVALNEGLRCKKRLWRDRGRQQLESFRLAPWASRRRTDLLQLLDRLSPMIAELSQAIEQEAEKCSEAKRLMTHPGVGPLTALAFVLIIGNAERFQCGKQVASYLGLVPLEKSSGSRRRLGHITKQGSSMLRFLLVEAAQVTVRSLPEWRSQYFRLLMRRGRKTAKVAMARRLSIRLYWMWRQGLNYEQLKSSVRTQESPEIAMVCSQTPSN

SEQ ID NO: 79974 - protein, 341 aa, unidentified
MEQATTIGLDIAKHVFQLHGADAAGHVLFRKRITRVRLLSFLAAQTRCVVAMEACAGAHYWAREIAKLGHHVRLIAPAYVKPFIKRQKNDAADAEAICEAAQRPSMRFVPVKTEEQQANGIVFRARDLLVRQRTQCVNALRGHLMEYGYVFPKGITHVETLIALVEDLQSSLPDSVRVILKLLIDTFTALEAQIAVLDAEINQRSKSDPTARRLMTIPGVGPIASTAITALVPAAEGFPAGRDFAAWLGLTPLQKSTGGKQKLGAVSKRGERTIRRLLIIGASAVVQQASRRGAPKGSWLAQMLARKPKMLVTVALANKMARIIWALLVKGGTYRTPAAVA

SEQ ID NO: 79975 - protein, 371 aa, unidentified
MEYPSKTLYVGLDVHKDSIAVAYAPEERGTEAVSRGAIGTRQCDIDKLIRKLQAKGALLVFVYEAGPCGYWRYRYLTRKGLRCAVVAPSLIPRKPGDRVKTDRRDAITLARLMRSGDLSSIYVPGIEDEAIRDLSRGREDTLRDLKATKYRLKAFLLRQDIRYEGRANWTAAHLRWLSKVVCPTRAQQIVFQEYVRAVTEQHERRQRLENELHEEVKGWRLSPVVEAIQALRGVDLTGAVILIAELGDLTRFDTPRKLMSYLGLTPSESSSGQRRRHGGITKAGNTHARRALVEGAWAYRYPAKVSRHLQLRLETLPAEGQAMSWKAQVRLCRRYRQLIARGKHANQVVVAIAREMAAFAWAIARTVPLAS

SEQ ID NO: 79976 - protein, 408 aa, unidentified
MEPIYPSCCGLDVHRKSVAACVRRLEAGGSLHQETRTFGTMTRDILELADWLAAEGVSHVAMEATGVYWKPIYNLLEDRFTLLLVNARHVKHVPGRKTDVQDCQWLAQLLQAGLLKGSFIPARPQRELRELTRHRSQLVAEKTRVANRLQQVLEDANIKLGTVATDILGASGRDMLRALITGEQDPERLADLARRQLRNKIPELRLALEGRVTDHHRFLVGQLLAQVEHLEGQIETLSRRIEEVSRPFAAAIKAVSSLPGFDQRSGQNVVAEIGADLEPFPTAAHLASWAGVCPGNNESAGKRKSGRTTKGNRWLRTALVQSAWSASRKKDCYFQAQYRRLAARRGKKRAIFAVAHSLLTVIYHMLKNGSSYKELGGDYFDKLNKNRLVPYLLRRFKDLGFQVTLEAA

SEQ ID NO: 79977 - protein, 343 aa, unidentified
MISVGIDVSKGKSTVCILKPYGEIVSKPFNITHTQNDLSELSSMLFRLNDEVKIVMEATGIYHLPVLTYLQEKGFFVSVINPYLMKSYRNESLRKAKTDKIDSRIIANYGIDHWFKMKDFQTSGEIYEELKLLGQQYRHYMKLHLLSLAELTHLLDLTMPGIKNLLASWNETNRKDKRSDFVERFWHYDVITSMSEQEFTEEYILWAKEKKYVPSQEKAKVIYTLAQESIPTLPSETSSVKILVTEAVRVLKEVDATLGLILSRMQEIAKTLPEYSVVREMGGVGNTLAPKLIAEIGDVRRFRNGKALVAFAGIDPPPYESGQFVGCNRKISKRGSASLRKVG

SEQ ID NO: 79978 - protein, 368 aa, unidentified
MTTNTLKAAPAASAKELKNEKPAKAKRMLVGVDTHLRGYQAARKIDSGVIGVVENFRSEEELELYVAKQTTLAEQVVVVYEAGPLGYTLYRKLTAAGVLCYVCAPDSGEQRKKRRKNNKIDARSLTSKLFNYLNGDQNALQLARVPTEAQEQLRMASRQHDQLVEERKRLGATGNAMLLSQGFGSWSNWWRPKAWAQLSSKLPPWLLERLEVWVDVLKVLDEKIAQAKAAFVRSCKGPRPKGVGALSQMQLQSEVLDWSLYSNRRKIACLAGMVPSEWSTGDKEWRGSITKVGVPALRRIIVEMVWRIIFFQPQYKPVQKWLEVLRGPNPGRKKKAVIAIGRQLIVDLWRLQTGRVTAQELNLIMVTD

SEQ ID NO: 79979 - protein, 341 aa, unidentified
MKNLFIGVDFSKEKVDVAIIFADGLTETAARVFNEFKTTVSGYKQLVKWVEQNSYGIDSSLWLFCGENTGDYSKGLCNFLYGKGYDMWLENAKSIKDASGLRRLKSDRADASMIAEYAMRNYDKAIMYEPLSESLAQLRELFLYRQMVVRHRCSFQVRRGEKRLTMEKSPIKTMISQSGRHIVSELNKEVEKIDKRIAELIKSDEELTEVFTIVTSVPGIGTQNAVSLMVYTDNFRRFNYDSRKIACYYGIAPFGKDSGTSVHSDPRVHYMANRQIKSMLTQAALAAVNFNPVIARYYMRLVERGKKKQVALNNVKNKLVHLVTAMVRNRQLFTTEYKITA

SEQ ID NO: 79980 - protein, 383 aa, unidentified
MSDHSEAFVAFDTSKLRNAVAIADGGRGDEVRFLGEFDNTPAATAKLVRKLAGKYERMTFCYEAGPTGYGLYRQLKGLGQECIVVAPSLIPKKAGDRVKTNRRDAMSLAKLLRSGDLTAVWVPDRQHEAMRDLTRARETAMLDLRAKRQQISAFLLRQGVHYPEDKRTWSKSHLNWLATQKFDIAEHRIVFEELMEAMRQAQARLDRLEAAIRAAVPDWSLGKLVIALMAMRGLDMISASTIVAEVGDLSRFRTPRELMAYLGIVPSEDSTGDKVKRGPITKTGNRRVRRMLVECAWSYQFPPRLSKEKQVKVEAVPKAVREIAWKAQSRLHQRYRALLRRGKLKNVAITAVAREFVGFIWAIAQAVGAAPAATNTTALLVAR

SEQ ID NO: 79981 - protein, 366 aa, unidentified
MPNGRVRQIDRVLVANTVTKQGSSHPILPQPEQLKGREARMMQDRERGTAMDEPNCFVGIDVSKLKLDCALGEQGEVFELANAEAELAQLVERLRALVPALVVLEASGGYERLAVAHLGAAGLPVVVVNPRQVRAYAKACGVLAKTDAIDARLLARFAAAVRPQVRTLPDAQQQQLAALLSRRRQLVGMWVAEKNRLGQALAAVKPTIKPVIRVLEAQIEACDDELSGLIKASAVWREKDDLLRSCPGIGPVSSRTLLAGMPELGCLDRKQIAALAGLAPIARDSGKHRAQRHIAAGRAQIRPALYMAAVSAVRCNAPIKALYVRLRAAGKPPKVALTACMRKLLTILNAMVRSNTKWDERLFISA

SEQ ID NO: 79982 - protein, 364 aa, unidentified
MGFATIIALDLGKFKTVCCLMNVATRTHTFETIDMSPLNVHDLVARHLTSPPADTLVVFETCDTAGWVHDVCTALGTSVIVVNANDERWRWRRVKRKTDRDDALKLARLALLDQLGAVHMPGPPARQRRRLMLHRRSVVSRRTQSRNAIRSIFNQQGLALARGGKQWTLAGVAQLRDDARPIDQCVDALDLWRGRLQVELDLIAATDAQLKLLDDKLDELAGADPRTRLLRSFKGVGPRLSEAVVLYLDDPRRFKTAAEVACYAGLVPKQLESGQMSRNGHITGRGPGLLRSLLVEAAWTVYRCHDWARAWVEKVSRGGRGRRELAIVALARKILVICWGMLKTNTPFRQSAITPALASPAALE

SEQ ID NO: 79983 - protein, 356 aa, unidentified
MQTQVTKKIDFNGKPLFIGLDVHKKSWSVTIVVDGTEHRTFTQPPDPESLFSYLHRMFPGGIYHSAYEAGFCGYGIHRRLTDLGINNIVINAADIPTSQKDKLQKRDPVDSRKIARSLEKGSLHGIHIFDREMEELRSLNRTRFYLMRDLRRSKTRIKSFLQYYGEPIPPEFDNNQWTLKFVSWLKQVKMQTMSGQDAFLNLISSYEYHRSQLLTLSRQIRERIREYDRELYTLLKSVSGIGPLTASALITELGDINRFKNIDQLSSYVGLIPRIRESGETTYTGGITFRCNTFLRTLLIESSWQAIRMDPALMQYYHAHLINNKGHKVVIKVARKLLNRIRYVMKNRQPYVTGVA

SEQ ID NO: 79984 - protein, 400 aa, unidentified
MRAVFGIDVSKTSSEVAILVNGEKVHGYTILNDAIGFNRLLGDLKTVHNPEIIFEATGVYSRRLQAFLEECGYAYTRLNPLEAKKQLDSLRVRKTDKIDAEKLAKSQFVHNRKPTYVQEEVYQHLHDLSRFYQNMTEDLVRAKNRLHKVLQVTFPELENLLSTPTGEQYWNLVMAFSCKEFVLSLSQSDLYEIIRQSTSKRISEKRIAYLTDKLIELAKQSFCAVKKTSPMLEEVRYYAQELLRLSERRQVVLNDMVALAQPLPEYDILRSIPGIAETTATSIIGELGDIRRFQSTNQINAFIGIDLRHYESGNFLAKEHITKRGNPYARKILFKCIHNIASASHTNPCHIADFYEKRKRQSTIASTKPHTIASIHRLIRTMYYLITHNKLYDYSLTQNR

SEQ ID NO: 79985 - protein, 391 aa, unidentified
MICVGIDVAKDKHDCCILDSEGTTLADCFTIPNNLDGFKRLLQTIKDCTQKSDKIKVGLEATGHYSYNILGFLLDNDLAVYVMNPLHTNLYRKSLSLRKTKTDRVDARTIATMLLSDVDLKSYTDTAYHNEELKSLTRYRFDKVQERAKLKQSVSRLVTILFPELEQLVSSIHGTSIYALLSEYPGAKQISEAHLTRLANILVTTSRGHYRKDRATHIRDAARTSIGSVMPAKSLELKHTIKLIQELTSEINEIEDAIRKIMDELKPPILSIPGMGFYSAAMILAEVGDFSNFNSPDKVLAYAGCSPSTYQSGKLTNCYAHMEKRGSRYLRYALYTATKYVCYWNPVFTEYLTKKQAEGKHYNVALSHATKKLVRLIYALQKSGKAYLAIT

SEQ ID NO: 79986 - protein, 400 aa, unidentified
MAVMIGIDPHKGSHTAVAVGAAEEPLATLRVRACPDQAGTLVAWAAAWPERTWAVEGARGLGGLLAQQLVAAGERVLDVQPKLAARVRLLHTGNTGKNDPNDARSVAVAALRSTARQEVIADGHARVLKVWAKRHRDLSRARNQAVCRLHALLCELIPGGVADEITAGQAARLLDQISPSEPVAQARCELAAELLADIRHLDARRREARAKLAAAVKASGTSLTEVFGVGPVIAATVIGDVVIVARFPTRNHFAAYNGTAPAEVSSGEKKIYRLSLRGNRRLNHAVHMAAVTQIRHKHSDGRAYYDRKIAQGKTHKEALRCLKRRISDAIYTRLRADARAAGPGGQPGNHSVSRAAGSHPERQLFGQATPGPQASLRATAALTPAIAPSEPLANKPRRAT

SEQ ID NO: 79987 - protein, 416 aa, unidentified
MTYFVGLDWAAREHAVCVIDAQGAVAAQFTVAHTAAGMTDLMSRLSKFGPPTELRIAIERPTGLVVDTLVEREFAVVPIHPNVVKSSRPRYSAAQGKTDLGDAYLLADLLRTDGHRFRTLAPLSDETKALRGMVRVRDDLVGQRVATANQLRCLLEQFWPGAATIFADVDSPIALDFLERYPTPQSAVSLGEKRLAAFMARHAYCGRRSAVELLARLRGAPPSAAGELESEAKGECVRALVAVLRPLVAQLATLTAAVEHAIDAHPDGKIVTPLFRTGRVCAAQILAELGDDRGRFVSADHLSAEAGVAPVTRESGKRRAVSFRWACNMHLRKALTTLADTTRHTTPWAAFTYQRARARGCEHAHALRILARAWCRVLWTCWQQRTPYDPTKHRGARQIAEIATPINLRFATKKAA

SEQ ID NO: 79988 - protein, 331 aa, unidentified
MSVHVGLDVGSRTTAMGWRDKGRAAGSWEIAQTPKGRKAAVKKLMALKPLSVVMEATGIYYLDLALELSAAGLPVSVINPKSSRNFARLMLQHSKTDAIDAQLLAEYGERMAPRLWVPPSPVQLELRAIGRHINRLICHCTRAKNELHALQATGTTSALLIEDEEEAIAMFGKRIERFRQAGRAIIANCPALRSQFDHMMAAPGMGEVSTFAVLAELTALPVTLKSPQVSRYAGLDVRLTQSGTSIDKPGRLSKGGNAYLRSAMFMPAMSAIRCDPHVKAFYEVLIGRGKRKMQAICAVMRKYLTGLWACIRTEEDFDTAKLFSEKHLLKA

SEQ ID NO: 79989 - protein, 348 aa, unidentified
MDRYIGLDAHSTSCTLAVVGPSGRRLGLQVIETNGQALIEAIRGIPKPRHLCMEEGTSSAWLHELLSPHVDELVVVGVTESRGPKSDQRDAFGLAEALRLGAIAMPVFKAPSRFALLRELARTYSMLARDVVRIKNRIKSVYRARGVSTPGKTVYGTQEREAWLARLPAASRAAAELLYAELDALRPLRAEAEKQLVAESHRHPISRVLETCPGLGAIRVAQLVPIVVTPERFRTSRQFWSYCGLGIVMRSSNDWVRQGERWRRSEVQKTRGLNRRHNSTLKAIFKGAATTVVTAPPAEPLRESYERLLSQGTKPNLAKVTVARKIAATALAMWKRQEVYEPTRYLKK

SEQ ID NO: 79990 - protein, 326 aa, unidentified
MRKPGSHTPKIKTQVALDVSSKALDVHFKSDGQAFSVPNTEEGLNCILKTFTAYDVSLVLMESTGGYEDLAACFFQDHGFDVVVVNARHARNFARAMGKLAKTDRIDSAVLADMAFMIDASHDRDRYIKPLTDEQRKRLSVMTVRRRQVVGLISTEKQRLTRADDWTRASIKKTIKTLTTELRHIEQQISAHVKKNFVDLSKMLLSIPGIGEQAMTILIGEVPELGKADRRTISALIGVAPFNHDSGNFRGRRRIWGGRQSVRNVLYMGIISATRFNPVIRSFYNRLVSAGKPKKVALIACMRKLLTIINAMMRTGKPFDVALHGV

SEQ ID NO: 79991 - protein, 391 aa, unidentified
MKSSTSYVGLDVHKSTISVAVAEDGRGGEVRDHGVIENRADILIRLVDRLGKGGQRLHFCYEAGPCGYGLHRLLERLGQDCTVVAPSLIPKKAGDRVKTDRRDAAMLARLHRAGELTAVWVPDAAHEAMRDLVRARATATRILGKARQHLAGFLLRHGQIYAGQRTWTVAYRRWLTTVRFALPAQQIVLQDYIHAVEDAEKRIARLMEQIEQLFSAWSMAPVVTAIQAMRGVAFINAITIVAEIGDLARFTNPRQLMAYLGLVPSEHSTGDSLRRGGITKAGNNQARRALIEGAWTYRMQARISRKLHDRIEGLPQGIRDIAWKAQVRLCARYRRLVAAGKKTVIVTTAIAREMIGFIWAIARQLQAQPTAPLASANATRHVTNSAREMAA

SEQ ID NO: 79992 - protein, 368 aa, unidentified
MFAQRIKPRKKGKQPMSNYITIGMDLGNRKHTVCAIDGAGEVLWRKKVTNTPEALKPFFEENAGATVAMETGLCCRWISALAKRCGCEVLVGNARKLAPIWQSMQKSDENDAFMIAKLARFDRGLFHPVSLRDDERHEMVQILELREVAVSQRTQAVNSVRGLCKAMGVFIPDCDATRFHKVAKDAIPRDLAWKFMPMLRQLKETAETIRRYDAMLKRYASDHFGEEVALASTIPGIGPVTSCAFVALVGDAKRFGKARDAGVYFGLTPARDQSGDRDAPKRVTKAGSKMMRRLLVTAANYVMRTSSPDTAIKRHGMRICARGGKIAKRKAKVAIARKLAVVMLAMLKSGKPYEDRVAANIPAKADAA

SEQ ID NO: 79993 - protein, 319 aa, unidentified
MAQNADVVAGIDVAKGKVDACIRTLSMRPAFPSTAEGRRRLLAWLRKHRVTKVVMEASGGYEREWAKVLRQAGIEVRIVDPKRVRNFALSAGRLAKNDAIDAEMIAWFAETFSQGPSQVYDADREELKALVQARLGLIDLRTRLGAQSEHAAHGLVQKAHARILKGLDTEIAKLEAEISAKVKSSPDLAQRVDLIKSVPGLGETSAANLVAGMPELGQVSDKIAAALVGVAPYDDDSGKRRGDRRIKAGRRWVRNAIYMPCVGAATLNNPVLKAFYRRLIAKGQEPKVAIIACMRKLIITLNTMLARRQKWDAKRYSLS

SEQ ID NO: 79994 - protein, 400 aa, unidentified
MDNAQQFSGFLGTDISKETFDACCVNTKGEKLFTLSALMNREGFEDLIERLSSLTIGAESVLMGMESTACYHVNLYSFLVSLGYSVIVMNPLLISNFVKLQLRKTKTDKKDAYVIAQFLLLHRDSLSQTFISSDVSELRDLSRQRESLVDQMSSIKSEMKRLLAITFPELEQMAGVFTKSMLRLLCQYPSAASMRQARRSQIAKLLIPGSYGKQTPASVERILKAAQGSVGTSSPTKEIILRQKTSLLMQLEGHLQELTEMLLELCRAKMQQDMDILTSMKGIGKKSAMNFLIEMGGDIKQFHTHQKLIAMAGLDPALYQSGKIDRKGKISKRGNRHLRRVIWLMATRVIQFNERFKQYYLKRIKDGLPYKMAVLATAHKLIRVIFAMLTHKTLFNAKMN

SEQ ID NO: 79995 - protein, 366 aa, unidentified
MKRKVYVGMDVHKETIQIAYLTSNSKEILKEQQIKHNEVQIKKFIKKLKTEWNEIYCCYEAGVTGYPLYRYLKSLGVNCILVAPGKIPRQNTDKIKTDKRDAIKLARLMRSRELESIHVPSEEDEAVRDYLRSRDSLRLDLGRNRQRLMKFLLRKDIKYSTTKYWTVSHYKWLNNLHFNNEILQETFNDYYSRVRVQEENLKSMDKKIQEIAESEPYREKVGILRCFRGVDYLTAMFLLCEVNDFKRFKTAGSFMSFLGLVPGEYSSGSKRKQTGITKTGSPRLRRILTEAAWQHRFPGTGSKIITARRSGQPALVVALAEKASLRLHKKFRNLQRKNSSSDDNGSFKRVIRISLGGNESCSLKLE

SEQ ID NO: 79996 - protein, 346 aa, unidentified
MEYIALDVHKNYTWARVENSKGERLYESRLAHAQGSIKNFVSRWSGGSPAAVETVGNWYWVVDEIEAGGGTPQLVNARLAKLMMGNVNKSDKLDCQGMNRLQRTGTLPTVWIPSSVVRDQRELPRTRMVLSSQRTQLKNRVHATLGKYGHTVQGASDAFGKKGRKIIEELLVKLPPHTQQTLRVVLDELDHVTDNLKAIEQQMIEIFSPCPQTDWLKSLPGVGDILAVVIFTEIGTIERFSRAEQLASYCGLVARENSSGGKIRFGAVRRDVNVYLKWAFVEAANSAVLNAGRCDYAHVSRLYGRLKPRRGHGKAKVAVARHLAEACFWMLKKGEPYREPMPSTQR

SEQ ID NO: 79997 - protein, 356 aa, unidentified
MLNKFNKIPDYSGHNIYVGLEVHKTSLSVNIMADEIEHRQFTQPPSPLILYKYLSENFPGANYFSAYECGFSGYHHHRELLNLGIQNIVFNPADLPVTNKEKVNKRDPVDSRRISRALQRNQLKGVYVFNPDHEQFRSLFRMRWKAAMENRRVKNRIRSFLQYYGIIPPASLKPDFWSAAFLDWLKQLSLPEKSGTLALEYLLIAYENTRAQLLQVTRHLRHQVKLRYQSIYLRLLTIPGIGPINAMCLIAEIGDIFRFRSCRHLASFVGLIPRSHQSGNKDPQGSLTYRSNKYIRAALIESSWTALRFDPALLKYYKDRVVKHKSQVVISKIAHKLLNRIRFVWMTDCNYQVGIS

SEQ ID NO: 79998 - protein, 317 aa, unidentified
MAMPARELDFGVDVAKASVQIDGEGLSLELSNTTRDLRTWLKRLPSRACFALEATSTFHLTFANLAHELGHAVYLIDGFRLSRYREGIGGRAKTDVLDAQLLRRYLSHEKQALRLWTPPPAGYSEMLKLLNLRERCVSARVMIEQSMAGVGVCKRELSETVRKMRALEVLLGQRIEACARRYWAEQVTRCRQIEGVGPITSAALAAIYQRGSFRSSDAFIAFIGLDVQARDSGTQRGRRKLSKRGNAELRRLLYTAAMTACRSGTWKPYYQKLLARGLKKIQALVALSRKLARVAFTLMKNECDYQPEIRSGGCLAT

SEQ ID NO: 79999 - protein, 355 aa, unidentified
MTSTKYIGMDVHKESISIAVRNSAGKVVMECVIETKASMILQSIDGLRGDLQVTFEEGTSAAWLYDLLKPHVTKLVVCDPRKNKSMREGNQNDKIDARRLAELLRLDHLTPVYHGEHGLRTLKELVRSYLTITKDLARVMSRVKAIYRSWAIPCTGKQVYAARHRAEWLGKINEPGVHRRAEFYYQQLDALRVLRQEVRRDLLAESKKQKAWKRLCEIPSIGPIRAAVLLGILQTPHRFRTKRPLWNYGGLAIEMHSSADHRRVHGQLERSTKNILVRGLNRNCNHDLKNLFKGAAVVASSKPGPFQEFYTALVAKGMRPEMARLTLARKIATIVLMVWKKGVDFDAQHLKPQTA

SEQ ID NO: 80000 - protein, 402 aa, unidentified
MIFINCLGIDISKSQSLLAHYKDEVLVKEMVIQNNQNGYRYLKNYIKHLDSLFILFESTGIYSRGMKRFCEIHKIDYLEMNPLEAKFKTSSLRSWKTDKSDAHKLALLAFRMKDSKVQRHPEEIYFELRERARFHLEMEINQNRLKVELVETLHQTFPGLEKLFTNRYSKIALNIAKAFPHPDFVSTLTHDELVEKVLHSTDKGISVNKAHKYVQKLIEIKNNSFPNVDKSSFLLQKVQYLCDKLLIGIEEMKEFDQEMIDLAKNTTEFENIISIPGIGELTAALLIGELGNIREFKTNKQLNAFVGIDIKRYQSGTSKSRDTINKRGNKKARRLLYLIIMNIIRGRNHYQSHIVDYYYKLREQPHGKTHKTAVIASINRLLKTIHYLIVNNKLYDYQKAPH

SEQ ID NO: 80001 - protein, 470 aa, unidentified
MEDNRVRRKRSKTKKAKQLSPAMLARINPNAAGIDCGSAHHHVAVPVDRDAEAVRRFKTLTPDLYRLADWLAACGIETVAMEATGVYWIPIYDILEARGFEVVLVNARHVKNVPGRKTDVVDCQWIQELHSFGLLRGSFRPSAEIVSLRAYLRHRDKLVQEAASHIRRMQKSLVLMNVQLHNVISDITGKTGMQIVRDIANGVTDPKALASHRNSRCRASEDEIAASLTGNYRREHVFVLRQNLELYDTYQHQIQTCDAEIESLLQSLAAKQAPPEAALPPARCRHRLQKNDPRFELRSPLHRLSGADITQIDAIGPYTALRLISEIGTDMTCWPTEKHFTSWLTLAPKNKVTGGRLISSKTQPSANRAAAMLRMCAMAVGKTSTALGAYYRRIAYRIGKPKAITATARKLAILVYRVLRGDIDYSDPGAEAYEAQHRTRTLRNLRNRAQRLGFGLVDLENGELTQQGVS

SEQ ID NO: 80002 - protein, 354 aa, unidentified
MTMMLIGVDPHKSTSTATAVEPESNREVASIRIEATLREYRRLLTWAGRWPERRWAIENAEGLGRHLASWLLARGEQVVDVSTNATARVRQLSRGGGRKNDRIDAAAAACVAALQGDARQLEAEGAADAIGVLDERRANLSQARVRSVNQLHAVFRALLAGGAPTGLTAGAAAALLRTVRPVGEVERVRKHIASDLVAEIRSLDARLKGNAEVMAELVKASGSTLEQTVGIGPVTAGRLIGRTGSPSRFPTPAAYAAYTGVAPIEVASGERSRHRLSRSGDRQLNATLHTIAVTQIRTAGSLGNIYYLTKIAERKTPREARRCLKRRLANHIWRTMIADEKRQRAKTSNVADAA

SEQ ID NO: 80003 - protein, 374 aa, unidentified
MSYVTSIGLDVHARSITAVAFDPATGEVRSKRFGYAPAEVAAWTLAFDSPKAVYESGVTGFHLVRALRGLGVDCIVGAVSRMHKPAADKRKKNDRNDAEFLARQLAARNIKEVWIPDEECEAARDLSRVLEDVREDLTRAKHRLTHLLIRHGYAFDEIGPDGKRKGKWTRAHWEWIRSIELSEAAARDALDFYVSEVRHIEAQKKAIEKEIADYARADRWRGRVEALRRLKGIETMTAFSLVAEAGVFSRFESARAFSSWLGLTPSEHSSGERVSRGGIIKAGNTHLRKQLVESSWHYTRATTKRKRDQRGEEVPLAIENHAARGREAPCREAGSLCKAQSSPGGGQRGHRKRALLLGMGCGLHVGRGSRIETR

SEQ ID NO: 80004 - protein, 404 aa, unidentified
MVFLGVDWAEEHHDVCLLDEQGKVLGRARVANSLEGVSRIHALVADHSEEPDAVVVGIETDRGLLVQALLAAGYQIYAINPLAVDRYRDRHSVSGAKSDAADAKVLADLVRTDRNNHRPLAGDSQQVEAVKLLARAHQALVHTRQRQVSQLRSALREFYPAALEAFKDDLGGRDAVAILEYAPTPTRGRSVSKAKLISALRTAGRERNLEARAVELHTILHRPQLEQPATLVAAYGLIVKSCLQIIRELNTQTTAMEQELTKSFELHPDAELYLSLPGLGFVLGARVIGEFGDDPNRYLNAKGRRAYSGMAPITKASGTRKVVLARYARNRQLADACYLWAFASLTGSAGAHQYYRALRARGKSHNQALRVLGNRWVSILHGCLRHRTPYSEEVAWTMAVAVAA

SEQ ID NO: 80005 - protein, 341 aa, unidentified
MIQSALIGIDLGKHNFHLHSQDKSGREVFRKKLSRAQMMQLFGNMPSCVVVMEACAGAHFVARQLAAMGHTAKLISPQFVKPFVKGNKNDFVDAEAICEAASRPSMRFVTPKSESQQTLSVLHRMRESLVHDRTKTANQMHGFLLEFGVSLPRGLTIMKRLTNVLAEHELPVRLTVLLQRLHDHFVYLDEQIKVLDKELASQLADDDLGSRLLSMPCVGPITASLLAVEMGDAKQYRCSRDFAASVGLVPRQYSTGGKANLLGISKRGDKHLRQLLVQCSRVYMQRLEHQKGALADWVRALLSRRHSNVVACALANKLARIAWAIATHHTQYEAGPDALNA

SEQ ID NO: 80006 - protein, 408 aa, unidentified
MLFVGDDWAEDHHDVEVQDEHGRAVRTARLAEGVDGMGRFHELIAGFLSEDADPSQVLVCIETDRGPWVRALVAAGYQVFGVNPKQAARHRELLSVSGAKSDKADAHTLADMVRTRRHQLRQVAADSEVAEAVKVVARAHQTLIWERTRHMLRLRAALREYFPAALEAYKPLRLTGADTLELLAKAPTPAAAAKLSAAQISAALKRARRRDIPAKTAAIRQALRTEHLGQAEIVAGAYAATVRASVAVLQTLNAQIRTLEGQVEAHFGQHPDAEIYLSQPGIGAVLGARVLAEFGDAKGRYADAKSRKNYAGTAPITRQSGKTKTVHARFIHNDRLLDALHMQAGAAILHDEGVRAYYDQLRTRHIGHNAALRQIGNRLVGILHGCLKTTTLYNQTTAWSHRTPHTAA

SEQ ID NO: 80007 - protein, 423 aa, unidentified
MDILHERVAGLDVHKDTVVSCVRVATGSQTRRECRTFATTTEGLMALAAWLEESRCTHVAMEATGVYWMPVWKILGQGDFELIVANAAHIKNVPGRKTDMNDATWIADLQACGLIKASFVPPEEMQELRSLTRTRKQLVREQTRHTQRIQKTLAEANIRLDSVISDIMGASGRRIIEAMIAGVRQPSKLAELASKQIKATPKELYDALHGRLTDHHRFLLELHLRQWDGLDAAIRNIDREIGQRIDRMDAQIGTGRVPFRALIDLLDTAPGVSTVAAPAILSEIGYDMSRFPTAGHLVAWAGICPGHNESAGKRKSSRLRKGAPWLKTMLVQCAWAAKRKKDSYYRAQFFRLQSKRGPQKAICAVAASLLTAIYHMLKSGVEHHDLGADHFDRRPTELKAKRLVAQLTKLGFTVQLQPIAQAA

SEQ ID NO: 80008 - protein, 440 aa, unidentified
MVRIYFYARSAIPREKGKEMPYRVAAIDIHKKVHMVVVASMAEEVEDTAAAAVEFECRKFGAGASEREHLVAWLRERQVQEVVMESTAQYWKSVWLELEPHFGKLHLAQAQSNRAPRGRKTDFRDAKRLGRRLLASELMLSYVPEPEQRRWRLMTRGRLQLVRDRVRLQNQMEGLLEEARIKLSSVIGDLLGVSGRRILEALAEGTRSPAQLAELGDRSLKCTKQELTDALTGAPDPCHIELLKLDLQRLQLLDEQIEKLSRMAGEALRVHQAVVLRVAKMPGWGAESAQQIIAEVGVDAEAFQSPGAFASWAGVCPGSNVSAEENHSSRCPKGNRYVRRLLTEAAQAAVKKKGSRFQNLFRRFLPKLGWNGAIALVRHRMARVLWKVLHDGVEYVECGQDTTPKARKRRAQKLTQALRKLGYQVTLTDVQIQTEPAATA

SEQ ID NO: 80009 - protein, 428 aa, unidentified
MNQPSNNDDTQNDYAAFIAIDWADRQHVFSLQLAGQTTKETGTLEQKPEVIGPWVAKLRERFGGRPVAIAVEQSRGALIHALMRYDFIVIYPLHPTTVAKFREAFKSSGAKSDPLDTDQILQILTKHRELLKALNPDTEQTRLLARLGEDRRKAVDLRTSHVQALTAALKEYFPQALELMNGNLTSRLACDLVIKWPTFEAFQQAKPSTIKRFYYGHNIRSPEVMEKVLGLATTAQALTTDAAIVQSGRRLSQMYAQIIRTLNPVIEEYDQRIENVFHDHPEANLFNKLPGAGPALAPRLLSFFGTDRSRYEEAGNVHSFSGIAPVTKSSGKTRVVYFRHACPKFDRQTFHEFARLSVAKCQWARNYVDYYTAKGKKFHTIIRALAFKWIRILFRCWKNRTPYDETKYMDNLKKRGSIFATLHLEQKS

SEQ ID NO: 80010 - protein, 430 aa, unidentified
MMEEVDDAELVVERIAALDLGKAGLEACVRVPSPHRPGRRMQELRGYGTTTAQLLEMVAWLRHWGVQRAVMESTSTYWKGVYYLLEAEGFECWLVNAREVKNVPGRAKTDRADAIWLAKVAERGMCRPSLVHPAEIRRLRDLTRYRRALVQDRTREQQRIEKLLEDAQIKISSVLSELHGVTARAMMDALIAGQRDPRALAQLAKGRARKKTAQLEEALRGFFTDHHAAILRMMLDNTDRISAQIAALDARIEKEIGPFSHQAARLAEIPGVDAVAAAELIAEIGVDMTRFPSDAHLVSWAKFCPQTHESAGKSKSKGRGRGNPWLAGTLGRIAFANSRADTFLGARYRRLARRRGKQKAIVATGNSVLTVVYYLLSDPTATFCDLGPGYYESRINVHRRARDLATQLQALTGQHIVIRDGKAVITDAAA

SEQ ID NO: 80011 - protein, 414 aa, unidentified
MELLHERCAALDIGKKDLKACVRTPSPKGKRSRRQEIRTFATTTNALLELRDWLVAEQVSLVVVEATGDYWRGAFYLLEDQLNVILVNAAHAKGLPGRKTDVCDAAWLCQLGECGLLRASFVPPEPIRQLRDLTRYRTTLTAERSREAQRLEKELEDAGIKLSSVATDITGVSGRAMLAALIDGERDPQVLAEMAKTRMRPKIPHLVQALTGNFGEHHAFLCRLHLQRIDELTAAIAELSARIAEQMRPFARQLEHLMTIPGVGQTVAEVIVAETGTDMGRFRTGANLASWAGVCPGHHESAGKRKSGKTRHGDRWLTGALGTAAMAAARTKDTTYLGARYRRLAPRLGKKKALVAIEHSILVAVWHMLTNNVDYHDLGGDYFARLDPEGAMRRIIRQANSLGFTVRFDPIQAA

SEQ ID NO: 80012 - protein, 472 aa, unidentified
MAQAIRRAGRGQQQKRRASRVRAAQLEQLNLNAAGIDVGATEHWVAVPADRDAQPVQRFGAFTADLYALAAWLRQCQIDTVVMESTGVYWIALFEVLEERGFDVKLVDAHQARQVPGRKTDVKDCQWLQELHTYGLLRGAFRPEDEVCVLRSYLRQRSMLVAMASRAVQHMQKALEQMNLKLTEVVSDITGKTGMTIIRAILTGERDPQLLATYRDKRCKHDQGTIAKALTGHWRAEHLFALQQALEQYEFLQQQSQACEQQIEACLQTFVTHVDVDTPPPAPARKRRARQRYAPGFDVHGYLVAMTGVDLTQIDGIDALTALKVISEIGLDMTRWPTGKHFASWLGLCPGNKLSGGKRYRMRSKPTANRAASALRLAAQGLVHSHSALGAYYRRMRARLGAPKAITATAHKLARLVYSMLRYGTAYVDAGQQAYEQKYRDRVLTNLQRKAKAFGYQLVHVEDLDGGVASTL

SEQ ID NO: 80013 - protein, 362 aa, unidentified
MAQVRSWAGLDVHSAMVVAAVMDRESGELRMRRLPGATSDIVAFCAALPGPTRVAYEAGPTGFALARALAAVDVQCVIAAPGKIERPTSDRVKTDERDAQRLLRLLMIDGLHAVRVPSTQEEALRDLVRAREDVRGDLMRARHRMSKLLLRHDVRFDGTAAAWTTHHRAWLGKVDLGEHGAQVTLIDYLGAIDALIIRRDTLEHAIGELVPDSPWAATVARLRCLRGIDTLSAVGLCAEIGDWQRFPRPAHLMSYLGLVPSEHSSGQTRRQGSITKTGSGHGRRLLVEASWHYRRAPAKGQALKRRQAGQPAHVIAISWAAQQRLHRTWQRLDTQRGKRRTIVAVAVARELAGFCWATANAD

SEQ ID NO: 80014 - protein, 401 aa, unidentified
MISVGIDIAKGKSTVCILKPYGEIVSKPFDISHVEKDLGELAAMLLRFDDEVKVVMEATGIYHLPVLTYLQEKGLFVAVINPYLMKVYRSGDLRKAKTDKIDSRIIANYGIEHWFTMAEFKASDDVYGELKMLGQQYRHYMKLHIMSLHELTHLLDYTMPGIKGMLASWNEGNRKDKLSDFVERFWHYDTITCFSETEFIKQYTFWAKEKKYHQSQDKAQAIYALAHEGIPTLSSETPSVKMLVTEAVRVLKEVDATLSIILSRMQELAKSLPEYSVVRGMGGVGEVLAPKLIAEIGDVRRFHSGKALIAYAGIDTPPYESGQFVGSNRKITKRGSAALRKVGYETMRCIKTHPRPDDPVYQYIVKKEAEGKAKKAAKIAGLNKFLRIYYARVKEVYTDIK

SEQ ID NO: 80015 - protein, 419 aa, unidentified
MFKIFRKNCCGLDVHKTWIYACIGITDANGRTEYKRERFSAFSKGLRRLAEWLAKYNCTLVCMESAGRYWIPVFNILEKTCNVILAHPKYTKPLKGNKTDRKDAKWVCDLFMCDMIKPSFIPPPDIRSLRDLMRYRFKLTCMLASEKNRAQNCLTVSNLKLDDVFSDVFGKSSSSIINYILEHPGEYFDVTPFVHKGCKHPIEEIQAAVDGSISTEQATKLREVLRHIDELKLHRNNIETEILRLAAPYKHSLELIRTVPGFNSDPITAIALVSEIGVDMSVFPTAKNLCSWAGCCPKNDQSGGKRKSVRISRAGVYIKPLLVQVANAVVKSDKYPEFKERYRRLKARRGHKRAIIAICRMFLTAIWNILSKIEPYSADGYLAERPKNQSITLTKSQALNLLKSRGYIIKDDIPWSDYG

SEQ ID NO: 80016 - protein, 340 aa, unidentified
MNATTIGIDIAKSVFQVHGVDAAGQVTVTKKLRRAEVMRFFEAIPPCLVGMEACATAHFWAREISALGHQVRLMPPSYVKAYLRRQKNDAADAEAICEAVTRPTMRFVPVKSAERQGVLVLHRTRELLVRQRTMLINAIRGHCAEFGIIAPQGARRASELVEQIRQAQAAELPELARSALLRLADQLAALAAEIHGLERRLLAWHRQDQASQRLATIPGIGIITATALAAAVTDPGLFRSGREFAAFLGLVPRQNSSGGKDRLGRISKMGDGYLRKLLVVGATSVIRRARTSTSASASWVNSLLERRPARVVTVAMANKNARIAWAVLKRGEVYRPPVMA

SEQ ID NO: 80017 - protein, 334 aa, unidentified
MSFNLLAIDLGKQSFHVYGLDSYGVIVSRKISRAKLMGAIAELAPEVIAMEACASAHYWGRHFLAAGHRIRLINPRFVKPFVKGSKNDAVDAEAIYEAALRPTMRFVPVKSIAQQDLQSLHRARERVVCARTALINHMRGLLGEYGVILPQGAWRFVGQAPGAISDAELSDLAREIFSDMLDQLSELNRRLEKFDAHLLAFCRTNEACRRLSKLPGVGPVIATAIVAAVDDGRHFRSSRELAAWIGLVPRQYTTGGKPRLGGIGRRANHYLRRQMIHGARSVVMRLAKHDDRRSEWLKGLTARRGFNRTIVALANKTARIAWALLARNEDYVAA

SEQ ID NO: 80018 - protein, 313 aa, unidentified
MNQENLFVGIDISKAQLDVAVSPLQEKEVFAHTEEGLSRLVERLKPLSPALIVLEATGGLEMDVVTALLTAELPVVVANPRQVRDFAKATGQLAKTDALDAQILARFAESVRPQIRPLKSAESQDLFALVARRRQILDMIAAETNRLRTAALCTRKNLEAHIAWLKRCLKDLDKELGQAIKKSPVWRQKDEVLKSTPCVGRVLSATLLAEVPELGLITGKEVSALVGVAPMNCDSGQFRGRRKVWGGRAHVRTVLYMSTLSGIRCNPVLRSFYQRLRLAGKEHKVAMTGCMRKLIVILNAMMKNNSHWSPTHA

SEQ ID NO: 80019 - protein, 487 aa, unidentified
MAKRNESTFERLQEGERLNRRERRELARRLNLADPGFEIVHPDAAGIDVGNESHFVAVPPGRDEQPVREFGSWTADLERMAEWLKDCGIKSVVMQSTGVYWMAVYDVLQRHGFDVKLVDARGTKNLPGRKSDVQECQWLLRLHTYGLLRSCFLPPEPIRRLRTVWRLRDQHVKEAGRVVQHMQRALTEMNVQLHNAISDLSGVTGQAIVRAILAGERDPVRLAALRDCRIQASPEELIQSLRGNWKEDTLFELRQAVEAYDFYRRQIAQCDAQLQPYLTRLPSRQHGAAEAQVPEAPNVGSGPRRGQPRSKVPKRKGNEPSFDIEAEQRRILGVDATTIDGIDVMTVQTFLAEVGPDLSAWKTERHWSSWLNLAPKRDISGGRVIRHTREHRTNRVGNAFRMAAQSLIRSHSYLGARFRYLRAKLGAVKAVKAMARVLACLFYRLLTQGQAWVDRGSAEFERRRQQREFAALQRKARDFGMNLVPAA

SEQ ID NO: 80020 - protein, 412 aa, unidentified
MDVFCGIDWAEGHHDVALAGRDGTIVARRRVGDDAAGLGELLELLAEHGDSPQAPVPVAIETPRGLLVASLRATGRRVYVINPLAVARYRDRHSAAGAKSDKLDAAVLAGILRTDMHAHRPLPADSELAQAIAVLGRAQQDAVWDRVQAQNKLRSHLREYYPGFLAAFDGQRGGIARPEARAILAAAPAPADATRLTLARLRSLLRKAGRQRGIEREAARLHAAFLKEQMRQLPLVEQAMARQALALLRQLDAACQSADDLQAAAQESFGQHPDAGIITSFPGIASLTGARVLAETGDDRSRFAHAKGLKAYAGAAPVTRASGKKRSVTRRTVKNDRLAAAGYTWAFAALTASPGARAHYDRRKDAGDRHAAAQRNLFNRLLGCLWHCLQTGQHYNEETAFPTSTRKPPQAA

SEQ ID NO: 80021 - protein, 325 aa, unidentified
MSNKIMYCGIDISAENFDICMLQPEGDFAWHQLSNDTKGFRQLLKLCSGNYHFVMETTGVFHLPLCLFLHEKHCAYSVVNALQMKRYIQMNLERNKTDKKDAWHICMYGIERRPAQYEMPEQQYFECRTLNSSIETITAEITAFTNKIYAQKKQKTDTAAVLRSYHQIIKTLKAELKKLKAELQKKMLLWQPGLVKQVSSVKGIGSRATATLIVATQGFKNTHSYQQLISYAGLSPKEYRSGKSIRGRVRISKKGGKQLRHILYMCALNAKVTNSACKALYDRLVAKGKNKKLAIIAVCNKLLKQVFAVVKSGKLYNDNYYKQIA

SEQ ID NO: 80022 - protein, 433 aa, unidentified
MTEPNSHPLLPEQNREPEFAAYVAIDWADKKHYWSLRLAGSKKIERGELDNTPEAVEAWVTELSARLEQRPLAVALEQRRGALVAMLSKYAPLHIYPVHPATLAKYREAWYPSGSKDDVKDADQLLEIVCQHRERLRRLDPDTTGMRLLQFRVEDRRQLVDQRTAISNRLTDLLKIYFPQILVWFPALDAPLVGELLKRWPSLQDLQKARPAAVEKFLRQHNYRHEEDIQQRIEQIRQAIPATDDEALLDSAQFKTRIYVQQMAVLRTAISELEKKIAELASRQADYAIFESLPGAGKALAPRLMAGIGSRRERFESAGELQCYAGIAPVKEASGNSQWVHIRWACSKFLRQSFHEWAACSIPQCAWAKDYYSRQRAKNKSHHTAVRALAFKWMRILYRCWKDRQPYREEVHLANLAKRAVNLSSLAKSVQMP

SEQ ID NO: 80023 - protein, 346 aa, unidentified
MMIIGCDFHTRYQEIAWLDTDTGETGEQRLEHGGESVRQFYAGLRGAVRVGIEATGYSQWFERMLHQLGHEVWIGDAAQIRASVVRKQKTDQRDAAHVLELLRTDRFPRIWVPTPAERDLRQLVLHRVKLVQLRTRVQNQLQAMAMGQGVCRRKKLWSTRGRAELERLALDPWAHRRRAELLRLLDELEQSIGELQGAVEQQARQHPDAVLLMTHPGVGPVTSLAFVLTIGPVSRFSRGKKVGSYLGLNPSEHSSGGRQRLGSISKQGNATMRWLLVEAGQTAARLDPLLHRSYQGLKFRKGSAIAKVAIARKLAVRMYWMLRSRHDYAALVRMSGSSSSAVVPEV

SEQ ID NO: 80024 - protein, 356 aa, unidentified
MSHDVKYIGMDVHKEAIVIAVLNESGKRVIESVIETKASSILQFLHGLGGELHVTWEEGTWAAWLYDLLQPQVQHIVVCNPRRNALLNEGSKSDQVDAQKLADLLRTRMLRPVYHGENGLRTLRELGRSYQTIRKDLTRVMNRLKALYRGWGIACAGTQVYVARCREEWLSKLPQAGVRRRAELLYQQLDGLQALRREVRPEFLAESRKHKAAKLLRQIPCIGPIRAARLIALMQTPHRFRSKRQLWTYSGLGIETHDSAQYRFVRGQLQLSKKPQQLRGLNRNHNHEMKEIFKSAATRASCGRGPFYDFYAALLAKGMKPEMARLTLARKIAAITLTLWKKEERFDVEQLKTQAA

SEQ ID NO: 80025 - protein, 352 aa, unidentified
MERYVGLDSHARSCTLGVMSASGQRLKSLVVETNGSALIEAVRGIAGRVHLCLEEGTQSAWLYELLRPHVAEVVVAVAPERKGPKDDQRDAWARANELRTGSIETRVYKAPEHLAGLRNAVRAYGFAVTDVVRAKNRLKSVFLSRGMSADTSVYDVKKRPEWLKKLSSPHRELAEWLGRQLDQVVPLRDEAQRWLLTEAKRHPIIRKLATAPGMGPIRTAQVVAIVATPERFRTRRQFWSYCGLGIVTRSSADWVQDRNGKWVRSLVAQTRGLSRKRHPRLKAVFKGAATTVIAQLPDDPLHGDYERMLQSGIKPPLAKLTLARKIAAMVLSMWKHQEVYDPKRHHPSPDQP

SEQ ID NO: 80026 - protein, 352 aa, unidentified
MEKNNKLDFGGQHIYVGMDVHKKSWSVSIHTEQFEHKTFTQPPEVEKLTYYLERTFPGATYHTVYEAGFSGFWLHDKLREKGIDCMVVNPADVPTKDKERTGKTDRVDCRKLARGLRNGEIKGIYVPPRVKVEDRTLVRTRQSMVRKQTRCKNQIKSILFFYGIVIPEESHWSRRFIHWIESIRMERASGDFALKVHLEELKHLRQIIANLNRAILSLSRTEEYRADALLLKSVPGISTLTAMILLTELADISRFSSLDKLASYAGLVPDIRSSGETEYDTGITFRRNAALRALLIESSWVSVRKDPALIMAFNKLSVRMKKTKAIVHIARKLLNRIRFVLKNRQEYVPAVV

SEQ ID NO: 80027 - protein, 356 aa, unidentified
MSKYIGFDIDCKKVVACVVEKGKRDIYETMGPDVGSMRKFLLAQKQSGARVELAFEIGGQAGFIYDSLLDCVDEVKVVNPSKMTWIYRTAKKNDRIDARKMAVLMSIGELPCVYMPSKEVRQWRQTILHRRTIVGKVVQAKNRIRASLKSQGHSKPEHGGGWWKKANRFWMRSLCQGSLDVDGLWRLGLCNLLDELQLLEIQLNRVSDYLDGYLSGKPGGKLLMSIRGVGPRTAEAVLAYTDDVSRFGNYKQYCSYFGVTPKLDESGLTRRLGHISKQGPSVVRWLICEASWKVIRYSKGLRSFYERVMAGQKGRKKIAIVAVSRKLLSIMRAMLLTGELFNEDMINRCDDLTDAA

SEQ ID NO: 80028 - protein, 351 aa, unidentified
MMIIGVDYHPSFQAMAFLMEETGECGEQELNYSDGQAEKFYRDLKQRGMCVRVGLEATGYSRWFERLLAELGFELWIGDPAEIKAKRVKKLKTDRKDAQLLLRLMLENNFPQIWVPSPENRDLRQLLWHRHRLVQMRTRIMNQLQALAMNEGYRWKKKLFSEQGRAQLEKLALAPWASRRRQELLELLDRIHPTIEELTAAVEQEAQKRPEVLRLMTHPGVGPLTALAYVLIIGTPERFHCGKQIGTYVGMIPCEDSSARKQRLGHITKQGNSLLRFLLVEAAQAAARSHPEWRRRYMHLAMRRHRSIAKVAMGRRLAVRLYWMWRNGCAYSPSLEFGSYAGQLGTGHGVK

SEQ ID NO: 80029 - protein, 355 aa, unidentified
MVEWEIEAKSSGTGVTSPYRRTEHCENTHEYRCDTSVGVIGIDVSKEHLVTSKGRVRKFTNNEKGYEEILTMKPNIIVIEPTGVYSTRPCQYFKERGVKVLLVSLAMERKGRKGKKTDFYDAEKLENMVNKSREYVNNPLKELVSLYLFMKDVQTKQENRLRRALFLVSDEEKLSEERLEKFSKGDFSDVKLYQLEYTGTVLREIQVLARTLIQTREELKEVRKMIEGNVPQDHVLLTISGIGKLAAGIIIGIVGDIRRFPRPESFVAYCGLDPVVERSGRIEVRKGISKRGNKYLRSLFYFLAETQYSRNPTLLKLHEAHKDKLKGRKLYTALARKLARIVWSVWYNNKPYEVK

SEQ ID NO: 80030 - protein, 412 aa, unidentified
MEIYCGIDWAEDHHDVALVDRDGKLLARRRISDDAAGLAALLGLLAEHGDTPEAPVPVAIETPRGLLTACLRAAGRPVYPVNPMAVARYRDRHSVAGKKSDHGDSVVLAGVLRTDLGMHRPLPADSELAQAIAVLARAQQDAVWDRTQAHNKLRSHLREYYPGFLAAFADARGGIMRPGARAILAAAPTPAGAAQLTVPQLRALLRKAGRRNRIDADAARLHEVFRAPQMRQPPLVEDAMGRQALALLRQLDAACAAAADLEQAVTESFNLHPDAGIITSFPGLGALTGARVLAEIGDDRSRFSDAKGLKAYAGAAPITRASGKTRSVTCRKIKNNRLAAAGYSWAFSALTASPGARAHYDRRKDAGDRHAAAQRNLFGRLLGCLHHCLATGQHYDEATAFPASTRKLPHAA

SEQ ID NO: 80031 - protein, 345 aa, unidentified
MEQYAGLDVSLEATSVCVVDAAGRVVREAKAPSEPEALVAWFAGQDGAMVRIGLEAGPLSQWLFAGMADAGLPVELLETRHVRSALKTMTIKTDRKDARGIAHLMRMGWFRPVHCKSTSAQEVRALLTARKLLQAKRHDIEMSLRGVLRGFGLKVGPTTPKTFEARIRDLVEGNDTLTGVAEALLAARATLLRGFRSLESRLLAQARRDVRTRLLMTTPGVGALTALTFAAAIDDPARFRSSRMVGAHFGLTPTKYQSGETDVTGRISKVGDHGVRVALYEAANVILTRPVKGSALKSWAHAIARRAGMKKAKVALARKLAVVLHRMLRTGQAFAPDGRPVPAAA

SEQ ID NO: 80032 - protein, 409 aa, unidentified
MLHRVCCGLDVHKKNVVACLRRSKPGEEAEQEVRTFATTTRGLLELQEWLIVAKCTHVAMESTGVYWRPVYNILEGSLEVLVVNARHIKAVPGRKTDVKDCEWIADLLAHGLLQASFVPPKPIRELRELTRHRRVLIEERARKANRVQKVLETANIKLGDVATDVLGVSGRKMLQALAAGERDPEKLADLAVGSLREKREELREALLGKFTEHHGFMLESLLREIEFLEKEIEIFDKRIEEKMRPFSQELERLDQIPGVGRRSAEQIIAELGPDMNRFRTAGHAASWAGICPGNNESAGKRRSGKTRKGNAWLHATLVECARAGIRKRDSYISAQYNHLVRRRGDKKAIVAVAHTILVDVWHMLRYNLEYKDLGANYFDCINRDRLVRYHLKRLESLGYQVTLQEAAMQ

SEQ ID NO: 80033 - protein, 412 aa, unidentified
MFKIFRNNCCGLDVHKTWIYACIGITDPNGRTEYKQARFSSFSKGLRKLAAWLAKYSCTEVCMESTGKYWIPVFNILEKSCFVTLAHPKYTKPQKGNKTDRKDAKWICDLFMCDMIKPSFIPSPEIRQLRDLVRYRVKLTNMLTGEKNRAQNCLTVSNLKLDDVFSDVFGKSARSITNYILEHPGETFDVSPFVDPRCKTPVSEIQAAVDGAISPEQAVKLRQCLAHIDELEAHRKEIESEILQIAEPFSAVLDLLSTLPGLDKNPMTAIAILSEIGPDMSVFPSSKHLVSWAGCCPRNDQSNQKVKSRRISRAGSYLKPLLVQVANALIKSKKHPELKERYHRIKSRRGHKKAIIAVCKMLLTAIWNMLSKLEPYNPEGFLEHRPVKQEKTLTVSQALELLRLRGYTITNQ

SEQ ID NO: 80034 - protein, 346 aa, unidentified
MMIIGCDFHPSWQQVCWLDTATGESGEQKLVQASGDAERFYRQVAAPALIGMEATGNCHWLVDLLAEIGHELWVGDAAQIRASYVRQQKRDKRDAVHILKLLVEGRFPRIWMPSSQVRDLRQLLLQRYKLVMIRARVKSELQHLCLNQGVQRKRKLWSQAGQQVLRELPLKPWAGRRRDDLLKLMAMLDQQIEPLEEAVKAEAQGDKMARLLQTQPGVGPITALAYVLTMGDVGRFPRGKQVARYLGLIPREHSSGGRQKLGAITKQGNRMLRMLLVEAAQIAVRYDPEFRRQYLHRCHQKPKAVAKVAAARKLAVRLYWMLRTQVAYPEIVRIESSPRVPLVGAS

SEQ ID NO: 80035 - protein, 358 aa, unidentified
MQRNKKTLKGQNIYIGIDVHKKNWQVAVITESGYTERLSTAADAKALFKFLKSHYPDGNYRAVYESGFSGFATHYALSDLGVSCVVAHAADIPSSQYELTMKSDRIDAEKLARALRAGLVRGIYVRPKDNLDDRGVLRIRKTIQIQVGGYKTRIKHLLHSNGVELPERFSRSGTHWSRAFIAWLREDVRLLSDTRRSLDLLLLQVETLRANLLEATRGVRALSMTDRYREDCALLMGIPGIGLTVAMTILTEVCDIGRFGNERQFASYLGLVPTSHSSGERVSHGGMTFRGNKHIGPLLVEASWVLIVRDRELGRMYTEYRWRMAGQKAIIKIARKLSNIIFAVLKTRKAYEPYRRDA

SEQ ID NO: 80036 - protein, 461 aa, unidentified
MANQDRRSLPGRGEGVEGFPVLRADVAGIDVGSEEHWVCAPARTGVGREVAVFAATTPGVEQLAAWLKERGVAAVALESTGVYWIAPHEILERHGFDVVLVDTRELGRVPGRKKTDRHDCEWIQRLHSCGLLRGAFRPVEQVCMLRTLVRDKGTLVAERGDWVRRMQKNLDQMNVRIHRAVADVDGATGMAILRAIVAGERDPRQLATLRDPRCRKSEAEIAEQLSGHWREDYLFSLKQALKMYDAITETIQESEREILRHLEEMAGADRRGEQAPIPKNPEKVKAIKKRGEDPLRHALYRMSGVDLTAIDAVGVQTVSVVLSEYGPDLSQFPTEKHFVSHVKLAPHKPISGGKVVKNKKKPGSGSARVGAALRMAALSLRHSQTALGGYYRQVARRAGADVAVFATARKLAQLIYRLLRWGQPYVDEGAAAYEKRYQLARVKRLTATAKDLGYKLVSVEA

SEQ ID NO: 80037 - protein, 348 aa, unidentified
MRIIGCDLHARQQTLAMLETTTGETANLILLHEGNQVREFYSSLPRPVLVGIEAGGSMPWFLNLLDELGIECRVGHPVQIRAAEPRKQKHDQRDAELILKLLAENRFPAIWLPSKELLDLRALLLHRHQWVRMRTRIQNALQAIALANGLRRGPSLWSKDGQEKIAFLPLMPHTACRRSALQVMYRNIQSQIEKLTQQVAEQAENRYAAQRLMTHPGVGPVTALATEVFLGDPQRFADAKALASYVGIIPREYSSRGQQRLGGITKQGSPLLRFLWGEAGAHAVRRDPELKRFYRGKLVQKGLGKARVAVARKLGIRLWIMLRDEIDYPEFCRRGQMQVSGAACGGDA

SEQ ID NO: 80038 - protein, 393 aa, unidentified
MHKPKKQKKPLNDLSRSITPFDPNRSLIVVIELSKESWLVAGIVPGVERQPLKKLAADENGLLKLLERWRAEAEKAGHKIDRMTVAFEAGRDGFWLARWLRARGIEAHVIHAASVAVAREHRRAKTDRLDTEQLKRAFLGWLRGEREHCKMCVIPTFAEEDAKRPHRERETLVGEHTTVINRVKGTLARLGIRSFNPTLKKAPERLEHVRTPEGEPIPPNTLAELQRDLARKQLVSEQIRQIEKARLEQLKRAPKTAPNLMVLILMRVIGIGIETADMLVKEILSRNLRDRRAVARYGGVTGAPDESGKRRREKGLARSGNARVRRGMIQLAWRFLDYQKESALAKWFRARTENAPRLRKKMIVALARKLLIALWHLVRDGVVPEGVVLRPAH

SEQ ID NO: 80039 - protein, 329 aa, unidentified
MQDFLIVGVDVSQDTLDIHFKPSGNSLRIENETAGFKRLLSALRKESTSHPRLMVVMEHTGHYSHRLEKFLLANGIDFCKLSALHIKRSAGLIRGKDDKADARRIAEYGWLRRDELQPHVMCTTEVAALKNLMSLRAKLVKDRAGYKTRLKGMLTTGTCTTGDLLFSVQNTVIKELTVHIKVIEQQIKAIIVASPLLKNNYELLCSIKGVGFVIAAYMISCTENFQKFASARKFNCYAGLAPFKHESGTSIKGKSRVSHLANKEAKALLGLAANSAIQYNEELKAYYNRRIKEGKLAWSSKNIVKAKIVARMFAVVKRQTPYQPLPKAA

SEQ ID NO: 80040 - protein, 319 aa, unidentified
MNKSTLFFGIDISKDCFDVYSDQMGYNSHSNTKDGFKIFLKVLGKTSHCVMEATGCYHHKLAMFLYEKGIAISVINPLIIKRFIQMKLRRVKTDKSDAFMIYNYAYEQSLEQWEPEVAYIVKAKELLSLIQTYLRQSTALKNKLHALENRGHSKGIMMTSIKRQLRQLKKEHELLEKELETLIKSNEPNLFSRLNTIPGIGKKTAVLMMVSTSNFNSFNSYKQVSSYLGLAPNERSSGSSIRGKSRISKTGDGLLRNHLFMCSFTASVHNPQCKALFDRIVAKGKSKKLALIAVCNKLIKQAFAIAKSGLPYDSNYAVK

SEQ ID NO: 80041 - protein, 404 aa, unidentified
MIFVGDDWSEDHHDVCLMDQAGKRLASRRLPEGLTGIRQLHELNAEHAEEPDQVVIGIETDRGLWAGALAAAGYQVFAVNPLAVARYRDRHHVSGGKSDASDAKLLADLVRTDRHNHRPIAGDSLDAEAIKVLARAHQSLIWARTRHTNAMRSALREYYPAALLAFEDLAHGDALGVLGRAPTPEQGAHLDLPAIQSALKRGGRKRNIAARARQIRAALRSEQLAAPAPVAAAFGATTRAAVGIIVELNRQIAELEAELATHFEAHPDADIYRSLPGLGVILGARVLGEFGDDPNRYTSAKSRRNYAGTSPLTVASGKKRAVLARHVRNRRLYDAIDHWALCALTSSPGARAYYDHHRAAGDVHHQALRALGNRLVGILHGCLRHHTTYSEHTAWAHRQITHAA

SEQ ID NO: 80042 - protein, 384 aa, unidentified
MEKSSTLYVGLDVHKDSLEIATADAGRDGEVRHVSSIGGDLVALDKALRKLLSKGHRLHVVYEAGPCGFVIWRHLTAQGLSCEVVAPSSIPKRPGDRIKTDRRDAMMLARLSRSGDLTAVRVPGAADEAVRDLVRAREDAVREQRNARHRLKALLLRNGIPYAGKTSWTAAHLRWLATLKLEHAAQQIGFQEYLHSITEAGARIARLEQAMRDTLAEWTLKPLVQALQAMRGMQLIASMTLVAELQDFLRFENPRQLMAYVGLVPGEHSSGPKGRQGSITKAGNSVARRMLVEVAWHYQHSPRVSPIIATRQDQLPKEITDIAWKAQLRLNAKFKGLVARRVMKTKAVVAVARELAGFVWAIGQEVQTSGWQGIEIKPASSTAA

SEQ ID NO: 80043 - protein, 302 aa, unidentified
MAPGASAQYANRPDAIATLIQKLQSGPTITRIVIEPTGGYERPLRKALRQAGLPVEVIHPSRFKAYRTLVGTKAKSDTSDARLLAAYAAAPDDVRGCKAHHVELPEDAIREALNELANRREQLKHMIHAETCRLNTARLADVRLAIEAHREALVADDKQVHKMMLTLVRQRVDLRRDQRLLRTICGIGEKSALACIAMVPELGRIDNKAAAALIGAAPFVHQSGTKTSPARIYGGRSAVRNILYMAAVAASRHNPVLRPFYERLIAAGKPAKVALIAVLRRLVVFANAVLKSGQPWRGAVPA

SEQ ID NO: 80044 - protein, 344 aa, unidentified
MTITVIGLDLAKNVFQVHGIDENGRVVLRRKVRRSDVLPLFCQLTPALVGMEACHTSHYWAREIAKFGHDVRMMPAQFVKPYVKSQKNDATDAEAICEAVQRPTMRFVPVKSKNQQAALMLHRTRDLLVRQRSSLISSIRAHFAEFGIVVGQGIRNVERLLALLGAEGDKRLPALAAEMLGVLAEQLREIAARVREVEIKLLAWHRANPVSRRLESIPGVGPITASAIIATVGDPRQFKSGRQFAAWLGLVPQQRSSGGKERLGGISKRGDGYIRRLLVHGARAIVGWRKRSAKHVTPWIARLLERRPMNVATVAYANKLARIAWAIMSHEDRYNPARAFAEVA

SEQ ID NO: 80045 - protein, 350 aa, unidentified
MDATTVAVDVAKTVFEVAIANRECHIVARQRFNRRQFTQFLATASPTHIVMEACGTAHFWGRCAHRYGHTVTLLPPAYVRPYVRRNKTDRTDAEALLEATRSGEIPSVPVKSVAQQTLVAVHRIREQWMATRTARINALRGILREQGMLLPAGAGPALRAIPALLEDAQTTLTTPLCRMISLMYQEVRQLEACIGALERELRAMADADPVATRLREIPGIGLLTATALVGTVGHIHAFRRARQFASWLGLTPREYSSGAHRRLGSISKRGDVYLRCLLTHGARAVLHAAHRRTKAQEPVTRLHEWALTLQARRGHNKATIAVANKLGRIVWAVWTRDVAFDPRPVRQEAA

SEQ ID NO: 80046 - protein, 343 aa, unidentified
MITIGIDPHKRSLTAAALDPHSSPLGQLRLPASAQASRQLLAWAAAWPQRRWAVEGASGLGRGIAQLLVAAGEQVVDVPAKLAARARLLGTSSARKTDVADACSVAAAAIHHRRLRPVALEDQTVVFRLLSDRRDDLVAERTRILSRLHVLLADLYPGGAKRELTAARAATLLRQTHPITAVDVERKRIARELLDDVRRLDRQIKTASQTIRQAVGEQGTTLTQVFGVGPVLAAKLLGHAGDITRFPSRDHFASYTGTAPVEASSGDVRRHRLNRGGNRQLNTALHLIAVCQIRDPSPGQVYYQRKLAEAKTPEEARRSLKRHLANVVHAHLVADHRGQTPAS

SEQ ID NO: 80047 - protein, 349 aa, unidentified
MGEITRVGVDLAKQVIQVHAVDAVGAVLCRRALKRGSFLDWCAKLPPGCLVAMEACSGAHHWARQLAKLGLQVRLIAPHLVAPYRMQGRTGKNDANDAAAVCEAASRPQMHFVPVKTVEQQGILAVHVIRQGWEKDRTACINRIRALLGEFGMVIAQGPHKLRLDLTELIEDASNEMPGIARLAIQRLMQQWRNLDEDIGWCDQQIARHARDDPRARRAMTVLGVGPLGASATVATVNDFHQFRSGAQFACWLGVTPSQCSSGGKSHLGGITKHGDPYLRMLLVQGAKAAILCGKPRDERVWLWAKQLSERAGWQKAAVALAAKNARILWAMFTRHEDFKPNHLSLKPA

SEQ ID NO: 80048 - protein, 352 aa, unidentified
MKSTQTTATPKLFIGMDVHKKSWTVHFKTDLFDNKTVTMPADPDELISYVRKHFQDHEVSCCYEAGCCGYWIARALLSHGWEVKVVNPADVPRNNKQDWQKTDRIDSRNLCKHLSDDNLKGIYIPGEEQEQLRSLLRRRIHLARNLRSIKNHIKSQLLYFGIKLPDQYDNPNWSREMKTWIGNLKWKFSSGGESIKSRLKQLEFMWYEELHISNELRAYCRKHYRKDYYLYKSIPGIGGITAAGILSELGDIRRFNRLDELAAIVGLVPGIYQSSDHTINLGLTKRSNHQLRSLLVEASWVAVRTDMALQQYYRRHAHKEPNKAIIKVAHKLLSRMRAVINSEVPYQLGVLK

SEQ ID NO: 80049 - protein, 387 aa, unidentified
MARVVIGMDPHKRSVTIEVIAPDETVLGGGRYATDEPGFTALLRDAQQWPERVWAVEGCSGIGHHVATRLLVQGEQVVDVPPKLSARARVFSTGQGRKTDATDAHSIALVGTRMAGLRPVVDNQQLAVLRVLADRRRTLGEDHTRMVAQLHHLLLELIPGGAKKDLSAAQAKALLAKVRPRDAAGKTRRRVAAELIADLERVYARKKAANKELRELIEATGTSLLTLNGIGPSGAARLLIDVGDIIRFPTKGHFASWNGTAPLDASSGDQIRHRLSRAGNRQINRTLHIMATVQLRNPSEGRAYYDRKKASGKTSMEAMRCLKRRLSDIVYRHLVNDAVRAVTGPGGQAGTATQSSAAGSHPHTGSSDKSRPGPAAPDPTTVLPAAS

SEQ ID NO: 80050 - protein, 348 aa, unidentified
MKIVGCDLHARQQSIAVLDTETGELTEKVIRHEGNAVREFYASLGKPVVVGIEATGAMQWFLELLEELGIESRVGDPAKIRAAETRKQKHDRRDARLILDLLERDRFPAIWMPTSEQRDLRSLLRDRHQWVKMRARLQHTLQAIALNHALRKGSSLWSGTGQEALAKLPLPAYTCQRRNELMSLYAQLQRRIQQLDKQVEEQAQHRPQARRLMTHAGVGPVTALATDVFLGDPSRFTTANEVASYIGMIPSEHTSGKRQRLGKMSKQGNSLLRYLWTEAGMHASGKDPELKRFYRRKLIQKGMGKSRIAAARKLGIRLWIMMRDEIDYEEFCRRGKLRQIGESPCRSA

SEQ ID NO: 80051 - protein, 590 aa, unidentified
MSATVSLPAIGVGIDTARYGHCVSFLRPDRQAAAKTMTIQENREGYEALRQRFEQLHQEHPQAHFHVRIDAAGQYASNLERFVRGLPWPMTVSIGEPKRNKDYQKAHFPKRTTDTTESLAMARFAIVEQPHATATLPDEFMLLREVAGRLQAQTKQTTQAINRLHNLLARVFPELALFANNFAATWVLELLTKYPTAERIAQARLASLEKIPFIPQAKVTALHGAAQRSVSSLRGELAETLVRELVAQVRHCQTSKNKLRQLLTQTYAGLPESRHQHLTSIPCIGEATAAVLVAKIGDIDRFQTPEQLVGYFGVFPAEHSSGVDKKGQPLPLGTMSMSPKGNDLVRSYLWMAARCGISWNPALRSLYRRLKARGKRGDVALGHCMGKLLHLVFAIWKSGQPFDPKHFPWDTPAQDVEERADGNEEPEAESDSVVSPAMLTGRGDGGEGNNQAAGHKPVIPARKVVTAARTSTVPESAIVDESTGIDFAHLKRHLTMARVLDQLGLASRLRGSGPQRRCTCPLHRGDARGRTFSVNLDKNVFQCFDAACAKKGDVIDLWASVKGLSLRQAAIDLVRTFNLKPAPATEKRNG

SEQ ID NO: 80052 - protein, 412 aa, unidentified
MEVIHSRCAGMDIAKRDAKVCIRLAGSGRRRTVETVTTWGATTRQILALREHLVAERVTCIVMEATSDYWKPFYYLLEDLVGVEVMLVNARHVKNLPGRKTDVADATWLAQLGAHGLVRGSFVPPAAVRQLRDLTRTRTAVTRERGREIQRLEKVLEDAGIKLSSVASDITGVSGRAMLEALIAGNSDPTAMADLARRRLREKIPALTEALTGRFTGHHAFLTRTHLNLIDQHTAAIDELTARIEVVIEPFRRFRDLICTIPGIGGNTADVIVAETGADMSRFPSAEHLASWAGTTPGNNESAGKVKSSRTRPGNPYLQGALGIAAISVSHTKHTYLAAKYRRIASRRGPLKANVAVQRAMLIAIWNMATTDTAYLDPGADYFTRLNPEKARTKAIRQLEAMGYHVTLEQAS

SEQ ID NO: 80053 - protein, 416 aa, unidentified
MNAAGIDVSSRKSTVAVLRPFGEVVKLPFDVRHSAEDLAALAAQLKSIDGETRVVMEHTGRYYESIAKVLHEAGLYVSAVNPLLIKEYGNNSLRKVKTDKADAIKIAKYALDNWTELRDYTPMDTIRYELKTLNRQFQLASKQKTATANNLIALQEQSFPGIRKLFDSPVRSDGTQKWVDFTHDFWHVDCVRSGSQNAFAERYRKWCKRNRYQFSMEKATEVYALAKSSVVLVQKTSVTKTLVQEAANQLTAISRSVETYRSEMNKLASQLPEYPVVMEMYGVGESLGPQLMAEIGDVRRFERKQSLVAFAGIDPAPSESGDYCSRSNRTTKRGSPYLRKTLFNIMKVHLQRAPADEPVFQFLGKKRAEGKPYYVYMTAAGNKFLRRYYGKVMAYFSTLEGLPPVDMDSTGLHHAE

SEQ ID NO: 80054 - protein, 350 aa, unidentified
MTMVGGFDVHRQQITFDYVDSDGLVRWGQIRPATRKTLRSWLGEHCPEGDAEFALEGCTGWRYVSEELAAAGVGVHLGDPAEVAALRGPKKRAKTDHADAKLLRTLLLEGRFPESWIPPAHLLEIRALGRLYCTLMDERRAWQQRIHAQLFHQGCPPVRALLSAAGREALANTELSAAGRQYVDTALRRIDELSVEIDPLRTQLVNFARRQPGCQALQRHYGIGWLCAAMMWAEIGDARRFASSDQLVRFAGLDVTVYSSAGKRSPGHLSRQGSPQLRWAAFEAAKSAARRGSPDYAYYRKLVAKHDGHNGKNPTLAVERKILRRCYHTLCELGDAALALPVSEPEEVAA

SEQ ID NO: 80055 - protein, 346 aa, unidentified
MWIIGCDFHPGFQQVAMVETDTGEVRRRRLEHVAEARQFYCDLRGEVRVGMEACGSTQWFEQLLAELGHEVWLGDAARIRAMCVRRQKTNQRDADHILELLQSGRFPRIWVPTPAERDVRQLLADRHHRVRMRTQVKNQLQAIALNHGVQKKYKLWTAAGRAVLESLPLLPFAAQRREQLLAKLDRLDVEIGELDKQVAAQVEQRHDARQLRTHPGVGPNTALAFVLTLGDVRRFRRARQVASYLGLIPREHSSGDKQRLGHISKQGSAFLRFLLGEAGQSAVKGDAELRRFYRRLLLRVGRNKAKVAVSRKLAVRLYWMLRNDWTYAQLCRSLVQASPSHSVVRK

SEQ ID NO: 80056 - protein, 345 aa, unidentified
MEHYAGIDVSLESASLCVVDATGRIVREAKLASEPAVLIGWFRGLGLTLTRIGLEAGPLSQWLYAGMRDAGLPVELLETRHVRDAFKAMPVKTDRKDARGIAQLMRLGWFRPVHCKSLPAQEVRALLTARKLLQTKNHDVEMSLRGVLRGFGLKVGPTTPRTFPGRIRELVAGHTTLSTVADALLAARSTLFEQLQKLEKRLRSLAREDGRVRLLMTAPGVGTIVALTYASAIDDPARFRSSKSVGAHFGLTPKKYQSGETDVTGRISKIGDGGVRTALYEAANVILTRPVKGSTLKSWGMRLAARAGMRKAKVALARKLAVVLHRMLADGTSFLADKAAAAVAR

SEQ ID NO: 80057 - protein, 386 aa, unidentified
MMVIGIDPHKSTHTATAVDPRTNRSVASLRIEASLADYRRMLAWARQFEQRRWAVENAEGLGRHLSSWLLARGEQVVDVPTTATARVRQLSRGGGRKNDQIDAAAAASVAALQGESRPLEPEGITDALALFDESRMNLTQSRVRLVNQLHALLRELLAGGAPRDLSASTAAALLRRVRPAGDVERVRKQIAAGLITQIRSVDALLKSNAQQINERVAASGSTLPSTVGIGAITAGRLIGRTGRAGRFPSSASFANYAGAAPIEIASADKARHRLSRGGDRQLNAALHTVAITQIRTPSSRGHTYYNAKIAQGKTAREARRCLKRRLADHIWRTMITDERRGAANPGGHPGTTLQSSAAGSTPTTSSSDKSLPGPASSHSTTPRPAT

SEQ ID NO: 80058 - protein, 362 aa, unidentified
MTLYIGVDFHPHQQTLSWCDTETGETKTLDMLHDVKRVREFYSSLPEPAIIGIEASSRAVWFENMLFETGHKLLVGNPVLIRKRATSRHKNDRRDAELILDLLLRGEFPSLWRRPPESDRILEMLRLRSSLVRQRTQGYNRLQALAHSAGLPRGRMRTAAFQAVIKALDLDETDDLRRMHLFKLIENFNEQITQLDIWLKAKAEADPKVRLLETQKGVGFLTALTTVHTLGDVTRFARLSKQVVSFAGLDPLEDSSAGRIRFGHVSKAGSRLLRFQLGQAAQIAARSDMKLKSFYKRLAKKKPKAVAKTATARRLLVKLAIMLRDNINAQEFDRRGKHSWQCPSGTKVGNDRRFDWAKPTFR

SEQ ID NO: 80059 - protein, 534 aa, unidentified
MGRRRRGGRGPGSAQRQRRSKALEERGRRVGPDHFGILAVDSAKSRFAVLLANFYGRTLMDLLEADNTTFALEALVTKVKAQCERHGLKDLVVAIEQTGRYHVPIRQVLRKHWDVQMVHPFATKQLRQPADPGNKTDPTDLQAIVRALVVGYGRSEAELPGRWADWRLVSREREALVRQRAWARVRIEMRTEALMPGYSAQFGCLWNSPLPLLLARHYGSARALLAAGQQGILARAHEEGHHPQQRTLARVLQWALQASEPDPNAAVGHRLLWDQIDLLRFLEARIGQYERSLADYLVDTPVVLLLGIPGINVVSAASYGAELGPIEHYLHPTKITGRAGIYPSRYQSDETDLADGPLVGQHNARLRDAIFEIAHNLLAYNPHFKAWAELRGKRKWAKKKVHVAVASKFVRISYWMMAGRTVFQHPCMAGRESILRKLFRFAKDHRIPAHETLSLLQRAGQQLPGGVREEEARALLDDLPKSTRRRHRSGPEPLGEILPRVIAWLAPRLSTETERSQPGPSSPAEDPVLRDLDR

SEQ ID NO: 80060 - protein, 351 aa, unidentified
MSLKVNSAIAVIGIDIGKNSFHVVGHDKRGAIMLRQKWSRGQVETRLANLPPCLIGMEACVGAHHLSRKLQILGHDARLMPAKYVRPYSKGQKNDFRDAEAIAEAVQRPTMKFVATKTAEQLDLQALHRVRERLVSQRTGVINQIRAFLLERGVAVRQGLRFLRAELPRILAGPCDALSPRMLRVIEGLAGDWRRLDERIEGLSSEIEALARQDKGCERLMTVPGLGPIISSAMVAAVGTGDAFSKGRDFGAWLGLVPKQISTGDRTILGSISKRGNRYLRALFVQAAWVVLVRVGPKHWERYGLKSWIEAAKKRLHHNVLAIALANKLARIAWSVLAYGRTFEVSKVQAA

SEQ ID NO: 80061 - protein, 362 aa, unidentified
MKEQKKAVRYVGIDLGKRTYELAIVEKGEVKISNGKTCAASRQALYKKLRANDKVALEAGNLAFIIAKEIQASVGCRVYVLNPSHLPLIYGSMKKTDKEDSLKLAHIVEDFSEERLPVVPVPSEKEMERRKLLASYRRAQQSRIRDINKLHGLFLAQGITTMGKEDLAAGESRKEAVSILSGSEKEEAEYLVECLDLHEKRIRVLKGRIKKESAGDEVIQRLQSVPGVGPMVAFAFVSHVGAERFENGSQVSNYLGLVPRVYISGETVRYGRITKRGNGYLRALLVQAAWALTRTKKGGKLKERYEYMTIEKSISKKKAIVAIARRLSELLYTLMKNGTRYEEREFRPGKGAEKLAEMALSA

SEQ ID NO: 80062 - protein, 455 aa, unidentified
MLPMSKSSARQTRLFKSASRVHPVMRPDAAGIDLGATVHFVAVPPDRAAQPVRSFGTDTACLQALADWLVACRIATVAMEATGVYWIPLFQILEARGLEVCLVNARHVKHVPGRKTDVQDCQWLQYLHSVGLLNASFRPPAAVCAVRSLVRHRESLVRTGCEHLLRVQKALDQMNVQVHRAVTDITGETGLAILDAIVAGERDPAVLARLRNYRCKKSEAEISAALHGDWKPEHLFTLRQSLEAWRYHQKLIAECEAEMKDRMKALDTQSEAVPPPPTKRSTQPDEPLRRMLFAKFGVDLTAVDGVAAQIGLVFLSEVGVDVSKFATAEHFASWLGLCPDNRISGGHQLAVATRPVANRLTTALRMGAQTLHRSESALGDFFRRMRAKLGTPAAITATAHKIARVLYAMVKHRRPFDPAKLGNPEIRRRRKERSLRQQAAALGFTLQPLQADAVS

SEQ ID NO: 80063 - protein, 411 aa, unidentified
MTNDNDTTSAAALVAIDIAKVKNDIVIELPGKRRRRRMKVLNTRVEHQHFIDQLRALNCPVQIGFEATGNYHRPLAWRLLAAGFDLRLISSVALARTREALHNGWDKNDPKDAQVMLHMLRIGATQRYHDPLAHGINDWQELSKTHDIVSKAKTEAMHRLQTHYLPLYFPEIERFRHNSRSEWFFIFLDRFPVPAAILDLKREQFIQTAWPLIGRKVAKTRILGDIYETARTSIGLPVAADSPAVVMYRLVIAHIRQLIQQRDEIERQAHALLAEHPDYQRLRQLPGVGPIIALTVLAEAGDLRRFRHHRQFLKFCGFDLATHQSGQFRGQSKLSKHGNARLRRVFWMAGQVAVRQRENSFRDKYRRYMARNPGNRDLNRKALTAVAAKMARVAHAVVTGETDYRPFYGVR

SEQ ID NO: 80064 - protein, 317 aa, unidentified
MARAGVGIDVSKDWLDVATTEAGAPWRVPNSAEGLSQLVAQLEAVDVHRVVLEASGGYEAGALEGLHAAGFAVVLVQPLRARHFARALGQYAKTDAIDAHVLARMALLAVDDAPRWEPVAEQVADLKALVDRRQQLLVQRDGEKKRLRFARAIVRPDLERAVADLTAQVAELEQRIDMLVASRNRLAEEIELLESVRGVGRVSAATLRVVIPELGTLTRQQVAALVGVAPINRDSGGKSGRRYIRGGRDVARQALYMAALAAARWNTVIQARYAHLVAKGKKPKVALVACMRKLLIHLNSLMRSHLQGLPVTVPTVS

SEQ ID NO: 80065 - protein, 338 aa, unidentified
MFIIGIDPHKGSHTAIAIDGDERLVGELVVRADRRQRERLLCWAAEFEPRLWAVEGAAGTGALLAQQLVGAGETVLDVPAALSARARLLDSGHKDKTDPFDARSAAIVALRNRKLRSVALEDHRQILRLLARRHHQLTAARTRAICRLHAVLCEMTEGGLSKNLSANRAAAELRKLRPSDAIGIERKRIAVEFLDEVRRHDRALTELRRRIADAVSAANTTVTDVHGVGPIVAAYLIGYTGDIRRFASAGHYARYNATAPIEASSGPRVRHRLNPNGNRQLNHALHIAALGQISHDTPGRAYYLQKQTEGKSRKEAMRCLKRRISDAVYQRLRADSDR

SEQ ID NO: 80066 - protein, 461 aa, unidentified
MRKARKSRRKPGKKIVDGTAGLEILRPHAAGIDVGNAEHYVAVPPGRSDPSVQTFGSFTADLHRMAQWLQACRVDTVVMQATGVYWMALYQVLEGYGFQVYVVNAKYTKTLPGRKTDVLECQWLQKLHSFGLLNNSFLPPEEICMLRTYLRQRENLVAAAGVCIQRMQKVLTEMNVQLANVLSDLSGTTGMAIVQAILEGQRDPQRLAALADPRVQASRKEIAQSLEGHWRDDLLFVLQQVHDLYWTYLESISACDRRIETHLKTLEAKVDMAAQPLPPTPRLPRRKHIPQTNLRAELYRITGVDLTRIDGLQVQTAQVIISEVGLDMTRWPDEHHFASWLGLCPNNRITGGKVIRRGTKKVLNRAATALRLAAQSLHHSKSYLGAKYRRFRARLDGPVAITAMAHLLARLIYRLLRYGTQYHDKGMEHYERKYRQTQMKWLQKQAAQLNMQLIPAQGVAE

SEQ ID NO: 80067 - protein, 390 aa, unidentified
MIYVGIDIAKLNHFASAISSDGEILMEPFKFTNDGDGFQLLVSKLETLALEDDNIIIGLESTAHYGDNLVRYLVASYFKVCVLNPIKTSSMRKNNIRKTKTDKVDTYIIAKTLMMQDSYRFVSFYDLDLMDLKTLGRFRQKTIKQRTRLKIQLTSYVDQVFPELQYFFKSGLHQKSVYALLKEAPTPHDIASMHMTHLAHLLDVSSHGHFKKEQAKELRVLAQKSVGANDSALSIQITHTIAQIELLDSQLNQVEAEMTEIMKFNDSVIMTIPGIGYINGGMILGEIGNIHRFSSPGKLLAYAGLDPSVYQSGNFQAKRTRMSKRGSKVLRYALMNAAHNVVKNNATFKDYYDKKMVEGRTHYNALGHCAGKLVRVIWKMLTDEVEFNLE

SEQ ID NO: 80068 - protein, 354 aa, unidentified
MHLYFVGLDVHKQVIAFCVKTADGVIIAEGSIRATRTALDEWVKTLPGPWHGAMEATMFSHWIYQHLKPYAVKLEMGHAARMKAICAGKKKSDKIDARTIADLLRCNLFPACFVISPELGALRQQLRFRRLVVEETVLFKNKTAGLLMGAGVEYERRRLHGKRYFESLVKDNEWIGQQLRPLLEFNRAQMTTLQAMDRRLKGMLARHPALESRVKALCQIDGVGTVTALSWALEAATPERFPSIKHALSYCGLTSALRQSAGQQKRGPLSKQRNAHLQSALIETAKLAPLNNEKLKEVHRKAIEKGGHRNRATLAVARKLVAYLMAADRAFFLSQRESADGGPYPVMQRDSTAA

SEQ ID NO: 80069 - protein, 345 aa, unidentified
MESMCYIGLDVHKKTISYCVKAASGQVLREGKIGATRGELDSWMKTLPQPWSVAMEATIFTGWIYDHLLPHAAQVKVAHPLMLRAIAAAKKKNDRIDASKIADGLRCDFLPECHMAPTEIRDRRRTLRYRDLLMRQRVQMKNRVSGLLMETGVSYSKQRLHKVGYFRELLSSNEEIHPNIRPLLKLSRDAIVRLQKTEYALVSSLQRDPLLADRIKRLRTVPGVGPITALTWALEMGEVSRFPSIKQAISYCGLCGDEKSSADKVIRTPLSKQRNKHIQRVLVEAAKLAPRENHELALVYETEKQKGNANRATLAVARKMVAYLLAVDRGKRDFVPAEDHRGAAA

SEQ ID NO: 80070 - protein, 369 aa, unidentified
MSATRKGLTDVSTTRVQGSDDVVEVVLGVDTHLDVHVVVALDQLGRPLGKLAVPTAKRGYHTLLSWAEGFGPVRCAGIEGTSSYGAGLARYLKAAGIAVVEVQRPKRRHLRRNGKSDPIDAETAARAVLSGEAAGEPKSADGRVEMIRVLRAARRSAVKAKTQAANQLQGLRVTAPEALRHRLRGLSTKELVAVAARFRPTNKLDDVEAATRLALRSVARRYRTLSEEIVKLEAQLELLVAEAAPELLSLPAVGTDHAATLLLAAGDNPERLRSEASFASLCGVSPIEASSGKTVRHRLNRGGNRDANRALHMICMVRMGSDQRTREYVSRRTAEGKSKREIIRCLKRYVAREVYRVLVPTASPSPIRS

SEQ ID NO: 80071 - protein, 503 aa, unidentified
MPVKKRGPGASDCFIGEAHAIPFRRARKVKAPSRLCRNHFREEECMGKRKQQKGEKVTSHFEHLNPHAAGIDVGSRSHFVAVPEDADEKPVREFSCFTGDLYRLAKWLHACGVKTVAMESTGVYWIPVFEILEHEGFEVRLVHAHHVKNVPGRKTDVSDCQWLQRLHSYGLLEGAFRPPEQVCILRSYIRQRMTLARYAASHIQHMQKALSQMNLLLHNVVSDITGMTGMRIIKAILAGEREPLALAGLRDPRCKNSAATIARSLEGHYKSEHLFSLKQAVELYEFYQAKIADCDHQIEEQLALFDDRSAGGEIPPSRRGKSESNGPGFNVREDLYRMTGVDLTRIEGIDSYTALKVVSEVGTDMNRWRSSKQFASWMGLCPGNKVSGGKNLSGKTKRVANRAAIALRLAAYGLHKSKSALGAYYRRQRARLGAPKAITATAHKLARLIYSMLKHGTQYVDAGQDYYEKCYRTRVVENLQKRATELGFTLVKATFPSPKMCAT

SEQ ID NO: 80072 - protein, 312 aa, unidentified
MNDLLERCCGLDVHKDIIVAYILNGPVGKPAKSEIREFSTLITGMRDLKAWIVSEDCHFVAMESTGIYWKPIYETLEDSFDGDISLLVVNARHMKNVPGKKTDMKDAEWIATLLRAGLLNGSFIPAKEIREFRDLTRYRKSVIRDITSQKNRIEKFLQSSGFRLSTFISDIFGASGRNIINCLIDHGQINKSQLNECLKTKTRKRIDEILIAVNGTLSVHQRNFLKMLVSHLDVLNSHLKDVEASIIAEINQFSSAIATLCSIPGIAETAAASIIAEIGVDMSCFKTAEHICSWAGLSPGNNESAGKKKRLL

SEQ ID NO: 80073 - protein, 485 aa, unidentified
MALVFAVVLGLLILEVAMSRRKPNPTSPDPASLALLHTLHPHAAGIDVGAAELWVCVPPGAVSIPRPPTVLPAHVRRFGVFTADLQAIAAWLHQCGVTTVAMASTGVYWIPLYDLLEQAGFEVLLVDPRQVQRAPNRPKTDVHDCQWIQRLHSLGLLTAAFRPEEPIRVWRSYQRHRASLIEDAGRHLQRMEKALEQMNVKLPEVVSDLTGLTGMRIVRAIVRGERDPKALAKLRDHRCKASAETIARALQGTWQPEHLFALQQSLALYDYYHEQIRDCDRVIEAHLMGMALPEVPPLEPKRRSRRRKDNEATFDARQRLHHVAGVDLTAIEGIEESTALVVLSEVGTDMSRWPSEKHFGSWLGLAPNPKKSGGKMKSSATRPGVNRAAQALRLAAKNLQRSHSALGAFFRRIAARRGLAKAITATAYKLARIIYAMLKHGMAYVAQGLEAYETAYRERVVRQVKRKAVALGLVVVERDAGVQPS

SEQ ID NO: 80074 - protein, 329 aa, unidentified
MCKRILYVGVDVGQEDLWVAIEGSKPYSFKHTIAGVRGLYNLVRQIDTDTTLHFCMEATGVYSLKLATSLSAYPDVQVSIVNPAQIAFFARAQLRRSKTDKIDAQVILAFAQSQNPRPWTAEPKSLRQLYELVVQADALLETQRRWVNRAHTQTYIPELPTTVSKSTSALKRHLERQIAKVERSILKLCETDPNLKIQMELLCTIPGVAERSASRLLAYGKIALTDYSARALVAHAGLAPKHRQSGTSLLAKSHLAKEGNKRLRHALYYMPALVGIVYNPLLKKYYKRLVAKGKPKMLALVACMKKLLIMIRAILIQKIPFNPDIQCLT

SEQ ID NO: 80075 - protein, 343 aa, unidentified
MDYFAGLDVSVKETSVCIVDDAGKIVREARVASEPEALLQVLTNTIYRFKRVGLEAGPLSQWLYSVLADAGLPVICVETRHMRAVLKAQINKTDRNDARGIAQMMRVGLYRPVHVKTLRSQKLRMLMTHRKLLQSKAIAIENDLRATLRNFGLKVGVVGAVKFEARIKELVENLPDLTVLVEPLLIVRRVIRGQVDILHRRLLAIVRDDDVCRRLMTVPGVGPVVALTYRATVDVPARFRNSKAVGAVFGLTPAKYQSGQNDRTGAISRCGDEMMRMVLYEAAQSMLARSAKWSWLKAWAMKIARHRGMKKAIVALARRLAVIMHRIWIDGTAFRWTREVAAA

SEQ ID NO: 80076 - protein, 340 aa, unidentified
MNIVFLGIDLAKNIFQLCGLNLAGKPVYLKRTGRKELLQTVANIPACLIGVEASTGAFYWQREFEKLGHKVKVISPQYVKPFVRGQKNDGNDAQAIAVALMQPTMQFVPPKSPEQQDIHTLHRTRQRIVNYRTATVCQIRGLLLDWGITIGAAVSRVSRAVPLILEDAENGLSARMRRMIAELYDLFNDLERRIHSFDNEIDVVFRQSEACQRIAKVKGIGLKTATAVVAAIGKGTEFKNGRYFAAWLGLVPRQHSSGDKQVLMNMTKKGDKHLRTLFIHGARAVVRVATNNNDGGLHQWVNQLKERRGFNKTTVAVANKNARIIWSMLKNDTEYQAVGR

SEQ ID NO: 80077 - protein, 368 aa, unidentified
MKKNSTRPPSRKASGRPAAIGMDLGDKSSRYCVLDEEGEIVKEDSVGTTKKAMLQVFGSMPRCRIAIEVGTHSPWVSRLLKNLGFEVTVANSRSVPLISASTQKSDRRDAQMLARLVRVDPELLRPIRHRGEQAQTDLMRIKVRAALVEARTSLVNTARGLTKAAGERLPSCDADAMGEKQAEGLPLELQAGLRPLLQQVESLTEKIKGCDAELKQIAEERYQETELLQQIKGVGPLIALTFVLTVEDPERFKKSRDIGCYVGLRPKRSESGEQQPQLGITKEGDIYLRKMLVQGAHYILGYHGPDTDLRRWGLKLAQRGGKNAKKRAIVAVARKLGILLHRLWVSGEVYEPLRNSNARQAAAQRAAA

SEQ ID NO: 80078 - protein, 329 aa, unidentified
MNVCGIDVSKDTLEVVVRKNNRSQRSKTFENSPEGHLKLINFLTQKKVELICVEATGSYHLDIAILLSETATLKVMVINPKAAHNFAKAMMQRTKTDATDAEMLAQYADRMDFVEWEVPANEVLSLRTFGRWLDALSKELTRLKNQLHAFEITKTTPDLIIESVKNRIAILTQEIVDLEEEALDIIKNNRKLKEKYELLISVKGIADKTAIKVLGEVLVLSANMTAKQWVAHAGLFPQIIQSGSSVNKKTRIGKAGNRYIRGALYMPALVAVNHDPHIAGFYQHLVNDNGLRKIQAICAVMRKLLLSIHAMFRTNTPFNGEFFYTLKEA

SEQ ID NO: 80079 - protein, 336 aa, unidentified
MTYYLGVDLHKKTQTWTLLDEENDTPVFSREYLVSPSEVTRACKDVSTFGNIVAAIEPVCGWQWQVVQMREAEMTVHVSNPRRTVLIAKSLQKTDKNDALTLALLVRTGLLHTSIEVSPETRKLRALVRERSFLVQLRAGMQCRLEGVVTREGRHLLEGATSSKKGASIILASANHEWKRAVYMKRDMTKYIDEIEALLRQKIQTPLVKLLSTIPGVGHVTALTWVAEIGDFSLFRTPEKLCAFAGLVPTERSSGGVQKLGHITKAGSTHLRYMAVEAAMHIRNTRDTETLYAFYEKIKLKKGAMCARVALARKMLTIAWHMVKKNEPYIPRSLTV

SEQ ID NO: 80080 - protein, 449 aa, unidentified
MKKFSSESHGLPVIHSRAAGIDIGSRFHVVAVPADLAEAPVRTFQAFTADLERMADWLVDLGITTVAMESTGVYWIPVYEILETHGLHVVLANARDARAVPGRKTDVNDAQWIQRLHACGLLRASFHPDREIAALRSYLRLRERHLDYAAAHIQHMQKALTHMNLQLHHVVSDVTGVTGMRIIRAIVAGERNPTKLATMRDTRCKSSPEVIQSALVGNYQPEHVFALAQALAMYDAYQVQLEVCDQQIAQSLLRLSQQKSPPSEPLPKPRHRTRQPNALNFDVRSLLYQLVGVDLTQIHGIGPYLALRLVAECGTDLSRWRTAHHFTSWLTLAPGCRISGGKVLSAHTRKTKNRVTAHLRLAAVTIGRTNTALGAFYRRLSARIGKAKAVTATARKIAILFYNAMRFGMAYQDPGADHYEQKYRERVVKGLHRRAAEFGFTLQAVEGVS

SEQ ID NO: 80081 - protein, 396 aa, unidentified
MIGFVGLDIGKDAFTAAFLWVDPQGQTHTRKPQTFSADRAGWQAFLACWRTLPPQTWHVGLESSGPYTRLYLHHLQALPHPVSLISPLQASHLRRSRSLRKTKTDRIDAETLAAWLFSAWQEERLPRQARTSPSLRDLATLYDQLTQEMTRVQNRFRQVLHLLFPELERRQRRFPKALRRLLQTFPSARQIAQASDEDLAPFCRRISWTPDKLRALAATSWGVYDEAAVIHLRQLLALWDELETRRQQVWLDLRQQVRQRYPDAWKRLRAIPGLGERLTALFLALTGDLSAFPSPKALVAFAGLDPSVYQSATFHAHGRLSKRGSPLLRHILFLIAQALVRYTHRFRQTFLHHRHQQGRAYREAMVIVARKALTIFHMLILRQRDFVDLAPQTSGL

SEQ ID NO: 80082 - protein, 345 aa, unidentified
MKKNIIGIDFSKETFDATLLDCRNSELSEAVQSAVHEKFTNNKEGFQAFVKWIKSSVKKITPDELLLCGEKTGKYSLPLSNFLYAKGYSIWLDSGLRIKRSLGISRGKSDKADSLKIALYAYRYQDMAVCYVPLSKNVSRLKELFLYRQHLVSQVKAMDVRKNVTDDFKKELGDVKFIVDSAAKIIQQIKATIKKCEEKMQELIEEDDELKTTHDSITSIKGISLINATAFIAYTNNFKDFGGNAKKIATYWGGAAFAQESGTSVHKVARVSKIASKMLKSLLTQAARITVRWEPKFRQYFEQLISRGKHQGVALNNVKNKLIHVITALAVSKEKYNREYEYIKR

SEQ ID NO: 80083 - protein, 452 aa, unidentified
MANKNKKEKKINTHIPLLQPDSAGIDIGATEIFVAVPDDRSSKFVRKFGTFTDDLHDAAKWLKQCGIKSIAMESTGVYWIPIFQILDAYGFDIILVNARHVKNVPGRKTDVQDCQWLQYLHSVGLLRGSFRPAQDICAVRSLLRHRDNLVKSASSHVQHIQKSLTQMNLQIHNVISDITGVTGLAIIDAILSGERNPEKLAELKDRRIKADTATIVKSLKGDYRSEHIFTLKQALQSYRNYQLMIEDCDFEIEKHLKQFESRIDLTESNDCPPEKQLKRKPKKNEPNFDLKEHMHRIIGTDLTKIDGISSLTAHVFFTEVGPDLSKFSTANHFCSWLGLCPNNKISGGKILSSKTRPGTNRLAQSLRIAANSLWNSKSYLGDYFRRMRARLGAPKAITATAHKLARIIFHLVKNQKAFDETIFAQQEEAHKIRLRKRVIKQAKSLGLQVVTA

SEQ ID NO: 80084 - protein, 363 aa, unidentified
MKKISKVAQQMETAKDKPAITVGLDLGDRYSRYCLLNEEGEVVEEGRIQSIESAFRRHFEGEPRQRIALECGTHSPWVSRLLNTLGHQVIVANARKIPAITASKSKNDRNDAELLARFAAHDPKLLSPVQHRSLERQQDLNLIQARATLVRARTMIVNALRGLVKSAGFRLPACSTEALFVRVRASIPPGFKAVAFPLLSQIDLLNRQIGSMDKQIEKLAAKYPEIEILRTAPGVGPVVAATYVLTLDRPDAAANRSAGAFLGLRPGQSQSGDSDPQRRISKTGDSYLRSLLVQSAQYILGRFGPDSALRRWGLKLASSGGKRGKKRAIVAVARKLAVLLHSMWRSGEHFQPFPQPATTATAA

SEQ ID NO: 80085 - protein, 425 aa, unidentified
MANGRWNVSDQIRWFVGLDWATEQHRVCLLDAEGKRVAERDVTHDGTGLTELCCWLLEITGAQAQEIAVAIETPRGPVVEMLLERRFQVYAINPKQLDRFRDRFSVAGAKDDSRDAHVLGHSLRTDGQAFRRLAVEDPTIIELREWSRMHDELKAERNRLANRVRDQLWRYYPQAAELGDDLAADWFLDLWRALPTPAKAARASETSIARILKTHRIRRLDAPAVLRILRQPPLAVAPGTLEAATAHIRAVAARLRLINRQIKETERRLDELCAAIEAAAETAPGQICEQRDVAILRSCPGLGRTTIATLLAEACEPLRRRDYQVLRVLSGAAPVTRRSGKSCIVLRRYACNNRLARALYHWARVATQHDPVSKQRYAESRRRGHSHGRALRAVGDRLLYVLCTLLERQTPFQPNYKTSQIAAAA

SEQ ID NO: 80086 - protein, 470 aa, unidentified
MFRQVSAMQKNCDKNSKPDKEVGIEGLPVIRPNVAGIDLGSETHWVCAPNVERTGLEVETFGATTPELERMAEWLKARKIESVAMESTGVYWIAPHEVLERHGLEIVLVNTRELARVPGRKKTDRVDCRWTQRLHSCGLLKGSFRPNEPVCMLRTLVRDKGNLVAEAGDWLRRMQKSLDQMNVRVHRAVSDIDGVTGMRIVRAIVAGERDAHELAKLRDRRCGKSEEEIVEQLSGHWREDHLFSLRQALKMYDAIQERIADYEREILRKLAEMERAECHGQEPPKLKNPQKAKAIQKRGEEPLRKALYRLSGVDLTGIDAIGVETVQVVLSEYGPDLSRFPSEKQFVSHVTLAPRQALSGGKPVKKKKRGSASTRVAAALRMAALSLRHSQTALGAYYRQISRRIGGDVAVFATARKLATLIYRLLRWGQPYVDVGAAAWENRYRQARIQRLAATAKDLGYQLTPNPTKA

SEQ ID NO: 80087 - protein, 343 aa, unidentified
MQTTTTIGLDIAKSVFQVHGVDAAGQVVIRRQLKRRYVLSFFQKLPQCLVGIEACASSHHWSRELQALGHTVRLMPPAYVKPYVKRQKNDATDAEAICEAVTRANMRFVPTKTPEQQSGLVLHRTRHLFIRQQTSVINAIRAHLAEFGIVAPVGRRGVEELLTVVADPNDKRVPEIARACLSAFGAQLRSIKEQVLEFDRLITAWHRSNEMSMRLDEAPGVGPVLATAVVATVADPKVFRSGRNFSAWIGLVPKQHSSGGKDRLGSISKQGDRYLRGLFVAGALAVIRYAKIHGTKHRPWLTALLTRRPTKVAAIALANKLARMAWAMMARGERYRQPVALAA

SEQ ID NO: 80088 - protein, 482 aa, unidentified
MKKKTIYSNQSQELLRLFEEAGNNSKMMCVPIDYAKKDHIVMFCNGYGDILRKPFSVKNSPEGVKYLTEQVRRSCRHRGINSKHVFLGGEDVGSYAENFVNTLRVKGWIVAGVNAHDAKKQRANIQASTDRLDLMGIASMLLNRRANCSPAQSGIYRNLRTLVRHRRKLVVMSTEIRNQIHTVVDRLFPGFLDERKTGIVPFTNSSLYLMENRFSARQIHRRKRDRLIEILKRNGTSKPELTAAKLQEYARQVLIPPKEYMSTLQLSLAQHVKHFRCLKENIKQVEREIALWLSQTQGAFLTTIRGIGIVLAAGVTAEIGDPSVQKPLNNLASYAGIIPRVKQSGGVEGKTFTGKVAKRCNRILKDYVVKSGLHLGLHGPQDLMADYKRRDAAGQHADFGMARRYLRMAMCLMRTSQIYLPSRLRKKGVDVQERSSYYLMTWPYIREKWYKLGALEPTFEKDRPLGQWRYRVQELYEIKLKL

SEQ ID NO: 80089 - protein, 420 aa, unidentified
MLSSALDTSSFADVVGIDVGSQAFVYTVLQPDKRTMVKPTELANRDTGFVQVHASLSHLGVAAQRILIGLEATSRDSENLYQFLAAQGYVLCLLHPRQTHQFAQQRGLRARTDRLDAATIARVLLSGEARPGYVPDELIATYREVERLHSQLAEDSARYQIQIQALLVVLFPECVQVFANACRPTALALLKRYPSARALVAAGVEAVAATLHEVAPRRYGRQTAQQLVDLATQCSASGLATDARALSLQILCDQLQHTLANLAQVEHELDQLLDRDTGVTGLKSTPEFGRKTVAVLRAELGDVTRFQRVDQVVAYAGLDLEVKQSGQWKGQVKLSKPGSGRLRRVLYLAALRSICLPASAFGAYYQRLVARGLKARDALTAVMRKMLIVAYHLLRSNETYDPTKVCAVAGPPPRTPSSGS

SEQ ID NO: 80090 - protein, 356 aa, unidentified
MQNENKNLDFNNQAFFIGIDVHQKSWNVTIISSERTIKTISMNPSPKELYKYMANNFPGGKYYSVYEAGFSGFWAHRELESLGFNNIVVSPTDIPTSGKEKLTKSDIVDSRKLARELSNGSLKGIYIPEQLIQELRSLVRARAQVVKNLVRIKLQIKSYLNFYGNKFPANYEITNWSGKFIKHLRSLSFNYDIGKEQLDIYLDLFEEQRSILLKIVKSIKKYCTDYGFYDRILLLCSVPGIGFINAVVLITEIVDMKRFTNFDSLASYVGLVPSKRSSSEKEYTLGLKVQCKRKLREILVEASWVAIRQDPALVASYGRYVRRMSKQEAIIRVAKKLLSRIRYVWYTQQKYEFSLK

SEQ ID NO: 80091 - protein, 394 aa, unidentified
MNKLFVGIDVSKDSSSARGLDPEGRSCFSLLFPMDSAGFSHLSESIRSHRGDLSEVVVAMESTGCYHLNLYTFLISQGIKTVVINPLIIANFAKLSLRKTKTDKKDALTIARFLVVHKDAISQIALSQDVQDLRDLARERESLSVLIASMKNDIKRILQSTFPELESVCEVFSETMLQFLREFPSARLIQAAPPRRIGKALCHSDRRKRISVSAEQIIQASKDSVASVSVAKEVILPEKISTLFHLIEKQEKITKALIELCKSTRVEDLEIITSIKGISDKTGATFLAEIGRFNDFPSPKKIIAFAGIDPTLHQSGKFEGMSKISKRGNRHLRRVIFLMAKHVSREDTFFKRYYLKRRMEGLSFKEAVLATAHKLIRVIFAMLSNRTYFCPNEN

SEQ ID NO: 80092 - protein, 593 aa, unidentified
MPLERRRGDAVVTASATIVWVSLIGAVSRKAAEQEIDSGQLDECLTRLDRAFRVLRQPPIANQPGKTPFDDPASRPIGRFGSVMVSLLLYLTRGRESAGLPTRTPGRKRSLLLLSAGPTQKDSRACLPLAYGRWPNTCAQDLRPCADRASAHGEGNRAREARWLPATATRSVQPTPEEVYAMLPPEIRCVVGIDVAKSAHVVCALEAPGGAPRLKSTPIPATAVGYAQLLEWLGAWGEPATLLLGLESTGSLWEPLYDALTQAGYTVLLLNPHQTASWATSLGLRAKTDGIDAHTLARGLLAGWARASTVPDETVQALRTLTRTRRDLVESQSAARQRVHDELVPVFPELVGHLPEHADLGAPAVLRLLSVYSSAQALAHAPLDDLCRVLAEGSAGRWGRAHAQALQEVARTSAASTRAVAARALVVRTLALHLLDLHARIAELEVALAELLRTDPPSQQLQAEVPGLGPTWTATIRAELGDVSRFSCVDQVVASAGLEPRTHESGRFAGQRRLSKRGPGALRHALYMATLVAVRFRPEWQAPYQRLLDRGRAKKEALTILSRRLLKVIYHLLRTGASYDPACLSPAPAAGQA

SEQ ID NO: 80093 - protein, 389 aa, unidentified
MYFIGIDISKYKHDCCIISAANQKVVSKVIIKNNKAGFNELLTIIHSLANPADIRIGFESTAHYALNLELFLENSLLTFMEVNPVLISEYKKSKTLRRTKTDSVDCESIARWLMTVEYKPHSKGFYHAYSLKSLTRLRDKLIRQRSFYLVKITNVLDHTFPEFKPFFNERLSKTARYLLENYGSAEKMARMNSASYEKLRSVSRGKFSPQQFLRLKELAVNTVGVNNSIFDVELNSLLSLYKSLVKEIDTIKKEINQLIEEVHPHYMSVPGIGPLSAAVIYSEYGDISNFTNPGQMLAFAGIEPGINESGTESHGGKMVKRGSSQLRYTLINCCLPLIRFDMTFATYYAKKRGEGKPHRVAITHVAKKLIRVIYALESQDIDFNAQELR

SEQ ID NO: 80094 - protein, 362 aa, unidentified
MTQVRSWAGLDVHAAKVLAVTVDAGTGELRSRTLSGRTGEVVEFCGSLPAPTRVAYEAGPTGFGLARALAMAGVGCVVAAPGKIERPAQDKVKTDRRDAERLVRLLMVGGLHPVRVPSIEEEALRDLVRAREDVRGDLMRARHRMSKLLLRHEIVFEGPGSNWTVRHREWLGRLELGERAAQSTLLDYLGAIDALIVRRETLEGTIAELVPASPWARTVARLRCLRGMDTLSAVGLCAEIGDWQRFERAGQLMSYVGLVPSEDSSGERRRQGSITKTGSRHARRLLVEGAWHYRRAPAKGLALKRRQAGQDPHILALSWKAQQRLHRTWRRLDHERGKRRTIVAVAVARELAGFCWAIANTD

SEQ ID NO: 80095 - protein, 354 aa, unidentified
MKDKIYYVGMDVHMATTVIVAINAVGKQIMQAIVETKASSLLDAIRALRGEVHVTFEEGTHSNWLYDIVKPYVAEVVVCNPRNNKLVQSGNKTDEIDAGKLAELLRLGALKAVYHGEQAIKPLKELAHCYQNLVSDQTRVKNRLKALFRARAISYKGDQLYKVERRNEWIEQLQEEGARNRAEHLYEELDCLVKLCARAQRAMCEQARKQSAYKLLDSVPTLGPVRVALILAAMATPHRFRTKRQLWAYAGFAVINKSTADYAIVNGRIVKSKKFAATRGLNDNYNRTLKMVFKTAAAGVRSGLFKNYYDKLLEKGMSSQMARLTLARKIAAIALALWKKGECFETEKFLKQIS

SEQ ID NO: 80096 - protein, 466 aa, unidentified
MENNYILYVGMDSSKGKADAAILKVSDRRSVKPKFLRKKLSFKFVKSEVTSFLETVRSYSDDNCTSICFALEVTGIYSTNVYNFIKDNLNDNESIKFLNTDFVNQWRNAHNIAKSDPLDAQTISTIIGTDSDVQYVNDNVFENKNGYQDLKALVHRHYQIKKIYSQEINRLIAQCDCLFPELQYVFEPKSAAFIAVLSSYPTTHDIINASRLEVFNVVYEATKHRCSMDKIDKLFDLCHDTLVPDNISSYGRSIILDLVENIKNIKGQLKMIERYIRDIASLNPAYKLLLTITGCGPLTAATVIAETGDIKRFKNADCFVSYSGTSPRNKRSGTSVETMGKISKKGSRYLRHAIYMIAEFARRHNPVLKHQFERIKNGNKKRHKLANIAIANKIARYIYSIMKNESSFVIFHEHIMKLPEETQNTFFNSISLDFPENTRKQIYQYSDINGEVHRFVYTKLEETMSI

SEQ ID NO: 80097 - protein, 340 aa, unidentified
MNITRVGIDLAKNSFSICAVDERGTIVMERTLRRGELLSCLANIPPSIVAMEAGSGAHYWARELIKLGHDARIIDPRFVAPYRTGGKARKNDRNDAHAIVEASSRPHMRFVPVKNEQQQATLIIHRRRTSLVAERTRTANQIRGFLAEFGVIAPKGPSTLKSRWHEIRLKYAQLLPALAWQELDPLYEKLIALHKEILGYDRKIAALNRENKLAQRLMEIKGVGPTTASAILATVGDASLFKNGRQFAAWLGLTPREYSTGGISRLGRISKRGDDYLRTLLIHGARTELMYTHKREDKKSQWAENLKKNKSWNKVAVALANKHARIIWAMLVNNEEFKPA

SEQ ID NO: 80098 - protein, 388 aa, unidentified
MQTVADRPEAPTAIRTDLGAIFVSLELSRSTWLITSLSPGGGEKMSKQVVRGGDVAGLLERFAQLRKKTRARTGKVFPFVVIQEAGLDGFWIDRALQNEGIESHVVDPASIATSRRRRRAKTDGIDGEVLGRALLAYKRGEPRVCAMIKAPTPEEEDRRRLCRERKVLIVERVRHVNRVKGLLFSQGISGYEPLRRDRRRRLDTLQTGDGRLLPVHLKAQVCRELDRLELLLEQIKAVEAERDVLLAAQQVAAPAPAAMLLDIKGIGPEFAAILWSEGLFRHFDNRRQVASYAGLAPTPWQSGSVDREQGVSKAGNPRLRTTLIQLAWLWLRHQPHSALALWFEERVRRNGGRLKKTTIVALARKLLVALWKYVTAGVVIEGAVMKRT

SEQ ID NO: 80099 - protein, 344 aa, unidentified
MGEVITIGLDIAKSVFQVHGVDGVGAVVIRRRVSRAKMLEFFAGLPRCLIGIEACPAAHHWARELQTIGHTVKLMPPSYVKAYLKRSKNDANDAAAICEAVTRPSMRFVAVKTREQQAALMLHRARQLLVRQRTMLSNAIRGHLSELGIVSAKGRNGTGELLEIITDDADNRIPLAARSILRVLAAQYSAIGAEITSIGKSILAWHRSCEPSRRLEEIPGIGPIVATALVAEISDWNAFRSGRGLAAWIGLVPKQHTTGGKDKLGSITKQGNRYLRWLLVSGAMAVIRYAQKHGTKKHPWLGRLMARRPTKVAAVALANKIARMAWAIMARGERYREPELLLAA

SEQ ID NO: 80100 - protein, 458 aa, unidentified
MEVLDEAGKRVGARRFAHSHQGLNELKQFLLSIAAQPEHLACIVETNHGLLITFLLEAGIPVYPVNPKTANQLRKSAGAKTDQIDAHLLAKIGRLDLAELRRLEPDSPTMQELKTLTRDQDALIQTQTRLVNQLTACLKDYYPTALHLFAKLQQRSTLVFLQTYPTPQAAQAASLEEITATLRLGKHTNPTRVAPKIVEELHRPQLVASAAIIRAKSRLMLSLVKQLLVVLEDIASYDEAIAPLFLSHDDAELWSSLPRAGKRLAPRLLAEWGDDRARYVDAGSVQALAGTAPVPFQSGNYAKAHKRFACLKPLRNALHQFAWQSTLQEGWARDYYQRKRAEGKHAQHCEVLCQCRYRVLQRSRPSGSRRVCSADREPFPRTCLPLQRLPQPATAFPTPGVGCSLQTTPSQGRAGGGKVGCGRARLGLDRCGRLASPHGRQLHLRSPCFFLSRFWLLT

SEQ ID NO: 80101 - protein, 342 aa, unidentified
MQIASVGIDLGKTTFHLVALDERSQVVMRKKFSRKQLLAFTANLQGSLIGLEACSGAHFLGAALRRQGHDARLIPAQFVKPFRKSNKNDFLDAEAIAEAVARPNMRFVPIKTDEQLDLQALHRVRDRLVRRRTAVINQIRGFLLERGITFGRGPAQLRNRMAEVLEDAENALTPRLRTLLDRLWVEWKQLESDIEVAAEEIEQICHGDEACRRLRSIPGVGPLVATATIAAVGNGAAFRKGREFAAWLGLVPRQHSTGRKARLLGIGKRGNLYLRRMFIHGARAVVFRVRHDTGGLGQWVQQLATRATPNKVIVAVANKLARIAWAVLFRGEDYRHPALAQV

SEQ ID NO: 80102 - protein, 341 aa, unidentified
MEQATTIGLDIAKHVFQLHGADAAGHVLFRKRITRVKLLGFLAAQTRCVVAMEACAGAHYWAREIAKLGHHVRLIAPAYVKPFIKRQKNDAADAEAICEAAQRPSMRFVPVKTEEQQANGIVFRARDLLVRQRTQSVNALRGHLLEYGYVFPKGITHVEALVALVEDLQSSLPDSVRVILKLLVDTFTALEAQIAVLDAEINQRSKSDPTARRLMTIPGVGPIASTAITALVPAAAGFPAGRDFAAWLGLTPLQKSTGGKQKLGAVSKRGERTIRRLLIIGASAVVQQASRRGAPKGSWLAQMLARKPKMLVTVALANKMARIIWALLVKGGTYRTPAVAA

SEQ ID NO: 80103 - protein, 475 aa, unidentified
MNIKGTKKKNQVVTVNIFEQQELLKKAEVIREKLTASTWRELETNGKFGKNEKLSFISDDMLILGCDIGSDTHYVRAIDTRGRELSKSAFPFSNTLEGFQSLMDWATKIAASNDKKQIILGLEPTGHYWFCLAAWLIGNGISVVQVNPYAVKQTKEIEDNSQLKDDRKDPKLIANLVKDGNFGMPYLPEKLYADIRRLSMLRDQINEDRIRDLNRLHREMKIYFPEYKDAFGKIDGAFCLEVLKVAPFPEDLVTLGVEGIRQIWHEAKLRGRGYVNATSIFENAKKSIGIQDGAESSKVAVKWLVHRMLESNEQLADIESRLHQMCMDIPYAENILAISGIGKNTLSGILAEMGDISRFDDVKEIQKLSGLGLVACSSGKHKGETKISHRGRKRLRYWLFQAAKSAVAHADEFKELHAYYTTRKENPLKKKQSLIVIACKILRVIFAILTKGTTYDPKKMLGDIVRPNEQSVQVA

SEQ ID NO: 80104 - protein, 354 aa, unidentified
MEMQQFWAGLDIGEGKTAVCVTSDAGEVLLEQLATSDIPGVAEVLEPFTQIGGVRVSIEAGMGNQLARKLRKLGYPVVVFDTITSNKFLTIRRNKTDANDARGLADLGRMRRTAAVSVHVKSVEIQRLRSQLVFRDQLLRQRTALDSALRALLRENGADPKAAPPNKGWRIRLEQELTRLKHDEEVDLTAQAGPMAEVREALDRYVKAADKQVLQTAESNPVTKRFLQIPGVGPISALSFYSAIENPVRFATSADVGAYLGLVPRVKQSGTICQRSRITKAGNKLTRGHLVMAAGVLISRTKTECAIKDWGRQLAARAGHGKAKVAVARKLATLMLSLWKSGRDFQPFPIPSRT

SEQ ID NO: 80105 - protein, 401 aa, unidentified
MKEFNPQKDCVKPTAALHVMEQHKLQRQYPAYIGMDVHKNTIAWAVAKEGRQEPEYRGEFANKARNIVKLVDRLTREFDGEVLLWCYEAGPCGYDLHRQLLELGQDCQVIAPSKIPKQPGEKIKTDRRDAIKLAQLLRGGNLTAIWVPDIEQEAMRDLTRARGDMKQQQLKARQQLGAFLLRHNCVYTGGKSRWTKMHYNWLEGLRLDNDMRQVVLQEYVNAVKQADERLNTMNTLMAKALPDWSMAPVVYSLKALRGVDTTAAMILIAELGDISRFESPKQLMAYLGLVPREHTTGSKRRQGHITLTGNAHARRVLVESAWCYRFPARQTPHLKRKAEQASYESKAIAWRAQKRLCGRYSELSRAGKNTKVVCVAVARELLGFIWAIVRQEMPKVDQVAR

SEQ ID NO: 80106 - protein, 408 aa, unidentified
MEVVYDRCCGLDVHKKMVVACALTPEGREVRTFLTMTDDLLELADWLKSLGVTQVAMESTGAYWKPVYNLLEAEFELVLGNAQHIKVVPGRKTDVKDAEWIADLLRHGLIKGSFVPDRSQRELRELLRYRRSLIQERTREVNRIQKVLEGANIKLGSVASDVLGVSGRAMLQAIAQGKEDAEELAKLARGKLRDKHDELVKALRGLIGAHQRTIIGCQLRHLADLEELIARLDQEVADRMGPFGKGVELVDSIPGIDVRTAQDILGEIGLQMSQFPTASHLASWAGVCPGNNRSAGKRKSGQTNRGNRWLRSALVLAARSAARRAGTYSNAQYHRLAARRGDKRAVMAVAHSILVSIYHMLQKNTSYAELGADYFDKRSSQATVKRAVQRIEKLGYKVTVEAPEPLFS

SEQ ID NO: 80107 - protein, 413 aa, unidentified
MKEENILYVGVDVGSKVNVASFLDRRDKEVIPPWQFANNQTGAEELEEKIIKLCSEKGFSPVRIGTEATSFYDFHLADFLAESKELNKFKIEVYRFNPRIIHHFKKILKDLEKTDFIDALVIAKRLKFGNLPCPYHCLKDYLPLQRLTRYRYHLIKEIVREKGFLLTHLFLKNSELATKRPIKRVLGSTSRAIIHKYLSKDEIAKASLEELTELITKASKNRYQDPQVIAKLVKQTSRESYRIREGLANSLNLVIVSCFRSIRSYQQSLKEINKAIEDQLKGFGQTLTSVPGIGSILAAGIIAEIGDVKRFHSADALAKYAGLWWPRKQSGEFEAEERRLNKSGNKYLRYYLVEAASSMRVHNEEYRRFYQKKYQEAVSHHHKRALVLTARKLVRLVFSLLKTKQLYQKEKQQ

SEQ ID NO: 80108 - protein, 339 aa, unidentified
MQLYAGLDLHSRNTYIGIMDKEFKRVFGKRVSNNLPLILKTLDPFQDQLKGIVVESTFNWYWLIDGLMEAGYDCLHLANPAAMKQYEGIKHTDDQHDAFFLAQMLILGILPQGYIYPKEDRPVRDLARKRLFLVRHKTSHILSLQSLIARCCGQRVSANEIRKFTVDDLQQLLEQEYIVLSAQANLDTIVFLKQQILLLEKAIKNKVKLNKAFQQLLTVPGIGLILAMTIMLEVGDIGRFHQVGNFASYSRCVSSQRLSDGKSKGHGNRKNGNRYLSWAFTEAAHLSRRYHEPFRSYYNRKVAQANTSLATKALSNKLARICYYIMRDQVPFRTELLSH

SEQ ID NO: 80109 - protein, 355 aa, unidentified
MQTQIGKMDYTGQNIYAGIDVHKKSWKVSIYSDHLYHKSFTQPPNPKLLHQYLVRNFPNGTYYTVYEAGFCGFWIHFNLESLGINSLVVNPADVPTTDWEKKYKSDKIDSHKLAKQLRNGDLNAIFIHKENHLEDRYLVRTRRTISKELTRYKNRIKSQLLFWGITIPPEFDRVNFRWSNRFITWLEDIELSSHTGTESFKFLLNHFKKLRQDLLHITRKIYELSATEYYQNRVKLLTSIPGIAVITAMTILTEINDINRFKNLDKLASYVGITPSNHSSGEKEVHGEMINRGNNYLKSIIIECSWIAARRDPILHNAFIHLSKRMNKNQAIVRIARKLLNRISFVLKNEITYCA

SEQ ID NO: 80110 - protein, 371 aa, unidentified
MGDEAVDGRGRVILGRQAVAQPGPPVRSAPPESAPLPEAETSHLQGGTRAGPHAEEAMMQATYLGIDVAKGFLDLSVRPTGQALRVANEPAALVAALGRVGAPAPTVLEASGGYERPAVRALQAAGLAVARVNPRQVRDFARATGQLAKTDRIDAALLARYAEAMRPAPTPPADPATERLAALVERRRQLVTMREAERNRRREAPAAVADDLAAHLAFLGARIAALDAQIRAAIAADAALGRRAALLRSAPGVGPVLAATLLADLPELGRASGKELAALVGVAPFARDSGRWRGRRQVWGGRAPVRAVLYMGALAAARHNPALRPFYDRLLAAGKPKKLALVACMRKLLVILGALVRHDTPFREDFHAHTP

SEQ ID NO: 80111 - protein, 378 aa, unidentified
MQSMKQQDTLVVGGVDAHADNHHAAALDERGALLATKSFPTTTPGYAELLGWLRAFGAVAVVAVESTGAYAAALVRYLREHDVRVVEVNQPHAHTRRRVGKSDPIDAEMAARLFLAGKAKAIPKQTDGIVESIRLLRAARHSAVKSRSAAMVQLGGLIVTAPQELRDQLSSPRTIRGKAALCRRLRPSIGELRRPTHAAKLALRSIAGRIDALDDEIAVLDRQLEQLVRAAAPRTIQLLGISTGHAGQLLVTAGQNIERLRGEAAFAALCGANPIPASSGKTTRHRLNYGGDRQANRTLHLIAVCRLRYCARTRAYTQRRTAEGKTKPEIMRCLKRYIAREAYNALRADLAALQHPAPSATVTISCSAGPIGTTRRRT

SEQ ID NO: 80112 - protein, 515 aa, unidentified
MPRFRPHPHGRGWAAGLPPELRQVNLNAAGIDIGAESHYVAIPAGRDPAGRDVRQFGAFTEDLYALAEWLSRCGIDTVAMESTGVYWIPLFEILSARGVEVKLVDPRRLKHVPGRKTDVVDCQWIQQLHTFGLLAAAFRPADEICVLRSYLRQRAMLVTYAAHHIQHMQKALEQMNLKLGHVVSDLTGVTGLAIIRAILAGQRAPRELAQLRDRRCKADEATIARSLQGNWRPEHLFELRQAVELFEFYRQQIAACDREIEAQLTQFADKSDGQPLPRKPGRRTARRTELAFDARAHLHRLTGVDLTRLDGIDAHTALKVIGEIGLDMTRWPTEKHFASWLGLSPGSKVSSGKKLSSRSKPSANRAAAALRLAASCLYHSQSALGAFYRRMNGRLGAPKAITATAHKLACLLYRMLRFGTDYVDRGQDYYERWYQGRVVSHLMRRAQQLGYTLTKNEGSPATSSPRGCKEVTWKKATLARSGSGRPPGGPHPRDIISRTRTLSAEEPRCHSVLAQ

SEQ ID NO: 80113 - protein, 418 aa, unidentified
MNNPRPGRPVLAQGRAVVGIDIGKRTHAATAISPQGQIIAQLASFPNTREGFDRLENEVLRPAGGPGRVLVAMEATGHYWMCPRAELERRGYDTVVLNPIQTNARCNAQIRKTRNDRIDSASIARLVLSGEARASRVPDERTLELRLLTRHRRRLLRAIGDQERFAHTLVDRIFPEYADVFSEPFLPSGEQLIRQVGLAPDSLLQRKDQVRDVLRRTSRGRLGPDTIDQLLRSAQTSIGVQQAQGVVHQQLTSILDFRHTVREQIALIEGELERRVQQLKSPLLSLGISSILAATIHAESDPIADFACADQYVAYAGLDPSIHDSGDTLHWRGKISKRGSPVLRHSLYLAAFVVYRKHNCFQRIYSKHRGKGKGHRNALVIVARHVACVIWRLLTDDRPFTKRPPKTTVRSGKQHPNA

SEQ ID NO: 80114 - protein, 337 aa, unidentified
MMNEATYVVGMDVAKRKLDIALLVNGKIKTKVVDNTPAGHTLLQQWLVERGAQPSDTHICLEATGPYSETVATALVEASWPVSVVNPARIKGFAQSELARNKTDRADAALLARFCAAMHPSVWTPPPPAWRELRAWVDRLQALKDMHQQESNRREAHHAAGQATLVQAVQTHLDWLAQQMAALERTITDHIDRHPDLKGDAALLHSIPGLGPTTVAKVLAYAGDVRRFANAKALAAFIGVTPRQRVSGSSVKGRTMMSRTGHAALRRALYMPGLVARRHNPVLRVFGDRLRATGLAPKAVVGAVMRKLAHLIYGVIKSGQPFDAQFCSARLAFQDGI

SEQ ID NO: 80115 - protein, 385 aa, unidentified
MKRQLDLHGNVVASFCPTTMDALTVLRRGAHREASCQMDTIGLDLHKRESQLCIGHEDGTITEQRIVTSRERFTAVLGNRPRARVLLEASTESEWVAQHLEGLGHEVIVADPNYAPMYATRSRRVKTDKRDARTLMEACRAGTYRLAHRLSAPRRHVRAELAVRDAVVRTRTRYVALAKALVRRDGLRVPSSAAERVGAHLQALPLSPALAGELTPLLTLLPPLNATIAAADQRVSALEASDPIVALLMTAPGVGAVTASALVATLDDITRFSSAHQCEAYLGLVPGERSSGEQRRIGPITKAGNRRTRWLLVEAAWRILRSKDPESAALRTWALTIAARRGKRIAVVALARRLAGIVYAMWRDGVPYDGTRIREPRRARGSQAG

SEQ ID NO: 80116 - protein, 369 aa, unidentified
MTTRQRSTSSTSTGPPAWGEVVLGVDTHGEDHVAAVVCPLGQILGTKSFPATAVGYRRLFAWARKSGVVRRAGVEGTGTFGAGLSRYLLAQHVVVFEVNRPDRSARRLLGKSDPLDAQAAARAVLSGRARARAKTGDGPVQSARMFKLAKDSAVKARTQAINQLKAVLVVADPALRERLSSLGNRELFRTCAGLSPREGGAGGGDEDTVAEATLMTLNLLAQRIEQLTGQIDELNQQLTGLVERHAPQLLAPVGIGPDSAVTLLITMGDNPERLSSEASFAALCGVSPIEYSSGGRSSRRLNHGGDRQANAALHRIVFTRLRHDPRTQAYYERRTQEGKTRREIIRCLKRYAAREVFNLVRMVSTDPPL

SEQ ID NO: 80117 - protein, 421 aa, unidentified
MKFKAQDKQNQLIENITANHLVVGVDIAQEFHVARAVNFRGIALGHLLEFSNDEVGFRTLHRWIQDLLASYKLNQIIVGMEPTGHYWLSLAHWLKDTEIEAVLVNPHLVKKNKENRDNTRSKSDKKDALVIADMVKDGYYSPVRFHTVEYEELRVLMANRETVVKRLVSAVNQIHRWVDIVFPELRQVFKILTCKGALVTLRLFPLPADLCKLESTDVIAGWKTFMKRHSGARRAKLLIDLAKRSVGSTQATHAYKLHLEHLLEEYDLASTQLRRIEDEAKSVLKRIPYTSKILAITGISAIALAGVLGESGDLSGFIHGNTLLRHAGLNLTEASSGKWKGQMTLSKRGRPRLRHFLYLITMCMVMTNKEFKALHQHNVQVKKLKRMKSIMKLCGKLARILVGLARNNQAYKPDKVFVLAA

SEQ ID NO: 80118 - protein, 412 aa, unidentified
MRRVIGIDIHRTFGEVVFWEDGRLRPAGRIDMTRTALEGFGKSLQAADEVVIEATGNCMAVSRVLSPFVQRVVIANPLQVKAIAHAHVKTDKVDAGTLASLYAAGYLPEIWTPDAATERMRRLVARRYQVVRHRTRLKNEIHAILHAHLIPRCPHADLFNRRGRDWLARQPVPDDERGAIERHVRELDRLGEDLAVLDREIAQSTLDDPAIKRLITITGVNLTVAAGLMAAIGDIGRFKSPQKLVSYFGLNPRVRQSGLGAAHHGRISKVGRSHARAMLVEAAWAAAKTPGPLHAFFVRIRARRGHQVAAVAVARKLTVLCWHLLTKEEDYLWARPALIANKLRAMELQAGKPQKKGNRRGPAYAYNVKALREQEMRIAEQAERSYEHFVERWRPRPPKDRARGRLKPAGLE

SEQ ID NO: 80119 - protein, 339 aa, unidentified
MELYAGSDLHGNNNYLGIIDQQGKERFKKKLPNDPQVILEVLRPFQKELVGIVVESTFNWYWLVDTFMGEGYQVHLANPAAMEQYSGLKHADDQHDAFWLAEMLRLGILPEGFIYPKEERPVRDLLRKRGHLVRLRTSLLLSLQNIISRNSGIKLNVNKMKRLRKDEVAPILEGNEDLALSGRVSKETIDFLTRQIKHVEKFVEDKVELKTPYQYLQTIDGVGKILSLTIMLETGPIARFAKVGNYVSYCRKVPTRWTSNQKTKGKGNKKNGNKYLAWAFSEAAELARRYETPARAYYNKKSAKTNFMVAHSALAHKLARAAYYVMRDQVPFDSAKVFA

SEQ ID NO: 80120 - protein, 327 aa, unidentified
MNAVSTLGIDLAKNTFSVHGVDADGVVTVRRTVTRSKLAELVARLPACLIGMEACSGAHEWARRFAAAGHTVKLMAPKFVMPYRKSSKNDGNDAEAICEAVGRPNMRFVPIKSVQQQADLSLHRVRQGFVDERTATLNRVRGLLAEFGYVLPLGTEQLRRQVPELLERLPTRVGHCVRDLLEHAERLRNKVLEYEREIRLSVRDNELARRAQTRQGIGSLTASALVATVGNGHDFKNGRQFAAWLGLVPRQYSTGGKTRLGHITKRGDPYLRTLLVMGARSVLQRAYRESDSLSRWALALQQRRGYHRACVAIAAKNARVGGSPGGP

SEQ ID NO: 80121 - protein, 348 aa, unidentified
MTLVGCDLHARDQQVAVLDTATGEIQERRLVHDGDSVEQFYTALPGPVTVGIESTGYALWFHALLRRLGHEVIVGDAAKIRAMVVRKTKTDRRDAAHLLDLLRHDRFPTVWLPEPAVRDQRTLLAHRMRLVRMRTMVKNGVHAIALNYRLALGPSLFTRAGVAQLQALSLPPHTACRRSESLELLSWLNTRIKGLDDQIGEAAHAHPEAQRLMTHPGVGPLSALATVLVLGAVTRFPTSKHVVSYVGLAPAIESSAGKHRLGRITKQGNALLRYVLGQAGQAAIKRDPDLNRLYYAVLHRRGRSRAKIAVARKLLVRLYVMLRDQIDYPTFLHRAPAAARRKEMTPTS

SEQ ID NO: 80122 - protein, 372 aa, unidentified
MDQVTTTFVAMDTHKQTISVAIAEGGRRGETRFLGEIPSRPEAVAKLVERLSKKYAKLAFCYEAGPCGYGLYRQIVALGHECVVVAPSLVPTRPGDRVKTDRRDAVTQASLFRSGELTPVWVPDDAHEAMRDLCRAREAAMETLRRARQQLLSFLLRRGRVYSSGAHWTNKHRLWLANQRFEHPARQIAFEELVQAVEEAQARRDRLVKQMLELLPSWSLAKVVAAIQALRGVAALSAITLDAEIGAFPRFANPRELMAYLGVTPSERSSGAKTARCAITKAGNRRGRRMLVEGAWTYRLPARVGLAILERNKLLAPPIKEIAWKAQVRLCARYRRLAKAGKPVNVVCGAIARELAAFVWAIATNGAVAAVA

SEQ ID NO: 80123 - protein, 399 aa, unidentified
MQQPRSCGWAGVDVGKGHHWVCLIDEAGTTVWSAKVVNDEGAILEAITAVLARAELVVWAVDVTGTMSGLLLALLAAHGQQVKYVPGRTANQMATAYRGEAKTDARDAYVIAETVRHRGDLSEVEVSTALVTELRLLVAHRSDLVADRVRMVNRLRDVLSGYFPSLERAFDYAHSRGALVLLTGYQTPAAIRGRGQARLAAWLVNRKVRSADQIATDAVAAAKTQHTIVPGQDVAASIVVDLATQILAIGARISDLDARITATFRAHPQAVIIESLPGMGPILGAELVAAAGDLNAYPTAGRLASAAGLVPVPRDSGRRTQNLHRPRRYSRKLRRVFYLSASAAMMREGPNRDFYLKKRGEGLKHVQALIALARRRVDVLWALLRDNRVFQRVPPAQGT

SEQ ID NO: 80124 - protein, 427 aa, unidentified
MSGIENGGQEPAFAAFVGIDWADQKHVWCLQGQDSTKRESGELEHTPEAVEAWVAQLCQRFGNRPIAVALEQSRGSLVFMLAKYEPLHLFPVPSTMSASMRKALYPSGSKDDPRDADVLLDLLLQHRNKLRRLSPDTEATRRIQNLVEERRKLVDEKTEHTNRLASHLKIYFPQMLNWFEHLDTELVCALLERWPTLEELQKVPPAKLRTFFGKHHCRDQELIEWRILSIRQSIPAIQDRAVIEAKSAAVKVIVQLIRILLEGIADLDERIEEAAAAHPDFFIFKSLPGAGPALAPRLLAAFGSQRERYRNAGEVQTYSGVAPVIEKSGKKQWIHFRWACPKFLRQSFHEWAGHSIGYSVWARAYYRQQRGKGVDHHGAVRALAFKWIRIVFRCWKERVAYDESKYLAALTRRGSPLVAVVATAKAL

SEQ ID NO: 80125 - protein, 351 aa, unidentified
MPRTSMVHAVTTIGMDMGKNTLHMIGLDSRGAIVMREKVSRGRITSRLANVPSCLIGIEAGMATHYVARELAALGHDVKQVPPTYAKPFRQGHKNDFRDAHAVAEAVQRPTTRFVPVKTDEQLDLQALHRVRSRLVSERTAVINQIRGFLLERGIIVRQGLRFLRQLLPDILAKRTDVLSPRMVRIVADLASDWRQLDERIENVTDEIETLAKSDDTCRRVMTVPGIGPIISSAMVAAIGSGAAFARGRDFSAWIGLVPKQMSTGDRTILGRISKRGNGYLRKLFMQAARVILLRPASWPKHSFGVWLARAAQRLHPNVLAAALANKLARIAWTVLAQERSYEARVTKAAA

SEQ ID NO: 80126 - protein, 412 aa, unidentified
MDQIHDRVAGLDVHRDAVVACVRTTGPRGGTVTEKERFKTTSTGLADLGRWLAERAVSLVAMEATGVYWKAVYYALEDSFECWLCNAQHVKNVPGRKTDLSDAEWLADVAAHGMVRPSFVPPRPIRELRELTRYRKSEIDVRGAEIARLEKVLQDAGVKLTSVASKVLTQSGRAMVEALISGEQDPAVLANLAKGKLRPKLAELEEALAGHFGAHHAVAARRILDHVDFLDETIAALSEQIDARTAAYQAVIDLLLPVPGFDRRTIDVVIAETGADMSRFPTPEHLSSWAGLCPGNHESAGKRRRVATTPGNSWLQRALIEAARAAVRTKGSYFGAQYRQIARRRGPNKAAVAVAHSILCLVWHLLATGERFEDLGADYFERRRDPERETRRLVRQLEALGHVVTLSDPTAA

SEQ ID NO: 80127 - protein, 337 aa, unidentified
MGKRSIQETTYCGIDVSAKSLTAAIQRVHHQVEQRSFPNTPIGHKALIVWLRKAKSPVRVSLEATGIYSLDLAFALDAAEGIEVAVLNPKVANRFAQTIRRSKTDAADAEVLAEYARRMPFTAWVAPSPGSMRLRSIVRHVESLSVQSAQNQNRLHAAHGSTSTPGCIVQDLKRSVASLELRIHKLRREAMTLVRQDDLLRERFELLVSIPGIAQVSAMQLLAELSTLPSDLTVREWVAHSGLDPAHEISGSSVRKASRISRAGNRHLRRALYMPALVASRCDPHAKAFFDSLLARKKARLQALIAVARKLLHAIYGIFRSGLKYEGKKLFPKIMLS

SEQ ID NO: 80128 - protein, 334 aa, unidentified
MFNHYVAVDWAMSNMAIAKMTTVSNNITVIDVPSDVKEMQLYLKNLKGTICLAFEETTTSQWLYTELKDYVDKILICDPYRNKLLSEGAKTDKIDAKKLVQLLKADLLKEVFHSSDKFIELRKIISAYEDTIKAGVRLKNQRSALFRAYNKSHKKEVELNGDANAFVLSGLDHQIISYEKERVRYQKEFKRLQKTHPEIKRVSEIPGIGTISAVKIISRVVDAHRFKTRNNFLSYCGLIKLERMSGGRSYGKKTPRFCRMMKSIFKSGTLAVIDGNNQFADQYRYLLNEKKYTERNARNAISRQIATLTYGIMKTNKKYDPIKNKKGRNNVSET

SEQ ID NO: 80129 - protein, 341 aa, unidentified
MQVITIGIDLAKNVFQVHGVDANDKVIFNKPLRRSQVLPFFAELAPCLIGMEACASAHYWARELKKLGHSVRMMPAKDVMAYVKRGKNDAIDAAACCEAVRRPTVRTVPVKTPEQQAQLMQHRVRELLIGQRTQSINALRSHLAELGIVAAQGYEGLKVLLAIVADSSDTRLPEHARASLSALVAQIASCQAEIGAIDKRLLAQHRKCEDSKRLETIPSIGVIGATAIVATVPDASIFKTGRDFASWIGIVPREDSTGGKRRLGPISKQGDRYLRRLLIVGAFAVLRQARAHPEKYPWVTQLLARKPAKVVAVAIANKTARIAWALLTKKENYRVQTNAVA

SEQ ID NO: 80130 - protein, 315 aa, unidentified
MVDVPCFVGIDVAKAQLDIALRPSGERWAVPNDAGGVVTLVDRLQALHPTLIVLEATGGLERAATAALATAGLPVVVVNPRQARDFARATGQLAKTDALDARALAHFADVIRPTPRPLPDTQTQELRALLGRRQQLIGMRTAEHNRLAGTSGRLQTDIAAHITWLNERLATLDDDIETLLRASPLWRENDDLLQSAPGIGPVCARTLVLELPELGTLNRQQIAALVGVAPLNCDSGTLRGRRTIWGGRAHVRTVLYMGTLVATRYNPRIKAFYERLLAAGKVKKVALTACMHKFLTILNAMLKHRTPWQAQAVQG

SEQ ID NO: 80131 - protein, 337 aa, unidentified
MEYFAGLDISMAETQICVVAQSGAVIHKAKVPSTPADIAAELAQVPTCRRIFFETGRMAPMLYHGLRQLGLPVICVESRQAYQALKLLATHKTDHNDARGLAHLARTGFFKPVHVKSLPAHAVRSLIIARKKLVGQRVTLENQIRGLAVVFGVRLPRALSSDFIRQALQASDGIPGLSAAMQGLVAARAAVLAAIIAIDADIRRMVRASDACRRLMSIPGVGQLTALAFTAAVDDPERFRRSRDIGAYLGLVPRRHQSGEIDYSGSISKCGDRRLRTLLYEAANVMLTRYKGPLKLKDWAVAIARRSTMRKARIALARRLAIIMHAMLRHGTEFKPA

SEQ ID NO: 80132 - protein, 351 aa, unidentified
MTMVGGLDVHRQQITFDYVDSDGLVRWGQIRPATRKTLRGWLVEHCPDGDSEFALEGCTGWRYVCEELAAAGVGVHLGDPAEIAAARGPKKRAKTDRADARLLRTLLLQGRFPESWIPPAQLLEVRSLGRLYCTLMDERRAWQQRIHAQVFHQGCPPIRALLSAAGRDALAHAELSTAGRQYVDTALRRIDELSAEIEPLRTQLVSFARRQQGCRALQARQYGIGWLCAVIIWAEIGDARRFRSSDQLVRFAGLDVTVYSSAGKCSPGHLSRQGSPQLRWAAFEAAKCAARRGSPDCAYYHKLAAKHDGHNGKNPTLAVERKILRRCYHTLRELGDAALAMPIAEPQEVAA

SEQ ID NO: 80133 - protein, 409 aa, unidentified
MEIVIARCGGLDVHKNTVAACVRVQGPSGQITQQVRTFGTTTIQLQALVGWLQEHGVTDVAMEATGVFWKPVWHVLEPHVHLLLVNPRDIRRVPGRKTDVSDAAWIAQLLQCGLLRSSFVPPREIRELRDLTRARATLEQQTTAVANRIHKLLEDANIKLGSVATDILGISGRAMLRALADGETDPVRLADLAQRKLRAKIPALQEALKGAMTAHHRFLLRRLLTQLAFLEEEIASFDRQIAEATAPFATLLARLDTIPGFARRGAENLLAEVGPDMAPFATAPHLVSWAAICPGQHESAGRSHGGTIRKGNRWLRRTLGQAAWSARNKKHCYPAAQFRHLAARRGKKRAIIAVAHSLLVAAFYIIRDGVEYADLGAAHFDRLAPDKLTRMLVKRLERLGHKVTLEAAA

SEQ ID NO: 80134 - protein, 408 aa, unidentified
MNQDSGFDIWCGLDVGKTGHHACPLDAAGRKVFDKPLPQDQKRLEELFDKLQTHGRVLVIVDQPNTIGALPIAVARSMGIQVAYLPGLAMRRAADLYPGNAKTDARDAFVIADTARTMPHTLRRVDAGEETLSELKVLVGFDEDLAAEATRLSNRIRGLLTQIHPALERVVGPRLTTKQGLAVIEQLGGPQTMAAASKSKLLRVISKAYPRGAQEFADAITTALAEQTVIVAGTAAAEQVLPQLAASLRQTLDQRHALAAQIEQVVDAHPLAEVLTSMPGVGVRTAARILLDVGDASQFPTAGHLAAYAGLAPVTRRSGTSIRGEFPARSGNKHLKRALFLSAFAALRSDPTSKAYYDRKRAQGKKHNAALICLSRRRCDVLFAMLKNREPYRAPTPTREPSPLPLAA

SEQ ID NO: 80135 - protein, 347 aa, unidentified
MAAVMIGTGPHKGSHTAVAISAAEEPLGQLRVRACAAQAGRLLEWAQAWPERTWAVEGAGGTGHLLAQQLLSAGERVLDVQPKLGARVRLLAAGDVNKNDPNDARSVAVAALRSAAVREAGPDDHATVLKIWSKRHRDLSSARTQVACRLHAVLCELIPGGVSKRISAALAGQLLEGITPSGAVEAARCELAAAFLDDLRRIDAQMRDAKNKLTAAVQASGTTVTEVFGAGPIVAATVIGEVRDVSRFASQDHFAAYNGTAPVEVSSGRRKIYRLSRRGNRRLNHAIHMAAVTQVSHRHSPGRAYYDRKLAEGQTPKEALRSLKRRLSDVIFARLQADAHRAAAGPR

SEQ ID NO: 80136 - protein, 343 aa, unidentified
MQIHSVGIDLGKTTFHLVALGAASKVLMKKKFSQKQLLAFTANMQTSLIGLEACSGAHFLGRAFRQQGHDVRLIPAQFVKPFVKSNKNDFVDAEAIAEAVERKNMRFVPIKTDDQLDLQAMHRIRDRLVSRRTAVINQIRAFLLERGMVFAQKPAKLKAGMADVLENAENALTPMMRNLIGRLYEEWKAVEEQIDELTDSLEQIAANDAGCCRIRKIPGIGPVVATAIVAAIGNGAAFRKGRDFAAWLGLVPRQYSTGGKARLLGISKRGNTYLRKILIHAARAAAMRIKRDRYSIGAWMNALEARAPRNVLVVAMANKLARIAWAVLSSGEDYRPVASLAAA

SEQ ID NO: 80137 - protein, 315 aa, unidentified
MNDHTPDTVGVDISKAHLDLHRRSTGESARFANDASVFEELAAWVGDGCAAVVYESTGPWHREFEERLAGRLPLARVNALRARRFAQAMGEEAKTDAVDARMLAAMGAAVDVRPVEPRAPAQRDLDELVAARDALVEDRTAALNRRAQARHPLLKRQLRNRLEQNERQIKALDEEIRATTAADAELSRRLEVLTSVPGIGPAVAAGLLADMPELGRIAGKAAASLIGVVPWARESGQWKGRSFIRGGRARPRKLLYMAAVASLRWNPDMRRKYDELRARGKPAKVALTAIMRKLVVLANTLLAQDRLWTPDPVRA

SEQ ID NO: 80138 - protein, 344 aa, unidentified
MANLNQFCDFTKLIGIDIAKSVFQIYSCDTQTGEITNVQIKRDKVLESLANCGKCLIGMEACGSSQYWARKLQALGHTVRLMDPKLVKPFVRHNKSDKADAEGVYHALVSGVRAVAVKTETERDIQTLLTMRAVLVKQRTARINHVRGLLAEYEHVMPKSVDQFDKKVDECINSLEGDAVQLVIDTLRDTVESIRDDQDRIKTLQREISRLANQTRNAKHFLTVPGVGDTIMAYMCVLLADPTQFSSGRQFAAYLGLVPMHTGSGGKTVTTKIPGRCDKALRALLVQGAHAVARSKYRPDWVKSILAKKPKKVAMVAIANRMARQCWAVASKGQDWRRMPVTAA

SEQ ID NO: 80139 - protein, 402 aa, unidentified
MTDAPNRYIGLDIHKEYFVAVGVNEQLETVFGPQRVSNYQLDDWILRCLTPEDAVVLEMSTNTYQFYDALLPHVHSVMAVHSPNVAMVTNVRVKTDKKAAMALAQLHAAGLLTGVWIPPYPIRDLRSLIARRDKMVRLSTMAKNRLHSMLHRHHLVTPEKPFAPEQRTWWESLPLSANEQLLVRSDLDTLDFAQKQVEQIEECLKQESAEDVRIPLLIQLPGVAMLTAITILAAIGDITRFPSAKKLVGYAGLGTRVHDSGMTHSSGRITKAGRKDLRCAMVNAANHAVEHHVHWKKELERLAPHLGRSKAIVAIARKLLVAVWHVLSEQVADRFADPRDVASSFIRYAYRIGVRNLPDQQPALAFTRDQLDRLGVGRELKEIPWGSKRFKLPPSKLLLEKE

SEQ ID NO: 80140 - protein, 400 aa, unidentified
MNTTTILYVGIDVSKDKSDICIKDQSGNDLIHRFKIENTKADLGKLYETIERIKSKTQGNSDVVFGMEATGIYSLPLYSALRRDGYKVKLYNPIQTNGFRKMKVRKTRTDPIDAAIIADLLRNSEPPQVNEITDLNLYQLRELVRIRHRLIEKQTACKVQMIRNIDMIWPNYVSLMPKVFGTTSIAILKKYTVPSKMIGKSFEQFYELVHKESRSKISRTKAEEIYSNAGNILTIPEIEPVISIEIKTLITQLELYDGQIQSIDAKIDQMMKRIDSKIMSIPGIGGTLGPIILGEVGNIDRFSSAKKLVAFAGLDSVVSQSGRFEKTGKISKRGSPLLRQALFLAANIARMNDDVMKGFYDKKRSEGKHHYSALNAVAAKLLRVVYSVLKNNKEYQPQTN

SEQ ID NO: 80141 - protein, 350 aa, unidentified
MIIIGCDYHPGFQQIAFVDTETGDYGEQRLGHSEGAEKFYRDLAAQGKKVRVGMEASGHARWFERLLAEVNFELWIGDATEIARKRERKQKTDRQDAQHILQLLMENRFPKIWVPSGENRDLRQLLWHRHRMVQARTRIMNQLQAVALNEGLRCKKKLWREKGRQQLEAFRLAPWASRRREDLLQLLDRLNPTISELTQAIEQEVEKCPEARRLRTHPGVGALTALAFVLIIGRAERFQCGKQIAAYLGLVPLEDSSGNRRRLGHITKQGSSILRFLLVEAAQVAARSIPEWRNKYVHLTMRRGRKIAKVAMARRLAIALYWMWRKGWDYEQLRKFGSHAGKLESGDGVK

SEQ ID NO: 80142 - protein, 355 aa, unidentified
MNSIKYVGLDVHRDTISVAVLNAEGKLVMQSVIATHASAILDFLHGLRGTLHVTFEEGTHSAWLYDLLVRRVAYLVVCNPRKNALLKAGSKSDAIDARKLAELLRLGYLKPVYHGQNSTAAVKHLGRSYAALTEDTTRTMGRLKALYRSQAIACAGAKVFGARHRDEWLAQLADSGLQRRARRLYQELDGLQQLRREARRDLIQECRKHSEAKLLRTVPWLGPIRVAVLIGRVQTPQRFRTKRQFWAYCGLALETRDSGEYCVVKGQIERKKRPLLIRGLNRNHNHDLKNLFKSAATTAGGSEGAFGEFYKNLLEKKMRPEMARLTLARKIAAITLHVWKKGEAFDAKYVKPQAA

SEQ ID NO: 80143 - protein, 342 aa, unidentified
MTFVGCDLHTRMQQVAVLDTGSGEVSERQLAHDGSAIEEFYAALPRPVTIGIESTGYAVWFHTLMQRLGHTLLVGDAAKIRAMVVRKTKTDRRDALHLLDLLRHDRFPTIWVPDPATRDLRALLAHRMRLVRIRTMVKNGLHAIALNYRLARGSKLLRQAGLAQLHALALPPHTAQRRDQSLELLAGLTTQIRELDDAITTAALAHPDGPRLITHPGVGALTALATIVVLGPVARFHDSKHVVSYVGLAPALNASADKYHLGHITKQGSTLLRFTLGQAAAHAARMDADLKRTYFTLVHRRGRPKAKVAVARKLLVRLFIMLRDQIDYDEFRRRGRPKEVAA

SEQ ID NO: 80144 - protein, 344 aa, unidentified
MSKITMIGLDLAKNVFQVHAVDAAGAVVLRRQLRRAQVEKFFAGLPAAVVGMEACAGAHHWARVIGKYGHEVRLMPPAYVKPYVKRNKNDGRDAEGTCEAAGRPTMRFVAVKSVEQQAVLIVHSTRTLLVRQRTMAANALRAALSEFGIVAAQGVNGLRTLIEQLKAPSEATVSEVARGALLLLVRQWEALDADVRALERAIVRTARGDEAARRLMEVPGIGPITASATVAKVPDARVFRRARDFAAWIGLTGRGRGTGGKHRCGPISKQGDRTLRSLFITGASAHLRHQRARGVKDPWLRELLARRPYKVAMVALAAKNARIVWALLAKGERYRERALVPAVA

SEQ ID NO: 80145 - protein, 429 aa, unidentified
MSYRIAGIDVHKKMLAVVVCDVEIESEYEFERRKFSSSPEQLRSLAAWLLEQEAEEVVMESTAQYWKPVWEALERYWKPLCEKREGARRKSGTLHLAQALSNRGRRGRKRDFPDAERLVKRLVARELTLSFVPDAEQRLWRTVTRKKYQLRCDRIRLQNQLESLLEEAHIKLSSLVSDLLGLSARRMLKALAEGATNPATLAALADERLRATPEQLCDALGACTELNAVYRRLLKMALEELRLIDEQIGRLDQEMASLLSEHQDAVQRLAEVPGLGVDSAQQIIAEVGPTAATFPSEKCLSSWVGACPGDDETAGVNYSHRSPKGNRHMRRLLNQAANAAARTKGSIFELAYRRSVPRLGHNQAIGAIAHRQCRLIWLILHQGVRYEERGPAVGKRSKQLRTWRMIRQLRNLGYRIEPPNPQPSQASAQ

SEQ ID NO: 80146 - protein, 321 aa, unidentified
MEIRSVGIDLGKTSFHLVALGERGKVLLKKKFTQKQLIAFTANMQTCLIGMESCSGAHFLGRALREQGHDVKLIPAQFVKPFVKSHKNDFVDAEAIAEAVERENMRFVPIKTDDQLDLQALHRVRERLMMRRTALINQIRGFLQERGIVFAKSPSRLREAIPEVLENANENLTPRMRNLIAMLWSEWKDLELQIDAMNDEVERIASSDDACRRLRQIPGIGPLVATAIVASIGNGAAFRKGREFAAWLGLLPNQRSTGGKTKLGAISKRGNCYLRKILIHGARAVVLRSKRDRLAMGAWMTVTLHSKPGITLVCYQSVSGI

SEQ ID NO: 80147 - protein, 348 aa, unidentified
MLADQLDYVIGVDPHRDSHALAVVRVISGAIVFEATVAANSEGYAHALELVDQHAAGRRAFAVEGTGSFGAGLTRFLTSRGELVCEVGRLRRERRSGGKTDALDAARAARSVLTQQRPTTPRAGGERQALQALVAAREGAVNAKRAGLCQLRDLLITTPEPLRSELRPLTRARLLHQLAATRPDRRRDPELRGSMLALRSIARRVLQLIAEERELAREIETLTRKLAPQLLDQPGVGPHAAAQLVLSWSHQGRISSEAAFARLAGAAPIPASSGQTIRYRLDRSGDRKLNRALHMILVTRKRSHPATIAYIERRLQEGKTRREANRCLKRYLARSLYRLLEHGPPLAT

SEQ ID NO: 80148 - protein, 359 aa, unidentified
MQRNKISFNGQKIFVGIDVHKRKWSVATITESGYQRVHTQNASAQELIDFLHRHYPYGEYHAVYEAGFFGFSTYYSLSEASIDCLVIHAADVLTTQYENVMKTDKIDCIKLAKSLRAGLLKGVYIRPKDSIDDRGVIRVRRAVVKDLNRYKTRTRHLLMSNGVAIPEQFDKRKGRFWSGAFIQWLKSDIELLSTTRRTLDIIIAQVERKRQAQLDATRELLKLARTDTYKDNHALLCSIPGIGGIVAMTLLTEINNITRFSNERQFASYLGLVLASHSNGDKTLQGDKTFRGNRELGPMMIEAAWIAIRNDAGLAASFSNYCRKMKRQEAIVRIARKLANIVISVLKSKKKYVPYSHLV

SEQ ID NO: 80149 - protein, 372 aa, unidentified
MKLYTAFDLHSNNSYLAIIKENGERVFNKKLPNDPEKILHALEPFKTGIEGIVVESTYNWYWLVDTLMQQKYHVHLANPAKIQQYSGLKYADDRHDAFWLAEMLRLNILPEGYIYPREDRPVRDLLRKRGHLVRLRTSLIISLENIITRNNGSCPTSNKVKSLKTDYVTPLLKGNEDLELAGKVSKESIDFLARQIRSIESVVEKKVELKGSYSKLLTIPGIGKILGATIMLETGPISRFTKAGDYASYCRKVTSKWTSNEKIKGKGNQKCGNKYLAWAFSEAAEIMRRYDPDAKAFYDRKKQKTNLMVAHNALACKLAKAAYYIIRDGVEFKPEKCFPIKTKASLQKVTHTNAHKTTISMTCISDHEQKGV

SEQ ID NO: 80150 - protein, 349 aa, unidentified
MEHVAIDLGRPKSVMCQLNAEGTKSFRTFGLNRSNLDRFFGGRPRCRVLIESSTESEWVARHLEGLGHEVVVADPNYAPMYGERNRRVKTDRRDADVLFEACRMGIYRKAHRRSQEQRDVTALLKIRDSLVRTRTRWINLVRALLRREGLRVRSGAAESFSSRLEELELSADLRAQVWPILELLDPLNERLLALEKRVVELKKQDEHLRRLQTTPAIGPVTSAAFMALVDDVGRFPRAHALESYVGLVPSEWSSSEKRLRGSITKAGDARVRSLLVEAGWTILRSRRPECQPLRSWAEGVAARRGRKVAVVALARRLAGILYAMLRDGTDYDPTRPQHGSQRRDRRVAA

SEQ ID NO: 80151 - protein, 435 aa, unidentified
MEEVTDEPLYRDRVCGIDIGKAGLVATIRVPSDKDPARRMQETRGFGTTRREVLALADWLRCWQVPAAVMEATSDYWKGPFYRLEAEGFECVLADAKQVKNLPGRPKRDPADSRWLAACFERGAITACFVAAPEFRIIRLHTRYRRDLTEERTREKQRAEKLLESAAIKISSVLTDLHGVTGRDIMDHLIAGERDSRVLAQLARRRARRKIAELEEALEGAEFFTPAHAALLAKVLARIDRLSADIGDLSQVIEQLLGPYEEQLAQAESMPGWARRAAQDAVAETGVDMTRFRTGPHLVSWGGRAPTDHQSGKRAGRAKAKKGNRYLGAVLGETAVAAGRTQTREGARHRRLARRRGTAKACVATGNTQLKVYHKLLSNPGMRYTDLGPDYYERQRDIRRQIAHHIGKLGSLGFEVTLCRIPEPDPDGTGPAQAA

SEQ ID NO: 80152 - protein, 363 aa, unidentified
MEYIAFDAHKHYTLASVARPDGRLVRERRLAHERGVLQQFLAHCEPGSPVALETVGNWYWIVDEIERAGCLPKLVHARKAKLMMGQINKTDTLDARGLNMLQRNGTLPTVWIPPGELRDQRELPRTRMALVRQRTQLKNRLHATLAKYALHDVEVSDLFGVRGRALLRQRCELLPPHTAYATRQLLEQVESLDRQVAGFEQRIKSVFKPTLAIQRLMTLPGVGLTLAVVIALEIGDVTRFPTAEKLASYAGCTCRVHATGGKLRYGRLRPDVNRYLKWAFIEAANAICLMRGRHPHRHVSRLYERIARRKGHPKAVGAVARHLAEATYWLLSKQEPYREPQSSAVSSTGDKRDFAMSSRKLEF

SEQ ID NO: 80153 - protein, 426 aa, unidentified
MTYRIAGIDVHKRMLAVVIADVAVEGEYQFERRKVGTSPGELCRLADWLVAQHVEEVVMESTAQYWRPVWATLEQRWRLKRLQESDGARSGQLHLAQAQSNRGAAGRKKDFPDAERLVKRLVAQELKLSFVPDVEQRLWRTIMRRKHQLTRNRVQFQNRLECLLEEAHIKLSSLVSDLLGKSARYMLQAVAEGETNPETIAALADHRLRATAPQLRDALGACRDLHPVYRQLLKMALEELKLMEEQIDKLEQEMANLLSAQQDVVQRLAEVPGLGVDSAQQIIAEVGPEAAAFPSAKHLASWVGVCPGEEESAGINHSHRSPKGNRQMKGLLNQASNAAVKTKGSIFEFIYRRLVVRLGHAQAIGAIAHRLCRLIWMILHQAIRYEERGPAVSRSTTERRAAKMIRELRRLGYRIEPVECKAEGSV

SEQ ID NO: 80154 - protein, 320 aa, unidentified
MIAETTIIGIDVSRDWLDGFCLPGQMRFRHTNTADGHIALVAMIQHLSGPFKVGFEATGGHEWVVWTKLAAAGIVAVQLPPAQIKAFALSRGTRAKTDRIDAELIARFMAFRPEVGRELPDENLRILRTLTTRRGQIVDMRKRLRAQVGARKKQGVSADVETLDDDLEDVLQTQIETLERRIETIIAQVEPFSTKANLLRSIPGIGPVSAAMLIAELPELGRMTLGEAAAMTGLAPVPHDSGAMRGRRTIAGGRRSLRHVLFQAALAAACHNPVLKPVAKRLKERGKPHKLVIIAIARRLVTIANAIIKTGTPWQLQPNR

SEQ ID NO: 80155 - protein, 355 aa, unidentified
MNKINSNFEGQTIHVGMDVHKASWNLGLHLNDMFIKNVHQKPNPHIMAGYLKQHYPGAHYRAVYEAGKFGFWIQRQLTALGIECLIVNPADIPKSQKDTLQKTDPRDARNLGMRLQSGVLKSIHIPDEQQEADRVFFRHRKRIWKDLTRCKNRIKGMLAFSGIDIPEQYDNASWSHNFINWLKAVDCKQQSRRRALDYMITQMEFLRKELLSISNAIRKMMREQRYKTNYYLLRTIPGIGPLTAASLLVEIGDVKRFETFYHLNSFVGLLPMEHSSGQSENKLSLTVRKHRQLRSDLVESAWTARRTDPAMALYFQEQIKRKDSKIVIIKIARKLLSRIRFVLINQQPYEYGLVK

SEQ ID NO: 80156 - protein, 370 aa, unidentified
MAKRSMFVGMDVHKESIAISLAEEGRDGEVRHYGGITGDLEALAKVVKALRAPTRRLRFVYEAGPCGFGIHRYLTAQGEECVVVNPSSMPKRSGDRIKTDRRDGDALARLHRAGELTAIDIPTADDEALRDLVRAREDAVGLSTQAKHRVKAFLLRQGRRYPGRAGWTLPYRRWLADLSFPLAPQHVALQEYRDTIDETERRVERLTDQLRTHTPGWRWAPVVDALQALRGVSFVTAVGLVAEVGDIRRFDHPRQLMAFLGLVPSEYSSGPSVRRGGITKAGNPHARRLLAAAAWAYQGIPRIGRQMLYRQQGLPKSICDIAWKAQLRLTSRFRKLVARGKAKPKVATAIARELTGFIWAIAREVPAPLA

SEQ ID NO: 80157 - protein, 293 aa, unidentified
MNTNTLQNINVGVDTGKSQLDIYIRPLDIYFTVPNTDKGISDAIKTIKKHKPQRVVIEATGRLEMPFILSCDKAKLPYVVANPLRIKRFAEAIGQRAKNDRLDAALIAHYAERVQPELTKLKSENIRLMSDLVTRRNQLLTMQTMERNRLQILPKNISSTITPILTALKNQLEKVEAKIEKLIESSHEYQAKSTILQSMPGVGKVLAASLISNVPELGFITNKQASSLIGVAPIARESGRFKGKRMIKGGRPQVRTVMYMAMMSAIQCNPVFKATYKRLLAAGKPKKSQSLPA

SEQ ID NO: 80158 - protein, 419 aa, unidentified
MALEVPAALVGWLSNEVPAGWCPRLWRGSKEARAHRPESGLPAAVTRRERKGNVMSVMIGIDPHKGSHTAVVIDQDEVVIDETRVRATVNQLGELQEWGSGYPDRRWAVESARGMGYLLAQQLVGAGERVIDVPAMMAARVRLLGSGKSQKNDPNDARSVAIAALRHPGLTLVHRDDHTRVLGLLAKRHRDIARLKNKAACRLHALLVELTPGGLATEMTVTKANTLLDTIAVSDEVTRQRVVIATELVDDIGRFETQMRASKRRIRAAVVASGTSLMNIRGVGPIGAAIILGAVGDIARFPSPGHFASYNATAPIDASSGERKRHRLNPRGNRKLNYALHIAAVSQLRYPGAGRDYYDKKVAEGKTSKEAIRALKRRISDVVYRRLVADTRHQAHRKRDGSGRTTRDDSLIQRGRLKP

SEQ ID NO: 80159 - protein, 420 aa, unidentified
MEVLYPDCAGLDVHKDTVVACVRHMANGEVRREVRTFKTTTKELLALSDWLADEGCTHIAMEATGVYWKPVWHVLGDGDFTLLLANAAHVKNVPGRKTDVNDATWLADLLAHGLIRGSFVPDQQTQEMRSLLRTRKQLVRERSSHVQRLQKTLEDANIKLDSVISDILGLSGRRMIEALIAGETDPEALAALAHRRIKATPDELEAALRGRVTRRHRFLLRLHLQQIDAIDAAIEQIDQEVDADVEPFRAAIALLTSIPGVSVLSAEIILAEIGRDMSRFPTAGHLISWAGLCPKNDESPTGQARGLKAHGKRRSTRMRKGAPWLKTTLVQCAWAASRKKASYLQAQFHRLRARRGAKKAIGALAASILTTVYHMLTSGEFYRDLGPDHFDRRANGRQTSRLVARLQNLGYAVQLTPLAA

SEQ ID NO: 80160 - protein, 331 aa, unidentified
MKIKETIGIDVSKLTIDVTVHSNKAYCKFENTVKDFKKMVNWVFKQSPFSPENVLFVFEHTGLYSHRLAVYLTKENISFSMVPGLEIKRSLGIVRGKDDRVDSRSIARYGYRLRDEISPCKLPSKELKSLKTLLALRETKVKQRSGDEALLKEYKLVYIRKDNEIVFKILEKSIKSLSKYISEIEQEMDKVVKSDQGLKNQYELVTSIKGVGPQIALYTIVLTEGFTKFKTHRQFASYCGVAPFPNVSGTSIRGKTKVSNLANKKMKSLLDLGAKGSLQYNLEIKTFYERRLELGKSKMSTINIIRNKLIARMFAVIKRNSPYVDFMKYAA

SEQ ID NO: 80161 - protein, 430 aa, unidentified
MKSNTQNAKIEAITEKTLVLGIDVGSETHYARAFDYRGIEYSKKPFKFSNTEAGFVTFREWILDLKERHGKDKVVPGMEPTGHYWFNLGKFLQDSEMKPVLVNPHHVKKSKELDDNNPTKNDRKDPKVIAGLVREGRYMIPYLPDGVYADLRTASNIRFQLQAELTRIQNRISRWFNIYFPEYKTVYGRPDAKSGMLILKAAPLPEDILTLGIDGVNQIWRDAKLRAVGKARAKTLIEAAEHSVGSKEGAVSARMEIRMLLEDYESRNTRLQEVMVLIEELVKEIPMAEKLLEIKGVGIRTVSGFLAEVGDISRFNNPKELQKLAGLALVENSSGKHKGETTISRRGRKRLRYLLFEVAMSLVAKNPEFRELHNYYTTRRLNPLKKMQSLMAIAAKLIRVFYAMLTKGVDYDPKKMVSDIKRPAVYLQAA

SEQ ID NO: 80162 - protein, 327 aa, unidentified
MHIAVMGIDLGKNSCSVAGLDRSGQIVLRRRLHRDSVAKLASRLPACVIAMEACCGAHHLGRLLQACGHEIRLMSPEYVQPYVKAQKNDERDAEAIAEAATRPTMRFVELKSEQQLDMQSLHRARSRLVGERTALINQLRAVLLERGITVAQGRHRLQRYLVLALEGDDTPPVPLSPRIRLLIDDMRARWCELDRRIAAFDAEFVAEARSDAAARRLATIPGIGVLNATALIAAVGDARSFVRARDLAAWLGLVPRQATTGGRPRLLGITKRGNKYLRTLLIHGARAALPLLARTESPLGTWLRGLSARAHRNTVIVALASKLARIA

SEQ ID NO: 80163 - protein, 357 aa, unidentified
MKKISQLTVINPTAAGIDVSDTEMMVAYPTNSEQLEIRAFGCFTRDLHSIANCLKENGVTTIAMESTGVYWVPLFLLLQEYGFEVYLVNAKHVKNVTGRKDDESDAEWIQKLHSCGLLSASFQPNNMERTLRSMVRHRKNLVQTSSTYLNRIQKALELMNIKLHTIISDIDGKTGLLIIEAILNGERNPEVLADLRDRRIKASREEIIKSLEGHWTTEHLFELRQCYHLYCTHRQMIEECESEIEKQLVEQIASKNEGLIPDLPKVKRKVSGKHKTSFNLTAYLKELLRVDVTEVFGISELSALTILSEVGTDMSKWKTEHHFTSWLGLAPNTKISGGKVISSRIKKRNIMQDRHSG

SEQ ID NO: 80164 - protein, 321 aa, unidentified
MNARYDPEMYVGIDVSKHRLDIAIGQEGDIWEAPNTISGIKKTISRLHSYNPLLVVVVSTGGLEKPLIRALQDTELPVCQVHPGRVRKFASGVGRLAKTDRIDARILAHFGFAAFPKPKPKQKPACEALSALIRRRNQIIEMLTAERNRYFSCPAALRQSIEEHIEWLISKRNELTQQIESMLSSEPDFQEKNAVLRSAKGVGPILSATLQAELPELGQYSHKQISALVGVAPFSKDSGQSSGKQFIQGGRTIVRSTLYLATLSAIRHNPVIHAYYDHLLDRGKLPMVAIVACMHKLIVILNAMVRDMQPWNYPDKFVVAS

SEQ ID NO: 80165 - protein, 347 aa, unidentified
MLIIGCDFHPGFQQIAIFDNLTGELEEKRLQHRAEAEEFYRSLAGQEVLVGMEVCGHYPWFERLLEELGMELWLGDAARVRAAEVRKQKTDRRDAEHLLQLLRENRFPRIWVPSLEVRDVRQLLVHRHKQVQARTRTKNQLQAMALSCGIQKKRKLWTKAGREELEQLPLLPYAAQRRKRLLEALDSLEVEISELDRRVAEEARQRPEAVRLMTHPGVGPVTALAMVLTLGPAERFGSGRQVGSYFGLIPSEESSGGKQRLGKISKQGSSFLRFLLVEAGQTAARLDPQLKRFYRRLAARKNRSVAKVAVARKLATRLYLMLREDWTYAQLCQSVMQVSPSHSVAGE

SEQ ID NO: 80166 - protein, 413 aa, unidentified
MLFVGDDWAEDHHDVEIVRDDGRRLVTKRLPEGLDGITRLHGLIAGCMPPEEWAELEPGEAAALVKVGIETDRGPWVASLVAAGYEVFAINPKSSAHYRELHTTSGAKSDRGDAHVLAEIVRLDRAHHRPVAADSAHGESLKLVARAHQSMVWERTRHVLRLRSALREFFPAALAAYGDLDEPDTLQLLTIAPDPDSAARLSTAKISAVLTQARRRNVAARAQRMQDVLRAPALRQPGPVQAAFAAIATSEVRMITAINTEIAALGQVVAEHFGRHRDAEVYLSQPGLGVILASRVLGEFGDDPDRYADAKARRNYAGTSPITKASGTKKVVLARYARNTRIADATQQWAFGSLRGSPGARAYYDELKARKIGHRAALRQLANRWVGILHGCLKTQTLYDEKTAWGHRNATAA

SEQ ID NO: 80167 - protein, 342 aa, unidentified
MYYIGLDVHKKTISYCVKDASGQVHQEGKVGATRWELDDWMNRLPQPWTVAMEATIFTGWIYDHLLPHAQQVKVAHPLMLRAIAAAKKKNDRIDAGKIADCLRCDFLPECHMASTAIRDRRRTLRYRHLLVRQMVQMKNRISGLLMETGVSHNKKRLHKVGYFRELLSTNEEVQESIRPLLRVSRDSIVRLQKTEYALVSSLQRDPLLAERIRRLRTVPGVGPITALTWALEMGEVSRFSSIRQAISYCGLCGDEKSSADKVTRTPLSKQRNKHIQRVLVEAAKLAPRQDHNLALVYEREKQKGNANRATLAVARKMVAYLLAVDRGQRDFVPFADSQSAAA

SEQ ID NO: 80168 - protein, 349 aa, unidentified
MTQFSRIGLDTSKAVFTLHCVDAADQPVLRVSLRRAQLLPFFKRHASTVVAMEACGSSHHWARKLTALGHEVRLIPPQYVKPFVKRGKNDRHDAAAICEAAGRPGMRFVLAKTEPQQAQAMVLKVRDTLLGQRTRLINTLRGHAAEFGLVAGKGTGKVAALLAAVAAETAIPAVAREMMALLGEEIEHLATRLATLEAKLMAMHKDNAISQLLATAPGIGPVIALTFAIEVDPAGFESGRHLAAWLGLTPREHSTGGKQRLGGISRAGNERLRALLVSGATSVINAVQRHGSKLATPWLLGLLARKPKKVAAVALANKMARMIWAMMTTGEVYRRPLAAGAVRRPAVIS

SEQ ID NO: 80169 - protein, 413 aa, unidentified
MSYKIAGIDVHKKVLMVVVMDASTPESKPERRRFTTMPSDLRRLLLWLREQGVEEAVMESTAQYWRSVWLELEPYMRLQLAQAFSNRAPRGRKHDFKDAERLVRRLIADELILSFVPHGEQRTWRNLTRMKLQLTRDQVRLQSQMECLLEEMRIKLSVVVSDLLGASGLRILRALAQGESDPKKLALLGDDRLKCTEEQLIDALTGRPQPMHREMLALQLERLQLMDGQIAKLNGLIAQAMKPHQDAVIRLAEVPGLGVDSAQQVIAEVGVKASTFPSAAEFTSWVGTCPGKDESAEENHSSRSAKGNKYLRRVLNQAAHAAVKKNGSHFQTVFRRLLPRLGYQSAIWAIAHRLCRVVWKILHEGVRFIEQGTEPDPKAKKQRARMLARALRKLGYDVAITPNPATAENGMQI

SEQ ID NO: 80170 - protein, 348 aa, unidentified
MLADQLDYIVGVDPHRDSHALAVVHVVSGAVVFEANIAACSEGYADALRLVEEHGAGRRAFAIEGTGSYGAGLTRFLAGRGERVLEVGRLRRERRSGGKTDALDAVRAARSVLAQERPATPRAGGERQALQALVAAREGAVNAKRAGLCQLRDLLITTPEPLRSELRPLTRARLLQRLAATRPDGRRDPELRGSMLALRSIARRILQLTAEERELAREIETITRKLAPQLLDQPGVGPHAAAQLILSWSHRGRIGSEAAFARLAGAAPIPASSGQTIRYRLDRSGDRKLNRALHMILVTRKRSHPATIAYIERRLQEGKTRREANRCLKRYLARNLYRLLEHGPPTAT
